United States Patent Application Publication US 2011/0214205 A1 - sequence listing, part 3

SEQ ID NO: 6959 - DNA, 461 bp, Setaria italica
  Peptide Sequence Number=SeqID_72933
ctctgtaggtatgcttgagttctgaaagctttgtaagctcctctatgacaagcttatcagcttcctggatcttgtccgggtcatatggggtgtgggcttcttgcagttgaatgtacgcagatttcaaagaggatatgttgttgaatatcctcccgatcatagtgtccatcgagtccccgttccgattcatattctcatcaattggttgaggatgaactttttggttattgttatcataattttgtgactccttagagcctgggcggatcattacttcttcccctcaggatcaaagaagttattagtcttcaactacgcagccaatcgacatcaacctggtggattctcgtcgccggcgaagggcccgacgaagacccggggaagggtgccgccctcgtccagccgtcgccgccacccgccaggagagaagggcgacgagagaggggggcgacgagagaggg

SEQ ID NO: 6960 - DNA, 2741 bp, Setaria italica
  misc_feature (1)..(37): n is a, c, g, or t
  Peptide Sequence Number=SeqID_72934
nnnnnnnnnnnnnnnnnnnnnnnnnnnnnnnnnnnnnaagcatacgatacaataaatacacctgactgggtaataacgtgggagatgaaagtggctgcctgtacaatcatcaatcacaccgacatgtttacaacattgggcagaattacggatggagcacatgaaaatctaacatcgagaaaccggaatatattatagtcctgataacgacaaaagccaattgcacagaattacatagcacatggatatcttcacaaaggcattggtgcccacatttcaaaaggaacagcatcacatacaaaacaacaggaagcatcacatacaagacggacagagtcctccaccttttctgatgcgattggtcgatctcccaaagatgcaaggaccctcaaacctcctggtgtaggcgcagggcatcttcagtcagtcagcacacttgacacctgaaaggtacacccgggcctgtatgatgctggtcccaatcaagaaaccaggcatcaccataaggccaactttcggcctctctgcaccttcgtctaggatgatgttcttcacaacgctttccatgtggatatccgcaaattcacttccccttttcacttgaaagaccttgaccttcggatcgaaggagtatgccagcctgtgcaacaaccatattgacttcgccagctttagaaaagcctgatagaaaggtgtccttggatggccaccgctcatgacatagttcctctgatccatgttgccgaagaaagaaccttccattttggggtgcacaagtagtaggtatttgcttctgcagaacttgccaaaaattgaatcaggattttggctcagaacatccaaaggatccatggctcgtactgcgaggaactgatggaagaaagcctcattggaaacactgatgttggagtccttgatagaaaagctctcttcttggaacccgctgaacattctttggcaaatataggattcaaaagcatacttcttgtgagccctccttgtgtaaactacaccaggttcgattgcattagcagccgcatcaagatcccaacctgcagccttcatcatgttgatcaaaggctttgaaaagtcatgcattgactggtatgcattatcaacagcagatgtaaacaaacttggtgtcaattcaatggaaaagtagttctcctcttcgtcagattcctctgattccttgttaagcaggcccctttgtttcagtttcttctctagctttgattttcgaagtttagcttcatcgatttgctgctgcaaatgggtaatctcggtatctctagtctggatctgggactggaacttctttaccatgacctcataggtcttcaacaaattctgctgctcttgtatttcagaaagtaagcgtgaatcttgaggggatgctgctactggcttaggatttttttctctgtaggtatgcttgagttctgaaagctttgtaagctcctctatgacaagcttatcagcttcctggatcttgtcagggtcatatggggtgtgggcttcttgcagttgaatgtacgcagatttcaaagaggatatgttgttgaatatcctcccgatcatagtgtccatcgagtccccgttccgattcatattctcatcaattggttgaggatgaactttttggttattgttatcataattttgtgactccttagagcctgggcggatcattacttcttcccctcaggatcaaagaagttattagtcttcaactacgcagccaatcgacatcaacctggtggattcaaagaaatcttggttcaggtaaaaaattatgagttatacaaatttcatagtaagcagctacagccagtgttcccttgccaacatatcaatggtctaaatcttcactggaatataatttcaacaacaaatctccacaatacgacctcaacttaggccaaacagaataggaaagtaaaaacatatgttggactctgggaaactatacattggttggcttgagctcattcaacgagttaaatccttctctctattttcaacactaggatctgttttagagccagttggtcaattgaattgctaaagaccaggcaacacgggaaagacccagcaaacatgatacatttggtctacacttcacatttcacaaggaaagaagggttccaaacaactacatcatggttttgattgctccagatcataagtcgcaatctcaacagtagtgtcaaaattataagtggggtggctaagaataacacaaatgttggtcagactgctcaagatgtataaactacattttactcattcagatcttattcgcataagatactcatgctatctgatttcaacacgggtatccatactgagcaatttagtcgtcgacactatgacaagcctatgcgtagagcaccaaatgcaataaacaaaaacagcacgctaatcataacctcaagcaacatatatcatcatgttccctctagcagagccagactaacaaggtttccgttggcagtccagattaacccacactgaagcttcaccgacacatatcagagacacatcggtactgatttctcccaaagcaagaaccacgtgaagcataatcataccttggcttccatccaaagtctagtctagtctacagcagtctcacttttagggctaaccttaacaaaccgcagcatggattcttagtatagcaaaacaaagaaacacctacatcgagagggaattcctaacataacgtagttacctac

SEQ ID NO: 6961 - DNA, 370 bp, Setaria italica
  Peptide Sequence Number=SeqID_72935
cgcggacgtggcgcgcctggcggccgcggttatcgccagcggggagaaggcgcgggcggcgaggaggaggatgaggccggcgtcgtcgccagccgctacggccaaggtggcagccgtcgtcgcgccgcctgaggttgtggaagcagccgccgccgcagcgccgcttctcgagacggacgcgagcaagccgagggccccgaggctggaggagatggccgtggacgacgaggccgccgcggcggagatcgaggagctcaagcagcggctcagcggcggcgggcgccggtcgaggcggccgacgctggagacgattcaggaggagagctacgcggcagcgagatgctgatgcaggtcaataatggtcaaggcc

SEQ ID NO: 6962 - DNA, 380 bp, Setaria italica
  Peptide Sequence Number=SeqID_72936
acagagaataattgatgatacaattctagaaagatggagctaaagatagcttagacttttgtgatatgcagttaggcgctatgctaaatcaaagaaatgcaatctccctccctcacacacacacaaaaacatccatagttgttaagaccattggactcttatagaaataagaaaatgccaacatggtgtgccacagaaagtaactatgatgctgcaaagctgtccagatccgagtatatatacaaccaaaggccataggctaattcaaacaagctgctgtaacaactaagtttgaatgtgcgtaagcaaatatagaacattcagtctgtttgatggattagctctgctggataagtcttggctttcttgtggggttgctg

SEQ ID NO: 6963 - DNA, 542 bp, Setaria italica
  Peptide Sequence Number=SeqID_72937
aaaacaagaaaggaacagaggcactctacatttcttgggacacttacactgcacccaaaaaaaggagtgtcacatgcagccgagctgcaacagaacgacaaggacgtatcatctgacgtgcgtagctcgatctgacgtattacagcgcaatgaccggttaagcacagaaaattgacattggagatggctgacatgaactagtagtatagaaacctctgctgctctgcattctatagcccctgataaagcgtactaattgatggcccagtaccaaaagcagcgtgtcggatgtatacctccggctaatccgcagcaatatttactccaaaattgtacaaccggtactggattccaacaaatcaacaatggcatggcgcgatcaccctaccctgtcaggctcagaccatgctgaagagattggccgtggagatgagcgcgttgagagcgagcatgaggaacccgatgaacgacagccacagggcgctgctgatcttcctgttgaaggcgtccgtgccgaacctcgacacccacaggtcgttgcg

SEQ ID NO: 6964 - DNA, 1340 bp, Setaria italica
  misc_feature (1297)..(1297): n is a, c, g, or t
  Peptide Sequence Number=SeqID_72938
accaaactttaacccccaaattactaactttgatactagtggctatgcttttacatacccattggctctactatttggctgcaaagtcatctcctacactcattaccctacaatcagttgtgatatgattgggcgtgttaagcagcgcagttctatgtacaataacaattctcgtatagctggaagcatttggctgtcacgatgcaaaatcctctactataccatattcagttggttatatgagctagtgggttcatgtgcacatcttgtgatggttaattcctcgtggacgaaatcccatattattaatatctggaagatcccagagcgtactaagagggtgtaccctccatgcgacacttctgctctgcagatgcttcccctggaaagatcaacaacaccacctgtttttatatcagttgcacagttccgaccagaaaaggcccacggttttcagctggaggcatttgcacttgctcttacaaggctagatcctgaatttcctaagccaaagcttcaatttgttggtagttgccgaaataaagaggatctggaaagattacaaaagcttaaggacagagccattgagctacacataaatgagctagtggagttccacaaggatatctcttacatggacttggtacagcttcttggaggtgccattgctgggctacattcaatgacagatgagcattttggaatagtggttgttgagtatatggcagctggagctattccaattgctcataaatctgcaggaccaatgatggacattgtgcttgatgaggacggccatcgaacaggatttctagcctcggagaaagaagaatttgctgatgcaattatcaaggtcttgaggatgtcagagcaagaaaggcaagaaatggcagctgcatcgcggaagcgtgcccaaagattttcaggacagaggttccatgaagatttcactgaggccgtccgcccaattttgttactgagggaatcttgacgagctgctgtttcctctgacaatctgaaagcgctaacaagttttacacgatagagtgaggaaagctggatttgctttgcatatagcaccggcagaattttgttgagcttttttccagattgctgatgtatgtgcttcgttaactttgtttagtgctatgcttctactgtacattgcttcgtgtaccactactgtacaggacatcgacacagaaatgacatgttaactttgtgtggtgataatagcaacatagcagttgccaagtggcgatcatggccactcttactaaagaaaaaaaaaaaaaanaaaaaaaaactaaaaaagagaactgaccaaggacacacaggga

SEQ ID NO: 6965 - DNA, 1161 bp, Setaria italica
  Peptide Sequence Number=SeqID_72939
gcagaagaaacgaacggaggcccagcccaactagaagagtagggaactgggagccgcgaccacaacggttatctcctcctctgcctgccccccaaccccacccatcatctcgattcgattcgattcgtttccattcaattcaaaaatccccatccttcctcctcctcctcctcctcctcctctagggcagaggcggatcaatcgcatcgcgagcgatggtgggatccactgctccgccgccgcagatggaggatgctagtagggttccgcctctccccggcggtgcggaggagtacgtgcgcgactccatccacagctccctgggcctccccgtctccgaccgctccctccgcctcaagctcctcgcctccgaggaccagcgccaccgcctccaggaccacgtcttctcgctcgaggaggacctccgcgcagcccaccgccgcatcgacctcctcaaggctgaggccgccatgaacgccgccggcctccgccgctgcgtcgaggacaaggaggctatggccgccgcatacgccgaactcaacgccaagtgcgccaaggagtgcgatctctacgagcgagacctcgagcgtgctatggagtcctgcgacgacctcgccagggagaacaacgacctgcgcgcacgcctcaaccaaaacgcagatttggcagcattgacggctcgagtgcaagaactagagagggataaggaggctctgaaaatgaatcttgatacagcagaggcggaggtcatcacgctgagtgaggacaacagggttctcgacgaagagaacaaaaggctgctgggtttgttggagaaagagcgacaacgccggtccgagagaaagaaatctgccagcacatccaccaagaataagcgcaagtcgtctagcttgagggatggcagcccagctggtcgggcacttgatttcggtggtgcagattcatcaaggcatcctctgtcgccgctgccgcacaactccccggactacagggcgcacaagaaatgaatgcgagaaacggagcgaccattctgagcatttccgaattaacccgcgcaacgcgagtgttttagtgtgctgcttgctgatgatctgattctgatctggtcccactaacttgtgctcgttgtgggtagaactagaacctaaggcacgcagcctg

SEQ ID NO: 6966 - DNA, 645 bp, Setaria italica
  Peptide Sequence Number=SeqID_72940
tgccaaccagaagagcgcgacggcgctgctgcgcatgctctcgggcgcctggtcgtacaggaactccatgagcgccaccgacgagaaggcgtcgccgatgccgtggacggcgaactgcggcaccagccagaacacgctgaggggcacgacggtggccgggttgtcgaggagcccgtgccgggccgcggcgtcgcggcgcttggtctccacgagcgcggccgaggcgacgctgaggatggagatggccaacccgatgcccatgcgctggaagtaggtgatcccggacggcaggcccgtgacgcggcgcgccaggggcacgaacgcgcggtcgtagaacgccagggtcacgagcatggcggcggtcgagaagatggacagggtcgccggcgggaactggaagtacggcctcatgtggcggtccatggtgcgcgcctgcatgatggtgaaggtgtagttgtgcgagccggcggtggcgagcatgatgccggcggaccagatgggcagcaagcggatgatggacttgagctcctccacgcggtgcaccgtcgacagacgccataggttcggctgcccggagtcggagatgtcgcccggcgtcactattgctgcccggtccaagaacgtgagctggttggtatgcagtta

SEQ ID NO: 6967 - DNA, 425 bp, Setaria italica
  Peptide Sequence Number=SeqID_72941
cacttttgtcagctgtaaaagctggcatatttgtggtgcaagctgcaggaaatactggcccttcccctaagagcatgtcttcctacagtccttggatatttactgtaggagcttctgcccatgacagggtatataacaactatgttgtacttggcaacaatttgaccattcaaggagtcgggcttgctcctggaacggatggtgattgcatgtacactctaattgctgcacctcatgcgctgaaaaacaatacagccagtcctactgaattgtccctgggggatgccaagattcaagtcggttagatgcagatttgataaaaggaaagatactagtgtgcagctattctataagatttgttactttggttcttttctttctagttgtaaactaagttctttttagttatttacttagttccttaa

SEQ ID NO: 6968 - DNA, 280 bp, Setaria italica
  misc_feature (273)..(273): n is a, c, g, or t
  Peptide Sequence Number=SeqID_72942
cgaaccttgtgtgatccatccaccatcatctgaagctatacagcctcaaacttcagctcctgatccatccacccgaccgcttgtgcaaatctaaggtagaataatggacgatcagaaaacatgtctgggcgaggcgccgctgccggtgagcacgctcagcgagcctctcctttccgggaacggcgccgacctcctcacctcagacgacctcgaggcgcagctgccgtcctaccgccccaccggcgcgtcctctccaggacgtgcctgaacctnaccaacg

SEQ ID NO: 6969 - DNA, 442 bp, Setaria italica
  Peptide Sequence Number=SeqID_72943
caaatctctcctcccctctcgccctcgccgcattgcccgccgacgacccccgccggagagagaggaggagcggcgcggcgcggctgcgggagaagcgggcgtcggcggagcgggcagcatgtgcgacctggtggcccgcacgggccggcatcagcagcggtacgaggatggccgtcggctagtggccgggtgcataccatttaggtatagagctaataatgatgaaacctctgatgacaaacataagaaacttgtggaagttctcatgataaattcccaaagtggacctggtcttttgttccaaagggaggatgggagaatgatgaaactgttgaagaggcagcagctcgagaagctatagaagaggctggagttcgaggtgatatagtgcatcttctgggtttttatgacttcaaaagcaaagacacatcaagatgcgtgc

SEQ ID NO: 6970 - DNA, 1072 bp, Setaria italica
  misc_feature (1039)..(1072): n is a, c, g, or t
  Peptide Sequence Number=SeqID_72944
cgccgcattgcccgccgacgacccccgccggagagagaggaggagcggcgcggcgcggctgcgggagaagcgggcgtcggcggagcgggcagcatgtgcgacctggtggcccgcacgggccggcatcagcagcggtacgaggatggccgtcggctagtggccggtagcggaatatgttcattattctgcaggtgcataccatttaggtatagagctaataatgatgaaacctctgatgacaaacataagaaacttgtggaagttctcatgataaattcccaaagtggacctggtcttttgtttccaaagggaggatgggagaatgatgaaactgttgaagaggcagcagctcgagaagctatagaagaggctggagttcgaggtgatatagtgcatcttctgggtttttatgacttcaaaagcaagacacatcaagatgcgtgctgtcctgagggtatgtgcagagctgcagtgtttgcactgcatgtaaaggaagagctaacctcatggcctgaacagagcacccggcagagaacctggctcacggttcctgaagctgcatcacagtgccggtaccagtggatgcaagaggccttgctcacaggcttctctgagtggcatgacaagtggagcagaagtggcggtggtaccgactgcgaccctgcctaaccgctgaacctatcagcggtcctccaatttgttcatcttctctctttccctaggcgccaaccttgcagaatacaataatacagtgtaattctcttgatgctgggtggtcattgacccttgatgtcacatgtcaggatggttatctagtttagcagaacggggtatatctcatcaagacgagaattatcacaacttttaagtgtcgattctcgcacatatttatttctcggtttcagctgctgtcgtctcggtgctgcaagcacgcaccgtgcgcattttgtaactcgctcctgattctggagatgcatatgctatgtattcctgactgctataactgaaatcaaaaggtcaccattgactgggagtcacnnnnnnnnnnnnnnnnnnnnnnnnnnnnnnnnnn

SEQ ID NO: 6971 - DNA, 266 bp, Setaria italica
  Peptide Sequence Number=SeqID_72945
gcatggcgtcgtcggcgacgacgtcgcagccgccgcgcgtgtgcgtgaccggaggtggcggctacgtcgcctcgtggctcgtgaagctcctcctctcccacggctacgccgtgcacgccaccgtccgcgacccaagtggtcccaagaacgcccacctgcggcggctgagggggccccggagagactgctcctgttcaaggccgacgtgctcgaccgcgccgcgctggcggccgcggtcgccgggtgccagggggtcttccacgtcg

SEQ ID NO: 6972 - DNA, 806 bp, Setaria italica
  misc_feature (787)..(806): n is a, c, g, or t
  Peptide Sequence Number=SeqID_72946
atgatgttggcatcggtggctcctgctccgacttgctcgactacctctattcttccttgtcttccggccaagtcaggatccgcttccctgtcgaccaaggccctggcactgctactgctaagcttgtggctaccaaggcaaaggggctacctctcataactctctctctccatcctgttgctgcctctgagctcgaagatgccattgccgatttctccattgcgctctatgcatcttacaagaccacgcaggaacatgcatccagagaacaagagcgattgtcacaactcatggacagtttagcatctgaaagagaaaaaaatgaagtaatgcaaaaacaacttgaagccctttcattccttgacaaaagaaaggcaacaaagcaaaagctggtgactgatcaggttccaagtgtatctggtgcgcctccagtctctgatcaagttattgttcctgtgcagcagcaaacatcagtggcttcacctagcaaagttcctcctgctaaagctgtgaagcgggtggcccctgtgcctcggagggcaagagtacgaggagctttgttgcaagatactgaagaaaatgatgattgtgatagttagatgttgctgatttactggcgttggttaacgctgtggcatgtaaacctactacatttgggtgacagttacaactgtcaggttttttttggctgcttgacttatgtcaaacttgtggaaccgtatatgcagctcatggtttagaaaagggtatagtgctaacaagagggaattgttttccccagcaaatnnnnnnnnnnnnnnnnnnnn

SEQ ID NO: 6973 - DNA, 334 bp, Setaria italica
  Peptide Sequence Number=SeqID_72947
attacgggcgtccctccactttcccttcgccgacctcctcctcctcacaattccccaattcacaaccccctccccgttcgggaacacgcgctaatcggagcaccacaagcaacagaaatggcggccaagtgcgctgccgccgcggccgatctggccaccggccgcccccgcaagcgcccgaggcttggctgggacgtggcgccggctgccgagacaagatatacagaaaaatgggtgaaggtacatttggtcaggtactggaatgttgggaccgagaaagcaaagagatggtggctattaaagttattcgttctgtacagaagtacagtgatgc

SEQ ID NO: 6974 - DNA, 298 bp, Setaria italica
  Peptide Sequence Number=SeqID_72948
aaagaaaccatgactcaatgcttcttcagcatcggagatgtcatagagtcatggtttcttcacaagatatggtgaaaggaggtctctatgacatctccgattctgaagaagcgttcagtcatggcttcttcacaaaatcacgagatatggcaataggcagtcgctatgacatctcagatgaatgtagcgtagcatcatcagagatgtcatagcgactgcctattgccatatctcgtgatgctacgctacattcatctgactaaaaactgatgaaagaactagctaatttttcaccagc

SEQ ID NO: 6975 - DNA, 541 bp, Setaria italica
  Peptide Sequence Number=SeqID_72949
ttttggaatctgttgcatgtgtgtagatacagtaccctgcaaacttcaaatatgtcaatttttctatcaagattcttcctcacttttttgttttctgtgtctgatgtcctaatcgtctttagcttcaactcaatatttcgagtccaaaatttttcacatttgaaagacagtggatagtgcttgtcatgttttttccctttctttagtcaaactttttcttatttttcaaatacttttgtgctattttggtgctgttttctttgccttttgggattgtctattttttatatcagcactcttaacatgggttggcatgatttatttctcttgtatcctgatgtttgcctttccttccttgcagttatgcatcgtctgcagctaattcatactgatctgaaaccagagaacatccttcttgtttcttcggattatgtcaagttacctgattctaaggatggatcattctcaaggaaactgccaaaatcaagtgccatcaagttgattgactttggaagtgcagcataccatcaccaggaccgca

SEQ ID NO: 6976 - DNA, 1161 bp, Setaria italica
  Peptide Sequence Number=SeqID_72950
taggaacattttgtgggcaagaagttggtggtgtggccagcctgctattatcagcaaatcattccgaccatacttgttcgtctctgctcccgaagggtgtggctcgaaatgcttcccctccttggagagaagacgataaagatggccattacgtatttgctgtcggagagaatttgacctctcgctgtaattacacttgactatcattattggattaatatctctgtgatatgtgatgtttatccttcttggatttcctttttttgactcttctaaaaaattttgcggataccttgtgttagcatattcttttcttttaaatgtgcatcaccatttaaacctttcgtttgtttttcaaacatacctcaatgctaaaggttgatctatttgctgtgatacccttttgggaccatttttaaacaactaattcattcagaaaaatatttcttacttggatgttcctatctcagttttcctttctaatctatggtggttcaaggttttcaaggtcgtctgtgttgacttattttatagctaaagccagtgatgttaccattatgtttcatcttgacataagctccttttttcttagtgcatgtcggctgtctgttttcttattgataaatgctcctgaacttgttgcagtcacagaaatggcactgttctaatatatttttttttttcagacaagatatacagaaaaatgggtgaaggtacatttggtcaggtactggaatgttgggaccgagaaagcaaagagatggtggctattaaagttattcgttctgtacagaagtacagtgatgcagcaatgatagagattgatgtcctacagaagcttgcaagaaacgatgcatcaggcaaacattgtgttcaaatacggaactggtttgactatcgtagccatatttgtattgtctgcgagaagcttggcccaagcttatatgattttctgcggaaaactggctaccgcccattcccaattgatctagttcgccagattggagagcaacttttggaatctgttgcatttatgcatcgtctgcagctaattcatactgatctgaaaccagagaacatccttcttgtttcggttcggtattattgttactaagtttaaccttagttaatttaactttaaaaggttaaatttaaagttaa

SEQ ID NO: 6977 - DNA, 1468 bp, Setaria italica
  Peptide Sequence Number=SeqID_72951
ccaattcacaacccccctccccgttcgggaacacgcgctaatcggagcaccacaagcaacagaaatggcggccaagtgcgctgccgccgcggccgatctggccaccggccgcccccgcaagcgcccgaggcttggctgggacgtggcgccggctgccgaggctcagataggaacattttgtgggcaagaagttggtggtgtggccagcctgctattatcagcaaatcattccgaccatacttgttcgtctctgctcccgaagggtgtggctcgaaatgcttcccctccttggagagaagacgataaagatggccattacgtatttgctgtcggagagaatttgacctctcgctacaagatatacagaaaaatgggtgaaggtacatttggtcaggtactggaatgttgggaccgagaaagcaaagagatggtggctattaaagttattcgttctgtacagaagtacagtgatgcagcaatgatagagattgatgtcctacagaagcttgcaagaaacgatgcatcaggcaaacagtaagtcatatgtttacttgtccacaatatgaaaccaaacaaataacttccgtgatgtaaattattttctttcttaaaaactactatgttgctactgtgatggaggcaggctacatgcttacaagtgttttgcagttgtgttcaaatacggaactggtttgactatcgtagccatatttgtattgtaagtatatggttgatttatagaatttcccccaacctgtcaagtagacattggggtcaaatcaatcaataaatttcggtgaatgaacaggtctgcgagaagcttggcccaagcttatatgattttctgcggaaaactggctaccgcccattcccaattgatctagttcgccagattggagagcaacttttggaatctgttgcatgttcatttttattatcagcactcatgggttggcatactcttgtatcctgatggcctttccttccttgcagttatgcatcgtctgcagctaattcatactgatctgaaaccagagaacatccttcttgtttcttcggattatgtcaagttacctgattctaaggtacttttaccatttacatgattaagattaactataggaaagattttagacaaattttgaccgtgctcattgctatgaattggcatttgcgtggtggaagggaaggagagatggctagccgggggcctaagctcttggcacagcaataaggaccttttcttcttaattcttgcttgattcaatgggatacaccagctcatatttttatagagccagcccttacaaatggtgctaacaaacttgatctcatctaatcataaccatccaaagttggtactacttaatttagctaacaagcaaactagttaatctaattgcatatggttgctgcttgtgtgcttggacctacatggtgctgtcgctgctaaggcgcataagagata

SEQ ID NO: 6978 - DNA, 430 bp, Setaria italica
  Peptide Sequence Number=SeqID_72952
tttactaattggttgtcttgtctgtcgctgctaaggcgcataagagatatcagtttaatctcgagttcattcttatttctcttgaactatactttctgcttcattagttatcttcactaaaatttttcaatctaggatggatcattctcaaggaaactgccaaaatcaagtgccatcaagttgattgactttggaagtgcagcataccatcaccaggaccgcagctacattgtatctactaggcactatcgagcccctgaagttattttgggtatgaacttgactgtagttgctacccaattgcatacaccattttcattgcttgtggaacgggagcttaatatttatgtcaccgttgcaacttgtaagggcatggatggagctacccatgtgatatttgggatgttggttgtatacttgttgagtcttt

SEQ ID NO: 6979 - DNA, 1195 bp, Setaria italica
  misc_feature (1109)..(1195): n is a, c, g, or t
  Peptide Sequence Number=SeqID_72953
aagaaaacctaaggtaagaaataagaacaagaacaacgtaggaatacaactactagactagggggaatcttttggaatctgttgcatttatgcatcgtctgcagctaattcatactgatctgaaaccagagaacatccttcttgtttcttcggattatgtcaagttacctgattctaaggatggatcattctcaaggaaactgccaaaatcaagtgccatcaagttgattgactttggaagtgcagcataccatcaccaggaccgcagctacattgtatctactaggcactatcgagcccctgaagttattttggggcatggatggagctacccatgtgatatttggagtgttggttgtatacttgttgagctttgctcgggtgagacgctgttccaaacccacgagaacttggaacacctggcaatgatggagagagttttagggtctcttccacggcacatgctggaaaaagcagaccaacatgcagagaagtacgtcagaagaggaaaattgaactggccagaaggggcaacaacaagggagagcattagagctgttctcaaattgcctcgcctccagaacctggtgatgcagcacgtggatcactctgctggggatttcattgacctgctgaagcgccttctcgcttatgagccctcagctaggttgactgctgaagaagcattgagtcatggtttcttcacaagatatggtgaaaggaggtctctatgacatctccgattctgaagaagcgttcagtcatggcttcttcacaaaatcacgagatatggcaataggcagtcgctatgacatctctgatgatgctacgctacattcatctgactaaaaactgatgaaagaactagctatgagggttcaaaggctagtgacgccgccaagaattcagatggtatctaaacaagtgctggtagaaaaattagcttgtatgttgtgaattgtgattgcatggaaagaaactgtaaagctcatttgctctttcgccgttgtaagtgtgtatgaagagtgcggttaagtttctcaatcagcttacaaattgttccgcataatgcagctgcaagttttaaataaaaaaaaaaaaaaaaaaannnnnnnnnnnnnnnnnnnnnnnnnnnnnnnnnnnnnnnnnnnnnnnnnnnnnnnnnnnnnnnnnnnnnnnnnnnnnnnnnnnnnnn

SEQ ID NO: 6980 - DNA, 685 bp, Setaria italica
  Peptide Sequence Number=SeqID_72954
ttagctggggtaagagttggcctgattaacggccagtttgttattaacccaactactgaacaaatggagaattcagagttggatttgatgatggctgggactgatagtgccatattgatgattgagggctactgtgatttcctgactgaggagaagctgctagaagctgtggaagctgggcaggtggcaattcgagagatctgcaaagcaattgatgttcttgtccagaactgtggaaagaagaagatggtcgatgctattgccttaccacctcctgaactctacaggcatgttgaagatatttctggtgatgagttggtgaaggcattgcaaataaaagaaaagattcccagaaggaaagctctttcagcagtggaggagaaagttataactatactttctgaacagggttatgtttgcaaagatatctcatcaggagttgctgaaagtttggatgatattgtagaggacgaagatgaggatgaagttatagtggatggagaagtagatgaaggtgatgttcacatcaagccggtttcaaggaagccccctcgtcagctatttgcagaagttgatgtcaagctagtcttcaaggaggtttcatctaaatatttacgacgacgcattgtagagggcggaaagcgaagcgatggacggagtccttgggaacttcgacccattaatt

SEQ ID NO: 6981 - DNA, 752 bp, Setaria italica
  Peptide Sequence Number=SeqID_72955
ataaaagaagagaatacaacacgagtactatgaatgattaataaaaaactaaagggcacagtgccgaataattaaatttatggaggacaaggtataaagttgcgaacagggaagagacacataacttccccttttggatggtagttattcaatatgttgattgcacaacttaaagagagtggtcgattcaattgcattgtctgacaaacatgaactttagaactgtcgtggagatggtaacgagggttggtttaattttcttccaaaaaatcaaattaaagagacagttttatttacccaaagttaccaaagcaaattggttctgcaaatataaaaggattggttttgataaacattggaaccacaaaaacttaccagcagtaacataatatttaccgtggtgatttctgaaaacaagttaacttagttgaattattcattccgagcatgcatgtaataattgaattattcatcagtgatttctgaaaaaaaagttcattaacttagttgaattaattcccattgataatgtaataattgaattcctgtaacgacgtacacatgcaggtctaggaggcccctgaccgtcccaaaggagccgagcttcctaaagctgaaatgctgcatcggcggagagttccatcgccacttttgctacaacggagcagcagccaaggccatcaagtcgtagtagtccatctgcatacacacctgcaatcacttagggcctacaaccacgagatgacgtaatt

SEQ ID NO: 6982 - DNA, 1056 bp, Setaria italica
  Peptide Sequence Number=SeqID_72956
ttcgttcttagttttcgcagttgcaaccttgcattgcgcattgacagagagagatggccagagaaatggagaaggcaaggaaggccacttcttcccctaagagctcaacgattaatactggtcccaagagcccagttaggaacggtggaggatctccaccccataagaagaatgttactgagccacgaggacggaaaaatgaacagcaaaacattcggaaagtaggtcaagacctggtgtcccatgatgagggaaagcgccgatctccaacttcacaaacctcacccaagagatcaccaagacacgaacagccccttagctactgtaggcttcacactgaggagagagcaataaggcgagccggttacaattatcaggttgcaagcaagataaacacacaggaaatcattcggagatttgaagagaagttagaacagttgatggaggaacgcgagataaagctgatgaggaaggagatggttccaaaggcccagctcatgccagcgttcgacaagccattccacccacaaaggtctaggaggcccctgaccgtcccaaaggagccgagcttcctaaagctgaaatgctgcatcggcggagagttccatcgccacttttgctacaacggagcagcagccaaggccatcaagtcgtagtagtccatctgcatacacacctgcatctgcatgggcctacaaccacgagatgacgtaattttttgccgctgcataatgaacctgctacaatacgttccaaccgacacatgcatatacatagaagaagtggttgctgatagatcgatgtaaatttccccggccagaccctttaactttttctcctctttatcttttgttttccttcctctttttttttcttttgcattcacggatccattgaaaggtaggtaggaaaccatgcaaaaggggtcatccggacacgatgcatgcgccatgtatgtctgtctgtctgatggcagtaataaaaggttgcatatagactatatagagagagtgccatgatatagatgagccttgttaactaaaaaaaaaaaaaaaa

SEQ ID NO: 6983 - DNA, 257 bp, Setaria italica
  Peptide Sequence Number=SeqID_72957
gtggggatgggggagcagagggcggcggcgatcgtggtagcggacgcggcggaggccgacttccccgtcatctacgtcaacgccgccttcgaggccgccactgggtaccgcgcccacgaggtgctcggacgcaactgagggcctattgaagcatctcacgaactgtgttcactcaaacttgtctttcagccgattcctgcaatttcgggatccacgtgcacaaaggcgacatccccttgttgatcccatggttgttt

SEQ ID NO: 6984 - DNA, 264 bp, Setaria italica
  Peptide Sequence Number=SeqID_72958
gggggagcagagggcggcggcgatcgtggtagcggacgcggcggaggccgacttccccgtcatctacgtcaacgccgccttcgaggccgccactgggtaccgcgcccacgaggtgctcggacgcaactgccgattcctgcaatttcgggatccacgtgcacaaaggcgacatccccttgttgatcccatggttgtttcagagattcggcgatgcctcaatgaggggattgaattccaaggcgagctgctcaatttccggaagga

SEQ ID NO: 6985 - DNA, 2200 bp, Setaria italica
  Peptide Sequence Number=SeqID_72959
ttttactagtggtatatttgtcttgtcttgtttttcttgttttgtcttatctttttttctttattaccaattttaaattgctgacactgaaaactgacagagggcctattgaagcatctcacgaactgtgttcactcaaacttgtctttcagccgattcctgcaatttcgggatccacgtgcacaaaggcgacatccccttgttgatcccatggttgtttcagagattcggcgatgcctcaatgaggggattgaattccaaggcgagctgctcaatttccggaaggatggtgctccactttacaacagattaaggctcattcctatgcatggggatgatggctctgtgactcatgttattggaatccagctattctctgaggcaaacattgatctcagcaatatatcatatccagtgtataaacaacagtccaaccacaggcccactattcaagatctgaactcagcttctcatgaacatactcccaaaatccagagctcagattactgtggtatcctccaattgtcagacgaagttcttgcacacaacatcttatctcgcctatcaccaagagatgtagcatcgattggatcagtctgtaccagaatgcatgaactaaccaagaacgatcacctgaggaagatggtctgccagaatgcatggggaagagatgtcactgtaaagcttgagatgagcaccaagatgttacgatggggtcgccttgcaagagagctaacaacccttgaggcagcatcatggaggaagttcacagttggaggacgtgtggagccttcccgttgcaacttcagtgcatgtgctgttggtaatcgccttgtcctgtttggaggggagggagtcaacatgcagccaatggatgacacgtttgtgcttaacttggaggctccaactccagaatggcgccgtgtcaaggtctctgcctccccacctggccgatggggacacactctatcatggctgaatgggtcatggctggtagtatttggaggctgtggacagcgaggtttgctcaacgatgtcttcgtccttgacctcgatgctcagcagcctacgtggagggaggttgcaagtgagggtcctccactgccacggtcttggcacagctcatgcactttggatggttcaaagcttgttgtctcaggtgggtgcacagagtccggtgttcttctcagcgacaccttccttcttgacctcacaaaggaaaaaccagcatggagggaaattcctacatcctggtcaccgccatcccgccttggccacaccatgtctgtctacggtacgaccaaactattcatgtatggtggactggcaaagagcggctcgctccggcttcgctccagtgacgcatacaccctggatgttggtgaagacagtccccagtggaggcagctggcaacgaccgggttcccaaatgtcggcccaccgccaaggcttgaccacgtcgctgtgagcctgccatgtgggagaatcatcatatttggcggctcgattgctggtctgcactccccggcgcagctgttcctgattgaccctgccgaggagaaaccggcatggaggatcctgaatgtccccgggcagccaccgaagttcgcctggggacacagtacatgtgtggtgggtgggacaagggtcctggttctgggaggccacaccggggaggagtggatcctgaacgagctccatgagctgtgtctcgcaagcaggcccgatgaagacgagtgatccattcttctcgcatggctgtggatctgctgctattcgaacctactttcaacctgttaccgtattctgcatcagtagtaaaaactagaggaagttaatctgaaaaaagaggttagtcctggagagtttagtctacattgctgttgtcatggggggtgttttcttgcatccccatcggtataaagtagtggaaattgatctgaaaaaaaaagaggttagtccggtagtctactttgttgttgtcatccgatatgttttctcgcatcgttctagatacatattattatggtctatatgtggatcttttttgtttccagaaaatccccccaaaaaaattaaactggattgtaaattcatgtgctcaagtttgtatcgagttggttgtatctgcccatatttgtatcgagtttaattgtatgtccatgcctagtaggcatcaaaattcatatatcaaagccgc

SEQ ID NO: 6986 - DNA, 275 bp, Setaria italica
  Peptide Sequence Number=SeqID_72960
agggaagggaggagaggagcaggacgccatggatcccagccagatgatgttcccgatgtggggggcgccgcctcccgccgccatgcctccgccctccgaggaccccgccgccgctcccaacgcgcagcccttcctccccccgcccaaccggggctggaagcgcaagaaccccgccgctgcctaccagcccccggccctcggcgacctccaggtgcagaaccgcgccaaggcacgccgctggttcaagagcagcaaccccaatcccaaacccccgc

SEQ ID NO: 6987 - DNA, 475 bp, Setaria italica
  Peptide Sequence Number=SeqID_72961
aactttctcgggaggctgtcgcatccgaacctggtgaggctgctggggtactgcgtggaggacagggagctgctgctcgtgtacgagttcatgcccaaaggcaacctcgagaatcatctctttagaaagggtggagccttcgaacccatcccctggaaccttcggcttcggatagccattggtgcggcccgtggcctcgcgttcctccactcatcggagaggcagatcatctaccgagacttcaaggcttccaatattctcctcgacacgaattacaacgccaagctctcggatttcggcctcgccaagcacggccctaccggcggcgacagccacgtcacgacgcgcgtcatgggcacgtacggctacgctgccccggagtacgtcgccacagggcacctgtacgtgaagagcgacgtgtgggccttcggcgtggtgctgctggagatgctgacgggcctgcgcgcgctggaca

SEQ ID NO: 6988 - DNA, 391 bp, Setaria italica
  Peptide Sequence Number=SeqID_72962
taaaaaaatacaaacatacattaatacaggctgataggatacaacatgcatgtctgcttgtgttattcacataattcatcagcagctcatgatcgtgttagacatccttctaacctcatgattcgtgagtttctatctcatgatattgagactttatcgatgagccaacagatggtattcatttaccaggcacacaacttataaaacacaaaaacagatgtacaagagcttgtgtgccagcaaagataagggaaaaagatgataactagcagctctttaggtcaggtttcgcagagaaattgtccataaaaggtctgcatcagactgtacagttaccttttccgattgcacaatgttggatgtgctaatcatgctcccaaatctcatcttt

SEQ ID NO: 6989 - DNA, 518 bp, Setaria italica
  Peptide Sequence Number=SeqID_72963
taaaacttaaagtaactaaagtaacttacttttaaggttactaaggttaggtcaggtttcgcagagaaattgtccataaaaggtctgcatcagactgtacagttaccttttccgattgcacaatgttggatgtgctaatcatgctcccaaatctcatctttgattcacttagattccatttcaggccagtggttgtggtgcttgttgatggtgctccaacaggaaaaagcccacaatgtggtccttcaacagatgactcaatatagagttcatggtgatgcgtcttgggaagaagtctaatcaagcaatcatctgatagaaggacaatcctcatgtccgaaaacagatacagaacattgatatttgccgcctcatgatcaaaccttccacctagtgctccagtaacaagcacacagagattaggtttttcatgatcaggtgtacggagatggatacgagaaatacatttatgtaaatctgttgtctcctggttatgtgtattatcagtaaattttgga

SEQ ID NO: 6990 - DNA, 1484 bp, Setaria italica
  Peptide Sequence Number=SeqID_72964
ggaagctattaaaattgatttacatgtccgtttgatcttttacctattctatttcaccttaatacaagttacaacacgcgaacaaagaaagttctgttatcacattggcgcaacgcacaagcatgctccaattttttccttcactggactaccggctatagctcatccttgatattttccgcagctggggcattgtccgtggccgctaccgtctccacgtctgagatttgcagcttctccttgatgaatttggccatgtccttgacacttaatttctttgaaactttgatcgggttgtttttgtcttcggcaggataaatgaagagcgttgggtaattgttcaccttcaatttaggatgttcattcacagaagcatctatgcgtgcaaatttaagagtctccaacccactgaaatgcttggccaacttctcgatatttttacttatcgcctcacagtcaacacaccaaggtgtataaacctcaaggaatacgttttgaggactttccagcacagaagaatcaaatgtacgaccaacaactttttcaacaagtcccttcccttgcggtactggttctgatttgtggtacggaggtagtgtgccatctaggagacttaagcagaattcccttaggttctttgcgttgatatctgcctccatcacatatttggctccattgcttgtatcgaatgctgtaacagtaggctttttttcttgattcaagaccataaagagtgaggaatggctttgcaaggttttcttcagcagtgtccacatatataaacattatctttgtcttgaatgctcttgcaacttcttcaaccatagattcaagatcctcaaaatcataagcctctgagaaagtgaagacctgcagtttaatagggcttgaatatactttgcccgaattgagctcagtgaatacagtaattaggggaaacttgtttagctccacaaaccgcaaaattgccttttcttcaaagtccccatcaaacttttcaaacttctcaggttcgcttttaacaaggcctacgaattgctcttcggatgtaatacctggaaatagaattttggcaacactcctatcactggtttctacaaactgtacttcatcatctgtggttgctgccttcacaaattcttcgtattctgctcccttaaaattcttgaatagtccaataacaaaagtctgatcctttttaaggaactccttagctgaatccttagactgaagcataatgactggcgcaccagtcttctttcttacccaagtaactatcgcgtccttggtgtggaggccatggtacgcgtgctcggtgccgttgacgaagaggagcacggtggggaaccccttgaccccaacggaagcggccgccttggggtaccgctccccgtcgagcttggcgaacgcgacggcgctgcccatggcgcgcagcgccgcggcggcctcggcgaaccgcggcatgagctgcgcgctgcgctcgc

SEQ ID NO: 6991 - DNA, 386 bp, Setaria italica
  Peptide Sequence Number=SeqID_72965
aaagtatattgatttggacactgcatgcctgctgtcagttactgtcactagctttttaagttattgagttcatctgatgtcagctctctttgtaacaccacttccacaaaattagtgtgaacaatggttgcactcctaaacagtttgctgttgtcttaatcaaaatttggatttattttgatttaattgagccttccatgttgaaacttttgaagtacggaaatgtcaggtttagctagcttctatgggattttgtactttgtctagtatcatagcagtgctatttttttttggtagaatttgatgagcagaccatttaactgttgcatatcctattgtcatgttgtgctacttaatttttatgctatgttgcttccttcagtcta

SEQ ID NO: 6992 - DNA, 298 bp, Setaria italica
  Peptide Sequence Number=SeqID_72966
caccgccaagcaggctgccgctgcaggcgccacggcatcttcggcgtatggagataagaagggtggagcctcgcaagatggggtgaaaacagacaagggcaagatcttgaaggtttcatgggatgggagtgctgattcttatactgcagcaaagttggaagaactcttccagaaattcggcaaagtcgaagacatagtaatcaagacaaggaaatcaaggagtaagggctcagcaattgtagtcatgggcaccaaagaagctgcactattagcaatacagaaccatttttctctgttt

SEQ ID NO: 6993 - DNA, 597 bp, Setaria italica
  Peptide Sequence Number=SeqID_72967
ccgctaatctccgaccactgccataggtcggtgtctagcatccagaaatcacctaatcgcttgcctccagaacggccaccaaagatgaacatattgcagtcaatgacgacagctacatgaaatgccctagggcttgggcctgcctgcccatcggatccattaattgtgcactcaggtgtgtaccatagcttattctcgacgtcgtagacggagacgtcagagaggaagcgcttgtcggcgaatccgccgaagacgaccaccttggacttgccgatgctcaccgccgtgtgcccgctgcggggggcggggcggtcgcccccgaagtcggaggagtcggccctaacccagtgcatctgcttcggctgcagctgctgcatccctccctcgtctcctcgccccagctcccagtctgcggctctgcgcgactcgtttcgacacaggaactgaacccagcaccaaacggaaggatgggttccggcggctggatggctgccgtgggcggcggcggcggcggcgagcggtgaccggcggggggctggccgctggggggggggggatcgggcaacggagaagtcagagcaggaggacggaaacacc

SEQ ID NO: 6994 - DNA, 563 bp, Setaria italica
  Peptide Sequence Number=SeqID_72968
gttccggtagcagcggcagcgggagcgggggccggagcgcggcggagtactccgggtgggtgtaccacctcggcgtcaactccatcggccacgagtactgccacctccgcttcctcgtcatccgcggcaggaccgtcgccatgtacaagcgggacccgcacgaccacccgggactcgaacctatccgaaagggtgctgttggtcacacccttatggtggaggaacttggtcgccggagggtcaatcatggggatgtttatgtcctgaggttgtacaatcggttggatcaaacaaagaaaggagagatagcatgtgctactcctggtgaagcccggaaatggattgaagcatttgaacaagccaaacaacaggcagaccaagacctgatgagaggggttagctggaacagattgcagaatgaaaatgagattaatcttgatggtcatcggcctcgggttaggagatatgcacagggcttgggaaaactcgtaaggattggtaaagggccagaaatgctccttcgtcagtcttcagatcttcgaaaccaggaaagggttaataca

SEQ ID NO: 6995 - DNA, 201 bp, Setaria italica
  Peptide Sequence Number=SeqID_72969
acgtgaatacgcacgcgatcgatcgacgcgcttgatgatgctagcgatttagtttctctctgcaaaaaccaatggcttttggtcgtgcgtccatggaaaaaagcagaggagatgatcgatgcgagtctgtgatctgttcctgtagcatctgttggattatcccgcgcaagttggcaacttggccaataatcatggcgatta

SEQ ID NO: 6996 - DNA, 292 bp, Setaria italica
  Peptide Sequence Number=SeqID_72970
cgaggacgacggcgagctcggcgtcgaggtcccggaaggaagcggcgaggtggggccccctgagcagcgcccacgagcggccggcggaggcgacgtaggagacgagcaggtcggcgcggaagagcacgacgtagagctcgcggaagcagaggttggcggcgtcggagaaggcggcctctccctcgtcgccgaggacgaggaggagcgagtcgaggagcgcggagagcagcgcgagccgccgcatgagcgcgtcgaggttccggcgctgcgacggcgggcgcgggctcgccag

SEQ ID NO: 6997 - DNA, 790 bp, Setaria italica
  Peptide Sequence Number=SeqID_72971
cccagcccgtaccgtgtcccgttcgccctcgcgatcgcctcctccaccgtcttgaacttcattaggcacatgacgggtccgaagatctcctcctttgctatgaccatgtcctccttgacgttggtgaaaattgtgggctcgatgtagtaccctttcttgccacagggttttcctcctgtcagaagagtggccccttctctcttgccacggtcaatgaagctgagcaccctctcatactgagccttgtccacctgaggtccctggtcgacacgagggtcattcagagggtctcccacgacccagctcttcatcctctccgccagtttcttctcgaagcggtcgtagatgctgtcctgcacgtagacgcggctcgcggcaacgcaggcttctcccttgttgaagaagtttgcactgatggcgagctcgacggccatgtcgaggtcggcgtcgtcgaagatgatgagcggggacttgccgccgagctccagggacacgggtttcaggttgctcttcgccgaggcctccattatgaggcgccccacctccgtggatccagtgaaactgacaatgtcaacgttcatgtgggacgctatcgcagctcctgctgttggaccgaagcctggcacgacattgatcaccccgtccgggattcctgcctgttttgctaggtcggcgaggtacagggcgctaagcggcgtctgttcggcgggcttgacgacgacggtgcagccggcggccggacacggggccaccttgatgccgaacatggtggtcgggaagttccagggga

SEQ ID NO: 6998 - DNA, 284 bp, Setaria italica
  Peptide Sequence Number=SeqID_72972
ggcgaacgagccgcgagacggaggcgcgggggcggagcggatggcgacctagggttcgccgattcaaatcggcggcgcgcggtggccatcccccgccggatccgggcatccggcgacggcgactcgggcgacgcgtcgacggagggagccagggagggaggagaggaggagcgagccggcgtccggcaagggaggcgcggccgcgcggaggagatccggcgggcggcagcggcggcgggtgggctggctctccggcggcgccctcagccgacagcctggcgtag

SEQ ID NO: 6999 - DNA, 300 bp, Setaria italica
  Peptide Sequence Number=SeqID_72973
agcggaagcaacaaccaacgccgcccagctgtcgtctccgcctctctctctctgcctcccctcccccgaatcgcgtcgtcccctctcctcgtgtcgcgaaaccctcgccatggcggaggcgcccgagaacgccgcccccaccgccacgcccgccccgccgccgccagcccccgcgcctgcgccggcgacctcgtccccgcctcccaagtcggggatcccggcgcggtacgacctggacgccaagtgggacgcgtgcctcgacctctccatccgccgcgtcgcctactcctccctcgccgg

SEQ ID NO: 7000 - DNA, 890 bp, Setaria italica
  Peptide Sequence Number=SeqID_72974
acggtgaccctcatccaacacagcatatccccattctatatcaagcaacttctcccctaagattattagctgctcatatgtagtcaaaagcaaacctgatcctgaattaacgacacttgaaatcaaatcatcccacttctttgcaggctttgcacgtctaatctcttcctgatcaccatccccaagaggcttcactgtcagaatcactatatgctttgctctttttattgaaccatttgcagaatcgtgtaagatttttcactttaaactttcggataccatcgactggcctccctttttccactgttgcagaagtgttacaggacagatgacaatgctgggcttgtacatgccactgttatgcaaagaaccaagaaacgttaagacttgcacagtcttccctaggcccatttcatctccaataattccaccagccctttgacaatgtaactcccatagccactgcactcccactttttggtagtcaaatagctgatcataaactgtgccaggaattctcaaaccaccttcaaggataacaggaggtaacccatcaaaaaccctctgctgcttgatcttcatcctcagaaaccgatgccgcaatgtccccatcatcctcatcgtcggtttccattagtgattccttgttttgagttggctttcctccatttcttgtcaggcaagtccctcttggtcttattccttcgtctcttcttttcctgctcttcagaactaggagaaacaggacgttttagaggtcttcctagcctttgaaatggagcagttggtgcatcaagtttaggtaaagattctggatcaagcaatttggtcattgggcggctttgtgcaatctgctgcatcgactgggcaaatttagcaatcctggaagc

SEQ ID NO: 7001 - DNA, 2085 bp, Setaria italica
  Peptide Sequence Number=SeqID_72975
ttgaatcatcaatagacaatatgcgagcatgagcctttctactcagcaccagagcagcatgcaaagtattaggggggtgttggagtgtcgtcagtatattcagcctcaccagtgacctgaagcatagctgacatatgaaccattggctggcctactgaggttccttgcctcaccatttcataaccttgagttccaacagtaacaggcctaacgtatggctgtatagctgatacatgatcagcatgcaatccatcttctagcaatcctttcatgttcatatcatgagtaacagaaaggaaaaatttgaaaaagaaactcaaagttagtgatctgcgaaattcgaccattccaccaggtgcgttctctgatagagggatgtcttctttcaacagattgaaggtatcatccaacaactcagagttccacttctttcctgtaaggaagttttcagtcgttgaagcactaagtggaactgcagctacccctccatagacaattgagacatcagatattatccattttccttcagtttctcttaaatatacacgcattccagcatttaccaaagcaatgtcatcctcccttctatgtgcctgtttaaattctttcacaaactcaaaaggccttgtccatggtagtataacagaaagtaatatttcatcaggttttatatcaactttacggtaaccaagaaagaagtctttcgcgagtgtagttctaacactgctgttcacatcaattatctggaattttgcacctacagccatccaaagtggattcaggtccgatattggactagcagtacaaatgttaccaccaacagaagcaacattccttatctgtgttcctgcaaaccattttaactgacttactattgcctgacatgatgaggtttcaggcaaatcacgttctgcaataactcttttaaggaaattttgaagctgtgcaagtcttacagcagaaccaatgtgtatgccatcttcttcaactttgagagtattaagctctggaacatgagtaactgagatcatgactttataatgggcattcttaaactttgtttcaactcccacctctgagttaccaatgataagctttgcatctggatagcaagatttcaaatgtagtacttgatttagtttaagaggtctaaaccacctggtctcattaaacccatttaatttaagtggcataacttttctcaactgaagttccggggggaagatgagttctttgtcatcatatgcatttccatcaatttcattgtatgaacaaggtgaatatctttccacagacgatgatagtgaagacccattagcattggcatctggctcattcttgcaagaacatggcttcccagttgaagggcagatagcttggccatctgtgttttgtgaagatgaattggtgtacaccaaattatctgttttggcaaacacacggaaggcatctataattggtcggtagccagtacatcgacacaaatttcccgcgaggcagtcttcgatctgttcttcagttggaggctctttgctagatctcagcagtgcatacatcgacatcacaaaaccaggggtgcaaaacccacattgtgaaccatgtgccttggctaaacattcctgaactgggtgcaaacctcgctggcgatctccaagtccctcaactgtgattatgtgcattccttccacggaataaagtggagccaagcatgcattgattgcaaaatgcagtgatttctttgtagttcggtcatagcaggagaccatgacagtgcaggctccacaaccaccttcaccacatccaagctttgttcctcgaaggccgatatctctgaggtactggagcagggtgaggtgggcgaggccgtcggggagcacgcggcggacaccgttgacgtagatgaccgcctcgtcggaccactcctccgctgccgccgcgaccgccgccgccgccgtctcctcctccgcctccctcgtcagcgatcccatcgggttcaggatcggagaagcaagaccaggccgcactcccgccgcgctctagcaggcacggggtgggttccgtgcgcgtcgtcccaggagaggttgg

SEQ ID NO: 7002 - DNA, 634 bp, Setaria italica
  Peptide Sequence Number=SeqID_72976
tacaatcaaggagcaactagcagctatatcaccatccttggaactactctgcaggaaaagagatagtagggtaaaagagtttgctgacgtacaacttcagattcagacactacgtggtgaaatcactgggaatttacagtctggtgaactcttggaaacaccccatgtcaatgaggatgatctttcagtaaagaagttaaatgaatttctttttgaactacaagccctacaaaaggaaaagagtaataggctccacaagattctcgaatctgtgagttcagtgcacgatctctgttctgtactcggcatgaatttcgtgggcacagttactgaagttcatcctagccttgatgactctgttggtgttcaatccaagagcatcagtgatgaaactttatccaagctgtctaaaatggtgattggacttcaagaagaaaaatcaaagaggtttgcaaagattcaagccctagcatcccagctatctgatctttggaacttaatggatgcccgggtggaggaacgccaaccttttcatcacatcacatgcaatatgtcctcaacattggatgaagtgacagttccaggagctctggctcttgatgtaattgagcaggctgaacttgaagttgaaagg

SEQ ID NO: 7003 - DNA, 925 bp, Setaria italica
  Peptide Sequence Number=SeqID_72977
gtgttagcaggcaagaagggcaactcagaccttccaggatacaaagcaaggtttgccagataagatttgctttctttggattccatggcacttttgtaaagagagccttggatgaacttttgtgtatccacagtaagtgcattaccatcttcaggagatcccgcagcaaccccaatttgaagaatgcaattacctccatacacaacaaccagtgatttgcaacaagttgcagtagtgagggaatcccatgtccaaagtagttcatgaagagcagaacttgacacaccaggaccaactcgtttgcattcgacacctcgaggaaccacctatcgtcaaattcagaattgagaaatcactcaacaaattaaaacatgggttcagagtatagggaatgtgtggtccaaaatcttaattctgaccggagaaatggatttcggccggatggacaaccaaacgaggccggcaagaatgtcagtcacggagagagcaagggtcaatatgtcggccctcgactgcgaactaggggtatggaacaaacgattagtgtgcccaaatcgcatcaattcggggcgttcgcaggtgcgaggtaccgagcgatttcatggcactgcaagtgcgggcagacctggaggcgtcggcgacggcggcaattccggagacggcacggttgaggaggacagcgacgagggaggcgccgccgacgaggatgggcaggctgcggacgagcgtgtcgttgctccggacccagcccctccacccactcctgccgcggccgcagcgccctgctgacgcagcatccatgctctcgcacatcggaaagcggttgcggcggtgagaaggctccgaagggaagccggcggccgaggcgcgggcgggcgccgtccgcagcgttggctgcgggagtggagctggagataatgcctct

SEQ ID NO: 7004 - DNA, 738 bp, Setaria italica
  Peptide Sequence Number=SeqID_72978
tcgacagtgtggcatccaacttgtctgcgatcattgcaatccatgcctgatcaatactagtgaaccctcttatagtatcgccaccaacaactgcaattcccttatcaccaattggttgtaatattagtgcctatagaacagaaaacgtgttaataaaagttttggtccagaaatttcagataatcccttcatctgaaattttggtttcagcttctggacatgaaaagaaggccctttatacactccaattcatataagaaagtgtatcattgctcgaatatatgcttctatgtaacatcatctctagaataaagtgaatcagcacctgtgtgttagcaggcaagaagggcaactcagaccttccaggatacaaagcaaggtttgccagataagattctgctggaagactctggtgaaatttctgaaaacaaatggaaaaaccttcgaagtaaaataagagatactcacgcttcttggattccatggcacttttgtaaagagagccttggatgaacttttgtgtatccacagtaagtgcattaccatcttcaggagatcccgcagcaaccccaatttgaagaatgcaattacctccatacacaacaaccagtgatttgcaacaagttgcagtagtgagggaatcccatgtcctatttgtaagaaaaataaggaatagctaacttcaccaactgaaaccctttgtataactgcatataggagatcgtggatttatacaag

SEQ ID NO: 7005 - DNA, 1493 bp, Setaria italica
  misc_feature (1)..(4): n is a, c, g, or t
  misc_feature (6)..(6): n is a, c, g, or t
  misc_feature (12)..(12): n is a, c, g, or t
  Peptide Sequence Number=SeqID_72979
nnnngngtgtcnctgttttttttttttttttaaaaacaacacattatgtcattagccgtcttgctttgcgtgtactcaaaaggaatgaatatatgcaaacacacgtaaagccattagttatgtggctatgttttgtcagacattgagacctgaactaaccatcaattcttcagaaagcagtcccagtgttgtgaccaaacaatgataaacctgatggccagacccaactgaacaggttagtttcaccaattcgccactacctgcacatgcactatttggagctttgactataggggctctggttcaggctattcagcgtccagccgtccacatgtatgcttgatgaattatcacgtcagacaaggacgatgtcctcacttgcaggagacaggcgatggtgaaccaaacatccaataatctgcccagtacttaagggttataagacttcgacagtgtggcatccaacttgtctgccatcattgcaatccatgcctgatcaatactagtgaaccctcttatagtatcgccaccaacaactgcaattcccttatcaccaattggttgtaatattagtgcctgtgtgttagcaggcaagaagggcaactcagaccttccaggatacaaagcaaggtttgccagaataaagaattgcttcttggattccatggcacttttgtaaagagagccttggatgaacttttgtgtatccacagtaagtgcattaccatcttcaggagatcccgcagcaaccccaatttgaagaatgcaattaccgccatacacaacaaccagtgatttgcaacaagttgcagtagtgagggaatcccatgtccaaagtagttcatgaagagcagaacttgacacaccaggaccaactcgtttgcattcgacacctcgaggaaccaccggagaaatggatttcggccggatggacaaccaaacgaggccggcaagaatgtcagtcacggagagagcaagggtcaatatgtcggccctcgactgcgaactggaggcgtcggcgacggccgcaattccggagacggcacggttgaggaggacagcgatgagggaggcgccgccgacgaggatgggcaggactagaacggcggcgtaaaaaagtaagaaaataaggaatagctaacttcaccaactgaaaccctttgtataactgcatatagaagatcgtggatttatacaagtgggataatgctaattaatggtaacaagcacagatttcgttatctccaatatctttcagttagtatacaaaattatagctgacgaatgtgtggtcttaggcagagtgccacacgatcatcaatcacccaaacgcattgctttcactataaaatatgtatgcaaagggcagttgattatcaggggagattttcagaattactactgaaaagatgcatgcagttgttctaagtccaaaatcaactggcagacaacgggctattgttagcacatgggtgacacctagcagtggcacc

SEQ ID NO: 7006 - DNA, 782 bp, Setaria italica
  Peptide Sequence Number=SeqID_72980
gtggccacggagcgtccggcgaggagggccttgggcgcggcgttggggtgcggcgacggcgcggccgtggcgccgccggagccaccgccggaggagggctcgggggtaggcgccatggaaggggcagcagaggaggaggcagcgacgcggatgtccaccttttggccgccggcgcagtggcccgggatgccgcagaggaagtagtggtggccggtggtgttgaggaccacggagtcgttgcccgaattccaggtggccatcggcttgttggcgtcgcagttcttgtagtccgccttgctcaccgccatcacgttgtggaactgcttgttgtacgtgaacacgacgacgtcgttgaccttgaacctcttgccggaggcccaggcggcgtagtcggggttgcccatgatggtccacccggtcttgtcgcccacctcgtacacggccgccgacgccacgccggccagcaccgtcaccgccagcgccgccacggccgccgccctcctcgccgcgccgccgacacccatggctagctgtggcaaaggcggcagcagaggaacgagacgcgagctggagcgagcttcccctcccctgtcgctggtgttttcctgctcgccgctcgctctagtagtgcagtgggagagcgctggcagtgtgcacacaatcgtcacgagccacaaagatcagcaggtgatttgctgaagaagctagtgcagcattgatcaaaacagcatacaataatttagggctttaggcgcgagaggatgtgtttcgctttatgaaac

SEQ ID NO: 7007 - DNA, 760 bp, Setaria italica
  Peptide Sequence Number=SeqID_72981
aagtgtttttttttttttttttggaaaaaaaaaagcatgacctgtttgcatagcttgctttctgaatttaaactactaataacaactccaaacagcacccatatatccactctcatagacagattcatgactccaaactaaacaacattacaacttgggtgtggagctagcagttaattcttcataggttaagctccctacaatgtccttttttcaaacccccggcgtgcaagaatttgagcgacactccacatgttgatgcttcacttctgtgcagtctctttctagaatgccaagttaccgaccatccactgctgcctgtgtgcgtgtcccgcacaagaactatacaagttagtagaacgcaatgctgtatgcaagcctccgcttgtgctgcttctcgaatccagtaatcaggtcatcgataatttcctcccagtcaccatcaattgcttcaagcttctggcacaactctacagcaagctttgccccaacaccagcttcttcatggttatctttgacatccatattgattatcggcacactcttcatcagctttggctcgcggttattcatatcttcaacaaccaagtcgaagaccctctcctcaaaggtcattatcatatcaaacaacccatcaccggcattgtcctgccaccgctgaggtgccagcttcactgaggtgttcctcttcagcattggcagcagcccattcctcttgtacagatcagggtccttgcggcggaggtcgtcgtagatggca

SEQ ID NO: 7008 - DNA, 806 bp, Setaria italica
  Peptide Sequence Number=SeqID_72982
gaaggaacgcaaacacatgacaggagctacatcccgcaatgaatattttgcgccctgaggaggtgacaaaaggcaccccactgcacggcacggacttattctgcgggtacagtacaggtggcgcatcacacctatcacgtacaagatcagctgcgccaggatccccagtgccttgccgtactccaccatgtcgtcgtagatgtgctccagcgtcttgaactcgaactcgaacccgtccttctccagcttcgtcgacggcagcagcgctatcggcttcttgaggaggtcgccggagagctcggtgttgacgttgtactgcgggtacttgtccgccaggaatcgggcgatctcgacgatggtggtgtcgagggcgttgcagatgtacctgccggcggccgcctccgcctcggcgacgaagatctcggcgcggcagacgtcgtgcacgtgcaccagcggcaccgacccggaggccctctcgatgcccttgagcacgccgagctccttgtcgtcgcccgacagcagggagaggatggccgggacggtggtgtagacctgcctgtccggcgcctcccccacggtgacggacgggcacagggtcaccaggctcaggccgtgctcctccgcgaacttggacgccgcctgctccatgagcaccttcgacaccgggtacgcctgtgttatgatgcggaggaagcgcgatcacggcgccatcagcatgcaaacggactgaacattgttcagggtgcagaagtgatgaacaatgatatgcgtttgtgcagtgccggcgtacccagagaccggtccct

SEQ ID NO: 7009 - DNA, 1662 bp, Setaria italica
  misc_feature (1)..(69): n is a, c, g, or t
  Peptide Sequence Number=SeqID_72983
nnnnnnnnnnnnnnnnnnnnnnnnnnnnnnnnnnnnnnnnnnnnnnnnnnnnnnnnnnnnnnnnnnnnntcattttttttttttttttttggtactgaaaactctggaatctcaaattttgaaggaacgcaaacacatgacaggagctacactccccgcaatgaattattttgcgccctgaggaggtgacaaaaggcaccccactgcacggcacggacttattctgcgggtacagtacaggtggcgcatcacacctatcacgtacaagatcagctgcgcaggatccccagtgccttgccgtactccaccatgtcgtcgtagatgtgctccagcgtcttgaactcgaactcgaacccgtccttctccagcttcgtcgacggcagcagcgctatcggcttcttgaggaggtcgccggagagctcggtgttgacgttgtactgcgggtacttgtccgccaggaatcgggcgatctcgacgatggtggtgtcgagggcgttgcagatgtacctgccggtaggtacgtcggtctgtcgttcgttgtctacgttgtctacctagtcggtctgcctccgcctcggcgacgaagatctcggcgcggcagacgtcgtgcacgtgcaccagcggcaccgacccggaggccctctcgatgcccttgagcacgccgagctccttgtcgtcgcccgacagcagggagaggatggccgggacggtggtgtagacctgcctgtccggcgcctcccccacggtgacggacgggcacagggtcaccaggctcaggccgtgctcctccgcgaacttggacgccgcctgctccatgagcaccttcgacaccgggtacgcccagagaccggtccttttggcggtgaggtactcgacgtcggagaaggactcctcgtccagcacgtgaccgtcgccttgcagcggcttgctggagacggcggccgtcgacgaggtcaggatcacgcgcttcaccgtcccggccttcacgcacgaccgcatcacgttgagcgtgccttggactccgagctccatcagctctttctcagggttcttggacgtgtagtccaccggggctgcgaggaggaaggcgtagtcgcagccggcgacggcctcgtcgtagctgccttcttcgcccaggtcggcgcggaacacctccagggtgccgagcttcttcatgtcctccaggtgggagttgtcctccttgttctcggggtgcctgaccgtcgtcttcacgacgtagcccttctccagcagcatcttgatgagcatcgacgcgatgtacccgttccccccggtcacgcacgccgtcttcttcctctcctcaccggccgcggccgccatctttggcaaggtgaacacgagcactgctggctctctcgactcaagcactgaggcagtgtactgtggctctggatcctgaagttctgaggtggatggttggcacactggctgagcaacgtgccttttgtaagcttgctgcctgccagggtgctccacacgatggttcacagccacagggtgctcgagatcttatcgcttcctctcaagcggtgacgccggcaggtcgacgacacggtgagaacgtcgacgacgacgtccggggacgagataaactgttccatgaaaaacactcgggatctttttcggggctgaaagttgcag

SEQ ID NO: 7010 - DNA, 238 bp, Setaria italica
  Peptide Sequence Number=SeqID_72984
tcaaactttttactatcaatgtcaatgccaataatccgagaagcaccagctgattttgcaccctcagcaactgcaagcccaactgtgccaaggccaaaaacagcaacaacagagccagcttcaacctttgcagtattccacactgctccaagaccagtagaaacaccacagccaagcaggcagactttatctagaggtctgagacacgcaacaggagataggcaaggcacacagggga

SEQ ID NO: 7011 - DNA, 1045 bp, Setaria italica
  Peptide Sequence Number=SeqID_72985
cacgatcttttccagtggaccatgaccaattagattcctcctggggacgaactgtcaggacagatggaccaccgcggtatccatgcctgctcaaagcactgaaatccacaccaccagttttcttcctctttgacacggctactgttcaagagctaaaatcaatgttaaaataaaccctaacaatgagttatcatacttagaacaacaatcttttggagttcaatatttactgttggtacttgctatttagcaaataaaactgtgtcggcttcaacagtaccaaaatagacaaaataaaaagggcccaaccttgtttgctaatccaactttatggaagggaacactggatctatgtaagcatgatacaagggatccgatgcccaaagactagctaagtgccgaccagaggtggtcaacctatggacttcttcagtagcccaaattagggtctcagctctcacagggtggacaacggcgtctagacgccgatgctcatcatcactcccaatcctttgctgatcccaccttttcaataggacattagtgaggtaatgcaagggttgtttgtacaactgcttcagtgatctggcgagtcccatccatgatgtgaatgggattagggaatcacggtaagcaggaaccggaatgtgcttcatgtaatgttgatacatttcagccctcctgatcagagcaccttctgctggtgaagcagctttggaggaattgggcagtctaaaggcgttccaaccattccccttaccagcctcatcatcagaatccgagctcagggaatcatcagaagacacgtcctccgcttcctcacccggcgcccccctcttcgtatccttcccggcctcttggtcggaatccgcgcttgaagaaccgccggaagacacgtcctggggctcctcccatggcgccgccctcttcatatctgaatcagagaggagaaacctcgcctgaggtggatgcggttggggaggagactgtggaggagctcgccgtcgcaggtcgccggcaccggagacagatcccgagtcgaaag

SEQ ID NO: 7012 - DNA, 966 bp, Setaria italica
  Peptide Sequence Number=SeqID_72986
aagtcccacatcacaggaagctcaacgctaaccagccctacactcagagacacgacattttactagcgacacaacagcagccaaagcacacgatgaagcttaaagccaaggattaatcctctgtaggcagacatgttagaagtctcactgcattcatagcagtttactttcaaatatcaaagccagagtaaacgccactccccctcaggagccgtttctcctcctcgacgtagttcttccctctgctggcctgcccccgatccctcttccgcttctccttctgcgagaaggaagcattcttatggtctttctctaatagtaattggttcagcggtgcattctgcacaccgataagcttctctccttcagttactgcagcccttgtgcgctcccgttcttcataggactcaggcgcatcttctttgtcatcacgatcttttccagtggaccatgaccaattagattcctcctggggacgaactgtcaggacagatggaccaccgcggtatccatgcctgctcaaagcactgaaatccacaccaccagttttcttcctctttgacacggctacttctgctggtgaagcagctttggaggaattgggcagtctaaaggcgttccaaccattccccttaccagcctcatcatcagaatccgagctcagggaatcatcagaagacacgtcctccgcttcctcacccggcgcccccctcttcgtatcttctgctgccgcagcagctttggaaacgctcccgaacttacccttcccggcctcttggtcggaatccgcgcttgaagaaccgccggaagacacgtcctggggctcctcccatggcgccgccctcttcatatctgaatcagagaggagaaacctcgcctgaggtggatgcggttggggaggagactgtggaggagctcgccgtcgcaggtcgccggcaccggagacagatcccgagtcgaaagtcg

SEQ ID NO: 7013 - DNA, 1506 bp, Setaria italica
  Peptide Sequence Number=SeqID_72987
aatcccatctgctcccgacacgggcccagcagccccccgcaccgccggcgccggcgaccgtttcctcctcctcctccgctcgaggagagggccagcggagggagaccggccaattcacctggaccgacccatatgggcgccgaggcagagcacccgcagcagcctccgtcctccctccggcccggctgggaggcggcggcggcggcggcgcccgcggtgctggggctccagctctcggcgctgatcgaccacgtcgcccgcgtcgactggtccctcctcgaccgcgtccccggcgaccgcggcggctcgcagcaggtgtccattgaggagctgaatcatattcttactgaagtgaatgcccacatccttccttcccgcaatgatctcactccaataactacaatggctggtggaagcgttgccaacacaatccgtgggctctcagctggttttgggatatcaactggaataattggagcttgtggagatgacaaccaggccattttgtttgtcgacaatatgagttttagtggtgtagatctcacaagattaaggcccaaaaaagggcacaccgctcagtgtgcgtgcttggttgatgcaagcggcaatcgcaccatgcggccatgcctatctagtgcagtcaagctgcaggccaatgagtttagagaggaggacttcaaaggctccaagtggcttgttgtgagatatgcacaacagaacatggaacagattattgaagctattaggattgctaaacaggaaggactttcagtatcattagatttggccagtttcgagatggttcgtgactctaggttgaatctcattaaccttttggagactggcaacattgacctttgcttcgccaatgaggatgaagctagagagcttatagagggaggtccaacatcagatccagaggaggcacttgcattcatgggaaagtactgcaaatgggctgtggtgacccttgcttcaaagggatgcatggcaaagcatggcaaacaggtcgttaaagtgccggcgatcggggagagcaacgcggtggacacgaccggagcgggcgacctgttcgcgagcgggttcctctacgggctagtgaaggggctgccgctggaggactgctgcaaggtcggggcgtgcagcggcgggtcggtgacgcgggcgctgggcggggaggtgcggccggagaactggcagtggatgtacaagcagatgcacgccaggggcctgctgctccccgagctcaagaactgaactgctgctgctgctgtagcttagcatcaccagctgctgtatctcaccattcctaagaggccattatccagcctcccccgttattgattgttgctagaatgttgttggtttaccatgcttgattcatggcatggtgaagggcaagcctggcacattagttgatttgttgaagggaaccacggaaccactcctaagtcctaagatgaatcaatcgaatggaatatattgattacctcaaaaaaaaaaaaa

SEQ ID NO: 7014 - DNA, 294 bp, Setaria italica
  Peptide Sequence Number=SeqID_72988
gtgctccagttgtggaaacaatggccacaactccagaacttgcagtggctacagaggccatgagaacagcattagtaccagcagtaacagcagcggtaatactagctgtggtggcttgaggctgtttggggtgcagcttcaggtaggctcccatcctctgaagaagtgccttagcatggagtgcctatcgccagctgcctactatggagctgctgctgctgctgccgccgccgcctccagcttgtcgccttccgtatcatcgtcttcgtcttcgcttgtgtcaatagaggagaa

SEQ ID NO: 7015 - DNA, 396 bp, Setaria italica
  Peptide Sequence Number=SeqID_72989
aaaccggcagagatctgtataacacgccggctcccgatccttgtcgatccaagcagcccacgttctccactgagacagtggagccagtgcccgttccaaatagcccatcaaggaggatgcccgattcccctgccatccaatgcctctactcaggatatgagctggaggtggagtcgcacttgcaagacgagcagcagctttgtaagatgctgtggacaaatgattggccagcgttgaaggttggtgccccccattgtagtgggtaaggaatcttaatccatggagcagaggagatcagattggctcggtcagtgcggcagttgatctgagtgacctcagtgctgttcttataggcaccacctgaagtgaggatttgagcatatgcccataccaaca

SEQ ID NO: 7016 - DNA, 1315 bp, Setaria italica
  Peptide Sequence Number=SeqID_72990
gtaaaacggtaggcaaccatttttactgggttgggggacctcccaacaaggcaacaacgatctaaagacatgaacaactacagatcaacgaatcaaacaatggccagctactactacacacagctactactatccctccgctcagcaatctgagttcatccagagaagcagagaccggccgcttcctccttttctttttcatcactctcggtaggcggtaagatcgcccgcccggtctaggccggagggaagaagcggttgagattgaacggcaggctatagaactcctcgttcctgctgtcccccttgaacgaccggaaccgcacccaccacggcaggccccggtcgttgcctgcgtccttggtctccagcgtgttgtccaggaacacggccacgatcagccccaccgttggcggcgatgagaagatggtgttgatgtagtcgttgaaccatccggctttggtgtgcgcaggaccacgctgagcagccatggtgtaccggaaaaagtactccggcacggataggccaaggaagatggagacgcccacgataaagaggttgcgcatggagttcatgttagtgaactgcaagaaggacagccccaccgcagcaacgagcccaaacaagacgcagtacacggctgcgaagatggtgaatgggatggaagcaaacagcgctccgaatttccccagcatggagaaaaagatcatgaaaccggcagagatctgtataacacgccggctcccgatccttgtcgatccaagcagcccgacgttctccactgagacagtggagccagtgcccgttccaaatagcccatcaaggaggatgccgattccctgccatccaatgcctctactcaggatatgagctggaagtggagtcgcacttgcaagacgagcagcagctttgtaagatgctgtggactcaactagtgagaccaaaacggcagacaccataccaaatgattggccagcgttgaaggttggtgccccccattgtagtgggtaaggaatcttaatccatggagcagaggagatcagattggctcggtcagtgcggcagttgatctgagtgacctcagtgctgttcttataggcaccacctgaagtgaggatttgagcatatgcccataccaacgcgatacagatgaaaagggagaacctttccagtatgggaatatcttttatttgtatattcttcagatactgagagagtacaacaaagagaatcagcatcggcaaaccgacctcaacgcatctcccaaccacagggaatcctctttcgaaaaggccaaatcctagcagagcaacca

SEQ ID NO: 7017 - DNA, 258 bp, Setaria italica
  misc_feature (249)..(249): n is a, c, g, or t
  Peptide Sequence Number=SeqID_72991
ccgcaggacctcgcgccggcgtcggccgagagcaacagggcgctcacggcgtcctcaacctccaagagcctgccgttctaggagaccatgccattgccaagctcccaccggaacagaaaactcaggtaaacaagccattgccctgatgccccgtctcttcacaactgcacaacgacagtaccttgagcaacaccgcatctgagcattttcgttgcatattcagttgatcgctcaactaccatatcaacnctgatccag

SEQ ID NO: 7018 - DNA, 662 bp, Setaria italica
  Peptide Sequence Number=SeqID_72992
agagcctgcagagcaacatgcggcgcatcgtgcgccgcgcgcggctgccgcaggacctcgcgccggcgtcggccgagagcctcaaggcgctcacggcgtcctcaacctccaagagcctgccgttctaggagaccatgccattgccaagctcccaccggaacagaaaactcagcagggaagaggccaggagagtgatgaggaggagacttttgctgcactctgcactgcattccattgcatgcgtcggagaccgggaatctttggagtgcctgcggagcggaggagtgattagaaagatgagctaatctaagcacttgtttatcggctgctcgcttgctcgtcgcccttttcctcgtgcctgctgatggagaccacgtgcatggatggatcgaccgggtcaaattcagacgacagacaggagctggctttgagatgttctcctaatcgctttctcgttttgttaatcgcttcgattgttcttcttccgcttttgtatatgggaataggttaagtagtttagtcatactacatctagtggtcattgtgtcagggctactcttttagatgtgtgcacatgttctcgtgttggagtgtgtgatagggtagtggagggttttagaagaactagaaagaggatgtagaagttcatatttaaatttagt

SEQ ID NO: 7019 - DNA, 288 bp, Setaria italica
  Peptide Sequence Number=SeqID_72993
gcctggtcaaacttggcaagcaggggaagacgcgtgcgtgcgtgcgcccagtctggtcgcatcccattcgagccaaacccgctgccttcgccccggcgtgccagcgacgtgcgcgtgcgtcggtcggtccccatccatagcttgtgcctgcgcgcacggcggcggcgggggtggcgatggcggtggaaatggaggacgcggcggtgccggcgctggcggtggtggacgcgcggttctgcgcggcggacgcggcgtcgctggccgtggccaaggcgctgagcatgtccg

SEQ ID NO: 7020 - DNA, 245 bp, Setaria italica
  Peptide Sequence Number=SeqID_72994
gggaccaagtccatcatcgcaacctgccactgcacgccagtgccagcatggccatggctccttgttgtgtccttgtgtccctgtgaggcaagggcacgatcgaggaagaaagggatggcctcctaccgctggcctctacgtgatgcgcgtgaattaagagcgtgtttgggtgacggccacagcttactacgtcccaaatcaaaagccacacttgtggcgagattttgtgctgggaaggcacgtgg

SEQ ID NO: 7021 - DNA, 543 bp, Setaria italica
  misc_feature (534)..(534): n is a, c, g, or t
  Peptide Sequence Number=SeqID_72995
tttaaggtaataggatctgtgcactgaagaaatcatgttagatccgcgatgtttctgttcgtagatggctgggaggtggaatttttgtgtagatctgatatgttctcctgtttatcttgtcacgctcctgcgatttgtggggattttaggtcgttgatctgggaatcgtggggttgcttctaggctgttcgtagatgaggtcgttctcacggtttactggatcattgcctagtagatcagctcgggctttcgtctttgtatatggtgcccatacttgcatctatgatctggttccgtggtgttacctaggtttctgcgcctgattcgtccgatcgattttgttagcatgtggtaaacgtttggtcatggtctgatttagattagagtcgaataggatgatctcgatctagctcttgggattaatatgcatgtgtcaccaatctgttccgtggttaagatgatgaatctatgcttagttaatgggtgtagataaatatatgctgctgttcctcaatgatgccgtagcttttaccngacgcagca

SEQ ID NO: 7022 - DNA, 2903 bp, Setaria italica
  misc_feature (2866)..(2903): n is a, c, g, or t
  Peptide Sequence Number=SeqID_72996
tagcgtgagtgggagttgggaggcagagccggccagtggggggcgccgggaggtgggggtgtgctgccagcgaccgagagttggtggtgctgcgccggccgccgggcagggacgggtggtggtgccttctcggtgtgcggcagcggaggcggcaccggcgcagtgccagatctgcgactccgccggcggcaggccaccattcccgaggctccgcattggatcaggatctggcaatcaacaagcaaccttgtccagtttcatcagttacggccccctgctgtcttcaccttccttgtttgttgttgctttctggtgccgtcattgcctgatgatcactgctggtgacgtctctctcgcactcgtctgctgaagttgacgagcgcagaagaaaacaagagagaagcaataaagcctgcattgtggcagctcccccagttcattggcctcaattcctctgtaggtgtccgctatgtctcgcaacttggagagcccagtgcagacccagatggcagtttcagccttggaccgagctcttagcagtgagtaccccaccaagagtagaagcgaagccagggtaggaagatggaaacgtctctttgtccaaacggacactggttgtgtcctggatgttcaactggatcgtggtgacaatgtgcacactgtcaaaagaaggatgcaggtggcccttaattttcccaccgaggagagttctctggtattaggtgatcgtgtcctaaaaaatgatctcagcaccatcagaaatgattccccattgcttctcaccaagaattccatgcatcgaagctcctccacaccatgcatgtctcctacgggcaatgatctccagcagcaaagagataagggtcgttcaattgaactgctagtatgcccaagccgttgctctcgaacaaggctgcttgtgaaggatgttgctaaggctataagaaaaggtgtggatccagtacctgtcagtggcgggcttggtggtgcctactatttcaggaacagcaaaggtcagaatgctgcaattgtgaagccaaatgatgaggagccatttgctcccaaaaccctttgtggtcccgcagccaggcctcaaaagtccagttagagttggtgagacttgtattagagaagttgctgcctaccttctggactatgataactctgctaatgtccctccgacggttctcgttaggatttctcatcctgcgtttcatataaatgaaggagtcaactgtgctaacaagaatgttgttgagggtggtactcaagctgttagcaagattgcatcatttcagcagtttattcctcatgattttgatgccagtgattatggcacctcaagctttcctgtttctgctgtccataggattgctattcttgacatcaggatcttcaacactgacagacatgctggaaatctgctggtaaggaagcagactggagcaggaaaatttgggaatctgactgagcttattcctattgatcatggtctctgccttccggagtgtttggaggatccttattttgaatggatccactggcctcaggcatcagtcccattctctgaggatgagctcgagtacatagaaaatcttgatccagtgaaagatgctgacatgcttcgcatggaattgcctatgatccatgaagcatgcctgagggtactaatactctcaaccatatttctgaaagaagccacagcatttggtctgtgccttgcagagattggggagatgatgagcagggaatttactggaatggaagatcagccaagtgagctagagtttatctgtatggaggcaaggaggctagcaacagaacaagatgacaattcctcagaacatgactctggtgacgaggatttaactcaatttgaactcgatagtgaagatcatgaaataccaaaagaaccatctgcccatcagtttgacattaagcggggaaactccagaaaccaactgtctaaattggatgagggtgatgatgatgatgaagaagaagaagaagaagaagaagaggaggaggaggaagatgacattgaggaggtagaaagcgatgcaggaaagttagctagccctaagcctgttaataagtggctggctaacatttcgaagctgtcaacctcactgaagggtgtcagtctaacagacaaaacccagcgtcaactgtctgctggtcctaaggttgtggattctgtgaaaacttcaaagagcaacagcaacaacaatggctctcaactttgtaactgggggagtgcaaatgatatgctcccggcaagtgtgagcttcgtcaagctggctgacatgggacccgagatgtgggggctgttcctcgagaagttccgggagctgctgcctgaggcattccgctcacgcaagtgcagcgtgacagcgcaaagggcaaagcagagactgggcacttcttgccagttttgagttagcgcaggactagggaggtgagcacctgttcagctgctgctgtttgctgtggctttcttgcaggtgttaagctatgccgttctagaataaagccatccttcacgggattgcgatagggcttgagggattgagcgcctgatccagaggtccatgtcgtgatgatggccttgctctgtacatagttttctttttcttttcattttctagctaggcttctaccttcgagacatgagttgcttgaaggaagttgggatgcaatgtctgccccagttcttggccgcccaactcttccgctcatgatatgcattcaaaagttccattcaaataaacattaagcagaaagtttctgatgtggtaattaaacattgtgacagacctcagatgaatgttaaagctcaatttacaatcattttgttgttttgtannnnnnnnnnnnnnnnnnnnnnnnnnnnnnnnnnnnnn

SEQ ID NO: 7023 - DNA, 499 bp, Setaria italica
  Peptide Sequence Number=SeqID_72997
tgtgatggggttagattgcttctgaattctcacaactttagcagatgctcttaaattctgcttggacttgagtaaccttgtcgtgttcatggtgatacttaatcttaaatcaagatatgatagctgcttaataaactgctcaccatgttatctatttcacacagagtaaagccaaacagtaggtgctagtgtgttatattccaaattcagatccaagaaaaaaaatctggagctatgccaattttcagatcctcttttagtgcaaggaattgggatgagtgatgttggtcaacctctaatatcgccaaaattggcaacctgtgttcatacctccatcgtctctgtattcaagatcatagtaaactaaaattcgattatcaccgtctttgagaaataacatcttttaatcgctgctatcgaaaatcgagatctcatgcatccataaatctttatccctttctgcaagttttttttcccggttgtgattctgacatggttt

SEQ ID NO: 7024 - DNA, 597 bp, Setaria italica
  Peptide Sequence Number=SeqID_72998
tcctaccccgacaacgcccaatggcgtcctcgacaaccacaccactcaagaccgacggtcggtgtctcttactctttctctaggatgtcactgtgtagatctaggacatcatgttgtttatctaaatcaagtagtagacccgctagattagcacttagaagttcctgttaatgctatcagctgtttgccaagaagggctcaggtcgacattttctacctcaaggtagcatctaaaatccaagcctttatttagcatctggtgtattatgtgatgtgttaagtggagtggtttcgctatctcttacacatattgtgcatgacaggtttggaggttttactgaaaatgtttgattgaagtcgtcggtttccagcaggtagagtgtctagaatagtttctgttgtttatgtatagttgattcttctgtcagattcatgtgtactaagattatcgtggccaaacgtttcgattgtcatgattgtatatatgctataatgtaatgatagatgtgttctggttgacttgataaagtcatttgagtcaactctggtgtatttgagaaacatatttaaatggtatttgtattattagaaaaaaaa

SEQ ID NO: 7025 - DNA, 288 bp, Setaria italica
  Peptide Sequence Number=SeqID_72999
gccttccagagttccagtaatccagtcgggctctctctccccttcgacaatcgacgccgtcctcttccccgtgctccggtggtctgcatccccaccagccctgtcggccgccggccatctgtcgccgcctgtgagcacgcgaaggcggaccacccagctgccaagggtttctccccctccggaggcgaagggggagtgagaagcaccgggaggatggcgagcgtgtacatcccggtgcaggggacagaggaggaggtccgggtggcgctggaccagctcccccacgac

SEQ ID NO: 7026 - DNA, 385 bp, Setaria italica
  Peptide Sequence Number=SeqID_73000
aagacaaaagacaaaaggacaagacggcgggcagtcctcgcagcccgaccggtcaaaagcactgctggttgctgctccacaccaccctcccctcccattccccaacccccaacccaagcgaactaccccgcagccgcagccgcagccgcaagcaagctgcagttctgccccccataggcctcggacgcggcgtgtgagcgcggcgacctcgcctcccactccccggacccatggaggcgccgccggggccggagcccatggcgctggacgcgccccctgccgctggtgacgccacggcggccgcggcggcggttgcccccgccggcgacgagaagaagaaggaaggcgaagggggggacaagatgccgggccacatcatctccac

SEQ ID NO: 7027 - DNA, 877 bp, Setaria italica
  misc_feature (861)..(861): n is a, c, g, or t
  Peptide Sequence Number=SeqID_73001
aagaaccgaaagaatagaagactgctgctcatcgatcagcctcctccttcttcttccccagattcccagaagaaaagaacgaccatttccacctaccgggccggcatcaggtttttgtctgcaggaggaggatcggatcgtatcatccaacagctagctgcttgatttcatctcatcaaggtcgagcccttcctgacagcgacagatccagaaagaagaggcttttgcattgcatttggggagaagagcagaggggagagaggggggaaggaggaaggtggtggccgtcgaggtggtgacattcgctgtcgccacctttaggccctatcgcctttcctcttcctctccctcctgccctgctctgcttcgcccccaaccttcttctttctccagcaaaggtgggcctccatcgcgatggtgctcgactccttcgtcaggcgatgcacggcttctctgcacaacttcgccggccaggactcctgcgccgccctcggcgtcggggacgacgtcagggccctcctggccacgctctcgcgcatcaacgccatcgtctcccacgaggagcggaggcgcgtcctcaccgccaagcttgacgcctgggtggcgcaggtcaaggatgccatgtacgacattgacgacgtcctcgacgtctgcatcatcgaggccggaaagatcctcgccgacgaccgcccacccacgcccaaggtccgatgcttctcctgcttcaagcctgctggcccccgcaagttcagacatgaaatcggattctcgattagagatattgatctcaggctcagggaagtcgaggaggaaatgcccaggcttcctgtcggatcaacacactacgatgcaaaaaagggnttggtccagtcataat

SEQ ID NO: 7028 - DNA, 261 bp, Setaria italica
  Peptide Sequence Number=SeqID_73002
cgggcgcggcgggacgcggagcacgacggcgcgccgacttcgccggcgtcgaggagctcgtcctacgacgtgacgagcttccacaagctgagcttcgaccagcacgagatcctggaggcgctgatcgacaagaacatcgtcggccacggcggctccgggacggtgtacaagatcgagctcagcagcggcgagctggtggcggtaaagaagctgtgggtgtcggcggcgcggcggaccaagcagcagcacgacgtgcaggtg

SEQ ID NO: 7029 - DNA, 300 bp, Setaria italica
  Peptide Sequence Number=SeqID_73003
cggcgaggcgcgggacgtggtggtgacgctgcccgcggaggcgacggccagggtatgccgcgacggcgaggtgctccgccacggcggcaaggtggtgttcggagcgaaggccggaaaggaggcataggctgataggcccgatgccacgacggaacggcaagaatcccccgctgttactccacgttctgctcttcgtaccgtgccgtccatttggtttaggtcgatgttcctttttttctccatgcatgtgtgtaatggatgctgcattgctgaactaaaaaaaaaaaaaaaaaaaaaaaa

SEQ ID NO: 7030 - DNA, 264 bp, Setaria italica
  Peptide Sequence Number=SeqID_73004
ttctttctttagctctagcggtggcagcatttctctgcttcatcttctactcccctttgttcagaaggtacaggaaaggatcaaggcgtactcaggacttgcagggacatgaagaactagtttgggatgggaagaactcagagttctcggtcttcgactttgaacaggtgctggaggccacaaatcatttttcagaagaaaacaaacttggacaaggtggatttggcgctgtctacaagggccagtttgctgatggattggaga

SEQ ID NO: 7031 - DNA, 284 bp, Setaria italica
  Peptide Sequence Number=SeqID_73005
cgctctgccaacccgagttagcgctcgtcgcgtggggatggccggcgtcctgccgaggttcggcccgttcggccctctgccgccgccgccgttagatgagttcgggatcaaggagacgaggccccgtctcgctggcgggcgggccgggggttacgacctcgtggagcggatggagtacctgtacgtgcgcgtcgtcaaggcgcgggacctcaagtggaccggcgctttcgaccccttcgccgacgtgaagctcgggggctactcctgcgcgacgcggcacatcg

SEQ ID NO: 7032 - DNA, 961 bp, Setaria italica
  Peptide Sequence Number=SeqID_73006
tcaaactttattgtttttgtcatccctacaaatggctgacgatatcctatgttcacttcgaaaaagatcaaacacctctttgactctaaatctatgactacttgctttcctttacaagttccaaccaccgtaagtaggcacatgactgaactttttggtgttttggtgaagagagaaggtgtcaccactcagccggagatcacctcctgctgctcgtcgttggagtgcgaagaagacggctgtgtcgtgacggtggtggtcccggacgtcgggaacacggtggcgaactcgtcgaacgactcgatgtatccatagaacaacctgttattgttttctagatccttcggcggcgtctctggcaccggcgcagcgccttccagtatctgcaccacctgcctcatgctcggccggcaccgggggtccgggtgcgagcagagcagcccgagcttgagcaccagctcgacatcggcctcgtcgccctcgccgatctttgggtccctggcgtccatgatcctcccggccttccagtgctcgaggacgaggtcgacgagccccggcgagtcgaggtcgtcgttgcgctccatgggcctccggccgcaggccacttcgagcaggaaggcgccgaacgcgaacacgtcggtgctcgtggtggccttgcccgtcttgctcatctccggcgcgaggtacccgagcgtcccgatgacgtgcgtcgtctgcgggttgctgccgtggtcgtacagccgcgccaggccgaagtcgctgagcctgccgttcatgtcggcgtcgaggagcacgttggcggacttgatgtcgcggtgcaccaccacctgctcccacccctcgtgcaggtacagcagcccggcggcgacgtcgcggacgatcttggcgcgccgttcccagctcagcgccgccggcttgccggcgtcgaacaggtgcttgtcgaggctgccgttgaccatgt

SEQ ID NO: 7033 - DNA, 650 bp, Setaria italica
  Peptide Sequence Number=SeqID_73007
aaactaagaaaagaacactgaaggaaggtgaggatttaccagctgagaaacagatcgtgactgctgaacctgagttgaaaacggtgagttttgccggaccctttctatcgagatttccttttctttgaacaaattttgctcaggattgctttgttttttgatcaggtgaagctttctgaagatgatgaattcattgttttagcatgtgatggcatatgggactgcatgtcaagtcaagaagtggttgatttttgacataaacacttagaaactgaggataagctatctgatgtctgtgagaagttgctcaaccactgcgtggcacctacatctggtggcgaaggatgcgataacatgaccgttatcattgttcagtttaagaagccactttcttcagctgctacttctagcaccgagaagtctgcagctactgcagaagagatgcggccaaacgagctcaatggccctgacgaccccctgaagtaggatcaagtggcacaccgtgctgtggagctctaaccggtgggtgatagacataaaaaaggatagcgagtggtgtacataagaaagggattctattcgacaatctctatagggtttgttccttctttctagtgttcagagtggtcacgacctgtattacagggcgt

SEQ ID NO: 7034 - DNA, 643 bp, Setaria italica
  Peptide Sequence Number=SeqID_73008
tggcgttagacaaatttaagtcgatggtactggaagctctatcacatattcacagctgactgcgtaagatattgatggttccacggaaagctagcaccctagatagacaagcataatccctgatcttgaggctttagacctgatgttttggttattcgctttccatgctgctagccaaagataagtgtaacattaatacttcggattatctggtctcttttattgtattattgttattgacattgattcgttgatacccaatttccttttgacatggactgcatgtcaagtcaagaagtggttgattttgtacataaacacttagaaactgaggataagctatctgatgtctgtgagaagttgctcaaccactgcgtggcacctacatctggtggcgaaggatgcgataacatgaccgttatcattgttcagtttaagaagccactttcttcagctgctacttctagcaccgagaagtctgcagctactgcagaagagatgcggccaaagtaagctttccttggagcaatgcaactaataccgtacacagtcattgaattctcagtgttgtaaaatcccaaagttcctctttcagaatttgagcccttgcctttgtgaacagcgagctcaatggccctgacga

SEQ ID NO: 7035 - DNA, 1537 bp, Setaria italica
  misc_feature (1452)..(1537): n is a, c, g, or t
  Peptide Sequence Number=SeqID_73009
ctcggctcccctcctcatcctcctcgtcggcgtcgccgttgtctcgcgccaccgccggcgctccctccatcctcggtgctgcccgggtcgggacacgggagcagcagatgggggtgtacctcagcacgcccaagaccgacaaggcctccgccgatggagagaacgaccgcgtccgctttggcctctcctccatgcaggggtggcggaccaccatggaggacgcgcacgctgctttgccagaccttgatgactgcacttccttttttggtgtttatgatggccatggaggaaaagctgtatctaaattctgcgcaaggcatttgcataaacaagttctcataaatgaagcaaactcatcgggtgatctacccgcttctgtctataaagctttcttaagaatggatgagatgatgaaaggtcagagggggtggagagaattgactgagctgggtgataaggggaacaagatttcgggtatgctagagggcataatatggtctcccaagggtggagatgcagaagatctagggggcggatggggcactgaggagggtccaaattcaaattttcctggaccaacatctggaagcacagcttgtgtggctgtcataagaaatgatcaactcattgttgcaaatgctggggattcccggtgtgttatctcacggaagggtcaggcttacaatttgtcaacagatcacaagccagatcttgagggagaaaaggagaggattttgaatgccggtggatttgttgttgctgggcgggtcaatggaagtttgaacttgtcaagggcaataggtgacatggaactgaagcaaaatgaggttttaccagctgagaaacagatcgtgactgctgaacctgagttgaaaacggtgaagctttctgaagatgatgaattcattgttttagcatgtgatggcatatgggactgcatgtcaagtcaagaagtggttgattttgtacataaacacttagaaactgaggataagctatctgatgtctgtgagaagttgctcaaccactgcgtggcacctacatctggtggcgaaggatgcgataacatgaccgttatcattgttcagtttaagaagccactttcttcagctgctacttctagcaccgagaagtctgcagctactgcagaagagatgcggccaaaaatttgagcccttgcctttgtgcgagctcaatggccctgacgaccccctgaagtaggatcaagtggcacaccgtgctgtggagctctaaccggtgggtgatagacataaaaaaggatagcgagtggtgtacataagaaagggattctattcgacaatctctatagggtttgttccttctttctagtgttcagagtggtcgcaacctgtaatacatggcgtgttgtttcttaaaccgggttttgtggaatgcatggatgagttgtcaggagataaaaaaaaaaaaaannnnnnnnnnnnnnnnnnnnnnnnnnnnnnnnnnnnnnnnnnnnnnnnnnnnnnnnnnnnnnnnnnnnnnnnnnnnnnnnnnnnnn

SEQ ID NO: 7036 - DNA, 1436 bp, Setaria italica
  misc_feature (1413)..(1436): n is a, c, g, or t
  Peptide Sequence Number=SeqID_73010
ttttgttttccccccgttttatttttctttaccccgttcgggtttaccgtattcggtagtctattggtcgttccgtcggtcggttggttggtacgccggcgacgcgccggagcccacggtgcagaacctcctcgaccaggacaccctcaagtgggtcttcgtcggcggcaagggcggcgtcggcaagaccacctgcagctccatcctctccgtcctcctcgcctccgtccgccagtccgtgctcgtcatctccaccgaccccgcgcacaacctgagcgacgccttccagcagcgcttcaccaaattccccaccctcgtccgcggattcaccaacctctacgccatggaaattgatccaaaggtagaaaatgatgatttatccaatgaaggaatggagggattcctttcagaactgacaaatgcgattcctggagtagatgaagctatgagttttgctgaaatgctaaaattagtccaaacaatggattactctgttgtagtttttgatactgctcctaccgggcatactttacggctcctgcagttcccagcaaccctagaaaagggtcttgagaaaatgatggagttgaaaaatagatttggcggtctgttgaatcaggccagtcgattgtttggtcttggtgatgaactgaacgaggatgcaatgcttgggagactcgagggcatgaaggacgtgattgagcaagtgaacaggcaatttaaagatccggacttgacaactttcgtatgtgtttgtatccctgaatttctttcattatatgaaacagagagattggtgcaagaattggcaaagtttgagattgattcgcataatattattatcaaccaagttatctttgatgaggaacctgttgagtcaaaactgctaaaagcacgggtaaaaatgcaacagaaatacattgatcagttccatatgttatatgatgacttcaacatcaccaagctgcccttactttcagaagaggtttgtggtgttcaagctctgcaaaacttttcccagcacttccttacaccatacaagtctgctataaaaaggggcactgtcgaggagctggaacagagaatatcgatactgaaatctgcactgcaagaagctgagtccgaattagatagggttaggaaagggaagcagtcagcgtgatcctttctttttcacaagtcaaggtgtgtaaaacctgacagaagctatgaagaaaacagaattagagacgctcaaatttttcgtgtcattacacacttgttgatttcagtttcatgtttcctcaaatgaaatgtttagatttgtaatagcttgttttcaaaaaatgatctgtaatagctatcggcagagaagtgtatgattagcacgagatatataaacattctttcgccgctgtcaggcatctgaggatnnnnnnnnnnnnnnnnnnnnnnnn

SEQ ID NO: 7037 - DNA, 282 bp, Setaria italica
  Peptide Sequence Number=SeqID_73011
gggagagagagtccactctcgaggtgaacaagtcgcagcggtcgaaactccaaagggagagagagtgatcacccgatcagcgagcggaggatgagggttcgggacggcgacggcggcggcgaggtgaccgcgccgccgcagcacctcgtgttcgcctactacatcaccggccacggcttcggccacgccacccgcgccctcgaggtcgtgaggcacctcgtcgccgcggggcacgacgtgcacgtggtcaccgccgcgccggagttcgtcttcaccaccgag

SEQ ID NO: 7038 - DNA, 523 bp, Setaria italica
  Peptide Sequence Number=SeqID_73012
gtcaacagggccacgccgccggcctcggcgatggccttggtgacggactggtgagtggcggcgagggtgcgcagctcccggagcgcggcaatgcgggcctggcccttgagcggctgcctcctgggcacggccgtgccccggaggccgtggacgaggtcggcggcgcggccgtggaagtcggcggagcgcttcttgaacctggtgtagcggcgcgagaaccaggcggcgatgagctggcggagcgtggcgttgggtgtgagcgcgtcgtcccagagctcctgcatcgtggtcgggcaggtccggtggcccagcgcgagccaccgcgagatgttggcccgctcgtacgtctgccccgtgcagagcgtcaccggatccaccatgggctcgagcgagatcgggcagatgaagaccgccggcaccgcctcgtccccgccgccatccccggccgcgtcgagctcgtccatcatcttcctcagctcgaccggctgcttcccggcgtcccccggcccgcagtccccgggct

SEQ ID NO: 7039 - DNA, 580 bp, Setaria italica
  Peptide Sequence Number=SeqID_73013
aactaccaagacttaatagttagctcctgaagtgctcagcagaaaaggctatgatggtgcaaaggcagatatatggtcatgtggagtaattctatttgtgcttgtggcgggttaccttcctttccatgacacaaatttgatagagatgtacagaaagatttccagagcagactttagatgccctcggggtttttctactgagctgaaggatctgctacatagaattcttgatccagatccaagcactagaatttctatctcaaggataaagaggagtgcttggtacagaaaaccatttgaagtcaacgcaaagaaaaatgagactgaaacaaccgaaaatgcctgtacaggtgaagctacaacctctggctcgacagaatgcagcacatctgagggaaatcaaggttcattaagtctcccaaacttgaatgcatttgacatcatctctctctcaacaggtttttaatctctctggattttttgaggataagtatcgcagggaagaaagatttacaaccaggcagcctgtaatgacagtattagcaaagctgaaggagctttccaaacgcttaaagctaaa

SEQ ID NO: 7040 - DNA, 365 bp, Setaria italica
  Peptide Sequence Number=SeqID_73014
cccatgggatctcctcagggttcctgatgccaaagacggtgaccggcttctcgctgaagagaagggtcttggtgtccttgatcttgatgtggtccttcttgaaaacatgtttttgcttgttagctcctctgaacactaggtacccaattaatgaagatgcaaaagttagctagaccagccaaaggtgacagcttcacttcatttctcaaaagccaccaaccctgaatagtgaaggtgaaaggaatgaaaactagatcaccaaacaccagcatgacctcaacgtgggacattattgctgaaaggttgggtttcatgctggtgtcatgaattcttcatgctggtgtcatagattacttcgtccatga

SEQ ID NO: 7041 - DNA, 901 bp, Setaria italica
  Peptide Sequence Number=SeqID_73015
tcgtacgcgactttgggaggttttccccatataggagctttggggtccttcttgaaaacatgtttttgcttgttagctcctctgaacactaggtacccaataatgaagatgcaaaagttagctagaccagccaaaggtgacagcttcacttcatttctcaaaagccaccaaccctgaatagtgaaggtgaaaggaatgaaaactagatcaccaaacaccagcatgaaacccaacctttcagcaataatgtcccacgttgaggtcatgaattcttcatggacgaagtaatctataatataccacgcacaaaagaattggtagagaatgactgaaagattgacggaaccagctaggtagctctttgcaagcaaagagaggttgataaataaccatcccatcattcctgccctcacgaagaagaatttgaggtcaactcccataaaatgaggattaagctgcactcccaaccaccaatcttgtatgaagctcccactaacatgtggcctcaaagaagaacttttgtggcgggacttggtgccggcaaagtagagtgcaaaagtgacaataacactaaaaatgaaggtcgctgatagaagctcaagtcccctgtcagccacaaccgtgggagacatccaacccatgtaggaaccgaacgccaagaggcccagtagcagcaggagcgagagtaaaccattgcagcggtagtggaggcgggaggaatcctggaggacggcgccggcgacgagcttcccggggaggatggctccggcggcggcgaggtagccgaggtaggcgaatagcaccaccaccgcgctaccggagggcaccagcgcggggaggacggcggcggcggcggcggtggcggcctccattctccgcctgtatcagcggcgtggacttg

SEQ ID NO: 7042 - DNA, 323 bp, Setaria italica
  Peptide Sequence Number=SeqID_73016
cgttggccatgaactgcggcagcagcagcgcgtccccgtgccgcggcggcgggacgtcgcgccggaaccggtcgcggaacgccggccacccgcggaagtcgtcgacgcagaggatcgccggggacagcgagaggttccgcgacacggccgccatgtgcagcgccgacgcgcccaggaacgcgcccagctccacgatcacctcggggcgcaccgcctcgatgagctccgcgaacacggcgcccgtcgagccccacccgcgcgggcgcgccctcgccgggtgcagcagcgccgcggtgtgcggcgccgggaaccctgcgtagggg

SEQ ID NO: 7043 - DNA, 1234 bp, Setaria italica
  Peptide Sequence Number=SeqID_73017
ttttttttgactactgcaaacataatagccatcttattgtacactatcagcaaaaaaactgagacaggagcaatgtacaaagcttcttaatcattatggctgcaagctataatgagtaccaatttgagcaggggcttctttttctctcccctagacagaactgaagacgtgatcgatacagattacagaagcaacggtccattttcttcatcgatacaaaaattaccttttcaatggatttacaaataaagagacaaaaattagttcttggtataacacctgaactagctcccttctatctcaactcgacattcaatttatccttcacagcttccctgacattcaactgcaggttgttaatctcctcatctgtgagtgaacgttccattgacctataggctattctgtagcaatgacttgtcatgcctttcttgttggtgaaattatcaatgagctttacctcctctacaagatctccagcaattcctctgacaacttcacataagttgttctccgtaaatgcatcattgatccagaaactcatatccttgtaacatggtggaaactttgaaaatgccttgaacttgacaccaagcttgccttctgagaactgggacgtgaaccgtttatcatttgaccagaagagccgtatatctggaatgtcaaaaaggaccattgcaaggcgttctaatcccagtccaaaggcccatgccacatggtctgtcctgccatttcttttcaaaatttcctgctcggtgactccacatcccaaaacttccaaccaatcatcctgaaaatatatttcaagctcaaaggatgggttggtgaatgggaagtaagtatcaacccatcgcatctggacatcaccaaaaagatgtctagccaggccttccagcgttttcttgaggtctgcagctgcatatgctgtcccgtccatgtcagaacctaaccagtcatctggagaaaagacacggaagccttccatctgatggaagactggatagtgagttgaatcaatagaatccctacgataaacatccccagttacaagaaagtgtgtatgtccatcccttagaagctctgcttgatgagcactggtgtggcacctcaagacagtttgactgtcaacatagtatgtgtcattgtaactcctgcttacatggtcagcagggaccaacacatcatcaaagttctgcttgacagagacaagagggcaaaggtcatcaaacttgta

SEQ ID NO: 7044 - DNA, 245 bp, Setaria italica
  Peptide Sequence Number=SeqID_73018
tttttattaaagaattatctatctccacagttcaaggtacatgaactgcgtttgagttgattaactaactataattaacagatattagacatctatttctaaccttcctgctgccaggatgtcataccccacatggctcaggaatatggattcgaatatgagctcatcacgtataaatggccaacatggttacacaagcagaaagagaagcaaagaattatatgggcatataagatattatttcg

SEQ ID NO: 7045 - DNA, 468 bp, Setaria italica
  Peptide Sequence Number=SeqID_73019
ggaatagctgcccagaatggccaattatcatggtagaaaacttgatgtacaaagtacattcgacaggcatcgtcttactaagtgtttccactgatgactactacaaaattctcaggcgttttctctgccaggttgctgttggctttagactggcagctgccaataaattttacatcacatgaacatctcaaatatgtgaattgttgactattacagtgtatgcagcagaccagttcttcaccccagctgacttccatgttaacctatgctgacaggatagccgtaccggacacaacatccccaccatttgattgggttgaaggtgcggaaacaattagtgaaaccaaatacctgaattgaggtgcatgtctgatggtgacaaacttcaggcgtcagggattccaggtctagtgtgttgacgaatttgtatgatatggtacctgcgtttaattagcccttccgcggcta

SEQ ID NO: 7046 - DNA, 1526 bp, Setaria italica
  Peptide Sequence Number=SeqID_73020
ccccaccttctacgcatactctggaaacagattcagccgagcatgaggattgtactaaatcctattagttccctcgcagatcttcctttgaagaacttctacagatttgttcttccatcgatggatgattttagcagtacagactattctgtacatggacctaaagctttcttcgcaaatatgccactttcaaaaacacttacaatgaacatagatgttccagaaccatggcttgttgaaccagttgttgccatccatgatttagacaacattcttttagagaatctcggtgatgttagaactttgcaggcagtatttgaacttgaagctctcctcttgacaggtcactgcatggaaaaagaccgagaccctccccgtggtctgcagtttatccttggtacaaaacaaagaccacacttggtagacacacttgtcatggccaacttgggttactggcagatgaaagtctcccctggtgtgtggtacctacaattggctcctggccgtagtgctgatctatatgagctacctccaaaactcattgccattgatagcttgagaggcaaactaatgcacattgaagtgcaaaagaagaaaggaaaggagcgtgaggagttactaaatgctgccgatgaccaccactttcaggaaaagatggataacaaaggctggaataacaaccttctgaaatgggcttctagtctcattaatggtgatgcatcatcaaaaaataaagctgataaaatcaccgaccgtaaggatgcaagacaaggggagaccataaacattttctctgttgcttctgggcatctgtatgagcgtttcctcaaaataatgattttgagtgttctaaagaagacgcagaggccagtgaagttttggttcataaagaattatctatctccacagttcaaggatgtcataccccacatggctcaggaatatggattcgaatatgagctcatcacgtataaatggccaacatggttacacaagcagaaagagaagcaaagaattatatgggcatataagatattatttctggatgtcatatttccactttcactgaggaaggtgattttcgttgatgccgatcaaattgtgagagcagacatgggagaactatatgacatgaacctgaagggtcgcccgcttgcatatactccattctgcgataacaacaaggatatggatggctatcgattttggaagcaaggtttttggaaagatcatctgcgaggtagaccataccatatcagtgcgctttatgttgtcgatttggccaaatttcgacaaactgctgctggggatactctacgtgtcatctatgaacaactcagcaaggaccccaacagtctctccaatcttgatcaggatctcccaaattatgctcaacataccgtgcctatattctctcttcctcaagaatggctttggtgtgaatcttggtgtggaaacgccacaaaggcaagagcaaagaccattgatctgtgcaacaatccaatgacaaaggagccaaagcttca

SEQ ID NO: 7047 - DNA, 934 bp, Setaria italica
  Peptide Sequence Number=SeqID_73021
aacaaacaataagaaaacaaataactaacaaaaataaatagtagaaattagttagaactattacagtgtatgcagcagaccagttcttcaccccagctgacttccatgttaacctatgctgacaggatagccgtaccggacacaacatccccaccatttgattgggttgaaggtgcggaaacaattagtgaaaccaaatacctgaattgaggtgcatgtctgatggtgacaaacttcaggcgtcagggattccaggtctagtgtgttgacgaatttgtatgatatggtacctgcgtttaattagcccttccgcggctatatcctgaactgctgaggcatcagaccttcagtcagtacgatcaagcccgggaaacagctggcaatcatagctcgtctttcacattctgatcagtgtctttatcatccggttttggtgtctcagatggtggggaagtggcttccggagactcgagattatcccccaagattcgtgcagtaaagtgccgtgcttcactgtcaagaccaacccactctggaactattcttctagcaccctgaagctttggctcctttgtcattggattgttgcacagatcaatggtctttgctcttgcctttgtggcgtttccacaccaagattcacaccaaagccattcttgaggaagagagaatataggcacggtatgttgagcataatttgggagatcctgatcaagattggagagactgttggggtccttgctgagttgttcatagatgacacgtagagtatccccagcagcagtttgtcgaaatttggccaaatcgacaacataaagcgcactgatatggtatggtctacctcgcagatgatctttccaaaaaccttgcttccaaaatcgatagccatccatatccttgttgttatcgcagaatggagtatatgcaagcgggc

SEQ ID NO: 7048 - DNA, 426 bp, Setaria italica
  Peptide Sequence Number=SeqID_73022
cctagcgccgagcacctggcaatggcggcttccgccccctcccgccacctcccagatgcgcccaagccgccgcctttctcactagagccccccacccaccgcccgccgcgtcccccgctcccacgaactcccccgcctacccaccccaaccctcgctcgcccgccgaacgcatctcgcgctctgctccccggttcttggcgccgccgtttcttgggccggtggatgcgtccccgaccccatccgtgccgcgaatccaggccgtcaggatccaggccgtgagcaatggcggcgccggtggcgccgccgctgtgcacctggctcgtcgccgcctgcctctccgcggcctgcggctctggcgagaaggagaagcatcgaaggcaccgcggcggcggcgttggcgtcgggggtctgttcggcacgcgccg

SEQ ID NO: 7049 - DNA, 588 bp, Setaria italica
  misc_feature (587)..(587): n is a, c, g, or t
  Peptide Sequence Number=SeqID_73023
tttgttcctttggttgtcccgtctttgtcttgtctaaagtcgttgtattggactttgccatagagaatgttgccggactccttggagtgtggccctgtagagagccaaaaggcgacctaacaaatgaggctgttgaaggagagatgctgtggaagtgatgcaagggtcgcccaggagtgccctggttggaaccagcatctgaatcgccagcaacatcaccgaaattgacatcaacagtcattctggggcccagcctggaaatagaacttccatccgttgcgttttctgatggctgaggcatagcaacgcgcaacgaggcatgcatgctacgccttcggatttcctcttcagcatttaaaacctgcttcagcatctgcacaagatcatgctttttcttatttaggatgtccagcttttcattcaactctctcttcttttcatcgatttgatcaggataactcacctcctcctggttagcgtcaacgccctcactttcaccttgcccttcttcagcatcaaccaattagaccaatacaacctaacaaacgaactaatactaccccggacaatacgttacaatatacaana

SEQ ID NO: 7050 - DNA, 308 bp, Setaria italica
  Peptide Sequence Number=SeqID_73024
gaccctgccctcgaggcaggaagcctcctccagcctcgtcgacccgagcccaagcccctcggagaggagccccagcagggcgcgccccacggcggtggcgtgcgcgtcccactcgagcagctcttcgcggcagacggccgggatgcgcgccgggtcagcccgctggggcccgaacgcgatctggacggtgtcgcgccagctcgcggcggaggtccggaacagatcgacgttggagaagtacgagaccccgccggccatggagcggccgtagtgcgcggagcgctcggcggccgggagctcgttgaagg

SEQ ID NO: 7051 - DNA, 1219 bp, Setaria italica
  Peptide Sequence Number=SeqID_73025
tctccgactcagtgtgagtagtagcagcatttacagaatgatctttatttactgttaagttatcttctgattttgaagtctcactcttgcagttttctacaatctacactctaggcacttagtgccaaaatcaagtgacatggacaaaagtagatatggatttgcaacaagattatttaatgaccattcaaacagcttacttgtagagaaccaaaaggcgacctaacaaaagaggctgttgaaggagaaatgctgtggaagtgatgcaagggttgcccaggagtgccctggttggaaccagcatctgagtcgccagtaagatcgccgaaattgacatcaacagtcattctgggctcagcttggaaacaaaacttccatcttttgccttttttgatggctgatgcatggcaacgcgcaatgaggcctgcatgctacgcctttggatttcttcttcagcatttaaaacctgcttcaacatccccacggccgggatgcgcgctgggtcaagccgctggggcccgaacggtgttgcgctagctcgcggcggaggtccggaacagatcgacgtcggagaagtacgggatcccgccggccatggagtggccgtagctcggcggccgggagctcattgaaggcgcccacggcggcgagcgcctgcgcggggtagtcctctgggacggcgagggcctgttggtggctgacgaggtggaagaagccccagctgcgggcggcttcggcggtggcggtggcggcggcgacgggcgcggggagggagaggtcgacgacagggatggagacgcccggggacaagaggaaggaacagcccgggggacggtggatgcggcgccaggggaccagcgcggcggtccacatcggccggctgttcggtcttggcggctctagccgccggcgggatggatcacatgagacgacgccggagcccgtcggctcctccgcatcgcgcctggatgaagccctccacagtgactgccaccaggatctccacgtccgtgccgagtccggagcacgcaaccctcgtcgattcacgtgatcggatcggaaaaggggaggaccggaggagaaaggggatcaggagattacctgggggcgaggtactcgaggatggcggcagtggaggcggcgcgagcaccaacccgcatccgcgatgctcgcccgagcctgcgccccagcctcgccggccgccgggcgcggagaggac

SEQ ID NO: 7052 - DNA, 1214 bp, Setaria italica
  misc_feature (1)..(60): n is a, c, g, or t
  misc_feature (67)..(67): n is a, c, g, or t
  Peptide Sequence Number=SeqID_73026
nnnnnnnnnnnnnnnnnnnnnnnnnnnnnnnnnnnnnnnnnnnnnnnnnnnnnnnnnnnngcaacgnaacccaattagacaatcagcagttcatgatccaacggggattacctaagagatggtactaacacttaaatattgtaggagtattacagttacctagcactgtccggaagattggcgacctgatgacatcctaatgtttacataactaagagatattacatgttaataacagtccacagcgcaacattaccttattccaagggtcgctaagagattctgacgagctgtcaataaataacgacccatacaagggcggtacaagttgtacaactatgcacaaagcatggaagctaagtagagctggggggacgagggtccctgaacactgatgaagaaccacctgatgcagcgggggaaggcgatgaggctacatagttcccacctggcaatgatgctgagtgcaggccaggatgttgtccttggtgcccgcttgctgcaaagcgtgatggacttgccatagagaatgttgccggactccttggagtgtggccctgtagagagccaaaaggcgacctaacaaatgaggctgttgaaggagagatgctgtggaagtgatgcaagggtcgcccaggagtgccctggttggaaccagcatctgaatcgccagcaacatcaccgaaattgacatcaacagtcattctggggcccagcctggaaatagaacttccatccgttgcgttttctgatggctgaggcatagcaacgcgcaacgaggcatgcatgctacgccttcggatttcctcttcagcatttaaaacctgcttcagcatctgcacaagatcatgctttttcttatttaggatgtccagcttttcattcaactctctcttcttttcatcgatttgatcaggataactcacctcctcctggttagcgtcaacgccctcactttcaccttgcccttcttcagcatcaccattgccatcacctacaacgactatctccccggcatcgttcatgtcagcatcctccacagccccctcctcctgctccacctcttccgccagtgcctgctgctgctgctgctgctcttcctccccagcccccctcttccgcctgctgctgctgttccccctccccatcctgatgttgctgctgcggctgctgtcccactagttcctccagccgatccgcttcctcttcacccc

SEQ ID NO: 7053 - DNA, 362 bp, Setaria italica
  Peptide Sequence Number=SeqID_73027
cgcatcaattttctattgtcaatgttgatctgtttgtggttttcgtagctgtcagcagttgatgcttttaggctgcttcacacagttcagtgagataatttgatcatgaacaggaactcaagatgacagtaacataacagagcattcaaactcagaaatcactgtaaccaaaccaaaagccaaaaaaagaaacaacccatcatcccttcatcagcgttgctccaaccccatatcaacatcatgaagttgacttgcgccacttcgcgttcggcgtcgctgaggcggcgctgtccttcttccccttggccggcgtccggcgttccatgccgctctccgagtcgtcgaccctcgcgacgtcggcg

SEQ ID NO: 7054 - DNA, 366 bp, Setaria italica
  Peptide Sequence Number=SeqID_73028
agtcaacttcatgatgttgatatggggttggaacaacccatcatcccttcatcagcgttgctccaaccccatatcaacatcatgaagttgacttgcgccacttcgcgttcggcgtcgctgaggcggcgctgtccttcttccccttggccggcgtccggcgttccatgccgctctccgagtcgtcgaccctcgcgacgtcggcgcccatgccgccgccgaaccagaacgcgctccacctgaagaagccgccgccgccgccgccgcgccgcctcctgtccgagcttagcctgtccacctgggcctgcagcgcgttgcactgcacctggagcctggcgacgtcctcgcggaggcggcgcacctcctggt

SEQ ID NO: 7055 - DNA, 436 bp, Setaria italica
  Peptide Sequence Number=SeqID_73029
ttaggtacttacggtacccgtacttagtacttagggttgggttcccttcgtccgtcggttcgttcttacgtagtccagtcactgttcgtggtcaacaagacgcacgagccgctgctcaatggggactgctgacgatcaggcccggcaatgggcttacatacatgatatatatagatattatattggccaaggtaattagagagggttgttgtaaaatagttccagtgtggaacttgttggatgtacaaattgttgatgggcttttaagggcagtattctttgtttctttttttttccccatgtgaagggcttctttttttaagagggctactagtacaaaatagaaaattaagttaaaaggaactaaattaaattaaagttaaagaaccaaataagtaaaaagaaaaaatttaagtaaaactaaaataaacaaaaa

SEQ ID NO: 7056 - DNA, 829 bp, Setaria italica
  Peptide Sequence Number=SeqID_73030
gccgtgcgtgccccaccgccctggaaatcgaaatatctccctgcacttttccgtgcgcttttccttctggccaacaggaaaacctgagccttttacctcccccgctttcccctccccctcgcccgtcgtcgcctccctgccaagaacagagcgaggaagctcctcggaatccatccgtccgtccagccatggcaacaaagctgatgcagaagtttgtggactcgtgcgacgacggcggcgacgccggccagcaggacgccggctgcgtgcgcgccgtgctggccgagctcgtcctcacctttctcttcgtcttcaccgtcgtctccgccgccatggccgccggatctggtgtgaaggcaggcgaggccatgccgatggctgcgctggcggcggtggcgatcacgaacgcgctcgcggcgggggtgctggtgacggcggggttccacgtctccggcggacacctgaacccggcggtgacggtggcgatgatggtgcgggggccacctctccaagctccggaccgtgctgtacgtcgccgcgcagctgctggcatcctccctcgcctgcatcctcctccgctacctcaccggcggcatggtgaccccggtgcacgccctgggcgcgggcatccggccgatgcagggcctggtgatggaggtgatcctcaccttctccctcctgttcgtcacctacgccatgatcctggacccgcggagccaggtccgcaccatcggcccgctgctgacggggctcatcgtcggcgccaacagcctcgccggcggcaacttcaccggcgcgtccatgaacccggcccggtccttcgggccgg

SEQ ID NO: 7057 - DNA, 1082 bp, Setaria italica
  misc_feature (1031)..(1082): n is a, c, g, or t
  Peptide Sequence Number=SeqID_73031
aactactttccttaactatcctttttgtctcttttagtatgataggtggaaacaaagaattcgatcctcaccaaaaaagagaataaaagacttgagtgaagtcaccaatattttttaacacccctttttcttaagaactaaaatgaaacattgaagacaccaatctgacctgccacaggaatataatgtagggattctttttgtcagggagcaagaaagctacagaatgatattaaaagaaaaactgacacgtagaacgtggaaaatggcttggatcaacattatttcagaatgctaaccaaagcattctccaaatgcgcaatgcatggtgaccccggtgcacgccctgggcgcgggcatccggccgatgcagggcctggtgatggaggtgatcctcaccttctccctcctgttcgtcacctacgccatgatcctggacccgcggagccaggtccgcaccatcggcccgctgctgacggggctcatcgtcggcgccaacagcctcgccggcggcaacttcaccggcgcgtccatgaacccggcccggtccttcgggccggccctggccaccggggactggacccaccactgggtctactggctcggcccgctgctgggtgggtccctcgccgcggtcgtctacgagtcactgttcgtggtcaacaagacgcacgagccgctgctcaatggggactgctgacgatcaggcccggcaatgggcttacatacatgatatatatagatattatattggccaaggtaattagagagggttgttgtaaaatagttccagtgtggaacttgttggatgtacaaattgttgatgggcttttaagggcagtattctttgtttcttttttttctccatgtgaagggcttcttttttaagagggctctgtcaaatgaattgttaaggctattattagttagccatgtaaagaaaatttgtactatcaacttgttggatgcaagggatttttctagttaaattgtatacgaaggtacttctgtttttgagtaagaaatttggnnnnnnnnnnnnnnnnnnnnnnnnnnnnnnnnnnnnnnnnnnnnnnnnnnnn

SEQ ID NO: 7058 - DNA, 255 bp, Setaria italica
  Peptide Sequence Number=SeqID_73032
ttttttgtaattctgaatgtggattccattgattcctctcagttccccatgatacaaaagcaactagttacagtgcctcgcgagaaggcgcgaaaatagaagccttcccagcagccgaggcctaatggtgatggtactcaaacaacagcagcagcagcagcagcaaggaacaaaaaataagataaaacaaaaggattgggacgaatgggaaacgctagcaggttctatgaacgacgctcttcttctcctaacaag

SEQ ID NO: 7059 - DNA, 166 bp, Setaria italica
  Peptide Sequence Number=SeqID_73033
atgcatggtcagtagcatgactactctctctcacacacacacatcccgcaacgcctgcgcgtgcgatctattaaaaaaacgttcagcggcagacagcgcgccactttgatttttgatgcaaaccaatacattatattagctgcacaaggcacacaggggataggga

SEQ ID NO: 7060 - DNA, 498 bp, Setaria italica
  Peptide Sequence Number=SeqID_73034
ccatgaatacccatttgtttcaccaatctgagttgtatcatcttgttggcagggtgagccactaagattatcccgtgaagtaattgatccatctgcaacacataatgaaaggttacaaataaggacacagacaataacaggaaaaatacacagatgaatgatgaatccaatttgtttaacatccaactttcatgcaagaacacaaacaacttcaaataaggacttactttgacttaggaaaagaaaagaaaaactaaggttacaacacaaataattttttgtcaaaaacagtgcaatctctcatcaatctccccaaccaatggaactaagatggtggagcttaccacacagtgagattgatatcccttccaaaatcgagttccttcgcctaaaaactcgaatcacatgccacattcacatcaattgagtggataccgctagcctcctctagagtctagaaccataagttcataatagactggtaacatttgttgatca

SEQ ID NO: 7061 - DNA, 1856 bp, Setaria italica
  Peptide Sequence Number=SeqID_73035
tttttatgacgacgccgacaaagcttccattctttttcccatttcatttacacaatgatacagtcaaaactttttgattctggcaacatgggctgctggggcacatggccggtacaattaggaggcttaatcacaatcgacaataataatttactaagaggaggctatggcaaacaacatatctaattagggacacaaggaatggggtttggttttgaaggagaggacctaaatggcttctactatccttacattcatctgctgtgtatggtacaaaacatacactggtatggctggttggctatgagagctcctgtatgtacaccatggggctcagggttcctggctgttcacccggtggtgaagctccagcatctcctggtggttggggtccaccgatagggctgcacggcagtcccggagggcgctcgagatgtcgccgatgtgctcgtggaaggccgcgcgcaagtggagcaggttcaggtccgccttgaaggcgattgccttggttagctctgcgatggcctctttctccttgtggttgtccatcagcacagcagcacggtatctgtaggggtagactcgtagagggtcaagtttggtgaccatctgcaagtccgcctttgtcagctcccggtcgcagtactctgatctcttctcgtatgctgatgcattgttcctggccttctctattagctttgtcatttcatcatatgcacctgttctgttgttccgaaggaaatgaacccttgcaaggccttgatgtgctcttgtgtggccaatctttagggcgttaatgtagcattcagctgccaggtctagcttcccacaatccacataaacacttccgaggttgttcagagcctgacccttccgaagtctatctgagggacaccgcaatgcatcttctagaagtgatacaactgttgctgaggtcgaaggatcaagacttgaatcagccagagcataggcttttagaaaaaatgcctcaaatgacctttgtattgcgatggatgcttccgctttctgcaacccttcctcgcagtggccagtatcatacaatatccatccttcatagacaagcctttcatgatcgcttgcagcatgctcacgagcaagttgcaaactcctcattgcagcctcaggacagtttaatctgagaagaagcaaagattgcctaaagtacaaaactcctttggcagtatctgactccagcatttgatatataacagagagtgatcctatatcatccacagatgaccaccgatcatagagctgcatccaacagtcagcagttgtccactgctctacattctccagcacaagcatacgcaactgcttggcagccacccggccgccaatcatacgatattctggggcaagcgtgaggattgcctgcacatcacatagcgcagctctataatcctcaagagcaaggtagcaacagaaccttagttctaagcattccagcacaagcttgaatcccaggatccggttgatctccatcaatgcagcttcaacactctgccttttcatcaaagatgcagctcggaacatatagggatatgtcagagtagggtccaactcagtagccttgttaagattttctaacttgctatcaccatccaaatatagtgctctctcttgatacatccatccaagaggccaccgagatgacatcacagagtctagcaacttgagagcaaaatgcttattacccctcagagaggccaatctagccaaacccactaccgaatagaaatggccagcagaaaatgcagcattgaacaggcgctcagcttcagcataatctttccttagaaattttgtgcatgcaagctgatgtaaggccaact

SEQ ID NO: 7062 - DNA, 2447 bp, Setaria italica
  Peptide Sequence Number=SeqID_73036
aaagtaaggcactttaactcatcccctttaatatacacatagaacatgtctagtctcgccaggcttctcaaacaaccaaaacccaactgttggacgaaaggcacaatcgtcaagagaaagatggcgaatggagtctccattcccactcgacaaaattgagcatgggaacttgtacttctttgcaacgaaatgttcagccagagcaaggttgagttcctcaatgcctggtgttatagccttctcgagccaactgtcgagaaaacgatggtacctcctattgtaatttggtgcacccaaaagcttgagtgtcttcacaccagtgcctaagtgattcttcataatgcggtcaacttttctggtaaaatctcttgctatttcatcctttccacgagcattttcagtcaatcccaatgtttgattactgaaagtgatgttggggaagctcctccaggaatatagaaagccacgacacacccaagctgtgcgggcagcatctcgcaatggcattaacgaatgtataagacgccagatatcctttggaaagtatggccatgaatacccatttgtttcaccaatctgagttgtatcatcttgttggcagggtgagccactaagattatcccgtgaagtaattgatccatcacacagtgagattgatatcccttccaaaatcgagttccttcgcctaaaactcgaatcacatgccacattcacatcaatttgagtggataccgctagctcctctagagtctagaaccataagttcataatagactggtaacatttgtttgatcactgaaaagcaacaacttctgtatcccttgaagttttgtcagcaacaaattaattctcgatattccacccaaaatataagttcaaagaaacattggctagcttggcttatacaaatccaagggactttctttcggcattcgacaaggggaagggagtttttttatacatggaaaacatatatagcaaacaagccttgttactacgggcttggattttgtgtgattcttactacgggcttggattttgcaccggcgcctcactagcagccccatggtgcgacgagaaatccacctccacctgaagccagaatttgccaaactggagtatccctgagaaatccaccagtaaattttgttctcctcaaatcttgacattagagattgtgttactggtctgaggacaaaccagtaaaaccaaatggtttctcaataattgcctgtacataacatgaggcagctctataatccttaagagcaaggtagcaacagaaccttagtacgagcttgaatcccaggatctggttgatctccatcaatgcagcttcaacactctgccttttcatcaaagatgcagctcggaacatatagggatatgtcagagtagggtccaactcagtagccttgttaagattttctaacttgctatcaccatccaaatatagtgctctctcttgatacatccatccaagaggccaccgagatgacatcacagagtctagcaacttgagagcaaaatgcttattacccctcagagaggccaatctagccaaacccactaccgaatagaaatggccagcagaaaatgcagcattgaacaggcgctcagcttcagcataatctttccttagaaattttgtgcatgcaagctgatgtaaggccaactgcttctgtctagaatctaatgctgactccaccagcttttccaagaaacttacagtgacatccgatgtcgggttggtactcatggagacttcactaagaaggcaatatagggagaaagatgcattgccagccattgtcaatctctgctgcttatttgcagaggagaatatcctaacaacttgctcatcattcaagcactctggaagctcattcaagagcacctgcaagcatgaagcagcaaggatggaacagcccagctcaagagcacattccatgaagtcgatagcatcttgccttgaggagacgaaagaagcaagctttcgctcacaagcatccttgaggcccttgcagcaaaatttattggcaaaatcaagcatttccaaaatagcatcagctgacaaatacggtaatcttcctgacaggctgaatttactgattgccctcatgccaataggggagatgccatttcgagacatgtcaatgacctcaagatatgattccctgaacccgccattgagcatcgcatatagcggggttgacaaagctgcaagcttccgccgatcacatgcaatcatatcatctcttatccggaaatgaaccactgctgagccccgaaattcatcagactcatcatcatagctcatgtcatgtgaccccgtggagacctgcgacacgaaatccagcagcctgaactcctgcgagcacttgccgcaggagctgaggaggtccgagatcgcttcctcccctttcttctcatacttgagccacgcc

SEQ ID NO: 7063 - DNA, 361 bp, Setaria italica
  Peptide Sequence Number=SeqID_73037
gtggtgatggtggcggtggcgatggtggcggtggcgatggtggaggtggtgatggcggaggaggatggcgtcgagcgggcggtcgaagaggcggggcggcacggcgccctcgaagtcgttgaaccggaggtcgaggaagcggagcgcggggaggtcgaggacgacgcccgggaacgggccgacgaagcggttgttgctgaggtcgagctcgtggaggaggcggaggcggcggagcgtgggcgggaggacgccgcagaagcggttggagttgaggtggagcagcgcgaggtcggcgaggaggccgagctccggcgggaggaaccccgcgatgtcgccgtggttgaggtcgaccccggccacc

SEQ ID NO: 7064 - DNA, 334 bp, Setaria italica
  Peptide Sequence Number=SeqID_73038
cccgttcgcctcttcctttcatctggctgccgttctccactcctcgagctccaaacctcgcgtaaaccccagcccccgcgtcgcggaggggaagggatttgcctccgcgggatgaagacgaggtcgcagacggcgccgaagcccctcaagatggtggcgctggcgcccaggcccggcagccccaagcggaggccgaggccgaggccgaagccggtggggaagggcgacccccgggcgcccaagaagccccccaccgccttcttctacttcatggaggattttcggaagacttacaagcaagaaaatccaagtgtaaagtcaatgcaggaaatag

SEQ ID NO: 7065 - DNA, 1250 bp, Setaria italica
  Peptide Sequence Number=SeqID_73039
aggtaaatgtgctttaggagctacagcaatggcgtcgctggtacccggggtccttctcaagctcctccagcacatgaacagcgatgtcaaggtcgcgggcgagcaccggtcatcccttcttcaggttattagcattgttccggcgcttgcagggagtgatctgttcacaaaccaggggttctacctcaaggtgtctgattcatcgcacgcgacttacgttaccctcccggatgagcagcatgatctcatattgagcgacacgatccagctggggcagttcatccatgtagaccgtttcgaggcagccactccggtgccgatcttgaggggggtcaggccagttccaggccggcatgcttgtgtcggcaatccagaagatcttgtggtgactagctcctctagttttcttggcagcaagaaggcccaaccatctgtcaacggtaacgcaaaggatgctttgtcactagagaaagagcagagcaagttagagaagataaatgcttctgtcaagaacaatgggacagaaagcaagaaaccccagctcaccaagtcaaactcttcgctctcgaaacaagcactcaatagccttacagacaagaaggacatagttagctcaaaggcaaaatgtaccactgctaggtcaacaccttcatctccgaccagcgtccattctctgcctgcatcatttgatagattctcaaatgacatgaaacagagagcaaaacaaaaggagcagagaaaccatcaccatctaggctatccttgttagaaaaggctgcttctgttttgaaggctactacagcagggagaaggtcctccataggtaattctcttagtaacaccatactgagcattgaatcaggaccaaaggccttgagaagaagctgggaagggaatgcagatgcaaaagccaaaggcaattcagattcaaagcctgccaaagctgagaagaagtctgagaaccgaagctcttcgactcccagacggaaatcagtagcagaagagaagtcattgcataaggatgacagtaagattcagactccacccagaaagagttcagcaagtgctcctgcagatgatgctgacaaagttgtgaataagcattcttcacctataaggaggacatctggggttttaagcaacccaaataccacaaatctagtgaaggttgctgcaatagcaaaaaattgacagatgctaacacttcatggacaagcactccctccatcacttgctaaaattaaggaaaa

SEQ ID NO: 7066 - DNA, 1531 bp, Setaria italica
  Peptide Sequence Number=SeqID_73040
gtatggttgtaatgcaggttctgccagggcacttctaagtgattatgttcccaatggaatgaccgacaaagcttaacttcagctctttgcagcctccatatcttgaaagcttatccactttctttttcaggaaggcaactacttccccagccaacctgctacccatttctttgaaatccccagatgttttatcttcattagcctcagacattaggcaatcagctccaggatccaatagaagccattgatttctaacgagacgtaaatccaaatggtgaccctgaaaaccatgcacaaaaatgacagctcgcaagatgcgtccactttttttaccagcactacttttggctgccaaagagtctccttgtagtttaggtagcacaatggtatccttttgttcagaagcattcagagccagatccttgccggaaccatgttgtggaacaaccatgacatgttgttctataagaacaacaggaacacgtgatggatcagcatatatatgcatatcttgaacagactgtgtattgatcttcatttgtgctatgcttttcctgtgtagttcagcccgtgaagcagagttttgtacaggatcatcatggaacttccttgaaccagaaactctaagaagcgaatgacggtgagatgagtcatcattcatactccgcaaatagcgatgagggatctcaatttttgagtgaacagtccatattgaccattctgccttcctgtcaatagcccaaacatcgtgcaagtagtccaatatctttgttttgtttgccctatgaaatttcaagaatgcattccatagaagtgaaagttgaccgctcacagttagaaacagctctaacagctcttccttgggaagagcatacagcatagaatcttctgtcccattaaccacatcattgggtctctccaaaaagtcatgtaaaattccagccaactgtccaacacccttgccagttgcagggaacactttactagaattaggcagcccggaatttgacggattaactggctcatatttgccaagattcaagtcagcaccatctaaatcatctattctcttcccaatagcatcactgattttcttcagttcttcaagcaacattttcctagatgttaataatgcctttacaatgtgatacgacacaggacctaaaccttcgtctggcacctttcaatgatggtttagttgcaccagctttcaggtacactatatgtaatgtcagatcaacaagcacagagtggaatgcatcaaagtgaactggacagtaggagtgtagacccaggagtgctctgcgtgggatccgaaattcatgcacagctgctgaagatgtgacactagaagcttgaagctcagacccattgtcaagtgttggggcatatatcagctcaaacttcaacatcctacccgaagctgctggaccctcctcttcgctgttgaatatgttgaaagacaccataaccgagagatagatatcctgtctagcatacttgatccgaaacggctgtgtgtagaagctat

SEQ ID NO: 7067 - DNA, 1240 bp, Setaria italica
  misc_feature (1)..(77): n is a, c, g, or t
  Peptide Sequence Number=SeqID_73041
nnnnnnnnnnnnnnnnnnnnnnnnnnnnnnnnnnnnnnnnnnnnnnnnnnnnnnnnnnnnnnnnnnnnnnnnnnnnntttttttttttttttttaaaaattcaaaacgtaaaacgcttatgggttcataataagctcactgattgttagcacatcctaaactgcagtgttaaatacaccaggcaacaaggattatgaattcacagcaaaggtgaccatctacagcactatgaatggaactgaaaaagaataagctatttatacaaatcgaatctagcaagctggaaaacaattgctgctaggatctttacagcggtacccgtctcggtgttggattctggtggagcatttatgctatgcaagcttaattttccttgcttggtcagtactcagtagtgtgcactattggtttggtatgtggcagtatcacagagatgagcagcagtcatcatcggaacagatcagggaaggaccacatgatgaacttggcgtagaggtcagtctccaggaactcgatgtgggctgctctgccaatcatggtgtttaggcttcgaccttggttggactggtcgaaattcacatcacagcgcatgaatatccgggtgtcggatgacggcgcacggatctgatctaagcagttgttgagcatttctgtgaagacttggcccttccttgaggtgtcagatgatgcagctgggcagagctcgattctcgcagaatgatatggtacataaccatcctgtggtgaggacagcaatatgatatttttgaagttctccaaagtttttaacttgcaaagcttataaaagtacgtattctgggggtcttgatcatcgctaaaagtcagttgatggatgcattgcgctcccttgagctttttcagcagccagagtccagaattgaacaaagaatttgaactgtaccagtaacccaagtgaggtccggatatcgacatgtaagtgtggaggtttttcaagtatggttgtaatgcaggttctgccagggcacttctaatgattatgttcccaatggaatgaccgacaaagcttaacttcagctctttgcagcctccatatcttgaaagcttatccactttctttttcaggaaggcaactacttccccagccaacctgctacccatttctttgaaatccccagatgttttatcttcattagcctcagacattaggcaatcagctccaggatccaatagaagctttctatttagtccttctagtact

SEQ ID NO: 7068 - DNA, 731 bp, Setaria italica
  misc_feature (693)..(731): n is a, c, g, or t
  Peptide Sequence Number=SeqID_73042
gtgtgattacaagaaacggagccatctccacagtgtcagaactcagaagttagcaggcaaaagaggaagagcggaagagatctagatgagctaccagaaagccccccacgaggaatcctaccctccaccagggtataatccgtctcagcaatatccgtaccctcctccctctcagggctatggccacccgccccctggtgcgtaccctccacctcagggtcagggaccgtaccctccaccggggtaccaaggctacttcaacgaccagcagcacccttactacccgccgccgcagcagcagccgccgccttatgggggatatcaacaccaggaacaggaggatagctcctgtgggttcctcaaaggatgtttggccgcgctctgctgctgctgcgtgctggaggaatgttgtggcctcttctgagattttagctcttagctactcctagtcttggtacttggcattcagtcccaagcaaaattgatgctagcactatggagcatcgtctgagtatcgagatgtcttgaattgtgattgtaacttgatgcaataatcggagaagggtgttcaagagctttcagctattgtattgtatcagtgtcagaaccaggcagtattgtgtctttgtctatgctttgtaataaaggcttttatgcatcctttggattggaccacaggtttttggaagaacnnnnnnnnnnnnnnnnnnnnnnnnnnnnnnnnnnnnnnn

SEQ ID NO: 7069 - DNA, 642 bp, Setaria italica
  Peptide Sequence Number=SeqID_73043
ccaggtttggttgttaggttgtatgccctacattgtattatttttcgtattaaatgtgttattcagattctcaacaattgaccactcgtgcttttaatgtcaaagacgccttcttatagagtctcatattacacaggcaaagagaagacgaggtagaaccccaacacctgggaagtatcttggcacaaaatcatcacgtggtaagtggccgtgaactattcacctatcatctttggttacttttgctcccaattttcagaacaataaagtcaataagcattgctagtatctcttgataataacttgttaccgaccatttcatttacatggtgacaccaggacggaggtccccaagctactcgcctgttcggagggaccgttacagctcacgctactcacctgatcgtgaacgatcttattctccttatagtagacgccgatcgtactctccgtatgacaggcgacgatcgcactccccctatgacagaaggcgatcatactccccctacgacagacggcgatcatactccccctatgatcggcgccggtcatactcgccttactacagcagtcggtaccgttcaaggtctccataccgctacagaagacggaggtcaccttcctatgaccgttcccgtttcc

SEQ ID NO: 7070 - DNA, 601 bp, Setaria italica
  Peptide Sequence Number=SeqID_73044
agaaaaccctgggaacaacctgtatgtgactggtttgtcagctcgtgtaacggaccaggatctggagaagcacttttctactgagggagaggtgatcgatgcaagcattgtgcatgatccttggacaagggaatcgcgagggtttggttttgttaccatggctactgttaaggaggcagatcgctgcatcaaatatctggaccgttctgtgttggaaggtcgggtcataactgttgagaagatttttttggcagcaacagggtagatgttggtagctgctctgcaacaaactcatacaacctaacaccaaaccatgccacctcatccaaagggcaaagagaagacgaggtagaaccccaacacctgggaagtatcttggcacaaaatcatcacgtggacggaggtccccaagctactcgcctgttcggagggaccgttacagctcacgctactcacctgatcgtgaacgatcttattctccttatagtagacgccgatcgtactctccgtatgacaggcgacgatcgcactccccctatgacagaaggcgatcatactccccctacgacagacggcgatcatactccccctatgatcggcg

SEQ ID NO: 7071 - DNA, 804 bp, Setaria italica
  Peptide Sequence Number=SeqID_73045
aagggaacaaagtaagaacttaaaactaagaaacgaacgaagaacgacaagcgaggagcgggaggacgagaaggcttcgccggggcaggatcgttgcggccacgaaagatgtcttactcaagaggatcaaggtatgaatctcgctcaccatacaggagaagcagctattcaagatacaggagtcggtctaggagtgtggactcgagtgatgctgaaaaccctgggaacaacctgtatgtgactggtttgtcagctcgtgtaacggaccaggatctggagaagcacttttctactgagggagaggtgatcgatgcaagcattgtgcatgatccttggacaagggaatcgcgagggtttggttttgttaccatggctactgttaaggaggcagatcgctgcatcaaatatctggaccgttctgtgttggaaggtcgggtcataactgttgagaaggcaaagagaagacgaggtagaaccccaacacctgggaagtatcttggcacaaaatcatcacgtggacggaggtccccaagctactcgcctgttcggagggaccgttacagctcacgctactcacctgatcgtgaacgatcttattctccttatagtagacgccgatcgtactctccgtatgacaggcgacgatcgcactccccctatgacagaaggcgatcatactccccctacgacagacggcgatcatactccccctatgatcggcgccggtcatactcgccttactacagcagtcggtaccgttcaaggtctccataccgctacagaagacggaggtcaccttcctat

SEQ ID NO: 7072 - DNA, 1633 bp, Setaria italica
  Peptide Sequence Number=SeqID_73046
gggcaaggcagtgcttaactgacgcgagacgcaagcgaggagcgggaggacgagaaggcttcgccggggcaggatcgttgcggccacgaaagatgtcttactcaagaggatcaaggtatgaatctcgctcaccatacaggagaagcagctattcaagatacaggagtcggtctaggagtgtggactcgagtgatgctgaaaaccctgggaacaacctgtatgtgactggtttgtcagctcgtgtaacggaccaggatctggagaagcacttttctactgagggagaggtgatcgatgcaagcattgtgcatgatccttggacaagggaatcgcgagggtttggttttgttaccatggctactgttaaggaggcagatcgctgcatcaaatatctggaccgttctgtgttggaaggtcgggtcataactgttgagaaggtaaaatcataatagtgcttatgtgtgaacttctatatttaacttctctatggagtgtatctctgattagtcttttatgctgaacttttgagtgttctcttcgttgaagatttttttggcagcaacagggtagatgttggtagctgctctgcaacaaactcatacaacctaacaccaaaccatgccacctcatccaaagggttgtatgccctacattgtattatttttcgtattaaatgtgttattcagattctcaacaattgaccactcgtgcttttaatgtcaaagacgccttcttatagagtctcatattacacaggcaaagagaagacgaggtagaaccccaacacctgggaagtatcttggcacaaaatcatcacgtggacggaggtccccaagctactcgcctgttcggagggaccgttacagctcacgctactcacctgatcgtgaacgatcttattctccttatagtagacgccgatcgtactctccgtatgacaggcgacgatcgcactccccctatgacagaaggcgatcatactccccctacgacagacggcgatcatactccccctatgatcggcgccggtcatactcgccttactacagcagtcggtaccgttcaaggtctccataccgctacagaagacggaggtcaccttcctatgaccgttccgcttcaccatactacagcaggcgccgctatcgatctgtctccaggtcacccagtgcttctccaagggctagaggtcggagctattcacgcagtttatcgccacagggaagctattctcgaagctgttccccagtgtcagaaagatcaacgagctattctccaaagaaagggcatagtagaagggaacgcacacgcagcagatcttctggcaagaggcgtcgttcaagggaaagctattctcacagtcggagttcgtactctaggtctgtctctagggagcgctcagcttgagctggaggtctgtgtactaggcaagaataagatgcgttctgtatctatgagaattatgtatgttaatatttctattctgaacttgaaacagcgtggggtgtgtgcatttgtgtattatgtttatgttgtatgaggtactgccatatttcagaaatgttattgacgttgttgtctctattgaaaaaattcttggtaatttagttggtaacaaaaaaaaaaaaaaaaa

SEQ ID NO: 7073 - DNA, 955 bp, Setaria italica
  Peptide Sequence Number=SeqID_73047
acctcgctcccggagcatctctggtgtgacggagaatgggtattatgtgatcactccgttgattcctaggtcgactgagcctggcagtttgcagtcacctatccttgtgaatagaggatgggttcctcgtggatggcgctataaaaatgttaaggatcaccaaatcctgcatgaagcttcagaaccaaaagctgttaaacagccagatggaaaaagttcgtggtggaagttctggtctaatgagcctaaatcgtctcctgagattgaaaaacctagagaacctcctgtaagagttattggagtaatccgaggaagtgagaagccaagcatatttgttccagcaaatgagcccagtagtggccagtggttttatgtggatgttcccatgattgctcgtgcttgtgggcttcctgaaaatactgtttatatagaagatataaacgaagacgtcttgccaacaaacccttatcctgttccaaaagatgtcaacaccttgattcgtcactcagtgatgccagaagaccatcttaaatacacttttacatggtacactctttctgctgctgtgacttacatggcttccaagcggataaaggctaagaaggttaggttgtaacaggattggagtccaccatatacttcgcacattgaaacctatcgcagatgcccaagcttatgcctctttcatctcaagcaataagtataacattgccctcttttgttttagtatgttgtacattgactagcagtttctcctggtggagctcagaggatacagggaatttgttagcttgattcctgcctccttgtaaaatttttgtcagggagctttcatacagggtagccttatcttcttttagcatttttgtatgatgattgcttcacccgagaaattgttgaactgggttgtctgacattgcattttccttagctagactgggccgttgccgccttg

SEQ ID NO: 7074 - DNA, 834 bp, Setaria italica
  misc_feature (1)..(40): n is a, c, g, or t
  Peptide Sequence Number=SeqID_73048
nnnnnnnnnnnnnnnnnnnnnnnnnnnnnnnnnnnnnnnnccttttttaggtaaacaaattttggataagattacatggcgatgggatctacctgaatacactaaaacaaatatgcccctacagtatctaatgacaagatccacggcaaattacgggtatctcatccaaaatgcaacattgttacaatgttttacatcactagaatggccagcaatgcggctactaggtgagtcaaccagcaggattgggatttcgaagcaaaactgtcagggcttacaggcccggaggctgtaccgccgtcgctgccgttggcgcccgtgcttccagcgaaaatgcatgaaccatggcttggatcagtagatgttatcattgcagtgccattaaagctgcatgtaccaccgctagattgtgttctatgataataatcgttgaaagcatatgaagcaacagctacaatgttatctgattcatagcatggttgcccaggctgaattgcactgcagtttgcagagccagggccacatgcccaatccaaactatgcttcagtgcaccatggggtgcacttgaatttgccacacaaaacatcccgcgcagagctggtgattctgggatagttgtggccacgtcctcaaatgatagagagtacacagtagtagcgttgggaaacataatccccaacttttctctgatacaggtcctgaccgaagatcctcgttgaatagctcaaagatgtaggtgcttgactgattcattggttggctgggcgtaccagaattattcagtacatgacgtatgaggttcgtattgtaggccaaagcattatcaacagtag

SEQ ID NO: 7075 - DNA, 425 bp, Setaria italica
  Peptide Sequence Number=SeqID_73049
aaaaaaagaaaaataaaagaaacaaaagggaaccaaaggaccctttaaaaataggtttaattagaaggaatcttcttaatgaaggttcaaaaagtcctcgaactattcgcctagcagctttgcatttgagtggtctttggttgatgtacccggaaactcttagattttatatggatgaactgaagcaactttcattatatggatctgtggcatttgatgaagattttgaagctgaactctctgaaaaccatgaagcaaaatttgaggtttcaatgctatcacaaagtcctgatcgtgaattcacagaggtgttcattaatacagaattatatgctcgcgtttcagttgctgttctctttcatcagctttggaaacagatcaaaagaaaagaatatatcgggaactgaagaagctcttcaatctgg

SEQ ID NO: 7076 - DNA, 688 bp, Setaria italica
  Peptide Sequence Number=SeqID_73050
gttacgcagctgaaggtgagaagaagacagaggcgacgagaccaccatgagcgctctcaagttctgccgcgaatgcaacaacatgctgtacccgcgggaggacaaggagacccgcaccctcctctacgcttgccagtcctgcgagcatcaggaggttgcttcagatacttgtgtgtacaaaagggttcttcgtaagccttctggtgaacccaaagatgtcctgaaggatgtagcagctgatcctagcctgcctcgcaccagaagtgttagatgctacaactgcaaccatccagaagctgcttttttccaggccccaactaagggagagaaagccatgacgctgtacttcatctgctgcaacccgagctgtggccacaggtggagggactgagaaggatccgggtctgggaaatcagtcccagaatgatcactattctctccacaaaacttagtagtagactggtagttgttggcacgaaccttcacctgcagtctgtgactggaccggtaccgctggttaagaagactttgatgcaaacctgccctttgtatgcgtgcttggctttcattgttagcttatcgccagggtaatgttgtgtgacaagatccggtgtaactattctcgcgtcttcattggcgagtgctggaagcttatataaacgaaagctcgtgatccgaacggaaaaaa

SEQ ID NO: 7077 - DNA, 250 bp, Setaria italica
  Peptide Sequence Number=SeqID_73051
tttttttaattttaccattcctaaaggaatatagttaatcgattattcactaaaagaatggtacacatattgcgatctacaaactgtatgtatatgtgctgccctcttcaagatcgaggacatcttgctgtctgaacaataaaggaagatcctgttgttccctgggaagcaacgtttgcctctcctccggattggcatgagcctgagcccacgggtgctgctggtatctcctcagcctctcagccaacct

SEQ ID NO: 7078 - DNA, 616 bp, Setaria italica
  misc_feature (518)..(616): n is a, c, g, or t
  Peptide Sequence Number=SeqID_73052
cgccgtggagcagggcgacggctgcgactccccgtccggcggcggcggcggcgggatggtggcggcggcgtgccccaggtgcttcctgtacgtgctcatctcccggagcgacccgcggtgcccccggtgcgagtcccacgtgccagcgccggcggcgcccgccgcgagcaagaagccgcggatcgacctcaacgtcggcttcctcggcacctagcccccgtagcccttacataggtcgatgatcggacgccatcctcctacgaagtacgtcgtaaagttagcctcggtgttaatcgacccgtataatgccgcgatgatccaaggacctggtggtggggtacagctagtacaggggaggcgcctcttttttggctcccagtccgtttcttctcccggaaatgcatccgcgccccccctcccgattctgttttagggaatttatggccgatagaacatgaatggtgatactcctgttcctgtagaagcaatcaatcctaccacaattgatcagagaactnnnnnnnnnnnnnnnnnnnnnnnnnnnnnnnnnnnnnnnnnnnnnnnnnnnnnnnnnnnnnnnnnnnnnnnnnnnnnnnnnnnnnnnnnnnnnnnnnnn

SEQ ID NO: 7079 - DNA, 322 bp, Setaria italica
  Peptide Sequence Number=SeqID_73053
tccctttccacttgtgactcaacctctttatcaaatataagagaaaaattgtcagttttggttgtctgtttcaatttccttatatcttctaaagaatgatcatgagcaacaatcgaatgttctgtttttctcctcttgttattctcttgaacgctatttcctatagtaggataatgctgtgacatgttcccagtgctgtgaggaaacaatttactatgccgagcccatgcctttctgagttcttcaacacctccataaaggtcaacaaactccgaaaacaacaatgagataagctcgtaatatatcttgagttcctgctgca

SEQ ID NO: 7080 - DNA, 660 bp, Setaria italica
  Peptide Sequence Number=SeqID_73054
atagtcgtctcgctatgagtatcagaggtggtgcagtgctaccatcctcctgaatttcctcttctgacagatcagcagcatgaggaacatccaatgtcttcgctctctggagggcactcttgtgctcctcctcaaaactttgcaacctctccatcttttgttgtggaggtggagccattgcattctcactttccttcattagctctaaagccttttgtgattctcgctcgatccaagcaatggcatgatcagaagtggtactgcatgatagcacaacatgctcaaatcgtccttccacaggaatagcagttctgacctcaggcgggaaccttccgcatctgcaaaatttcctctcaacgatatgatacattcgcccaggagcatacaatcttcttggatccttaaattttcgcttgtcttgtttaaatgtatctctcaagcaaatgaggaatagcaagcagggcaaactgtccaaagtataaaggccagaagatagacccaaaaatgtactctagtggcgttggcgttcttggcaaaaagtcatcctggagcacgacggagctgacgacgtctgcgtacttgacggcgaggttgagcgacatacacctggcgggcgcgagcgcgtagcacttgattcggctcctgggtatattgtcgaac

SEQ ID NO: 7081 - DNA, 866 bp, Setaria italica
  Peptide Sequence Number=SeqID_73055
ctaaagcatgatggtgtaatcaattatcatgcaacaattttaacttcccaaataaattcttaacttgcgatccattacagagaacaatgtacaaactagtacaaagcctgtattgataaatttacaagacttcaaaggtccaagaatgcacatagatgaagcctctacacaaatgcgaactatatagccctttgcactacccctcttctctatactgaaaaatgaatggacctcaaaaagacgtttcaacagactagcaaaaaaacaaaatagtatagatgtatcgcggccacaacttactcctttgtacatccagccaaaagaatgaactaccatgtgcagagtagtcttataatcatcattactcaacaacaatctccttcgccatgtccttcttcacgacgagtttcccatcttcatccctggtgaaaagcttctccatcagttcgtcccagctgcttcttcctgcagatttcggttccatagtcgtctcgctatgagtatcagagggtggtgcagtgctaccatcctcctgaatttcctcttctgacagatcagcagcatgaggaacatccaatgtcttcgctctctggagggcactcttgtgctcctcctcaaaactttgcaacctctccatcttttgttgtggaggtggagccattgcattctcactttccttcattagctgcgacaaatatataaatgtagacatgcagtcataaacaaatattcactatgtcgaactaaacaaatcggtgcaaaaaccaatggcaagttccagcagatgtgcatttctgtaaatttttgtttgcaaacaaattttccgttttcttccaagtcaattcagtactaggaaaagatagagc

SEQ ID NO: 7082 - DNA, 1029 bp, Setaria italica
  Peptide Sequence Number=SeqID_73056
gtttctggtaaactagtataattattgacgtatcaaacataagtataagaccacctagatttagcaatcagacacgccgtcaatatgacactacagtgtgcaaaaaaagaaggcttatggaaaactgtgaaaataaaccagcaaacacgtagtataacatgtgtatacctctaaagccttttgtgattctcgctcgatccaagcaatggcatgatcagaagtggtactgcatgatagcacaacatgctcaaatcgtccttccacaggaatagcagttctgacctcaggcgggaaccttccgcatctgcaaaatttcctctcaacgatatgatacattcgcccaggagcatacaatcttcttggatccttaaattttcgcttgtcttgtttaaatgtatctctcaagcaaatgaggaatagcaagcagggcaaacagaagatagacccaaaaatgtactctagtggcgttggcgttcttggcaaaaagtcatcctggagcacgacggagctgacgacgtctgcgtacttgacggcgaggttgagcgacatacacctggcgggcgcgagcgcgtagcacttgattcggctcctgggtatattgtcgaactccttgcggttgttgacgacgagcacggtcatgagcgcagcgatgccggagccaagtgagtggccggtgaagatgagcttgtactcggggccgtagcgccgcagcaggtcccgcagcgtctccgtctcccgctccaggatgtactgggcggccttgagcaggccgtggtgcacgtagccgccgtcgaacatctgcatcccgagcttgttgtccatgagcaccttgtagtccgcgttgcggacgaggttgaggccgcgcacggcgaggatgatctccttgtgcgcctcgtcgacgtagatgaggtatggcgggcaccggttgccgacgtcgtcgtaggtggcgcgcttgacgatgcccttggggtcgacgtcggcgtagatgaggtatggcgggacaaccggttagaccgaacgtacgtacga

SEQ ID NO: 7083 - DNA, 1735 bp, Setaria italica
  misc_feature (1697)..(1735): n is a, c, g, or t
  Peptide Sequence Number=SeqID_73057
ggcttcctcccattcggaccgagacctgattgggggcaccgtccgggcggagaacgcgagtacccccaaatcccccatccccgaacccctcccctccgcagtaaacccgccgttcttcgccggagctcccccgccccagccccagccccagccccagccccaagcctcagccctcgtcctctccatctcttccgaggccgccgttcggggccgcccgcatgctcgcatcctagacactgggccggcgcggggaggagatccgtccgggctcgaatcggtttcttcgctcgctggtacctaggttctaacaatttgcacaaaacctatggaaagttctaaatctcctcaatcatcaaagaagagtcgggttgttgtgccctctgatattaatggcccccgatttgaaaatgatgacttttcttctgaaagcgcatcaaatcaaatggtcgttttcaaccatgaagcaggagataaagagcaggacgaactaggagaaaaccgctcgcagaaatcagtcataacaagggggatatcgccatctattggggcattcacagtccaatgtgctaaatgtttcaaatggagacttattccaacaaaacagaagtatgaagaaattcgtgaacgcattatacaggaaccttttgtatgcaaacgagctcgtgagtggagacccaatgtaacatgcaatgacccagaagatatatctcaggatggaagcaggctttgggctattgacaaacccaatattgcacagccccctcctggatgggaaaggcagatcaggataaggggtgaagggggcaccaaatttgctgatgtgtactatacctctcctactggaaggaagctaaggtctctggttgaaattgataggttcctccaagagaatccggagtatgttgcacagggtgtaactttagctcagttttcattccagatacctagacctctgcggcaggactatgtcaaaaagaaaccgaagttggtaaatccaagtgatgaagcaagtacagtcatctccaagtcttttcaaccagaagaagtgaaccccatatcctgggcagttcctacagcacatgagggggatgctagcgaagaagcttctcacgctgatgagacaattggatcagaagagatagagctaacccggaagagaaaaacaggaagttctttgtcagaagagtcaaaccatctctctgatgaactgaaaccaaagttggaggatgctcagaacggagacacatctacctgaaaagtattagtggctgatgttgtaatgccaactgccccctttcatggttttacgggcccgcttcccctctatttgctttccattgcacttgggagtcggtttctctgttttgtgaggccacactagccttacatgtagttaaaagcacagaggctggctgacctgaaatccgacactttgggggcagcagcttaacgaaatgtttgtatcagagttgagagccgtatggaactcctgcggataagtatgtttgttaccatgtacttagctaggagaaccaacttatgtaagattagtgtttttcacgatctttctttgtgtaagatgaactgtcgtagcgacctagttctgctgaatgtcagattttaatctcatgttctttttgttagatggaccagcagcagtggtggtgaaatgtcaatgccagtgctattgcaatttnnnnnnnnnnnnnnnnnnnnnnnnnnnnnnnnnnnnnnn

SEQ ID NO: 7084 - DNA, 457 bp, Setaria italica
  Peptide Sequence Number=SeqID_73058
tccggtagtcctaagcaacggcgaccagtcaatctcgaaacgcttctctcggcgagtgctagcggcctataagtagcgcgtcccatgtcctggataggcctcgcgagcaaaaccaaatccatcgacaagcgccgaatcatttcacgtacaagccatggtgaagaagccttccaccctccccaggtcctttctgtccctccgccgcctcctctggcgaagcatctcaggggggcactaccgccgcagcacgacggcgagggcggctccagccgttccagcacaggaaaagctgagagaccggacggtgctggtcgatgtggagggatggctcctgaggtcaccgctctccaccttcccttacttcatgcttgtcgccatcgaggctggcagcttcctccgtggccttctcctcctgctgatgtatccggtcctgccgtcctccgtcggccgtcctcct

SEQ ID NO: 7085 - DNA, 496 bp, Setaria italica
  Peptide Sequence Number=SeqID_73059
tgtgagtagtttgcccagtgctccctagctacatcttccactgacactagtctctctccaaccttcttatccttgttccggtgtgcaaggatggaaagccaagcaagaacagcccagataccatccttctctctgatgtgatcagatcctgtcccaaaactttcctctccacatatagacaattttcctgcatccattaggttcccgaacaatttccagcctgttggaacctacaaagtgacaccactcaaagaaaggaacattcaatttctcggcaacacaatccagagcaccactggttggcattgatcgagcaagtccttttataccagactggaaataaggaattgctgtttgtgcattggctgcaattattgcaacagagtctgatggtgtaacaaagaaccttttcccaagaatcatgttccgatcaccatcaccatcacttgcggcaccaaagtcaggtgcacgggttccaaacatagtaaaaacaagc

SEQ ID NO: 7086 - DNA, 450 bp, Setaria italica
  Peptide Sequence Number=SeqID_73060
tttaaagaaagttcaaatatttgccaacaccaacgacacaaattatacaaaattacaaatccaattgcttgcttgccattactgatcattatatcaacatccatgctgtagaagaaatatccaagtgtttgtttagtactattggttcaaaccttggagtaagttttaggattcaacaaaacactgctgtagaagaaaaactaatccacagtttttattgcctatcaccttaataccccaatcattatctggtccacctggattgtggcttgcactcatgatgaagccaccattggcttctcttttacgaatcactgaagacacagcaggtgttgacagcagaccattcctgccaacaaggatcttcccaacaccatttccagctgcaatcttaataatgatctgagaagcatccttgttaaagtaccggccatcacccccaagtacaag

SEQ ID NO: 7087 - DNA, 1443 bp, Setaria italica
  Peptide Sequence Number=SeqID_73061
tgttaggttaaccttctaaagtaaaggtaactatttctaatttttcttcggtctaactactaattcctagagcaccactggttggcattgatcgagcaagtccttttataccagactggaaataaggaattgctgtttgtgcattggctgcaattattgcaacagagtctgatggtgtaacaaagaaccttttcccaagaatcatgttccgatcaccatcaccatcacttgcggcaccaaagtcaggtgcacgggttccaaacatagtaaaaacaagctccttggcataagttaaattgggatctggatgaccatttccaaaatcttcaagtggcaccccatttaatatgcagtccggatcagcaccaagtttctcgacaaaaataggtcctgcgtacgcaccagtaattgcatgcatggcatcaaatatgaacctgcaaaataaaggtaaaacaatcgatttgatatgtgctttgtaataaaaaaaactcagccagtgggggcaagatcacccccatggtatttcactaatcttgtggacgctttcattggccgcagctatcatcgcagactcgcaggaagaaaaggacagagtccacaagacatcaactgatcgtggctaaagaggattgcatgagttctgtttgggcgggagatatttggggataagtttgatttgtaagggaagttataattacttgatggttaagctagcctgatctataaaggcagctgtagttttgtattagggtatcgagggaataaactctccccatttcagggcgtgagttgtcttcgatggtggcgaggaactcctcctcagccgccggcgagagcaacccggcgtcccaacatagatacttgctacgctcctcttcccaagctcgtttgcttctgcattctccactaagcacaccttacagaccctggcaccatatcactaagaagagctcaaccggagcccagtcaagcaaccagagcatctatcacaaaaaaataccacaacaacatgggatcagctaagttaagcaaatactcctattatagaacaaaccttgttcataactcaatagtaattttcttaagtcttctgcattcatcaaaattaatggcacatgcgtcatgtgaaaaggaaaatcaactcaattaacttatggtaaaaaacatgaactggtgaagtacaacaaaggtgatgcatgaataccatgtgaaggtcaataaaaacaagtggatcacaaggggtttgatagttgtattactcaagcaatattttaacaaatagcatgctaaagacaaagggaaacatatgagacctgaaatcaggccgagaaagcaaatccttgataagttggaagtcaaacacattctccattaattcaaggtagtctgaaacaggatctatcacttctacagtgaaatcaccatagcttactagtctttact

SEQ ID NO: 7088 - DNA, 2089 bp, Setaria italica
  Peptide Sequence Number=SeqID_73062
ttaatacaaaattacaaatccaattagcttgcttgccatactgatcattatatcaacatccatgctgtagaagaaatatccaagtgtttgtttagtactattggttcaaaccttggagtaagttttaggattcaacaaaacactgctgtagaagaaaaactaatccctgctttttttcaccgaacatatggtccttcacataatcagattagtagatcctccccacaggaactataattgattcagaatacgtttccactggcgtatggaattgaaatatcttcacaggcagttcagagcatgatattcgctctctaactggagtatacgagcgcgtagagcaagagcgcgcggcgaagcgcacgtcccatcctagtattttctatctaaactcaaaaacatggcaaaccgttcgtcagttgagaagggttgacaaacagcaaaaagaaacgaaagaataatgcacaacgtggtgatgccgtggacgtcacgagtttatgttatgacggtaggcttgtctcttcctgtgaagtccttgagctttgaaatagacaatgccaggtctattagaggcttcaaagctgttggagcatcgagactatgcttcgaggtatcagattcgaattgttcgacgtagagacggatagttgctccagcagatccagttcccgaaaggcggaagatgatcctagacccatcagtgaaaacaaatcgaagcccttgtttggatacagtactaccgtctacaggatcagtgtagctaaaatcatcagcaaattgaagggtgtaatctccatatttctctccaggtttgctacttgcaataacatctctaaggtgatccatcatcttgtttgcaccgtcagattcacatgcctcataatcgtatctggaaaagaaattcctgccatatgttgcccagtgctccctagctacatcttccactgacactagtctctctccaaccttcttatccttgttccggtgtgcaaggatggaaagccaagcaagaacagcccagataccatccttctctctgatgtgatcagatcctgtcccaaaactttcctctccacatatagacaattttcctgcatccattaggttcccgaaaaatttccagcctgttggaacctcaaagaaaggaacattcaatttctcggcaacacaatccagagcaccactggttggcattgatcgagcaagtccttttataccagactggaaataaggaattgctgtttgtgcattggctgcaattattgcaacagagtctgatggtgtaacaaagaaccttttcccaagaatcatgttccgatcaccatcaccatcacttgcggcaccaaagtcaggtgcacgggttccaaacatagtaaaaacaagctccttggcataagttaaattgggatctggatgaccatttccaaaatcttcaagtggcaccccatttaatatgcagtccggatcagcaccaagtttctcgacaaaaataggtcctgcgtacgcaccagtaattgcatgcatggcatcaaatatgaacctgaaatcaggccgagaaagcaaatccttgataagttggaagtcaaacacattctccattaattcaaggtagtctgaaacaggatctatcacttctacagtgaaatcaccatagcttacaactcctatagacgatagatcaacatcaggaatatctgctgtttttatttcagaaattgaaagtgtgtttccataaatctggtcagtaattatctctggcgctggctgcccgctgctgtagttaaacttaataccccaatcattatctggtccacctggattgtggcttgcactcatgatgaagccaccattggcttctctttacgaatcacctgaagacacagtctaggttgtttgttactttacattagaatagtatgaaatctcacaatatgacaaggaaatttacgaatcactgaagacacagcaggtgttgacagcagaccattcctgccaacaaggatcttcccaacaccatttccagctgcaatcttaataatgatctgagaagcatccttgttaaagtaccggccatccacccccaagtaca

SEQ ID NO: 7089 - DNA, 276 bp, Setaria italica
  Peptide Sequence Number=SeqID_73063
gtttttcatagtactctctctccccttcgggaggcccttggagcgggagaagtcgacgtgcgacgggcgctcggggtcgacggcgtcgagcaccttcttgggcaggcgcgagacgaactccccgcgcatcgacgccaccgagttgcgccgccgcccgggccccgccaggagcggcgcccgcgcgtcgccatcctccccgcgcccgttcgcgtccatccttcacgccgcgcgtccccccccaccccgacccactccgcaagctcctctttcctttcc

SEQ ID NO: 7090 - DNA, 715 bp, Setaria italica
  Peptide Sequence Number=SeqID_73064
tcaatttttcgaattgcccaaaacgttgttgtcacgcgaacagaagtgccactcccagaaacgagaacagaaccaaataatgaaagtttatctacccgattgaatgaagcgcagcaggaagtgcatgctcagcctgcttctgacacaaggttctttcttccccttgtcagtgaccatctcgagccgtactttacatttagatttactcatttctcaagattctttttgaaattttggttcttttggctgaaatatgatgtcagttgtgctacaagttaagctagcatgttaacattccagtatttcggtatttacatggtgaccttttgttttgctttcctggtgaaaagtgatatataacacccattctcatgacagtaacagaattgtagctttctgggtacatgccttgctgctatatttctagagtcacctatgatgatatacggcctgttctctggtgttccagcatgtgggggagtagctaagcacttaggtgtaactttaaatttccttttataatgggtgtatcacctcgtgttatcatgatctgtgatcctttccatttttgcttcctctaagctatccttgttgattacctttggtaggagctaaacacaggttttcagttgttgattgcaaaatagaactgcatggagcaaaacatgttttacacgtgcatttttacctgtattaatcttctttcacttcttct

SEQ ID NO: 7091 - DNA, 649 bp, Setaria italica
  Peptide Sequence Number=SeqID_73065
agaacaacaaagtaataagtaccggaaaagacctactaagtagtacaataggaagttttaagggatgtgctaaattctatggatcctagacaccctgagggagcaacggatgaatttgtgttggatcttgtcgagcaatgtacatttcagaagcaacgaataatgcaccttgtcatgacatcaagggatgaagcattggtatcacaggctatagagctaaatgaagaactacataaggtccttgtgcggcatgatgcattgctttcagttcaaccgaccacagcagtagcttctaatccggaggaagaggaggaagaagatgctgaaagtctctatcggagactaaggaaggggaaagctctatctcaagattacacagatgattccgtgccgtcattccgatccatacctgatgacaagatgcggcggccgttgaccatccagcctcctctccccgacaagaagctgggtgcactgaacatccgttcaccggaccgggaggagccgagacccgaacttgctccactgatcccgccgccgcccgcgaagcacgctgaaagggagcggttcttccgagagaagagcatagacggcctggccagcctgaccaaggaaccaaaacctaaaagaaaaaggggaaaaacaaaaa

SEQ ID NO: 7092 - DNA, 441 bp, Setaria italica
  Peptide Sequence Number=SeqID_73066
aaggggaaggaaataaaggtatgtgagccgcagcagtacaaatgggccgcagcaggccgcgcgggtcgcgcgctccggcgcgagcgcgacgcagcgcacgctagcttttcctaatggttactattcatttgatttaaaagggagcatggaagtacatcggatgtctccttgtctgcaggcttaattctgtgctttatgcattatatctggattttattttaatttagactggcatataaattttctgctacagctgtacctaaatgatctatcattttcaactgagactttcaataagcttatgaaatgtgcatctgtgtttaatatgattaaccttcagtcttgattcagattcattgctatttgtttcagctattggagatgctcatgaataactgtggagagcctatccacaggcaggtcattgctatttgttcagct

SEQ ID NO: 7093 - DNA, 1802 bp, Setaria italica
  misc_feature (1776)..(1802): n is a, c, g, or t
  Peptide Sequence Number=SeqID_73067
gactcctcttcctctcccggccgtgttctcccctccaactgagatcactgcgcgtgccgcccgcgccatggccccgacaccgccgccgccgccgccgccgccgtctccgctgcccgcaatacactagcgacgcgtctccaggcagctccggccgatctaggaaggaggaattttttctcgcctttttcccctcagcctgtgttgaggaatacaggcttggatttgctgaggattgggaggagaaggataatagagtgaaggacgcgggggaagaagatggcgtcggaaatggtgaaggcggcgacgagcgacaagctcaaggagatggattgggcaaaaaacatcgaaatctgcgagctcgtggcgcaggatcctggaaaagctaaggatgtgatcaagtctataaagaagtgtatagggggcaggagcaagagcactcaactccacgctgttatgctattggagatgctcatgaataactgtggagagcctatccacaggcaggtcattgataatgggcttcttccgatacttgtgaagatagtgaagaaaaagacagaattaccagttcgagaaaaaatctttcttttgctagatgctacccaaacatcccttggtggagctaaagcaagattccctcagtactatgaggcatactatgagctggtgtctgcgggtgtgcaattttcgaattgcccaaacgttgttgtcacgcgaacagaagtgccactcccagaaacgagaacagaaccaaataatgaaagtttatctacccgattgaatgaagcgcagcaggaagtgcatgctcagcctgcttctgacacaagtatagtccggaaagcctctagtgtcatggaagttttaagggatgtgctaaattctatggatcctagacaccctgagggagcaacggatgaatttgtgttggatcttgtcgagcaatgtacatttcagaagcaacgaataatgcaccttgtcatgacatcaagggatgaagcattggtatcacaggctatagagctaaatgaagaactacataaggtccttgtgcggcatgatgcattgctttcagttcaaccgaccacagcagtagcttctaatccggaggaagaggaggaagaagatgctgaaagtctctatcggagactaaggaaggggaaagctctatctcaagattacacagatgattccgtgccgtcattccgatccatacctgatgacaagatgcggcggccgttgaccatccagcctcctctccccgacaagaagctgggtgcactgaacatccgttcaccggaccgggaggagccgagacccgaacttgctccactgatcccgccgccgcccgcgaagcacgctgaaagggagcggttcttccgagagaagagcatagacggcctggccagcctgccaggccacctgaggggcctgtcgcagcacagccgggacggcagcagctcgtgtagcggcagcactgattacggcgactgatggggagcggcagcagtacatatagggttccctccttggggttgttggtctcccgcctggtgaccaggcgatacattgatgttgggcaggccggctcggcctcagccttatcttcttcttcctcatgctgacctgtgtacacttggcttggtagctgatatttcttcttctccttgtcctttgcctgatgacattattgggaggccgttgcgttggtgtggtgttgtgggtttctttttttcatcagatctatagagatgattgtgatctttcaatacaaaaaannnnnnnnnnnnnnnnnnnnnnnnnnn

SEQ ID NO: 7094 - DNA, 383 bp, Setaria italica
  misc_feature (371)..(371): n is a, c, g, or t
  Peptide Sequence Number=SeqID_73068
ctggaatggcgcccaaggcgcgcctcgccgcgtacaaggtgtgctggtccggcgggtgcttcgactccgacatcctcgcggccttcgacgcggctgttgcggacggcgtcgatgtggtctcgctcagcgtcggcggcgtcgtcgtgccgtactacctcgatgccattgccattggggcgttcggcgccaccgaggccgggatcgtcgtgtcggcttcggccgggaacggcggccccggcgggctcacggtgaccaatgtggctccctggatggccaccgtcggggccgggtccatggaccgcgcgttcccggccaacgtgcggctcggcgacggccaggttctcgacggctgagcgtgtacgggggccccngctggagcccgg

SEQ ID NO: 7095 - DNA, 995 bp, Setaria italica
  Peptide Sequence Number=SeqID_73069
ttttttttttttgtttatgaacgcgcataaacaaacatcccattttgtagaaatttttacctacaaaaattcactcaaatcaccaggggagggggaagggaaaaaaaataacaggcacacatcacagaatcacacagcccaatgtcaagtttaccggcccagcccacactcgagttacactgaactgaacatatagtcaaatagaaactcatgacagtgtcaggaaaaaagagagagaaaaggggggcactgaagtgaagtgcaggcaacggagagcattgccattgcgtcgagctctacctccaagtccagccatgagagagatcgagctcaccggcacaagctcagttcttgacgaactggaggccgttggcctgggagtagcgctccatgaagcgcatgaagcggtcccagtcccggggcgtgcgcatcacgtacttggcctcgatccgcgccggcttcccgttgacgaacttggcgctcacgtccaccgactgcagcgtgccttcctcgtcgatcatgtagaaccccgtgatgtcgcccagctccgccgacgagtcgaacaccgacggctgctcgaaggtgaagatggccacgccgttggtgccgtcccgggacttggtcagacgcacgtccgggatcgtctgctcgtccgtgccctggatgaactggatcgacggcttcgccatcatcaccacctgcaccgacgacgaccgggaggagcatggccgcggtcgcggcgctggccggcactgcagggacatgccgttgaaggacgactgcaggttctgatggctaggggtacctgcaacacaccgacggggctgtgcccgggccgagaccggcgaggcaacggcaagagccttcatcacagcagccatcctgcagcctgctggtggctcttgaggcagcttgccggagaagctgcagggctggtgtccagaaggaaggagaggaggggggaaatgcagagggagcagcaggtttgagtggtg

SEQ ID NO: 7096 - DNA, 276 bp, Setaria italica
  Peptide Sequence Number=SeqID_73070
gtctcccctccccccaagccggtcgcctcgccctccccgcagctcctcgccttcctcgacttcgcctcccgcctctacgaactccacgccccgctccttgcctccaggctggccaagctcctcatgatctcctccacccgcgcactggccgtcaccaagatcgctgccgccaagcgcgacttcggcctccaagatgacttcttggtttcgttggtccccaagtacccggagctcttccgcctcgtcggcgaccctgggcccgagcatctgggaacg

SEQ ID NO: 7097 - DNA, 1557 bp, Setaria italica
  Peptide Sequence Number=SeqID_73071
gaaaaagaaaagaaagaaaagaaaagattcaggaggaagcgcggcagaatcgccgcggtttcagaaggcgaccgaaggtgcggccagcgcccctgcgtaggacgcgtgagcccgtccccggcgcgtatccgccggagccctcccgccgctcggtgtcggtggcgccggcgttggcgggcgccgccgtggggggatcacgccggagtggccggctccggtcggttccgtcccgtttccctgggacgagggaagggtattcaatgtgttttcttggtaatttgtcgcggcgatccgcttcactggattatagcaacagcaggctgggccagggtggacattaggtggctacacgctggtttcctttctggagatgaatgatatagcgctggaacatagacctacttttgtaactggcatttcagagccaagtggaaggacattgtttcgccttcgaacctgtgccgagcctgtgccactcgaggaggagcatctggtacagccgtcacccttctgcgtcggatgaataaccaagttggttccaaccaccagaaaaacttgaatgtggtctatcaggatctgaccaaagatcaaggtcttagtaggtttgactctgagaacctgtcggatgtctcaactactgtttttccactgaaaggcattatggatcctacaaaattggttcatctgaagaccgtaccatctgaaaatggactcaaaacagttgaaaattcaagcgatgacttactttaataggtttctgaaagcccacttgccggaaaagtcaagttcatgtgcagctttggtgggaaaatcttgccaaggccaagcgatggaaagctcaggtatgtgggtggggagacacgcctcatctccattaacaggaacttctcatggaaagaactcatgcagaaaactctcacaatctgtagtcagcctcatatcatcaaatatcagctgcctgacgaggatcttgatgcattgatatctctttcatgtgatgaggattttcagaatatgatggaagaatacgacaatcttgagaaggccaatggctcagttagactaaggatatttcttgtttctctgactgaatgtgaggatccatcattggattcaaagagcttggagagtgagccggagtatcattttgttgttgctgtcaacaatcttgcacgactggatcggagcatcagcggcaacaatttaacgagccattcgaaccatcaattggataattctccagttccttatggagactcacctctgtgtcaaaccaatacacaaactggagccaaagattctcttggagcagctcttaacgagtcttcctctcagttttttcttgctccatacacacaacaaatggttgtggagtcatcaactactccatccccctgctcaggtcagcagaggacgatgcaacagtctaggatgcaaccccctgcagatgaatccaccacgaatgtgaatagaagtgaggtttgcaatagctcaaatttgaaagccatgcctccaggccatataaacaagaacctagttgatgcaggctaaaacatt

SEQ ID NO: 7098 - DNA, 544 bp, Setaria italica
  Peptide Sequence Number=SeqID_73072
tggtgatggatgacttggaaatcatgtgcgacgagcagcagagcgtggcgggcagcagcgacggcgacgatcaggaagcaaatggtggcacagccgagggaatggacgagggagacagcaaggctgaaatcagagaagaatgcccgtcgccaccgaagaggggcccttcgtcgtcggacccgaaccccgacagccgcatgtccatcgccgacgttctgcaggccagcatggaagacgagctcatggcagccagggagagcggcctccttgcaggtggcgcgggcacgtcaagacggtgccatggcgagaacagcaaggaatggggccgcagcagctggcgcgcattgccggacgccatggactccgtgccgacgaagcggttgccgtcggccgggcggtcgtgcttcagcagcaagagtggaaggggaagggattcggatcttccgatgtgatttctcagttctgaatttcagatttcacctaggatacggggcaggcttttgtttgcttgcaagatggaatgtgaacggtaaaagtctagggt

SEQ ID NO: 7099 - DNA, 1646 bp, Setaria italica
  Peptide Sequence Number=SeqID_73073
tcttctcggcgcgggcgccgctgcccgacacgcccgccctcgccgcctgcggcagcagcaacggcaacggtagcctcagcgatcagtggaagcagccggtgagcgtcgcgggagtgggctcggcggtcttcttccgcgggaccgagccattctccctcgctgattggcgcgcaatcaagagatttctttcaagggactgtccactgattcgagcatacggcgtcatccgtttcgacgcgacgagcgatgtttcggttgaatgggcggactatggctcattttacttcattgttcctcaagttgagatcaatgagcttgaggagagctcagtccttgcgacgaccatcgcgtgggacgattcgctttcttggacatggcacaacgctctgactgatctccaatcattgttgcagaagatatcaccttgctctgtacaagtgaacaagtccagcctgcagacaaccatcatgagtctcaaccatgtcccaaccaaggcatcttgggatcttgcagttactaaagctctgcagatgatcaaagggaggcaaagagatttggtaaaggttgtattggcaaggtgtagcagatacattactgatacttgcattgatcctgtggaactgctagcttgcttgaaggttgagggcccaaatgcttaccaattctgcatacagccatcggatgctcctgcatttgttggaaatagtccagagaaactatttcaccggaaatacttgaacatttccagtgagtatttagccggtactcgagcaaagggggaaaacaagggcaagaatgactttcaaattggtcaggatttgcttctaaggttcctttcggtccttagaattcatgactgtattatggttcaggagttcagggtggagtcaaatactttgtactgaatttgatcaattactaatacaacatttctcgcagtagcaaagaggatattgaatttactatagtgcgggacagcataaagaagaagctggagatgatatgcgatgaggtggttgtccatcccagcaaggctcttcggaaacttccaagagtacagcatttgtcagcacagttagctgcaagaataaggaacgaagatgacgagtttgagattctaaatactcttcatccaactccagctgtttgtggtttacccactgaagagtcacgccgatttatacgagaatatgaaatttttgaccgtggaatgtatgccggccctgttggttggtttggaggagctgaaagcgagtttgcggttgggattaggtcagcgttacttggaaaaggtcacagcactttagtgtatgccggtgtggggatcgttgatggtacaaacccatcttttgaatgggatgagcttgatctcaaagcatctcagtttgcaaagttattgcagtaccaagaacaacatattcgctaccaagaggctgaaaatatgggaacggtgatacgaatagagaagtagtaactagtaagtcatcacaaagttcagcattcattttagctagttattgcccccttatttgtttgatagtaacctagaaggaattcaattgaaattgtgtaattatggaattcagaagagcagtagtgctgaaaatacattgattgaatcagcatgtgaatgtaaaagaatatat

SEQ ID NO: 7100 - DNA, 262 bp, Setaria italica
  Peptide Sequence Number=SeqID_73074
aacagcgacacgcacgcgcacggcttaatccccctctccggccgatctccgccagcgccgagcgagaagcagctagcatggcttcgagcgcccagcgatccatggcgtccgccctcctgttcctcaacctcattatgtacgtcgtcgtcgcggccatcgccggctgggccatcaactacagcatcgacgagagcatgaactcactgcagggcgcatcgccgccggtgcgcctgttcccgatctacttcccgatcggcaacct

SEQ ID NO: 7101 - DNA, 942 bp, Setaria italica
  Peptide Sequence Number=SeqID_73075
tgtccttgtgtgtgcctgacagaattcagtaaccaaattccaatgttgacttgcttcgttctgctgggatcggtaaactgatgcatcaccaatgccagtcaaaagccaaaatccacaggttttaccttcgtctaatgatggcaaacttgctttttcaaggtgctgcagaatagcaataagaggctgtggtgtctgttccctcttgggagccatcgaggtttgcgtctgctccaatacatgcagatgatcagactggacataatcttcggctaatgctcgagctagagcaggagctatgtcagctccatgggactgcatatggagctctggggccttaggtgaagatagatcaaaatgtttttttgctgaactgacttgtagtaggaagagatgcgtcgaagtgcagcaatatctaaacgaagcatgttggcacacaggccacaaagttccaacaagaatatacaggaagcaactagagccgagtcctcaaagtttgtaatggctagtggagccaccgatataagaattgatcgttcagcttgacttaaaggagcaagtatcaattgtacatctgcttgaacattagactgtgcaggtatcacttgacatgcactggctgatttcaactgcgaagctctcttaacaagaagatgcctgaaagcagctagggctcgaccacggtgcaaatgatgttccactctcacatctttctcctcaagggaagaatataattcttcttcaacacttttttggatcgatgcttctaaggacagtgcgttggcgtcagtatatccagtggaattgtatatataatcagtgacactgtgagtgaataactcttcagatggtggagcacttgatagcagttgcattccaaaagggccctgttcaaagagttgaattaatcgtctaatagattttgggtcccaaagtctattagac

SEQ ID NO: 7102 - DNA, 1227 bp, Setaria italica
  Peptide Sequence Number=SeqID_73076
gtagcaatgagactaatgtaactgatgttggagcagaagaaactgagggtattcatgagaacacagatgagatcaatgcactcctcgattctgactcagatgaagggtatgaaaaggttcaagaactcaacagagttaggaagccatctcctgctgagaatgacaccttgagtgtggaatcagtggccagtgctggtgctagtgcaggttctgtgcgaccggccaagaagagaaaactcagctctggcactgacaagtctgttgtggacacggccagttcagcaaggcttgatcattccatcgaacagaagcttcttgttaatgactctgatgcacagtcctgttgcattggtgaagtggagagtgatcacaagttctttctgggggaaggtgaagcagctgagggtgacaaccccgacgatcagaatcgaagaagagagaggatccaagagactgttgctgcactcaggaagattgttcctgggggcatcgccaaagatgccacagctgttctcgatgaagcaatatgctacctgcagtatctgaaactgaaggtcaagacgctgggagctgtctccctctagctcctgggcagttgtgatttggttaatgaagccactagcttgtgcatatatgaagtgccagtattagtaataaggtgaagatgccaaagaacaatttggtgcttgagaggatgcactggaagaaaaggatccagtggtgtggcgcttgcttggcatggcccgtaccaataacaggaggctttgatgattgagtggacaatgaacatgcagcattgcaaccccacttaaactgaatcaaggcatggaatgctttcttgcattgcggtggagtgctagtcctggaggccacaagttccaactagctcgccataccactctccggtgagctagttagtctaccaccatctttctgccacagggcttcggtgatcttctccgtcccagactccctgtcggtggtgcctcggtgcctttgcatcaccaccctcctcaaaagtccctcatggcgttgataggagcaatatgttatgcaaagctacaaagatctttcgccgagcctgagcgggatccaaagcaagcaaaggggcctaaaggagcccattccatgcaaagggcactgttgtgctgtttgcgcccatggctttttgacccaacgtaccggggggggggggggtagggtactcgtacggttaagggtttaggg

SEQ ID NO: 7103 - DNA, 584 bp, Setaria italica
  Peptide Sequence Number=SeqID_73077
cgcggcgcgtcggggaggccgtggggctcctggagctggggcgggagctgcaggcgcgcggggagttcccggaggcgctggcgtcgttcacgcgcgtggtgcgggagtacgcggacctggcgctgtcggagtacgcgcgggtggggcgggcgctggtgctctacgagatcggcgaccgcgacgagtccatcgccgagatggaggacgtctccatcgcgctcaagggatacccagagatccacgcggcgctggcggcggcgctgtacgccgacaagcacgcggcgctgctggcggagaaccagttcgccatcgccacgctgctggacccgcactacaccgacctcacctacgtcagggacaccaagcactggccgcccagcctcgtcgcctcgctccacgacttcatcacgctctcctagtctagcagctcatcactcccaaatgaaaaatctcgatcaactagtagctgtatacttgtatagcatgaatacatagcgcacgcaccaactatttggtaagtaaatggtatggtcatatacattgtgtttgataggaaccaaagctatcatcagtacaaaagtatt

SEQ ID NO: 7104 - DNA, 953 bp, Setaria italica
  Peptide Sequence Number=SeqID_73078
ctccttaggctttcagagcatacgtgtaataatgaacgaaggactggcaactatacctgtacaatgccttgatgagtgcattttggtaactggagcatatggtacccagaaaactgaaataaacataagtttaacagcagttggccttttgtggactgctactgattttgttgtgaagggattaatcagcaactctgttgagcaagctaatcacatgaatgaagaggctcagttgggcgcaacaattatagaggcaaacatcaagcaagttcccccaaaacaagttgttgattatagtaaacttttcttttcagtcttttctgtcctccagaaattgggttcagatgatcgtcctgaggttcggaactcggctgttaggactctctttcagactctcagcacccatggccaaaagctttctaaaagtatgtgggaggattgtctgtggtcatatgttttccctatgttagagcatgtttctcacttggcatctacctcatctcgagatgagtggcaagggaaggagctaggaactcgggcaggcaaagctgttcatatgcttatccatcacagtcgaaatacagcacaaaagcaatgggatgaaaccattgtccttgtactaggtggtattgcacggcttttacgttcttttttccctttcctccagcaattgagcaaattttcttctggttgggtgcttttacttgatttcataaaaaatagcatcttaaatggtagcaaggaggttgctcttgctgccataaattgcttgcagacatttgttggcgcaaactgtccaaagggcaatctggaatcttcgtatgtcaaatctgttcttgatatttatgaacttgttcttcaaacttcaccaaattttaagatgactcactgaaaaagtgaagcaagaggtcctccgtggtcttggtgatctttacgttcaagcacaatctcta

SEQ ID NO: 7105 - DNA, 1520 bp, Setaria italica
  Peptide Sequence Number=SeqID_73079
ttttcttttccacaaagaaccttgactatatatatatgctgtcttgaacacttcgatctagcatcaaacagcgatccatatgacacagcactattaaatttgtgttcattttaatttatgttacaagccacagtactccctttcatcattttctctaccctgtgacaggatgaaccctgacccagccagcatctgctcccttagattcttgattgcttgatacctctcctcatcatgctcaaagttcagcatcccgttgctacacccttctgcccagtctccctccaattcgtcatccaggtcccgaaagcttcgctctaagcggcacgaattggcaccatccatccctctatctgaaaaggattcatgcctctgcctgccttttgaggaaggagtgtagctccaggtgtaagtcttgccaatgccatcgacattcagctcaatcgagtgcatttcactgccttctgatgcatcgtctgtgctgccttcgctgcagtttccaccatttctgcaagcaactgcatcagctgcagctgcgccagtttcagatgcatgggacaattgcattggatcagttactggttcctgctcttgcctagtatccagatacgcttggagctcgtcgcgcagctgattaacagctgcattcttctcctcaaactgtagccgtgcttccagcagcttcatctgaactctttgttcgcgccactcatccgctaactgaagcatctcacgctctttctgaagctcttcatgtgccttctcagtttctctcttcaatgcctccacctcggccttgtcctcgtcgattcctctgatgagctcgctgcagatcttctcaaccctttctttagatttcctctccctttcaagttcttttgtcactgcctgcagtgaggtttcagtgttggctaaggcaacgcttagtttcttgtttgccttctctgctcttttccttgacttcttctcactgtccagctccgaaactatgaattgaagagcatttgcagccttttccttttgtttgaccttccaagattccatttcttctgttagttgcttttttaagcccttgatttcgtgggcatctgatttttgttctctcataagcctcctcacatgagcacgagcaacatcaagctcagaacgcaatgcagaaatgagtgatacagttgacggattcagttctccaggtccccagatgtgggctagtactttcacaagttctttagatgcaatcaagctgttctgcagatcctgcaggttgaatgttttctcctcaggacatcttgaaacatcatcttgggagcatgtacctacctccatcgtactgccgttgctcatcatatcggccgaaaaccaccggccatagccgctgcgccggctacccttgccatctgcctccaaaatcttgctccggcttcttgacctcttggacatctccgtggacccgccgctccagggaaccaagctccggcgcgcccccgcggcgtccgcttcaagcagcatacccctgtcca

SEQ ID NO: 7106 - DNA, 304 bp, Setaria italica
  Peptide Sequence Number=SeqID_73080
gcgcaagctgctcttctctctctctttctttcattctcctcgcctccccacgccgatttcaagcgcttggggggacgagatcgcgctcatcaaagctctcgacgttctttgcatttttttcgctgttaatctgctcgtttaattattctcgtattaatttgtgctcgattctaacttgctagtttttagttcgcgtttaatttcgttgcttctgctgttgctattactattctctgttgtgcttgtcttgttcgtttgttgctgctataaccatggacgcaggttccctctcgatctcctccgg

SEQ ID NO: 7107 - DNA, 576 bp, Setaria italica
  Peptide Sequence Number=SeqID_73081
tatattaacaagagcttgttgatgcttgggaatgtcatcaataagttaagtgagaatggaaagcaaagagggcacattccctatcgtgatagtaaattgactcgtattctccaacctgcacttggaggcaatgcaaaaacgtctatcatctgcactgctgcacctgaagagatgcacattgatgaaactagaggaactcttaaatttgcaagtagagcaaaatgtgtcagctattgtgcccaagtaaatgagattctaacagatgctgctctgctgaagaggccaaaaacgggaatagaagaacttcgtaaaaagctgcagggttcgcattctgaagggttggagcaggttgtactaaaactacgcaatgatatgcacaagtctgagcttgagcgcgatcgtttagcaatggaacttgaagaggaaaggaagttacggatgaccctagagcaccatttgactgagcaacagaagcagctagagggtctggataataccagcatattagcagaccagtttactgactcgatccagctggatgcactgaaaactcagattctaagtatatgccaggat

SEQ ID NO: 7108 - DNA, 476 bp, Setaria italica
  misc_feature (238)..(238): n is a, c, g, or t
  Peptide Sequence Number=SeqID_73082
ttagttaacctaaccggtacggttagtcttgtcttggttagttttcttactttagtaagtttgtattattctattattgtactagtaatttatttagtattggttactattaactttgggtacttaggtcttttggttctttgttgtattgcttttcagttccacccgggtctcagagagtcaaaaccggggatgcgaaagaagcatgcgtcacggaccagccttaagctcgagggancgtaacttgctgcgccctctcttcagaactcaactgacccgaccgacgcgatcccggtgcttaggcttcttgactcctgcctgctaacgtagtcgtcgcagctgctaccgagcctcctcgcaggggccgccgagctcagaagctcaagcccctgcttgcccatctgcttgtctaccttccttgtcggtcgtagtagttattctttttatttgtctaggtattaccgttacttctacgt

SEQ ID NO: 7109 - DNA, 847 bp, Setaria italica
  Peptide Sequence Number=SeqID_73083
aaagaaaaagtaaactaagaaatagaataggacaatagaccgtttgtggcctgtttgcccgacgaatgcccagaagcagctggttattgtcattccagataaaaaggacagaatctccagcgaccagtctctttgcactaacaaagacactccaacctgttgtcagaagatgccgctttggttgaccccgaaatatatgacgaaatttccactcattgccatgaagatcttttgcaatcaactcctgtgctggtggctgctgattgaaatccagtggaggaaacaccttctctgctgctcggcggggaactgagaatccaccatgtgtacttgtgtcactcgcagttaatgtcttgcaaaagtagtttgttggttgcttgctggcaccgcctaactcagcaggtagaaatgggtccttgagctcttgtgggctgagtggctgcagtgtcatctgtgcatacacctcatctgtctctgcatcagcatgcatggtcacattatggagctggcatataagctgcggaggaaggctaggatagttgggaatctgagattccatttccttattggttgatgctgctacctgctcaccgtggccttgaggaaaatacaccacccgactaccaaccgcaggcaacgaaacaagaggcccggcacacgcatgccacaactcagaatttaggcacttgttctcttctgcttcttccggcgacgccggctggtcctgaagaccgccggcggccgacggcgagagcttcattcttcccccaccactcgccgaccgatccgaaacgcgttccaggagcgcgcgaaatggagaggggaagggagagaaccgaagcaaggg

SEQ ID NO: 7110 - DNA, 2198 bp, Setaria italica
  Peptide Sequence Number=SeqID_73084
tctatgagatgtccctaacttccatttgagacatttttacaattacaacacggaccgtgctgcatttgtgccagcaagtgcagaacgagtagatgcactaaattagtggtattagtgttccagggaactaagtgccagcatgtatacaaaaacatagtagttactgctaagagtctatatcatatgacataatcatcagatggcatagtagaacatcgggctacattgatctatgtgcttggttccaagccacaaaactaggaagagctgtgggaacatacagtaagaggcatcctagcgcggtagcaccacgggctatgggctccctatcttcagaactcaaccgaacccactggcgtcattccagtgctcaggttttttgattcctgcctgctaacatagctgtcacaaccattgctgagccttctggcaggagccgagctcaagagctcaatgccctgcttgcccatctgctgaacctcctccagtgaaagtatctttatgcaggacacactgttcacgaattcctgccacgggtcatcaccaactaaaaggacatcgtcctctccatcaacaaatacaagctgccagcctgatctcaaagggtcttccaactggccctcaaggccaaatagacgccccacctcactacgaagctcatcatagctgctgaatctagtgatatcgagcagccttccaacggttccagatttgtaaaccttcacaaaggttgcaaactgttgatttgcttgctcggaattctctgcacttggaacatagctcgactcatctaagcagcctgtactaggtagtggttgacccaaggggaaatcattctgagaagggctcaggaaattggaggttgaatatggaatcgtgcttgaatcattatcattctgatggcctggaatgccaccttgcatcaaaagtgactgtgagtctatgttaacaccaaataacaggtgattttgaggatcagagctctcatcttgatccactaagcaccctcgtccaggtaatggtgctaatgcagagttttgtggcaaattacatggcgtcatatccaattgttctatctgggccgaaacaacatgaggtcgggaaggattaacagactccactgcaactcgcttagatgaccatgggtcagatatcgataaaggggtgtttcttgccacacatgggaggctcgaaggtgcatctgatggtaactgtcccaacatgccttgcatggaagagccacccgatggtgagagagcgctgatgtttgtgtctgcaaagttttgttgatgtgagaatgctggaactgctggtaatgtggaagatggagattgagtgactgaagaaagctgagagaaagctgatagcgcatttggcaaacaatgcagttgttgattctgtggcgtttgcacacattcctgctgctgctgtgattcttgccgctgttgctgtggatgcagctgaggcttctgctcactaaatgagtggcagcgttgaagctgctgctggaggtactcagcttgagtatgaccttgaactgtgttgtcattgatattttggttgtacatttgctgaaactgaggctgcacctgctgcataatctgattagataggagagcagatctaccaacgatattctgcggctgctggaactgcattaatgaaggtgagatttgctttgtggtgccctgtaatgctgctgcggctgctatggtctggtacatgtcagattgcagaccaagtagggaattatccatcctcggctgcatccaaggactcggactcgtaccaagcccgccaaaattcaatgactggaaacttgggtttgtgccgtctcgaagccacataagagaagaggtcaagccatcatcccttccaccatataaagaaggcaagcctgtaggccatggacgctttaatccaagagcaaaaggagatggatacatcggaaaagttgtcaatggttcaatctcccaaagagacacccttggctgcttctctccagcagttgattcatcccatccaacctttacagaacgccagtgcgagttcggccagcgaacaggatcgagatcacttattcctgtaattgtccccatgtatcgtctgacactagattcctctgtctcaaataacatccggaaacgcatacccacagatatacgggtatggtacacagctttcacgtaattagccaa

SEQ ID NO: 7111 - DNA, 3713 bp, Setaria italica
  misc_feature (1)..(37): n is a, c, g, or t
  Peptide Sequence Number=SeqID_73085
nnnnnnnnnnnnnnnnnnnnnnnnnnnnnnnnnnnnnttttttttttttgatcattagagagcctacattcacaggattagtatttccatggaagaacaaagttttggcatgtgtaccaccggcggtgctgctggtagtttctacttagaagttgatatcatatgacagaattattagatggtacataacttgggactaggctttggtcttgtgatgctttcagttccacccgggtctcagagagtcaaaaccggggaatgcgaaagaagcatgcgtcacggaccagccttaagctcgagggagcgtaacttgctgcgccctctcttcagaactcaactgacccgaccgacgcgatcccggtgcttaggcttcttgactcctgcctgctaacgtagtcgtcgcagctgctaccgagcctcctcgcaggggccgccgagctcagaagctcaagcccctgcttgcccatctgctgcacctcctgcggcgagagtatctttatgcaggataccgtactcacgaattcctgccaagggtcatcgccaacgagaaggacgtcctcctctcggtcgacgaatacaagctgccagcctgatctcatagggtcttccaactggccctcaaggccaaataggcgccctagttccctacgaagctcatgatagctactaaacctagtgatatcaagcgaccttccgtaggttccagatttgtaaaccttcacgaaggtagcaggtagtcgattcacttgatcagagttatctgaacatggcacataccccgcatcatctaagcagcccgaagaatttagtgtgtgatccaaagagaaatcattctgggaagggctcaggaaattggaggtggaatagggtatagcagttgaatcattcccattctgaaggcctgggatgccaccttgcattagtagtgactgtgagtctatactaacaccaaacaagagatggttttgaggatcagagttcacatcttgatccaagcaccctcttccaggaagtggtgccaatgcagagctttgaggtatgctaggtggtgcagaattcaattgttccatctgcgatgtaacctggggccgagaaggaagcaaagactccactgcaactcgcttcgatgaccatgggtcagcgacaggtaccgcagtaggccttggcatgctcagttgagaagctgcttctgctgagaatggcctcagcgtattttgcatggcagtggcattagatggagacaatgagctcatattcgtttctgcaaagctctgcgcctgtgaaaatggtagtattgtttgcagcgccacaggtgaagactgaggggctgacgacaattgagaaaatgctgacaatgcattagacactgactggtagttggtcatgttgttctgttgttgcatttgctgatgttgagggacttgcaggcactgtgattgctgctgtgattcttgctgctgttgctggggttgcagctggggcttctgctcattaaatgaatggcttcgttgaatctgctgcttgaggagctcagcctgaccctggccatggattgtgctctcagagatgttttgaaggtatggctgctgctgaaactgaggctgcacttgctgcaaaatctggctcgacagaagcggcgcagctcgaccagctatgttctgcggctgctggaactgcagtatcgtgggtgacacttgcttcgttggatcctggaaagcagctgtggccatcgcctggtacatgtcaggttgcagaccaagtaaggaagcatccagccttggctgcatccaaggattcacaccaagtccgccgaaatttaatgactggaaaccagggttcgcagtatctcgaagccacatgagagagttagtcaggtcatcatccttaccaccatgcagagaaggcaagcctgttggccatggacgcttaagcctgagtggaaaaggagatggatacattgggaaagtagtcaggggctcaatttcccatagtgacacccttggctgcctctctccagcagttgattcatcccagccaaccttaacagaacgccaatgtgaatttggccaccgaacagaatcaagatcactaattccggtaatcgtccccatgtatctcctaacgctagattcttctgtttcaaacagcatcctaaaacgcatgcccacagatatacgggtatgatacacagccttcacatattttgcaagtggtatgacaaactccgaagggcttgcccttgggttatagaaaattgtaaagcggctatttgttgaagcagcatgagcagctgcagcaagaagaccaatatgcatactatcactagataagactgaagatggcatgacagtctgtggtcgacttgcccggcgaattcccagaagaagctggttattgtcattccagataaaaaggacagagtctccagcgacaagtctctttgcactaacaaagacactccagccagtggttagaagatgccgctttggctgaccgcgaaatatgtgacgaaatttccactcattgccatgaagatcttttgcaatcaactcctggcagggaggttgctgagtgaaatccagtggaggaaacactttctcagctgctcgacggggaacagagaatccaccatgcgtacttgtgtcgcttgctgtcaatgttttgcaaaaatagtttgttggctgtttatttgcagaacctaattcagcaggtaaatacgggtccttcagctcttgcgggttgagtggctgtagtgtcatctgcgcatagacctcatctgtctctgcatcagcatgcatcgtcacattatgcagttggcaaataagctgtggaggcagattaggataattagggatctgagactccatttccttgtttgtcgatgctgctacctgctcgctgtgaccctgagggaagtacaccacccggctacccaccgccggcaaggaaacaagcggtccggcacaggcatgccacaactccgagttcagacacttgtgctcctcaacagcttccggcgagcccgcctgagccgggaggacgctgccggacgacgacgagagcctcattttccttccccgttgcggagggaccaatcacactgctcgccccgcgatctgagggcggtataagagcgggggaagggaagggggaggcgaaggaaagattcctccttttcaggccaaatcacagcgccttcccgaaggaaaccatcactttcccagtttcaccacgagcaacttttcttttctttttctttttttcaccgcgtgccgcgattgcggctcccgaagatggccgccgccgccgaagcgaagccaagcgcaagcgcaagcgcaatctttcccttccttgtatctcggtgtccccggagccgagagccggaggcctccgccgccgccgccgccgctggctcgatccgaggagccgccgcggcgtcagatcccgcacccgcttggtggagaccgctagcgccgagctccccgcgccgctctacggcagatccgcccgccgccgccggggagcatgctcgctcgctcgccgccgctcctctccctcctctcctcgcttccttctcgcgcgcgtgcggctgggatgggagctcgaacagttgcggcagcagggaggagaagcgcgtgcgtgcgtgcgtgctcccgcttcctgctccggtatgctttcgctcagcttgcttgcttcgctcccgctgcttcctc

SEQ ID NO: 7112 - DNA, 277 bp, Setaria italica
  Peptide Sequence Number=SeqID_73086
gttccccttcactcaccgccacggggacccgctccgcctccgctgcgtcgccggagccggagccctgtagctctcacccttccgcccgcccgtcccgagatcggggaggggtgcggtgtcatctctcctgaggaagcggcgcggcaatggccggggggcagcagcccgaggcgtcgcccgggcgctaccagcgccgccgcgacgagatcgacgacgactgcgcggacgtgctcggcgtcgacgtgcggggcccgacgccgacccttccgacatcccg

SEQ ID NO: 7113 - DNA, 253 bp, Setaria italica
  Peptide Sequence Number=SeqID_73087
aaagaataagtccctgtctcagcatttgagcaacttaaagggggaaaagatacttgagaacaaactaggtcctcatcaccattagacacttcagtagcaaaccaaaacagatgcaacatatccgcattggaaagtagagaccgactcacccatccatgatgtccatgtggagccagtcggcgccgaggcggaccatgcgctcggcctccgaggcgaggttggcgaagtccgatgagagcatcgacggcgctat

SEQ ID NO: 7114 - DNA, 1150 bp, Setaria italica
  Peptide Sequence Number=SeqID_73088
cacaaagcaagatctttcatccttcttgacagcacagtaacatttacaagaaagatataaagaaacacacactcaggttgttcttttaaaaaagaaaatgtggttacatgacactcacaccgtggcatcagggccaacactgaattttattctcgcttgacagtttttattgcaatctgaggatctgtttatatgatcaacgtgcagagtggatctagtttacagcagaaatagcatattacaaaaatcagcttttgttctgagggccctcgacgctcttcctaagcaccgatatgacctctcctgggtcagcagcgccaaatatggagcttccagcgacaatgcagttggccccagcagatgctgccacatcgatggttgaaggacctagaccaccatcgacctctatgtcaagggtagggtacttccttctcagtgtacgaaccttgtccatcatttctggcatgaacttctgaccaccaaagccaggttcaactgtcatcacaagaaccaattccactggattttctgcttcgaccaggggaaaaacttcctccactggagttcctggcctcaatgatacaccaggcctcatacccttcgatttaatgctttggatgagctcttgccagttttctctggttacttcaatatggaatgtgaatcctgaggcgccggcctttcccaatgattctacataatctgaaggatttgtgaccataagatggcagtccaaatatgctttggtgtgtttcctcaagctctgaatcactggagccccaatagtcagattaggaacgaagtgcccatccatgatgtccatgtggagccagtcggcgccgaggcggaccatgcgctcggcctccgaggcgaggttggcgaagtccgatgagagcatcgacggcgctatcttcgccgacgccatgtccggttcgcttcctcccccgactggtggtggttgcttcctcccctgattggagtagtagttgaggtctgagatggggtgggaacactgaagagaagacgatgtttcgttcgggtcggcggctgcccggcggcttgattcacgcttcgcggagtacgggagtaggtggaccgtggacctgaccccttgcagctttgcccttgtgtgttctaaattctgaatttt

SEQ ID NO: 7115 - DNA, 247 bp, Setaria italica
  Peptide Sequence Number=SeqID_73089
ccttggtcgaatgggcaatgctaaagaagctctttcaacaatcataaacaaactggaaaacatagaggaggttctagcttgcttatctattatctcaccactttataagaaatcatattctatattatctaaattgtatatgaggttggatggtaacattaatcttgaactgcatacaggctgttgaatttgttatggaccaacatgatgacgaactatgggatgaactgattagacagtgcctcca

SEQ ID NO: 7116 - DNA, 1724 bp, Setaria italica
  Peptide Sequence Number=SeqID_73090
aggcaagggccgactgagcttcttgatgaggttggttcaagataccttgaccacttgataattgaaagaaaatatgctgaagctgctcaacgctgtccaaagttgctgcgaggatctccttcagcatgggagagatgggtctttcactttgctcatctccgccaacttcctgttttggtcccatatatacctacagaaaatcctcagctgagtgatactgcatatgaggttgcccttgttgctctaactaccaatccttctttccatgaacttctgctgaccactgtaaaaaaattggccacctacactgtactcagcttcacctgtcatatctgccattgagccacagctcgactcatcatcgatgactgatacattgaaagaggcgttagctgagttgtatgtaatcaatagtcaatatgaaaaggcactttccctgtatgctgaactcctgaagccagaagtattcgagtttattgaaaagtacaacttgcatgatgccattcgtgataaggtcgtcaatcttatgatactggatagtaaaagaacagttcacctactgatccaacatcgtgatatcattcccccatatgaagttgtggagcagttgttgcataccaaataaaaaaatgtgacaagagacattttttgcacctatatttgcatgctctatttgagatagatatacatgctggaaaagattttcatgatatgcaggtggagctttatgcagactatgagcaaaggatgctactacccttcctccgtactagtcagcattacaggcttgacaaggcatatgaaatctttgcacaaagggaacttgtaagggaacaggtttttgtccttggtcgaatgggcaatgctaaagaagctctttcaacaatcataaacaaactggaaaacatagaggaggctgttgaatttgttatggaccaacatgatgacgaactatgggatgaactgattagacagtgcctccagaagcctgaaatggttgggatgctattggaacatactgttggcaatcttgatcctctgtacattgtcagtttggttcctgatgggttagaaatacctcggttgcgggatcggcttgtgaaaattgtgacggactaccggacggaaacttcactgcgaaatggatgcaacgatatacttaaggctgactgtgtgaaccttttggttaaatactaccacgaggctcggcgtggagtttacatggcaagcatggacgaggaggtacatggaaacagggttgatgatggatcatcgcgagcaaatgagagatcatccagtgttcgggctctagatattaagtccagaacgagatgtggtgcccggtgttgcttatgcttcgatcctttgccaattcaggacatatccgtcattttgttctactgctgccatgcgtatcatctatcttgcttggaaggtgggttggacttaatgagatcaaacagtaatcaggatactgacaatggctcagacgacgaggatggttccccgtctggtgagtctcgtatgcgctgtgtattgtgcactactgcctctgcataatttatgccttgttgggtagtccatgctaccttgtgttgtgttgtaagttttgagccttgtaagtattgtgttcttttggtgttacatatgtacaatagcatgattctttgagggtagccatgtcctcagccagaggagttttgtgtaaatttgattgtaactaa

SEQ ID NO: 7117 - DNA, 576 bp, Setaria italica
  Peptide Sequence Number=SeqID_73091
cccaccgcgcgcgccagccagtaggtcacgaacccgccgtagctcgtgcctgccgcggccacgcgcctcccctccaacccggggagcgcgtccagcagcgccgccagcgtcgcggcctgcgtggcctccgacggcggcggcgccgtctcgaacgggtacgcgctgccgccgaagcccaggaggtcgggcacgatgacgtggaagtggcgcgagagggggcccacctggcaccgccactgccaggtggcccggggcccgaagccgtggacaagcaggagcggcgggagccgcggctcccccggcggcgcccagtagtggacggtgcacgtcgccccggcgccgccgtccgggtacgggagcgtggcggcgttcgggcggaggccggcggcgaggaactcgcgccgggcgaagtagtcgagcaccggcacgaggctcaggctggcccccatggatggctagctggttggtggcgccgagcagtctgagctaccaagcgaaaggtaccagcagctagcagcctagcactaggctacgagcagcgccagcaggcagtgtgcaagtatatgcatgccaagg

SEQ ID NO: 7118 - DNA, 318 bp, Setaria italica
  Peptide Sequence Number=SeqID_73092
aaacctgaaagctccgcctgagctacccccaagacgccaagtgctgtcctagcagcccattgaatattcttgtggtcgccgcgagacagtggccgcgcagccattcaaccacgcacacggcacgcgcacgggagagagagggagcagccatggccgccgccttgtactaccacccggccgccgggaaggcgggcctcgaggcggtggccgcgtcctcgccgtcgctggccctgcggccgtcgcagagcaaggtgctgtgcgtgggcagcagccggtggtggatgaggaggaggagatggggaggggaagcgagcggca

SEQ ID NO: 7119 - DNA, 427 bp, Setaria italica
  Peptide Sequence Number=SeqID_73093
ggcaacggcaccggccacgacggccagctcctcgtctcctacttcggggacaaggccttcgcctggtgcgacgccgccgagctcaggccctacgagccctacttccccgtcgccgagctctatgacgacggcggcgacgacttcgacgcagccgtcgaggcctccctcgacgagttctccctccgcgtcgaggccgccctcgccacccccgcccgccccttcgtccccgccgatttcctcgcctcgctccacgacctcgcagccgaccgcatgggcttcaccaacagggtgcaggcggccatcgccaaggcgcatctcagagcattcgacgccttcagggcgctgccggaccctcctcactacaccttggaactcggcctgcctccccctcactcctatccatcctcctcctaaatccaccaccacc

SEQ ID NO: 7120 - DNA, 523 bp, Setaria italica
  Peptide Sequence Number=SeqID_73094
tggattcctttttcttgacatgtgtgccaaatttcatgagggcttgaggaacaacctgaccagcctcccgcaaaacattcacgagttcaccagcaagccccttgttctcttgagtgaaaaaggtatgtgcaacacctttcttgccagcacgaccagtccttcctatcctatggacgtaatcctcagttgtcaaaggataactataattaatgacaacttcaacatcaggaatatcaagtccacgtgaagcaacatctgtagcgatcattaaagggcatttgccttctttaaataaagacaaagcttttgttctatcatgctgagccttgtctccatggactgaaacagcattccatccccttctctgaagcattgtttccactcgtgcagcttctttcttgtacagccacaaaaacccaaacctgttgctttgcgcttgatggtatttgtcaagcaaggcaagttaattctttgtaattcttcgggttatttctttatttcttatttcctttaatttactttt

SEQ ID NO: 7121 - DNA, 350 bp, Setaria italica
  Peptide Sequence Number=SeqID_73095
atgtgcaacacctttcttgccagcacgaccagtccttcctatcctatggacgtaatcctcagttgtcaaaggataactataattaatgacaacttcaacatcaggaatatcaagtccacgtgaagcaacatctgtagcgatcttctctgaagcattgtttccactcgtgcagcttctttcttgtacagcacaaaaaccaaaaccctgttgctttgcgcttgatggtatttgtcaagcaaggcaagtaatcttgaatctcgggatctatcatccaatacttcaacaatttgcatcacatcatggttagctgcaagatcttctgatccaataacaacctttattggatttgg

SEQ ID NO: 7122 - DNA, 1844 bp, Setaria italica
  misc_feature (1)..(54): n is a, c, g, or t
  Peptide Sequence Number=SeqID_73096
nnnnnnnnnnnnnnnnnnnnnnnnnnnnnnnnnnnnnnnnnnnnnnnnnnnnnnttttttttcttgcaaagccattttttcttttctataaccagaacaggactacacttttactattcaatagtcggatttaaccactctccaatgagttgttgtgcatacaaccaagtataatgcggatggtcaaaaaatacataagcagaatgctgctcataataaactaacctagaacatggatgatactatgagagctatattttggggccgccttctgccacatattacatccaccgcaatcagcttccgaatgcctaatccgatgatatccatagcatcgtcaaccaagataaatcaagtttccttaagcagggatgaaagaaaacattaagtgctgttagtttagtcctcatcagaatcaccaaatgtgatcttcgtggctttaggagcatcagctgtgatttccttgaagtgggagccatataatttggattcctttttcttgacatgtgtgccaaatttcatgagggcttgaggaacaacctgaccagcctcccgcaaaacattcacgagttcaccagcaagccccttgttctcttgagtgaaaaaggtatgtgcaacacctttcttgccagcacgaccagtccttcctatcctatggacgtaatcctcagttgtcaaaggataactataattaatgacaacttcaacatcaggaatatcaagtccacgtgaagcaacatctgtagcgatcattaaagggcatttgccttctttaaataaagacaaagcttttgttctatcatgctgagccttgtctccatggactgaaacagccttccatccccttctctgaagcattgtttccactcgtgcagcttctttcttgtacagcacaaaaaccaaaaccctgttgctttgcgcttgatggtatttgtcaagcaaggcaagtaatcttgaatctcgggatctatcatccaatacttcaacaatttgcatcacatcatggttagctgcaagatcttctgatccaataacaacctttattggatttggatccataaactcttgggctagcttgtggacagcaagaggccaagttgcactaaacataaccatctgacgtacagatgatgtttggctcaaaatcgccctgacttcaggttcaaaacccaaatccagcattctatctgcttcatctagaaccacaaatgaaacctcattaagcttacaaacacccatttcaataaggtctttcatacgtccaggagttcctatgactatatccactcctgatttaagggcagctatttggggtccctttgaagttccaccataaaggcaaactgaatttatcccacatggtgtaccagcctcactaagtacatctgcaatctgctgagcgagctctctcgtcggcgacagcacgaggcaccgcggcacagccttcttccctgttttcccccctaccttctgcctgatatgcataagcgccggcacaccaaaggcaatcgtcttcccggatccagtggcggcgatgcctatgaagtcgcggccgtcgaggaggaacggccaagcgtgcgcctggatgggcgacggccgcgcgaactccttgcagcagtcgagcacctgggacggcagctcggcggcggagaacgaccgcagcggcgcgtacttggtgtcctcggagcccttcccggtcacggccacggccttctcggcgccgttctccgcctcccctcctcctccgccgggtccatcctccgcccgcttcttcttcttgccgctcttcgcgacctcctcaaccgccgccgccgccgccgcctcggcctcggcctcggcctcgg

SEQ ID NO: 7123 - DNA, 478 bp, Setaria italica
  Peptide Sequence Number=SeqID_73097
atagatctataaagcaaatcctgaaaaattcaagtatacatcactaatcttggagaaaaccgaaaccctaactcaagaacacaatttggaagaaattcgaaatccaagccggatctgcgagagatttagaaggggatcataccaaagatgctctccaaggttttagcaacatttcccttcaaccaatctcacgagattcgggctcaaacgtgatgaacgaaaattccccaaaaaaaagtttccgaaaatagggaaaaagaaaaacactcgggaatcaaagatttagcacaatttgagacaacaaacaatactaaatcacgagaacatcttctatacaagatgagaactagcctcctcccttcatccacccactaaagatgaagaaattaagagaaaagagtaatcactctctaatctccctctctcctctcactttaagcacatgactagcctctaagcaaatagataatgagttgct

SEQ ID NO: 7124 - DNA, 500 bp, Setaria italica
  Peptide Sequence Number=SeqID_73098
cttttagttttttagtttttttttttaaggtttacaagcaagtaatgattgcatgagaattagtcacgtaagaagacaacgatggttcacaatctgatgatcgaaacctgtagcttctgttgcttgctagcttactgttacctgctactgaatgttgtcgctgcttggacaggtctcctggtgctggcacgttgggcttcgcgtactgaaactgctacctgggccactcggcctgctgatgcgcgtgggctgttggtctggctcgtgcactggtgggccgctcctgcagcttccccgcctggaccgctgacgacctgcaccgcctgctgcgcgagcttgtggcccgctcgccgatgggccggtttgcctgctaggccgctgcagctggcccgctcgctctgtcttgcgaatgtgtgcttcagcttccgtgaatcgacgacgccctgcaagagagaaaaacagagacgaactgcaagaacaagcaagaacacgactcaaac

SEQ ID NO: 7125 - DNA, 448 bp, Setaria italica
  Peptide Sequence Number=SeqID_73099
tgtcaaggcttgttgaaaccatgtgcctacttcttttggttagacatcatgtaacaactaagcaagcaaggatatcaacattaagcacaaaaacttggtgaattactgaatttttcttatcataatttttcatcattcacattaaacaagttacatgaagtgcctttgcggcacaaagaatccatgcttccccaaggaatgcattatgggctaaatatttgcaatgatacctaaatctttgatccaattgaaaagaacatagattccaagtagaagctaaacatggagctagcattcaagcaagagcaatgcataaataggtagctagtcaggggtgataagcatttcagaattcattattcaagattaacatttgattcagaaaagcatttagctcaacatggttatatgacaatatcatcaagagaatatgctgcacattgctaca

SEQ ID NO: 7126 - DNA, 466 bp, Setaria italica
  misc_feature (22)..(22): n is a, c, g, or t
  Peptide Sequence Number=SeqID_73100
tagttctctttagttttttttnttttttttttttaactttgtctagacttgattagcaaattgattagcaaaaggtatatagctaaacaagtagcaattaactatttgctataaataaaagaacaataaaagctcacagtgctgtccaagatgaagctaggcctgtgcgtgtgaatttgccttggagctcgcaatttgctggacggttgcctgggccaagttccttgcttgggccgtgcgtggaagctgctgctgcctgcgttggtgcacgtgcctggtgttgggcttgcctgatggcgcaactgagctgcaacagatcctgggccgcctgctggttgaatcctcctgggccgcggcctgcgacagtgctctgctgggccgcgacgcaccgagccggcctgctgctccctcacgtgctggtctgattcgcttgctgctcccctcgacgcctgaagctaccttgtct

SEQ ID NO: 7127 - DNA, 406 bp, Setaria italica
  Peptide Sequence Number=SeqID_73101
gctgtgcgtgcttcctcctcccgagtgacctgcgcaagaaacagagaccgaacaacgaagaacaggaagaacagttctaagaacgcatgaatttcaaatcacgagaactccttcgatactccacggatcaagatgaaatttgagacaaggatgtaataccccgagggcaaatagatccatgagacaaatcctgaaaagctcaagtattcatcactaatcttggagaaaaccgaaaccctaactcaacaacacgttttggaggaaattcaaaatccaagccggatccgtgagagattcggaaggggaatgaatcaaaaatgctccctaaggtcctagcatcatttcccttcaaccaagttcacaagattcggctcaaacacgaagaacgaaaattcctacaaaaata

SEQ ID NO: 7128 - DNA, 547 bp, Setaria italica
  Peptide Sequence Number=SeqID_73102
caagctgggtctggtgcggcctgctgacggcccgttgcactgctcgttgcacgtgagcacgagcgctgctgcgtgcacggcacgtgcgcttgcgccatcttgcctgatgctccgctatccagagaacctgcgcgaacagagacaggaacaccaagaacaaccgaagaacaataacaaacttcaaatcataagatctcctccccatacttcgcggatcgacatgaaacttgagacacggatgcaataccccaagggcaaatagatccatgaaacaaatcctgaaaagctcaagaattcatcactaattttggagaaaatcgaaaccctaactcaagaacacgatttgggaaaattcaaaattcaagccggattcgtgagggatttgaaggggatcatatcaaagatgcttcttaaggacctagcaacatttcccttcaaccaatctcgctattttcggagctatttttggggatttattgttcttcgtatttgagctcgaatctcgtgagattggttgaagggaaatgcttcttaaggacctagcaac

SEQ ID NO: 7129 - DNA, 534 bp, Setaria italica
  Peptide Sequence Number=SeqID_73103
ccttgccatccacctcgactccttccagtttcaaattggacagtgacgtcatatatctagttgctcccagggacctctgccggtttgctccaaataggcatagttccctgagctttggtgctctaggcagagtggttaacttgtcgcaatgataaatacggacagtctcaagcaaagggaatagtgcatgttctacttcaattcaatggcagcctcccatctctcaaagctccataaacctatcaatatgaggctcttcaatcctggaaatgctgagcggaccattgtatattctccaccatcataccattttctgagcactcccgcttctggtaatgctgtcaattttctgcagccatcaatatgcaatttctcgagctgaggaaatgctactagctcttcttgcactacctgatcataaaacctatcaaaattctcaagacaaacaagcttaagatccttgagctttccaaatgtggaggatgtacaactgctgcacaagaactgcaactttgtcaaccgttccgttaccaa

SEQ ID NO: 7130 - DNA, 806 bp, Setaria italica
  Peptide Sequence Number=SeqID_73104
ttggcccacgtgcttgtgctgggccacaagcgagcatgcgctctaggctgcttggcacgcgcgagctaggccaagcctgctgctcagctttgcacgctgggccgtctggcacgtgcgaactgggccgactttgctcaagcctgcacgttgttgccggttcggcctgcgttgcacacgagcgtgttgctcctgctgttgcgaatcgctttgctcaacgcctgcacaaggaagaacagaaagaaccgaagaacacaacaagaacgccggccacacttcaatccaaaattcctttctcgatactccacgatttgacacgaaacttgagataaggatgcaataccccaaggtcaaatagatccatgagacaactctcaaaaaactcaagtattcatcactaatcttggagaaaaccgaaaccctaattcaagaacacgatttgggaaaaacttaaaatcaagccgaattcgtgagcgatttggaggaggatcatatcaaagatgctctccaaggtcctagcaacatttcccttcaacctatctcacgagattcgggctcaaacatgatgaacgaaaattccctaaaaatagctccgaaaatagggaaaagaaaaacgctcgagaattaaagatttagcacgatttgagacaacaaacaaaactaaatcacgagaacatcttctatacaagatgaggactagcctcttcccttcatccacccactaaatatgaagaaattaagagaaaagagtaatcactctctaatctccctctctcctctcactttaagcacatgactagcctctaagc

SEQ ID NO: 7131 - DNA, 934 bp, Setaria italica
  Peptide Sequence Number=SeqID_73105
aatactcaagaatactcaagaaggtcgctagcttcctgtctaagctccaagcagtcctctctagcaagaatgcttggcgcatgtctgtaggcctggtgcatgcgttggcctgccttcctcgtgcatgggcctgcaggtctgctttgctcgaatgcccagatggcctgctagctggcctgcttcgcgtcctgggctgctacctggcgaagctgggcctagtgcactgctgcacctatctacctgctgggccgccttgctgggcctgctgtagctggcccgcgtgcacgtgctactcgctgctctggctcgctcgctgcctcgcttccctgttcctgcgcacgaacagacagagggaaaacaagaactccaagaacaccactcaagcttcaaactaaaaatactccctcaaaattccatgaatcgagacaaaaacttgagctatagatgcgcaaccacaagtgcgaatagatccatgaaaaagatctcaaaaagctcaagtatccatcacggattttggagaaaaccgaaaccctaactcaagaacgcgatttgggaaaaactcaaaatcaagccggattcgtgagggatttgaaaggggatcatatcacgaatgctctccaaggtcctagcaacatttcccttcaaccaatctcacgagattcgggctcaaacatgatgaacgaaaaatccccaaaaatagttccgaaaatagggaaaaagaaaaacgctcgggaatcaaagatttagcacgatttgagacaacaaataaagctaaatcacgagaacatcttctatacaagatgaggactagcctcctcccttcatccacccactaaagatgaagaaatcaagagaaaagagtaatcactccctaatccccctctctcctctcactttaagcacatgactagcctctaagcaaatagataatgag

SEQ ID NO: 7132 - DNA, 808 bp, Setaria italica
  Peptide Sequence Number=SeqID_73106
ctgatgctattcatctcttggctcttgcacagttaacagagcacatgtatacaaatacaggggaaattggtaatgactactcactaggctgcactctgctttgaggttgatgcagatttggcgaagtcctttataattctttttagtatcaccaccacatcactctttgccatgctttgctcaaataactacgaatgaagctaggcatgtactggctgataccatgaagagtgcctgcgccatgtacgacatacgcgctgcccgacatgtccaagacctactacagggcgtgtggtcttcacacagaagccccgtaggaggaggaagctaggagcagagacgcccaagcaaggatggagagcgttcttccaaaatggcatctcgtggattgagggggatgccataccgctcccgcaggtctgaaacaagtgactttatacctggacagttgctaactgataggtcactgagagatgagtattctcctgtcccactgggcaaggacgtcaggtttttgcaaaatgccagaaagagctcttccaatgctgggatctcgatcatgcatgattctaatgatctcaactctgggcactcacagactgttagctttttgagtgcatccagctcgcctgataggatttgtagttgagagcaacaataaatttttatttcttcaagggatgagggaagattgagaacctctaacaatccatcacatttattgattttcagagtttccagagatgatgagagatcctcctgtacagcagtggatgccatgatgacgtcagtggtaggacgacctgca

SEQ ID NO: 7133 - DNA, 522 bp, Setaria italica
  Peptide Sequence Number=SeqID_73107
gtgggcctccttgagctgctgggccgcgacgcacggagccgggctgctgcttcctcacgtgctggcccgatttgcttgctgctccccctcgacgcctgaagcacctgcacgcatgaacagaaggaaacaaagaacagaaacaagaacggcaagaacacacgcaacttcaaatcgtgagatctcctttcgtactcagcggatcgaaacgaaacttgagacaaggatgcaataccccaagaacaaatagatccatgtgacaaattacaaaaagctcaagtattcatctcaaatcttgaagaaaatcggaaccctacctcaagaacacgacttgggaaaaactcaaaatcaagccggatttgtgagggatttgaaaaaggatcatatcaaagatgctctccaaggttctagcagtatttcccttcaaccaatctcatgagatttaggctcaaacttgatgaacgaaaatttccctttaaaaatttagctccgttaccgttggaaaaagaaaaatgctcgggaatc

SEQ ID NO: 7134 - DNA, 873 bp, Setaria italica
  Peptide Sequence Number=SeqID_73108
tctctctctaagcacttggctagcctctaagcaaatgaattagggttttctcaagaggtgctgaaattaacagccatccacccatatttatagtctgggacggaggatcaaactacccctacaactacaactaggataattaccaacgtagggtattttggtccatgtttttctacgctcatcggatggacacgccaccttcacgactttgcttcgcctcgatgcaagcttcgcgatgatgccacgtaccgtccttgaagctccggccgaaccaggctcgctcccggttttgaggcccaaaccagcaaacctgcctgcactatggttttgaggcccaaaccacccaaaccgtccatttccgcttggccgccacgcaacctcctcgatgtcgacgcgtgtccagtctccgccaagcttttgacgcctccaagtctttcgctcccggctcccaggccgcgtacttgactcacctccatcccgcttgactcgaccgccgccatctccatcccattattttctcttgctcttccatgcaccatgtggaccacttatgactccgtccggactcctcgggtccatcggtccaagcctactcgcgttcatccttcaccacccttggtccatcggcatgaacctttcgcttgaccttcatcgcatgccgttggccattacaccgcatcctacacctgcacatcacaagcaaagagcaacatcattccaacacaacattatcaatcactcatcatccaagggtgaccacaattggtcctcagtagtagttgagaaaggacatttttggaatgtaaagtagctcacgggtcactataaaaggggagctctaccctgttgtagagagagacttattgttttttg

SEQ ID NO: 7135 - DNA, 239 bp, Setaria italica
  Peptide Sequence Number=SeqID_73109
caacatcataccaacacaacgttgtcaatcactcatcatccaagggtgaccaccattgatcctcaggttttcgcaacgtaccagagtgagctcttccaatgctgggatctcgatcatgcatgattctaatgatctcaactctgggcagctccaaactgttagctttttgagtgtatccagctcgcctgataggatttgtagttgggagcaagtacgaatttctatttctttaagggata

SEQ ID NO: 7136 - DNA, 1147 bp, Setaria italica
  misc_feature (57)..(57): n is a, c, g, or t
  Peptide Sequence Number=SeqID_73110
gtgaaagaactaataatgattactcaaatcattgatccctgtagctagaaagcaacncttcatggcacgaaggcactacctgctacttccgctgcttgcctgctggttgcttggcctgtcgccgtgcttgtggcctggtctggcccgtgatgcgtcagctactcctagatcgcaagctccagacggcctgctagcgatcagcacctggggcagcctgccaactcgctgggctgctggcctgcgaaggctgctgggccgctgcttgcttccaccggcccgcgtgccgctcgctgtgaacggcctggcaacaagtgaagcgctgctccatcatctgcgcacacaaacagaaggatacgaggaacagagaacgaacagccaagaacacaaagaacaccggccacacttcaattcaaaattccttccttgatactccacgattcgaaacgaaacttgagacaaggatacaataccccaagggaaaatagatccatgagacaactctaaaaaagctcaagtattcattgcaaatcttgaagaaaaccaaaaccctaactcaagaacacgatttgggaaaattcaaaattcaagccggattcgtgagggatttgaagggggatcatatcaaagatgctccctaaggtcctagcaacatttcccttcaaccaaactcacgagattcgggctcaaatggactgcccgtgacttcgcccggactcgctcggtccattggtccaagcctactcgcgttcatccttcaccgcccttggtccatcggcatgaacctttcgcttgaccttcaccgcacgccgtcgaccgccacgtcgcatcctacacctgcacatcacaagccaagagcaacatcataccaacacaacgttgtcaatcactcatcatccaagggtgaccaccattgatcctcaggttttcgcaacgtaccagagtgagctcttccaatgctgggatctcgatcatgcatgattctaatgatctcaactctgggcagctccaaactgttagctttttgagtgtatccagctcgcctgataggatttgtagttgggagcaagttacgaatttcttatttctttaagggatgagggaagattgagaacctctaccaatccatcacattcattgattttcagag

SEQ ID NO: 7137 - DNA, 675 bp, Setaria italica
  Peptide Sequence Number=SeqID_73111
ctgtctagggcaaacaatattctcagttattcagttcaacgacatagtgggatacagagcataccaagtggatactcagctacatttgacagttgttcgttcaaaaaagaaactccaatagaagaaacttatattacacatgacagtttctgttcagaaatcttatataggatacaaataacaagtggagaaaaatgaaataagagatggctaatgctattcatctcttgcacaagtaaacagagcacatgtatccaaatacaggggaaattggtaatgactactcactaggctgcactctgctttgaggttgatgcagatttggcgaagtcctttataatctgttttagtatcaccaccacatcactctttgccatcctttgctcaggagattcacacgaatgaagctaggcatgtactggctgataccatgaagagtgcctgcgccatgtccgacatgtccaagaccaactacagggcgtgtggtcttcacacagaagccccgtaggaggaggaagctaggagcagagacgcccaagcagctatggagagcatcctgttaaaaaaattgtaaaagttcaataaaatttggtataaacttcatccaattttacaaacatgtcgatatatgcaagttctaattagaattaaaaaaaaaaaactaagaagactacg

SEQ ID NO: 7138 - DNA, 884 bp, Setaria italica
  Peptide Sequence Number=SeqID_73112
gtgatggcacgtccgacatggaaaaatgcaccggaggcacgtttagtctttggctggaacgatgcggctgcacgtaaagggttgaggcgctctccctccctccctctccgaagagccctgctactgaatgttgtcgctgcttggacaggtctcctggtgctggcacgttgggcttcacgtactgaaactgctacttgggccactcggcctgctgatgcgcgtgggctgttggcctggctcgtgcactggtgggctgctcctgcagcttcccagcctggaccgctgacgacctgcatcgcctgctgcgcgagcttgtggcccgctcgtcgatgggccggtttgcctgctaggccgctgcagctggcccgctcgctctgtcttgcgaacgcgtgcttcagcttccgtgaatcgacgacaccctgcaagagagaaaaacagagacgaactgcaagaacaagcaaaagcatgaatgaaacttcacgctaaaaatactccctcaaaacttcatgaatcgagataaaacttgagccatagatgcgcaaccccaagggctaatagatccacgaaaaagatctcaaaacgctcaagtattcatcgcggatttagagaaaaaccgaaatcctaactcaagaacacgatttaggaaaaactgaaaatcaagccagattcgtgagggatttgaagggggatcatatcaaagatgatctccaaggtcctaccagcatttcccttcaaccaatctcacgagattcgggctcaaacatgatgaacgaaaattccccaaaatagctccgaaaatagggaaaaagaaaaacgctcgggaattaaagatttagcacgatttgagacaacaaacaaagctaaatcatgagaacatcttctat

SEQ ID NO: 7139 - DNA, 698 bp, Setaria italica
  Peptide Sequence Number=SeqID_73113
aataagatagtccaggacgaaagactatactacccctacagctacaactaagataactacccacgcaggggcattttggttccaagtttttatccgtgcatcggacggacacgccgccttcatgactttgcttcgcctcgacgcaagcttcgcgatgacgccacgtgccctccttctcgaagctccggccgcaccgggctcgcccccgattttgaggcccaaaccgggaaacctgcctgcgcggtggttttgaggcccaaaccacccaaaccgtccattgacgcgtgtccggcctccgccaagcctcccgcttgactcgaccgacgccgtctcattctgtcatgccctctcgccattccgtgcaccatgtggaccgcccgtgacttcgcccggactcctcgggtccatcggtccaagcctactcgcgttcatccttcaccgcccttggtccatcggcatgaacctttcgcttgaccttcaccgcacgccgtcgaccgccacgtcgcatcctacaccagagtgagctcttccaatgctgggatctcgatcatgcatgattctaatgatctcaactctgggcagctccaaactgttagctttttgagtgtatccagctcgcctgataggatttgtagttgggagcaagtacgaatttctatttctttaatgaatgtgatggattggtagaggttctcaat

SEQ ID NO: 7140 - DNA, 1375 bp, Setaria italica
  Peptide Sequence Number=SeqID_73114
tccgaacgggaaaataaacataaatgaaggaccgaaggggcgaccagagggggtgaatgggagcctataaaaaattctcaacgaaaataaggcctatgtcccaaacgcaaccccaaagcacactacgtgtcgtatcgtcaagatgacgcaagtcaactcgtgacaggctcaccctaggaacgatgtgacacgctcaagacataacggaagcaagacataaaatgactctaacaagtttgctcaaaacactgattaaccaagatcactactagctaatcactcaactaagcatgcaagagaaaaaaaaaattaatccaaaatgctaggcgtgattagctaatgagagaacagaataattaacagctagacttgattagcaaaagatatatcatggaaagtagctaaacaagtagtgattaactatttgttataaataaaagaacaataaaagctcaccgtgctgtccaagatgaagctgggcctgtgcgtgtgaatttgccttggagctcgcgatttgctggacggttgcctgggccaagctccttgcttgggccgtgcgtggaagctgctgctgcctgcgttggtgcacgtgcctggtgttggacttgcttgatggcgcaactgagctgcaacagatccgctgcctgggctgcctgctggttgaatcctcctgggccgcggcctgcgacggtgctgttgttggcctgccttgagctgctgggccgcgacacaccgagccggcctgttgctccctcacgtgctagtctgattcgcttgctgctcccctcgacgcctgaagcacctgcgcgcatgaagaacgaaaaaccaagaacacgaagaacgccggtcacacttcaattcaaaattcctttctcaatactccacgattcgacacgaaacttgagacaaggatgcaataccccaagagcaaatatatccatgagacaactctcaaaacgctcaagtattcatcgcggattttgagaaaaattgaaaccctacacgaagaacacgatttgggaaaaactcaaaatccggccgaatctatgtgagatttgaagggggatcatgtcaaagatgctccctaaagtcctagcaacatttctcttcaaccaaaaccacaagattcgggctcaaacatgatgaacgaaaattccccaaaaatagctccgaaaacagggaaaggaaaaacgctcgggaatcaaagatttagcacgatttgagacaacaaacaaagctaaatcacgagaacatcttctatacaaaatgaggactagcctcctcccttcatccacccactaaagatgaagaaatcgagagaaaagagtaatcactccctaatcccccctctctcctctcactttaagcacatgac

SEQ ID NO: 7141 - DNA, 1226 bp, Setaria italica
  Peptide Sequence Number=SeqID_73115
gtcctgaactgctagaccaaagttgccttgcgtgcggcccgtggacgtgcggcctggtggcctgttgcgctgccggcccacaactgctgctgcgtggaccgctgcttgctggcctgctgcacgcgtacctgggccgcagctcttgctgcttgctgggccgcctccttgctctgatctgcttcgctgctggcacgtgtgtgtcccgtgcacgtgagctgcccgatgcctcctgcgcaagagaaaagcgacgcacgaacagacacaggaacaacgaagaacagcaagaacaccgagaacaacacctccgacttcgaacgagaaattctctttcaaatcttcatgaatcgagatgaaacttgagacaaggatgcaataccccaagggcaaatagatccatgaaactaatcctgaaaagctcaagaattcatcactaattttggagaaaaccgaaaccctaactcaagaacacgatttgggaaaaactcaaaatcaagccggattcgtgagggatttgaaaggggatcatatcaaagatgctctccaaggttctagcaacatttcccttcaaccaatctcacgagattcgggctcaaacatgatgaacgaaaattccccaaaaatagctccgaaaatagggaaaaagaaaaacgctcgggaatcaaagatttagcacgatttgagacaacaaacaaagctaaatcacgagaacatcttctatacaagatgaggactagcctcctcccttcatccacccactaaagatgaagaaatcaagagaaaagagtaatcactctctaatctccctttctcctctcacttaagcacatgactagcctttaagccaaaagataatgagttgataagcaaagaggtgctgaaataaccagccccccatccctatttatagtccaggacgaaagacaatactacccctacagctacaactaggataactacccacacaggggcattttggtccaagtttttatccgtgcattggacggacacgccgccttcacgactttgcttcgcctcgacgcaagcttcgtgatgacgctatgtgccctccttctcgaagctccggccacaccgggctcgcccccggttttgaggcccaaaccgagaaacctgcctgcgtggtggttttgaggcccaaaccacccaaactgtccatcttcgcttggtcgccacgcgacctccacgatgtcgacgcgtgtccggcctcc

SEQ ID NO: 7142 - DNA, 1915 bp, Setaria italica
  Peptide Sequence Number=SeqID_73116
cccaacggggaaacctgcctgcgcggtggttttgaggcccaaaccacccaaaccgtccattgacgcgtgtccggcctccgccaagcctcccgcttgactcgaccgatgccgtctccgtcctgtcatgccctctcgccattccgtgcaccatgtggaccgcccgtgacttcgcccggactcctcgggtccatcggtccaagcctactcgcgttcatccttcaccgcccttggtccatcggcatgaacctttcgcttgaccttcaccgcacgccgtcgaccgccacgtcgcatcctacacctgcacatcacaagccaagagcaacatcaaaccaacacaacgttgtcaatcactcatcatccaagggtgaccaccattggtcctcaatctcccccttgatgagtgcattgacaacaccccacaaattcatagtattgaagcagaaaaataagaaactcaaaatagaaaactctcagtcccctaagataagggcaacggctctacacaactgagttaaaatcatgtgatcccttaagaagaggcagaaaacgggctcaacaccaatcacatgaacatccaaactcaaataaaaaatcggctcctcaagaagaggtaaacagctcaacgcgaccggtacaagagcataagagcataacaagagtataacaactcataaatactccccctgaacatatgcactccccctgaaatcatgcatacatgcaaagtctcccccttgatagatgaaagagtttgtgtagatttctctcccccttgttgacaatgcaaccatcaagaaaagcatgaaagcacaaagtgcatgccatggaaatgcagaacctaacaagcttctcaaatatatcacaatgcactctcaaaggctactagggagataaagcttgatagatcataagaaacaatagcatcgccaacaagatgatagcaagttacaacagtggatgtggagcaagtatcaagttttagcaatgtataaaaagatcaccacatgagcattcacctagttaagaatcacccaagcaagaatagaccagtccatcaagagctcatactaggaaaatccattctcaacaagagatcattgcaaacacccacatatgcatcacaagtcatgtttaaagcttgttgaaaccaagtgtctacttcttttggtagacatcttgtaacaactaagcaagcaataatatcacattaagcacaaaaacttggtgaatttatgaagttttcagcatatttcttttcagtattcacacaaagcaaaatacatgaagtgcctttgcggcacaaagaagccatgcttccccaaggggtgcatcatgggctaaacatttgcaatgatacctagatctttgacccaattgaaaagaacatgaattccaaacataagctagatatggaaccagtattcaaccaagggcaaaccataaccaagcatctactcatgggtgataagcaagttaatagagtagaatttagcagtgaatttcaaaaacagttatctcaacaagtatacaatatcatcaagagcataactgcacattgcatcaaaatcaccaaccacagcactacctcacaagtagcataaggaagtacacaagatatataggagaagctcatctagtgcagcatgatacaaaatgcaatatgatacaaaatgcatggaaactaagctaaaatgatacagatgaacaacatgccatacccaaatgtgaactaaggtaaagcatgacatgatgttcatatgtatcatccaccaaaatatatcacaaaaatagcatgataagatatacatgaagaactcaaagctatcatgaaaaagtggctatcctaccatgttttgtacaaaaatgatacaagtataatacaagagaagctccaaaaacccaactcagaaaggaa

SEQ ID NO: 7143 - DNA, 4400 bp, Setaria italica
  Peptide Sequence Number=SeqID_73117
ccttagaaagcctggtttgctccttgcgtgagtggcaggcttgctgccactcgatggcctgcgggtgcttgcctggaattgctgaaagcctggcccgcgagcacctgctgctgcagcttgggccaccagatgcaatccggcccaggtaacgagctggcctgcggcacggcttgctcggcctgctgcgcaacttgctggcctgctgctctggtgcagacttgcatgcgctgtcccgtacctctcgtctgctgctcgacctgaagaacagaagaaacaaaaggcaccgagaactcggttcgaacttcaattcaaaaatctatcctcaatactccatgaatcgagcgaaaattgagccatagatgcgcaaccacaagggctaatggatccatgaaaaagatctcaaaaagctcaagtatccatcacggattttggagaaaactgaaaccctaactcaagaacgcgatttgggaaaaactcaaaatcaagccggattcgtgagggatttgaaaggggatcatatcacgaatgctctccaaggtcctagcaacatttcccttcaaccaatctcacgagattcgggctcaaacatgatgaacgaaaattccccaaaaatagttccgaaaatagggaaaaagaaaaacgctcgggaatcaaagatttagcacgatttgagacaacaaacaaagctaaatcacgagaacatcttctatacaagatgaggactagcctcctcccttcatccacccactaaagatgaagaaattaagagaaaagagtaatcactctctaatccccctctctcctctcacttttagcacatgactagcctctaagcaattagataatgagttgctaagcaaagaggtgctgaaataaccagccccccatccctatttatagtccaggacgaaagactatactacccttacagctacaactaagataactacccacgcaggggcattttggtccaagtttttatatgtgcatcggacggacacgccgccttcacgactttgcttcgcctcgacgcaagcttcgcgatgacgccacgtgccctccttctcgaagctccggccgcaccgggctcgcccccggttttgaggcccaaaccgggaaacctgcctgcgcggtggttttgaggcccaaaccacccaaaccgtccattgacgcgtgtccggcctccgccaagcctcccgcttgactcgaccgacgccgtctcattctgtcatgccctctcgccattccgtgcaccatgtggaccgcccgtgacttcgcccggactcctcgggtccatcggtccaagcctactcgcgttcatccttcaccgcccttggtccatcggcatgaacctttcgcttgaccttcaccgcacgccgtcgaccgccacgtcgcatcctacaccagagtgagctcttccaatgctgggatctcgatcatgcatgattctaatgatctcaactctgggcagctccaaactgttagctttttgagtgtatccagctcgcctgataggatttgtagttgggagcaagtacgaatttctatttctttaagggatgagggaagattgagaacctctaccaatccatcacattcattgattttcagagtttctagagatgatggaaggaaaatactccggtcggatggtgagagatcctgtacagcagtggatgccatgatgacgtcagtgctaggacgacctgcatttaatgatgtcttgtcctgttgcttgaaggatatggtcttcagattgttacagtatcgaacatccatcttcttgagggcaggggtagggttgaagacctctaccagactatcgcaaaaagatatacttagagactcgaggcagggtaaaagttggctcctttctaatgttgcctggtcaggagcatatccaaccagactctcgcaattccaaatttccagcctccgcaaggaaaccaaatgttgcaactcgttttccggccagtagattagttcattcgaggaacggatatccagatcttgcagctgccgaaaacaagcccacagagctagtgcatgtgattggaagaacaaactgcagtacttaaggtgcatatttgtcacagatgaaatatagtcccatttgtccttgccatccacctcgattcctttcagttccaaattggacagtgacgtcatatatctagttgctcccagggacctcttccaaaatggcatatcgtggattgagggggatgccataccgctcccgcaggtctgaaacaagtgactttatacctggacagttgtaaactgataggtcacggagagatgagcattctcctgtcccactgggcaaggatgtcaggtttttgcaaccttccagagtgagcttttccaatgctgggatctcgatcatgcatgattctaatgatctcaactctgggcactccaaaactgttagctttttgagtgcatccagctcgcctgataggatttgtagttgggagcaacgatgaatatatatttctttcagggatgagggaagattgagaacctctaacaatccaccacatccatcgattctcagagtttccagagatgatggaaggaaattactccggccggatggtgagagatcctcctgtacagcagtggatgccatgatgacgtcagtgctaggacgacctgcatttaatgatgtcttgtcctgttgcttgaaggatatggtcttcagatttttacagtatcgaacatccatcttcttgagggcaggggtagggttgaagacctctaccagactatcgcaatcaaatataaagagagactcgaggcagggcaaaagttggctcctttctaatattgcctggtcaggagcatatccaaccagactcttgcaatgcccaattttcagcctccgcaaggaaaccaaattttggaactcgttttccggccagtagattaggtcattcgaggaacagatatccagatcttgcagctgccgaaaacaagcccacagagctagtgcatgtgattggaagaacaaactgcagtagttaaggtgcatatttgtcacagatgaaatatagtcccatttgtccttgccatccacctcgactccttgcagtaccaaattggacagtgacgtcatatatctagttgctcccagggacctctgttggttttctacatcactcatagataggcctagttccctgagctttggtgctctaggcagagtggttaacttgttgcaacaatcaataccgacagtctcaagcaaagggaatagtgcatgttctacttcaatttcaatggcagcctcccatctctcaaagctcggtaaattgctcaatatgaggatcttcaatcctgggaatgctgagcggaccattgtatattctccaccatcataccattttctgagcactcccgcttctggtaatgctgtcaattttccgcagccttgaatatacaatttctcgagctgaggaaatgctactagctcttcttgcactacctgatcataaaacctatcaaaattatgaagataaacaagcttaagatccttaagctttccaaatgtggaggatgtacaactgctgcacaagaactgcaactttgtcaatcctaccaaatgaagaagctgtagtgctggtaactggcccaatggaggaagctgctcagatttgctacaaccagatagccgaagctcaaccatgtttcttaacacacccatccataatggaaatttggtgccttggtaggcttctatttctagagctagtagtctatcatgaacttcgagaacctctagcacctcgttacattgctgttcctcctccttaccacttgtccaccttaatgacagctgtctcagttccttcttatttccaagatttgcttgttttgcatttcttgcttctgtcacattttcgagctgctttagctctagtgaaccaccaatgttcaaattttttagctctccaagactactacaatccgagtcactgctcactacaaaacatgtaagtgtttgaagagaggtgagtcgtccaagctccggaggcatacactgtaacttcgtgcatccatcagtgtagagatgacaaagggcagtcatgtacttcatttgcttcggaagcatactaagattctcacaaccagaaagtttaagtgtctgaagattgtatagtatgcttatgtcatctggaagtgcttcgactctactccaagagatatcaaggtacctaaggtggtgcagatgctttggtttcattggcaaatatttatatgcactatatttagatgctggtagagcaagtgctcgcagagaactattattggatgaattccgcacatctcgatatttggatgaataatgcagctcatctacaagcatctaaatatagtgcatataaatatttgcc

SEQ ID NO: 7144 - DNA, 716 bp, Setaria italica
  Peptide Sequence Number=SeqID_73118
ctcttctccatcggaatcgagggcgggccgccggaagacgatctgcagcgaagcgaagggagaaatcgaggaagaagcgaagatgatctaccgcaactggtcgctgctctcctcgacggtcgtcatctggggcggcgtcgccaccgccggcctcgccgggatcttcctcttcggcggcaaggagaaattccaggactacctttgccgtgagggtgagaggcttaggcggcaggacagagccgcgatgggccgaaactagagaggaagccaaacctgatggatatcaacgatcggagcaacatttgaatttgacaagaaatccgcccctctactagagcaagccccccttctagaatggaatccttctgaattgctttcgctttcgtgagccgaactcgctccgtaacaataaatctgactgcaccctgtgtaaatcattgaagagctaacgcttttgcctttttggcccgtggtttgtcaaagcttgtgtgcttgtttggcatcgactggcttgatgccctgaataaaggttgatgcatttgacgggacatcatcacaaatatctggcctccttgtgttgttcaatttgctaccaaaggcttgtctttgacgctttgtgtgcttgtccagggtgggctatttggctaatgtattcctcctaattgtgtttagctacatctgatcctgttatagcagcatatttcctgcgtaaaaaa

SEQ ID NO: 7145 - DNA, 651 bp, Setaria italica
  Peptide Sequence Number=SeqID_73119
cggcgcctcgctctgcgccatgcgcgacgtcgtcgacgccgcctcctccgccgccgcctccgcgtccgccgaccgcgacacggctccgctgaaccgccgccgcgcgcaccgcgctggctcgtcgtcgtcctcctccgctgccgccggcggcggcagccactcctccctgcgcggcctctccggctgctacgagtgccgcgccatcaacgtcgagcccatgtcgaggcggtacccgaggccgagggagctgtgcgcctgcccgcagtgcggcgaggtgttcaccaaggccgacagcttggagcaccaccaggccattcgccatgcagtgtcggagcttggacccgaggactccggccgcaacatcgtggagatcatcttcaagtccagctggcagaagcgcgaccgccccatctgccacatcgaccgcatcctcaaggtgcacaacgcgccgcgcaccgtcgccaggttcgaggcctaccgcgacgccgtgcgctcccgctgccgcgccacggcggcgcgtgccgccgccgacggcaacgagctgctcaggttccactccgcgccgctcgcatgcgcgctcgggctcagcggcgccacctccctctgcgccggcgctgccgccgacccgtccagcatcaggagtagtaaccg

SEQ ID NO: 7146 - DNA, 198 bp, Setaria italica
  Peptide Sequence Number=SeqID_73120
ggcatcaacgcggaagtagaagagctcatttggatcaagccaacccttcagattatcgcagatgacgtgaagtgtactcatggtgctgccatcagtggtgagcttgatccaaatgagtacacttcacgtcatctgcgataatctgcagtttccgcgttgatgcctcttgcttggaagtagaagagcttcattttggat

SEQ ID NO: 7147 - DNA, 1451 bp, Setaria italica
  Peptide Sequence Number=SeqID_73121
ctcccctccaaggcgcccgacctcgcgccaccagcctcccctttcccctcccacgttctcttctccgacgggctccttgtatccgcctctggcgttcatgtcagcgccctcgccgatcttcccccggccgcgcgcgagaccgcgccgccgcggccctcgctgcctccgctgaattcgctcacaaggacctcttctacgacttcaacgccgttggagcgagggacgtcgtggtcgtgcacgtgcccgagggggtcaaggtggccgacgaccctgttcacatcatgttcacctataccaattgcggtgctgagagtatgctgatgtccaatccgagggttctggtcgtggccgagaaggaagcagaggtggccatagtggaggagcactttggtgctggagaagaaggtggttgctattgggccaatccagtagcagagattatcatcgacgctggcgcaagggtggttcattcatatgtgcagcggcaatcctttgctgcagctcatactaaatggactgtcgtccagcaggatacgtccagtaaatatgaatttgttgaggtcagcactggagcaaaattgaacaggcacaatctacatatccagcaattaggtcctgagacagaaacagaattgtcaacacttcacttaacatctcagaataaacagatacatgatctgcatagcaaactgatacttgatcaccccagaggtttttcacgacagctccacaagtgcattgcttgtgccacagggaatagcatatttgatgggaatattaaagtcaacaggtatgcacaacaaactgatgctgggcaagaaaccaagtgtcttatcctatcaccaaaggcacttgttaatgtcaagccaaaccttcagattatcgcagatgacgtgaagtgtactcatggtgctgccatcagtggtgagcttgatccaaatgagctcttctacttccaagcaagaggcatcaacgcggaaactgcaacggatgccctactttacttttttggagcccatgtgatcaagcgcataccgtttaaacctataaatgagaatgcattagcgcagttcaaagagttgcttgcttcctccagacaaacaacttatgatgcccttctttcatgatctcgtttgatatggttcaacacatttttgtgagctgagaagattaggggtggtggaagtgtttcagccaaaaagtgaaggtggcgctatgaccacattttgatatgatgtaaaaaatactactctagcttgcaaatgctgtttatttgcacatggtgtgttcctctcttctctactaagaggaagctgctatgagcttcaaagtagtcttttttgcacatgttacaataataactagagtcggactctctacttgaaaaatattctgtaaagaaataccacgaagcagctcgctggaacaaataaagcccttaattcttctct

SEQ ID NO: 7148 - DNA, 505 bp, Setaria italica
  Peptide Sequence Number=SeqID_73122
catgctcaaaaatattttatacgtcagtcaaatatgagcagaaggaagagaaggtctagccttttttgacatggttcctgatgaggtaacctgcttatcttatcctatattttaatgcaattgttgtgctttctgtgaccttgtttcatacttatatatatgtgttctaactacactggtgctcattgttttgatagtatgtaaactcattattacttatgttagtgaaattttttggatcaaattgtttagcttgtgtgtcatggagccatggacagttatggacattggcccatcctgagtttcattaggttgttcttgtgctttgcatataatttggaactgaactgtgttctctttgttttacagtcgatggaccttccaccccttcctgggagtcaagaaccagaggcctcagtattaaatcaaccaccactaccaccacccgtggaggaggaggtagaatcgatggagtcagatacttccgctgttgcagagagtcctg

SEQ ID NO: 7149 - DNA, 1338 bp, Setaria italica
  Peptide Sequence Number=SeqID_73123
ccacggcttcctcccccctccctcccccccccccccccccctcccttcccgacacgcgcagccgtgaccgggcgccgcgagagccctagctggcggcggggaggcggcggcggcggggcgatgacgcggcggtgctcgcactgcagccacaacgggcacaactcgcggacgtgccccaaccgcggggtcaagatcttcggggtgcgcctcaccgatggctcggccatccgcaagagcgccagcatggggaacctctccctcctctccgccggatccaccagcggcggcgcctcccccgccgacgggcccgacctcgccgacggcggcggaggctacgcctccgacgacttcgtccagggctcgtcctccgccagccgcgagcgcaagaagggtgttccttggactgaagaagaacaccggaggtttttgcttggattacaaaagcttgggaaaggtgattggcgaggaatttctcgtaatttcgtggtctcaaggacacccactcaagtagcaagccatgctcaaaaatattttatacgtcagtcaaatatgagcagaaggaagagaaggtctagcctttttgacatggttcctgatgagtcgatggaccttccaccccttcctgggagtcaagaaccagaggcctcagtattaaatcaaccaccactaccaccacccgtggaggaggaggtagaatcgatggagtcagatacttccgctgttgcagagagtcctgcagcttctgctgtcatgccagagaatatgcacccaagctatccggtgattcttccagcttatttctcaccattcttgcaattctcagttccgttctggccaaatcagaaagatggagacgatctgccccaagaaacacatgagattgtcaagcctgttgcagttcattccaagaatccaattaatgttgatgaacttgtgggcatgtcgaagctaagcataggggagtctggtcaggagacagtatcaacatctctttcgttaaatctgctaggaggtcaaaatagacaatcagctttccatgcaaatcctcaaacaagggctcaggcctgatcttcagcatacagaactgcattagatgaaaccctggcaaaataagctttgcctccttgtttttttaatatttaagattaaccgtgctctgtagcttgtatcatgtgctgtaagttatgctatgtatggatgtatcttttgtttgtctggcacgcatgatatgacactctatgttaacaaagtcattaatgttagtcctgatcttcatggttgtaatgctgtaaacttttgtaagaagaaagtgttagtcagttctgtgggtagaaaaac

SEQ ID NO: 7150 - DNA, 1062 bp, Setaria italica
  Peptide Sequence Number=SeqID_73124
tttttttttaggaaacaacttgttagttataattcagaagaaaatgccacttttgccttgacaaaagcagtaaagaactgcggataaacactctcatcagagagaagctcacctgatccagtgacactagcaatcgaaaaacaatgcattgagccatattagggtcataaatcactccaaatctgcacccggtaaacaggtacattcgttctcaaaacagaggtcttcgaataaaccatacatgtctttcttaaacactcctagagtagggtgaccaaaagcaccaggatcatatacggttccgttcagtgtaacagcaactgcaccatgcaagtagtactactgagccaatttcattggctcacagaaagagacctctccctgcgaggagacctaacagcagggctcgcgctccttgatctgctgtccactggtgagcgcgacaaagatcgagacggggatcttgaatggtgctttggcttaggtgctggtgagtagcttctgctccgggaccgtgatctacctcttggagagccagagtagccaggtgaccttgagcgcaacctccgatcataagaacggcctctgccactgactctttcccttgctctcatctcagtgggcttctttctgttctcctctgcgaaaacaacagtaatttcccttccaagaaacatctgcccatccatatggtattttgcatcagcagcatcatcaggatcaaaatattggatgaatccaaatcctcgaggatccccagtgtagtaatcccttggaagatatacatctttaacacgaccaaattttccaaatggtctacggaggtcatcaggcctgcaatcccggcgaagattccttactagaagactagttgggaggtccctagcacggcccccataacgaccacgaggacttggactgcgagctcttctcctgtaacctcttggaggtgagggactgtaatcgtagcctcttcccatgctgatctttttctagggctcgaggggcggaggcggtctcgagaagcttccgaagtccgaacgcgaccgtggggaacgagag

SEQ ID NO: 7151 - DNA, 356 bp, Setaria italica
  Peptide Sequence Number=SeqID_73125
ccggggatggcactcgtgagtcatgacagcatcaaaacggcaaatggagggatcggaagcatctcgctagctcgcgacggtagcaacaagaagctggatctcttcatgggttgaagccttgttttaaccgtcaagttctgaacgacaggtcagtttgaccgtttcaatggagttccctttgccaacatttggagcctggatccattgatctggacagttggtttgcggcatattcgtctgaaattttgaagaaaatggacagttgatgctccggtagctacaaaggtgaggccttgctttttatgtgtccacaccatccattactgtatgcagcttgctgattgacagcgtcagtt

SEQ ID NO: 7152 - DNA, 255 bp, Setaria italica
  Peptide Sequence Number=SeqID_73126
aaacttcagttctgagctgaggcctcatttgcttcctagtcccttggtcatgacatactattttgtggcagaaaggaactctttaaagtatgacctgctggcagacctgtaaggttacggaaggagcagagtagacctctcggaacatatagacctgagcagcaccggagattgctctagcaccgtctctgcaacctgatggtcaagaagaaaatgaggaacgctaataaaggaaccgggattagcatcagggag

SEQ ID NO: 7153 - DNA, 178 bp, Setaria italica
  misc_feature (140)..(140): n is a, c, g, or t
  misc_feature (156)..(156): n is a, c, g, or t
  Peptide Sequence Number=SeqID_73127
tggtggtgcacacatggtacgtacatggatggctgctcttctaagtttctagaagagctcattcatgtaatgcttggtaagtgcatatctaatgctcatccatcgatagacaatttcgcctctcgccaagggttttttgngtccaaggcacaccgnggacacgtacaagggatttccc

SEQ ID NO: 7154 - DNA, 263 bp, Setaria italica
  Peptide Sequence Number=SeqID_73128
ggatagctcacaagaatattcagttaatgtgcttggagaacaaggtacatctgctacaaaccaagactgggttaggagtgattccctcaaaacagttgaaaacacagctatacctgtgattatgcttgtagcagatgtaccttgtgacacaaatatgttcaatgagtattcttcagtactggatagctcacaagaatattcagttaatgtgcttggagaacaagggagtcctcctcggtctgaactagaggtatcagctagta

SEQ ID NO: 7155 - DNA, 1769 bp, Setaria italica
  misc_feature (160)..(160): n is a, c, g, or t
  misc_feature (166)..(166): n is a, c, g, or t
  misc_feature (176)..(176): n is a, c, g, or t
  Peptide Sequence Number=SeqID_73129
agtgacgttgatcttgtagtttctcttccccctgtccgaaacctggaacctattaaagaagctggaattttggaaggccggaatggcatcaaggaaacatgtctacagcatgcagcaaggtgtcttacaaaccaagactggggttaggagtgattccctnaaaacngttgaaaacncagctatgtaccttgtgacacaaatatgttcaatgagtattcttcagtactggatagctcacaagaatattcagttaatgtgcttggagaacaagggagtcctcctcggtctgatacctctagttcagaaggcagcaacatgctggtgtcctcaaaattgaataaggatgattgtgacattgtgcagtcaattcgtcttgatataagtttcaaatcgccatcccacacaggactgcagactactgagttggtgcgcgagttgacacagcaatttcctgcagttgtacctcttgcattgattctcaagaagtttttggctgaccggagtttggaccatccctattcaggtggtctaagctcttactgtttggtgctgttaattgttcgttttctccagcatgagcatcatcttggtcggcctatcaaccaaaatctgggcagccttttgatggatttcttatacttttttgggaacatatttgatccacgccattagcgtatttctatccaaggaagtggaatttatttgaatcgtgaaagagggcacagcattgacccaattcacattgatgatccactttgccctgcaaacaatgtgggcaggaattgtttccgcatttcaccaatgtataaaggcttttgctgatgcttttgctgttctagagaatgagctactacagttcagttcagaatgtagcatgcctgaatcatcattcaatatactaaagaaaataatcccaagtattgatactgatgagttgtagctataaaaagaggtaggattccgcaagctacatttggtgtcaggttggaatgacctgtgcagccttttaagcactctgatggctatgcagctgcttagaagcctcagtctactgagcttgcttccctgaaatgggcgaagtagatctgcaagatctgcacaggagtgttcatgtaagtgtaacgatgcaagatgccttgctccctgatcaagcctctcaatgttgagacctctgatggaggcggattggtgtactcaagagcacgatggtggtgcacacatggtacgtacatggatggctgctcttctaagtttctagaagagctcattcatgtaatgcttgaaaggaactctttaaagtatgacctgctggcagacctgtaaggttacggaaggagcagagtagacctctcggaacatatagacctgagcagcaccggagattgctctagcaccgtctctgcaacctgatggtcaagaagaaaatgaggaacgctataaaggaaccgggattagcatcagggagatgctattggcgccaaaccacggttcgtgtagcaagacacgtctccagattgccgagccggtgccgagaacttcctggtgaccggggacgagatgctggttagcggacggaactgtggcaatgatgctctcagtactctcgttgtcatattgctggttgcagctacatctctcttgcttttgcaattgctctgaaatttgagcagttgctcttgtattgctgtactgtcttgtaactgaagcaaaatacagttttgctgcattgtaatgatttttacaggttagtagccaccgaaagtttttgc

SEQ ID NO: 7156 - DNA, 266 bp, Setaria italica
  Peptide Sequence Number=SeqID_73130
cattgcaaagagtcaaatcaacacctccgatcacacgtgaaagagggagaaatcttattacaatgcaaggggggaaaacgaacgggacgaaataaaggcacccgtcctgcacccatccaatccaatcatatcatccaaccgcgacaaagtccttggcgggtgcaggtttgattaaccgccgtgatttaatttttactcgctgcctggaccagaggtcgccttcgtcacgctggtgaagttgacgctggcgccgagcagctccgtgc

SEQ ID NO: 7157 - DNA, 1681 bp, Setaria italica
  Peptide Sequence Number=SeqID_73131
tgtcgcggttggatgatatgattggattgggcgggtgcaggtttgattaaccgccgtgatttaatttttactcgctgcctggaccagaggtcgccttcgtcacgctggtgaagttgacgctggcgccgagcagctccgtgctgacggtggcggtgaaggtgtcgtagcggaggaacagctcgacgacgaagagcctgccgacgagcaccacgaagttcttgccggggcactgcttgttgtcgacgctggggctctcggtctcgcgcccgttggaccagtacacgtactgcagcagcttgctgccctcgtcgccgacgaaccggtcgggcacgaactccctggccgtggagccgaacacgcgggcgtccttggtggcgcacggctggtaaccgaacagcatctcgcccttcttcacctggaacacgccgtcgtggctcgcgatctccaggtccttcttggcgtggccgtactggaacttgacgggcgggtccaggcgcagcgactcccacaccaccgacttggtcagctccatcttctccagcgccgccagggtgaccttgccgccggcctcggccacggcgccgcggatctccgccacaagcctctcgtggagcttctccccggcgttggcgatgttggccaggagcccccgggaagagcaccttgaggccgccgtagctgttgaacgtcgtggcgaaaagcaggttgtggcaggcctcctcccgcgacaggcccagtgtctcggccatgtcgagcgcttgcttcccggcggtcgagtagtaattgtacagcgccttgtagtcgcccttgatgaggaacggcgggaggtggaaggtgtggaggaggggctcctcgaggaccatggggaggccgagcgtgacgagggggtggagctgccagatgagccacttggcggccttggtgggcccgctgctgccgaggttggtcgccgaggggcgcacgccgaagtaggcctcgccgatgaagtcgaaggaggtgacgtcgttgagcttgttgaacgcggccttgccggacttggcgagctccgactcgacggtggcgaggagggaggagaagttggagcggaaggttgggatgacctcgtccttgcgggagagcaggaggttgaagagcatctgcttgaccttggtgtgggtgggctcggaggggtcgaggtaggagcagacgcggtagccgccggtgagggaggtggaggacatgtaggtgcccgtgaagaggttcttcttctccaccttgtccatgtcgaaaagcacggggaagctcttggcgtcgaggacggcgaccacccgcgggtccttggccatgaacgggcccggcggcacgttgatgcgcacgacggtggagccgtagcgctcgacgcgggactcgaagtacttgtcctggccctggaagtagtagaagtcgaggcggtcccgcacggcgccgatcaccggcagcccgtagctgcccggcaccggcttcggggcgccggacgaaccctgatcggagctcgccatggacgtatgggaaaaactctcgcggctaccttggattctcactaccttggatcgatcagagctcgcgcggcttattagcttgcgcaaatttctctctccttgtcactgacgcgatctcttctcaaggtttggagggagaagaatggagatgtggttttgttggt

SEQ ID NO: 7158 - DNA, 333 bp, Setaria italica
  Peptide Sequence Number=SeqID_73132
tcggttggggagggttgaggttgagcgagtggtggaagtggaactgcccgttgttgaccgacgcgtccgccgccgccggcggctccgtggtgatggtggtggtagtgctagtgacgtcggctggcggcgcggcggtgttcgtcggcgtgccctggaagaggaggcccctcatgtttacggtgagcaggctgctgcagtggccgcaccgcaccgtcaccgtcttgaacaggctgctcgtcggcacgctcacgacgaggacggtgtcgcagaagtggcagtgcacgtagcagagctgctcggaggccggcgccgccgccgccaccggagtgagct

SEQ ID NO: 7159 - DNA, 1738 bp, Setaria italica
  Peptide Sequence Number=SeqID_73133
ttttttttttaagttgttctattgtaggggtttgtaaacttccttttcttcttttgacgaaactccccctcataatgatattgccaagtcagcaattttgctgatgtggtaacagatttaatgctaatgaaactctaatgaaacttccattgagactagcctaagcagcaacagcatgtagcagttaaacagaaaaggaagaaaagaaaaggaaagaagaaaacaaaagcaaaaaggggagttcatccatgatatgatcaacgtaaaaaccaacacaatggagcaggataattgaccgcgctgcaatgctatatcagctcgatcgatcgaccaacattgcagccacgtgcagtgattccaacagcgagcgagagcagattaacaaagagcaagatcgagtaagccctactagatatatagcttggttgttcagagcaggcacaagttaaaaggagagtctcggcagctaggtaacggtagcaacttgctagctaagcttgagtaattagtatggagcaacccccatgttggctgccgccgcgtagagcccatcctttagaagcccgtcctttctttggtgatcctgatgaggtagcaggcttgtcttcttgagcccctggtgatccggcatgagtccaaagtggatatgcggaaagtgcgcccagttcttggccgccgcgctgaaggcctccctgtgcgagatgtcgggattgccagccttgatgcgttggatttcgtccttgatgaagcggttgtacgccgacggcacgcgctgcctcttctccggaggtctgttgacgacggggttagtgcgcggcgatggctccttggtccctttcgccgccgccgcgggcgggtgaggcgggggcggcgccgcggcgttcctgccgctggggatcaggccgccgaggccgtgctgctccagaagctgcaggctcgggttcgcgctgctcgatatctcatccaggagggattgctggtggggagggttgaggttgagcgagtggtggaagtggaactgcccgttgttgaccgacgcgtccgccgccgccggcggctccgtggtgatggtggtggtagtgctagtgacgtcggctggcggcgcggcggtgttcgtcggcgtgccctggaagaggaggcccctcatgtttacggtgagcaggctgctgcagtggccgcaccgcaccgtcaccgtcttgaacaggctgctcgtcggcacgctcacctgcacccacgcacacgcctcaggcttgcgtaaaatctttgagattttaaagaactaaatcacatggagagctgcatgtggatatagggagaagaagaggtcgggagaaggaggggttcgatcacggacgacgaggacggtgtcgcagaagtggcagtgcacgtagcagagctgctcggaggccggcgccgccgccgccaccggagtgagctggtgcagcggcgggaggttctccaccagcagcggtggcggcggctgcggggacggcgggaacacggcggaggcggaggccgcggaggacgaggacgaggaggacgacatgctgccgtgccggccgacgacagccaccgaccgaccgatcgatcgctgcttgcttttcttcaggtacgtggtgcaagcaacagcagagcacgccaagcaacaggccggactactggctccttgccccgatttgacgcggcaacgaacgaaccgagctgagaggtggtggtggtgtacgtgagtggaaaggcg

SEQ ID NO: 7160 - DNA, 439 bp, Setaria italica
  Peptide Sequence Number=SeqID_73134
gtcggacccataggtgtaggcgcccgcgagtttcacacccgatgggtgcgggcgtatgtgcgaaattccacctgtgagtctagagtcgacccgacctgcattaagatgggttgggtgtgatgtgaatttttacccgtggatgcctaatgggaccagtatttcctaattcacctcatgacacacgacactttgcaccatggattccttctagaccaactgaaactctagactacacagtcaattacttggtgatttgaccagtgtgctagtcatgtattgtctctatttaattctttatttgtttgttagtactgagatgttgaatgatcggaacttataataaaatgactatgtactaagacttcctggactattaataaaatgactatgcactaaaacttcctggactattcttttttgactgagatattcctaccaa

SEQ ID NO: 7161 - DNA, 333 bp, Setaria italica
  Peptide Sequence Number=SeqID_73135
cgtcgccgaggagcccggcacgccgagccgcggcgtcaaggacgacatctccgagctcaccgagaccctcgcccgccgcttctgaggcgtcgcgtcgttcgtggcgccgccctcgacaccgccggaggcctcaaccccgcgcaccggcgccgccgcagggggagatcgacgaggcggagatcgacgaaggggagcccgtgcccggtgtcaccgaggaggggcagatcgacgagggggagcccgtggtgttcgtcaggcacatctccacgtggcccgagaaatggtttgatttcgccccctcttcaccagcgagccgccacgccgatggtagga

SEQ ID NO: 7162 - DNA, 395 bp, Setaria italica
  Peptide Sequence Number=SeqID_73136
ggccactgatgcatttgatgatgatgctgcctgctaattatggaaggtactgcagaggctcaactgaacaggggtagagtatgccattcttaagttgactttgttcgacattggtatttccgtatctttagcagcgtgatgctggcaagccttggaaagcagctgaatatcttctgatgtcatcatttcattgtggaatcgttcagttgcctaatttttctaaaaaaaggtttccatgtcaccgttacactggccaaatccagccatcggagctgtcatgacattgttgcttgcctggttgtgttagtgtagttttgtatcatccatcccgacaatcctaggtatggagtaatgttcctttcttagttgttctttatttagttttaaaactttaa

SEQ ID NO: 7163 - DNA, 863 bp, Setaria italica
  Peptide Sequence Number=SeqID_73137
aatgtgtggtgttgatggtatctcaggcaaatttctgcttccttgttgtgctctactcaatgaatttattggagagacacggctgccagatggagctgttgagctggatggttcttcgctctcagcaagtgctgagtgtgatcttacaagttgctggggtgtcatggatcctgtcatgtggttcaaaggtgtttgctgcaaatgcttgagctggcccatagtatcagcaccgcctaactgatgctgaagaacttgttgttggagaatttcctggcttttctgagatagttgttggatcagctgcgactgatgctgtgggttcagctgagatagcaaattttgttgttgaatcttttgaagcagctgcagctgcagttctgattgtgatagttgttgtagttggggttgttgactttgtaggagtgcctgctggtattctgctgtttgttgcagctgtggagtctgagttaattgtggttgtggcaaagaacccatggtcgttaaacctggtaaccctggccgttgggtaggtgacttgggtaaacccaactgttgtatctgagaggacgatggttgcaaaatctggtttaacaattgtgcttgtgagactgcttgtccgcctgaaggctgttgctctttcagcttgtgctggtccattggctgaagagatgcagtggccttcaactgctgtggtggctgtgaatgttgccgttggagttgttcttgctgctgttgcaagtgaatggcattctgctgcaacagctgggcttgctgttgctgtagaattgcagagttttgctgcagtggttggacctgctgctgttgcaatatagggtgctgctgctgctgttgttgagctaatg

SEQ ID NO: 7164 - DNA, 249 bp, Setaria italica
  Peptide Sequence Number=SeqID_73138
ggtccgctgcggcggcaactgtggacccatagttgttgacgattccaagggcgacaatgctaagtcgggaggctgtggcaccttcaaagcgagcaccatgactgagggtcaggccaagtcaggaggctgcggctctggctgtggtgggggaggtggctgtggcaccctgttgaactccaacgccaagggtgaccatggccaggccaagtcggctggctgtggttcaggctgtggaagcggctgcggtaa

SEQ ID NO: 7165 - DNA, 573 bp, Setaria italica
  Peptide Sequence Number=SeqID_73139
cgacctggccagtgctttaaaactggagtgcttctctatagcttgaagcatagccttaattcccttgcagaaatcttcaaaccgaccgagcactggcctgatgccacaagattgggatacacatagttccatgtaaagtgacatttcaagtgtcaccaagagaaggtggcataccctctctgtctcaggatttagagtgcttgacccatttgcctcaaacacttcagtgactatagaaaccacttgatcctgtagtccgtgaagaatatctggcatgggaagctcaggaaaatgagcaaggtcaagaaactccagttcttctgccctttttactgcttcttttgcttgactacagaggaacttcataataagaaaagctattctgtaaatctgaacagctaacatctcagtaaagcgagtttgccttacagaatcagaatctcctgaactcttgtctctgatcactagaggtaatgctgtactggcagaaactgaagcacctgaagttgacaaagtacaacttgcagcaaatttgaaccatccatgcttgctacgaatatgtggtggtttctc

SEQ ID NO: 7166 - DNA, 1962 bp, Setaria italica
  Peptide Sequence Number=SeqID_73140
ttttttttttttggttgacagtaacatgtgaggccctggtgaccatacatacatatacaaacggtttttctttagtacaaagtcctcgccttgcgaaacatgtacgtgctcacgcaacatgggtctacaggacagcttaaacatgctagaggcatatgtcgagtttcacacggaacaacattgattgaacacgttatcaagttaactgagtacacaactcctatggaaggcagccaacacatttcattaacagagatacaatttacaagaattacatgaaaaggttagtttgcacgatcccgggatacaaaagagtagtaatttgagttagcgacctggccagtgctttaaaactggagtgcttctctatagcttgaagcatagccttaattcccttgcagaaatcttcaaaccgaccgagcactggcctgatgccacaagattgggatacacatagttccatgtaaagtgacatttcaagtgtcaccaagagaaggtggcataccctctctgtctcaggatttagagtgcttgacccatttgcctcaaacacttcagtgactatagaaaccacttgatcctgtagtccgtgaagaatatctggcatgggaagctcaggaaaatgagcaaggtcaagaaactccagttcttctgtcctctttactgctttgtacttactagtaggtatattctgttctgaacagctaacatctcagtaaagcgagtttgccttacagaatcagaatctcctgaactcttgtctctgatcactagaggtaatgctgtactggcagaaactgaagcacctgaagttgacaaagtacaacttgcagcaaatttgaaccatccatgcttgctacgaatatgtggtggtttctcattaagtgctagttcctctttgacaacagcagggcagaaaaaagacgagttccaattagaggaactgctagcctttacacttcctttgcttacaaatgctagcaggtggataataatctctcttagttctgaatctacttccttttttccagtgtcccgtggaaaatgatattttgccaaaatacagagaagtatgagaatattctcagtaagactgagggttgaaagtgacgtctgtgacttctgcgacaatgcccgtttcttgttctgatgagcagtaacactctgtgcagatagatatgatgacatcaaaggcacctgtcctgaaaggaagctgatagtactgttcgcaacattgttacgagaaatatcatcatccaaacaatggttcagtgacgcaacaatagcaagacccaaaccccattgattcacatccttcacttgggcgctcaaggaatttctcaaacaggagtcatccagagacaactgacttaaaagtacttttaagaaggcaaaaatattggcagactgaagaactgtagcaccatcctttgttcgccccaaggtcaaaagaaaattcagtataacttgagtagacaataaaccaccatgttggcatctatgcagtatagcctggagatgaaaatgcttttgtagaataggcacacatacttcagaaggtacaaacccttcaatattaagtccatcgatgcaacagcaagatcagagaattccctattctctgcaaatttgcacagcacaggaagcaaactcacacttaaaacagctaattcaccaaagatgttaacattgtctggtaggtcttttatgtcaaccttgctgtacatgaactcatatgaagacaaaagcagaacaaggagggccttcactggttgcttaagagcatgagtggatgacaagagatcaaccaaaaaagaagtgctcgcaactgaagttttcattagaagtacaatatctggatagagatggcttgatttcttattttgctttgcttgatcaaataatatccgggcaagagtaagcaacaattccacttgcccagataagaggggaaacaaaaca

SEQ ID NO: 7167 - DNA, 472 bp, Setaria italica
  Peptide Sequence Number=SeqID_73141
cggaagtcttctgcgcaatgcacaaccggaattgatggatactctaatacaggcttccaaggatggaggtgacagcaagttagataccttgctgagtgaaaacgcattgttggtggaagaggaggaagtggaggatctacctgatgaagaagaggatgatgaagagtatatgaaagttgcagatagatggtttgatggtctcctttgcaaagacatctcagttactaatgaagtttatgctgtccataatgttgagtttgatcgtcaggaactgcggaagctcgtgaggagagtccacatggttcaggaaagcacacaaattaaagatggcgaggaaggatccagcgggaagctttccagagcaaagaaaccgcttctgaggttccttcgctcccttgcaaaggaggcatgtgctgaataggcaaaaagacttactaatacttggaaggatggacagtggagtgcaagtttg

SEQ ID NO: 7168 - DNA, 776 bp, Setaria italica
  misc_feature (728)..(776): n is a, c, g, or t
  Peptide Sequence Number=SeqID_73142
ccaccgacgccgccgaggacaacgaacgaatccggacgccggggacggcgccgcagtgcccttccggaggagccgcaacgcgctcaagagggatgcccgccgcgccgtgcggtggggcatggagcttgccaagttcccgcctccgcagatcaagcgcatcctgagggctgcctcactggaaaccgaggtgttcgacgcgctcatgatcgtcaagagatttgggccggatgtgcgggaaggaaagaggaggcagtacaattacatcggaagtcttctgcgcaatgcacaaccggaattgatggatactctaatacaggcttccaaggatggaggtgacagcaagttagataccttgctgagtgaaaacgcattgttggtggaagaggaggaagtggaggatctacctgatgaagaagaggatgatgaagagtatatgaaagttgcagatagatggtttgatggtctcctttgcaaagacatctcagttactaatgaagtttatgctgtccataatgttgagtttgatcgtcaggtatcctctgtgctgacatttaatatatcattcaacaatgtaactagagtgtttgcttatgcaatggaaatctgtagcacacgacctttgcgaactgtctggctcccaatgtttaaaccttgttgtatttctatctgaaaatattttgtgttttcctgttgttcaaccaaagtatgcatattttctctttgctttnnnnnnnnnnnnnnnnnnnnnnnnnnnnnnnnnnnnnnnnnnnnnnnnn

SEQ ID NO: 7169 - DNA, 752 bp, Setaria italica
  Peptide Sequence Number=SeqID_73143
acttctagtcctggagcctaatacatccaacatctgatactggtgtttacttcaaaatctataactttcacatgaataccagttgaaagtatctgggatgctcctgcaccacccaaacttcctaattaattcaactaagtcaactgcattattacggctcaatatatggttcctgtcagctcttaacatttcgccaacaggaactgcggaagctcgtgaggagagtccacatggttcaggaaagcacacaaattaaagatggcgaggaaggatccagcgggaagctttccagagcaaagaaaccgcttctgaggttccttcgctcccttgcaaaggaggcatgtgctgaataggcaaaaagacttactaatacttggaaggatggacagtggagtgcaagtttgtatctcactacccactcacgtccatagtttgtatcattcgtttcaccaaggttgtgtaaggaggctcaccggcaatgggggtttttttactccaattatattgacagcggcagcctggtatgctgtggtcagtgagctaaattaccatggatggagttttgggtgcactcatttcaacgaggatacgcagcttaattggggaatcatatcatgcggagacgtgcttaattgttgcttaattgtctcccagatatcgatctgccatctacctgctgtacgaaaatggattatcgatgccgtagtattttttggacaaaagaaaagcagttattatttctgaaatcgtag

SEQ ID NO: 7170 - DNA, 831 bp, Setaria italica
  Peptide Sequence Number=SeqID_73144
ttttttttgcccaaaaaaaagaataaccattcacaaacaagacacggcgtattcctgcattacaatgggataggaaaagtacagatccacagctggtctgtccattactgttgaactgatttggtacacgagttccatgctcatcaaacaacctggacatacatccttccaggtacaacaacaaatttgcaaatccgagcgcaaggctgtgcttatttcagatgacaagcaggtcaaatgcgaagaaatacagcaagcgaacaataacaagaacggacaatgcttcacttggtccaccagtgatggaagtccttgcgcctgttgatcttcttttggagctggaggacaccgtacagtagtgcctcggctgttggtgggcatccagggacgtagatgtcaacaggaacaatacggtcgcacccacggacaacagagtaggagtagtggtagtatccaccaccgttagcacagctgcccatcgaaataacccatcgaggctcaggcatttggtcataaaccttgcggagggccggcgccatcttgttggtgagtgttccggcgacgatcatgcagtcggactggcgcggcgaggggcggaagatgacgccgaagcggtcgaagtcgtagcgggacgcgccggcgtgcatcatctccacggcgcagcaggcgagcccgaaggtcatgggccagatcgagcccttgcgcgcccagttcatcaggtcgtccaccttggagaccaacgaactcggccgtcttggacatcgccggcggggggcgcccccgtacggcgccggggacgccggcgaggcgcccgccgcggcggcggcggag

SEQ ID NO: 7171 - DNA, 866 bp, Setaria italica
  Peptide Sequence Number=SeqID_73145
tagcccaaacttaaagaccaaaaccataaaaaattgaacgaaaatagcaaaaaactagccagaaacgggaccctaggttagtacaaacatgaaacgaagctcgaaatacatggagaagtgttagtgccagatgtacaagcatggaccatcgtccgctcaactgaagcagcagttttctgcgctgttctgatggtgatggggctcctcagaggtactgttcgtgtatcctcgctcggttctcttcccaccagagcctggcgtgcatctcgctgaacttctcccggctgaaccgaacgcggcgaagttccctgatgccaccaggcaaagcccggatggtgatatatacaccaggctcatcttcctcaacccactccctctcctggtcgcttgcattgctgatggaaaccgagagctcaccagacctgtcaacctcttcaggagacgagcttgtcctcattgatgcatccatagatgaggtttcggtcttggctccactgatacttgacaactttggtgttgatgccaaccccattgaatcacagaattggtgtccatgatggtggtggtggccattacagtaccggttcaagtgatgctcaagagaatccgaagaagagtatcccatggctccaccacttgacattggtctgtgcaaggtgtggggcaggcgctccttgtccagtggcggggttaccgggctgtcttccttggagctctcatcttcagattttggagttgtggggagagggacagtttgattaaacctctggacattgtaaagctccataactttgtcataattttcagcccaccacctttgtgcttgccagttgttgaacatctcacggctgaatcgaatgcgtttg

SEQ ID NO: 7172 - DNA, 1906 bp, Setaria italica
  Peptide Sequence Number=SeqID_73146
tttaggggtttaggttaggttaggttaggttaggtaagcggacggaaccgccgcttgctgcgagatctaggcgaacgcggccatgggtgcgcgctgctccaagctctccgtctgctggtggcctccccacttcaaatcgccgatgcttgagaatggcgccgtcgacgatgacggcagcggcgtgccggtgttcgccgagtacagcctcgacgagctccgggcggccaccgacggcttcgctccggaccgcatcgtatcggagcacggagagaaggcgcccaacgtcgtctaccgcggcacgctcttcagctccggccgcaccgtcgccatcaagcgcttcggccgctccgcctggccggactcccgccagttcctggaggaggcgagggctgttgggcagctgcgcagtggccggctggccaacctgattggttgctgctgcgagagcggcgagcgactgcttgtcgccgagttcatgccgcatgagaccttggcaaagcatctcttccactgggagacaaaccccctgagctgggcaatgaggatgagggctgcgctttatgtggcacaggcattggaatactgcagtagcaaagggagagcactctaccatgacctgcatgcatacagggttgtttttgatgtggatggtaacccaagactatcatgttttggtctgatgaagaacagcagggatggaaagagctacagtactaatttggccttcacacctcctgagtacctgaagacaggcagagttagtccagagagtgttgtttacagttttggcactgtcttgcttgatctcctgagtggaaagcacattccaccaagtcatgcccttgaccttataagaggaaagaacttcctggtgctgatggattcttgcttggaaggtcatgtatccaactctgatggaactgacttgatgcgactagcatcacgctgcttgcagtatgaagcacgtgaccggccaaaatctgaaagcagtggtgtccggtcttgcaagcctacagaaagacgcttctactccttcacacactttgctgggcatccaacatgaataaaaaaagctcagaccatgtcccattatccgctattgggaaagcttttgccagagcagacctgaacgacgttcatgagatattgcaggatgatggatataatgaggacgacatggcgaatgctgagctatctctccagtcatggaccggcgaattatctgagagctttgttgttaagaggcatgcagacaatgcctttaagtccaaggattttgcaactgcagtcgagtgttactcaaggttcctcgactcaggtgcagcggtggctccaactatgctggcgcgacgatgctttgcatacgtggtggctggcaagctgcaggaaggcctagaggatgcaaagagggctgaggacattgcacctgggtggccgatgggacactacctgcaggcattggtactccataacctgggaagggaggctgaaagccatgaagctctaaagaaaggcaccatgttggaagctgaaagaaatagtagagctagaactgtatagcctccctgaatgtgtgatgccctctctgcttgtacttagatcgcctgcatcttggatgcctccctccaatgctttgccaccagtagggctgtttttggtattccctaacttgtatcggtatttccagtggttttactagtcgaaaaagtcctaggttggctgttattacacccccgatatattcatgaatacagaaatgggcaactagtatcgcgatagcattctgttgatgtgagattgtaaagtgacaaaattttcattttatttcaacaaattcttgtacatacgaacttttgaattttcttcaggcttaaaaaacttgaagaaataaaaaaaaaaaaaaaac

SEQ ID NO: 7173 - DNA, 631 bp, Setaria italica
  Peptide Sequence Number=SeqID_73147
tttagtttcgttacggttcctttcctttgtctagtcggtctaggtccctttgttacttccatgacggcggcgacgtcgcgcgccagcgtggagcggatgatggcctcgccctcccccgtgcacgacaccgcgcaggcgtcgcaggcgtaggtgcccgagccgatgagcggcgagtccccgatgcgccccgtcatcttgttcatgagcccgcccgtggaggtggccgccgcgcagaagccgttcgagtccaccaccgcgcaccccaccgtctccggggcgtagatgctgatgggaagcccgttcatcaccatgccgttgcggttgtggttgctgtccgcaccggcctgcaagctgcaggtgtccgtcccggtcagcgggatccgatagtcaaacaggatggtgccggcctccttggcgagcttgagcatgccgacgttgtcctcggtgatgaagtagctattgtccacagtctcaaggccctgctcacgggcgaactcctcggcgccgtcgaaggcgaggtacgagtggggcgacttgtccatgacgcggcgggccagggagacggggttcttgacggtggagacgccggagacggcgccgcagcggcggccgcggccgtccatgatgcttg

SEQ ID NO: 7174 - DNA, 1511 bp, Setaria italica
  misc_feature (65)..(81): n is a, c, g, or t
  misc_feature (91)..(91): n is a, c, g, or t
  Peptide Sequence Number=SeqID_73148
aaactaaacaaaagtaagtaaagaaagtaaagttaacgaaaggaacgactaccttagaacgacannnnnnnnnnnnnnnnntttttttttntttttttttttttttattttagaagacatataaattttcacatttttatttccagggcaataccatcacaatgacgatcgtccttattaacccgaaatccaatctccaatcactagcccactaccactaagccaataccgacgaccggccctgaccaagagaccaaccacatggcaatcgcaagatggccacgcgcacgcacgcacgcctagctccgctccgctccatcccgctcactcccagatgccgacctccatgaagccgtcctccgtggcgcagcccctgaacatgccggtgcagttgaagccgtacgcgacctcgccggtcttggacacggcgatgaggcccgcgaagccctcgtcgaggcgctccttgacgcagaagtcgacggcctcctgcagcggcaggcccttgtactccatgacggcggcgacgtcgcgcgccagcgtggagcggatgatggcctcgccctcccccgtgcacgacaccgcgcaggcgtcgcaggcgtaggtgcccgagccgatgagcggcgagtccccgatgcgccccgtcatcttgttcatgagcccgcccgtggaggtggccgccgcgcagaagccgttcgagtccaccaccgcgcaccccaccgtctccggggcgtagatgctgatgggaagcccgttcatcaccatgccgttgcggttgtggttgctgtccgcaccggcctgcaagctgcaggtgtccgtcccggtcagcgggatccgatagtcaaactgcatgcacgggaaatgatgaacaatggtcagttcactgctgatttgaatgcacgatcgatgccgattgatcagatgactgtagaacgaaacaggatggtgccggcctccttggcgagcttgagcatgccgacgttgtcctcggtgatgaagtagctattgtccacagtctcaaggccctgctcacgggcgaactcctcggcgccgtcgaaggcgaggtacgagtggggcgacttgtccatgacgcggcgggccagggagacggggttcttgacggtggagacgccggagacggcgccgcagcggcggccgcggccgtccatgatgcttgcctccatctcgacggtgccgcggcgggtgagcgcggacccgcggccagagttgaagaaggggtcggtctcgagctcgcgcaccacggcctcgacgacgtcgagcgcggaggcgcccgcccgcagcaggtctacgccggcctgcaggcaccgcgccagcacgcgcttcgcctcctcctggcggtgctccggcaggttcgggtccacaccggcgccgccgtggatggcaatggcccagggcgccatgtctctccgaagctagcgaggtggattggtctaggcgctagcttccggagatggttctcggctcccccgtgcagtgcgtgaagctctgtggag

SEQ ID NO: 7175 - DNA, 1064 bp, Setaria italica
  Peptide Sequence Number=SeqID_73149
catggttgataagggcctggattactttgatagcatgcgtagagattatggtgtagttgccagcgcagagcattatgcttgtgttattgacttgctggctcgctctgggcgattagataaggcatggaaaacagttcaggaaatgccaatggagcctactgcagtaatctgggtcgcattacttagtgcctgcagggtacattcaaatgtggaacttgctgaatatgctctgaacaaactggttgatatgaaagcagagaacgatggatcctacacgctgatctccaacatatatgccactgcaaggcggtggaaagatgtagcaagaatcagactgctgatgaagaaatcagggattaagaagaggccaggatgtagctgggtccagggtaagaaaggcactgcatctttctttgttggagatcgttcacaccctctgtctccagagatatatgctcttttagagagactaatcaatcgcatcaaggctatgggttatgtccctgagacaaacttcgcactgcacgatgtcgatgatgaggagaaaaataaccttcttactgaacacagtgagaagcttgccctcgcatatggcctcctcacgacttcccctggttgtcccatacggatcacaaagaacctgcgtgtctgtggcgattgtcacattgcattcacttacatatcaaagattgttgaccatgagatcatagtgcgagactccagtcgcttccatcatttcaagaagggatcttgctcctgtggtggctattggtgacttgatgatctctcttcctgtaaaaggaatgggtgcggaagaaatgctaattatttcccatagaagaaatactaatgtgatgatgattattctcaaaaggactaatatgctcatgattttgtcatactaattcagcattccagaaaacagagtcacagaattctggttaccattgttttgatctgcttctgtgagatgtcacctgcactggtatttatgttatttgttcccttttttttcatgcctcgtgttgatttgttttaagctgtgactactacttaaccgaaca

SEQ ID NO: 7176 - DNA, 882 bp, Setaria italica
  Peptide Sequence Number=SeqID_73150
ttcttttgttaccttaaatttacgttagtcttggttggttggtaggtaagtaggtacccggtacttggtccttgaggacgccgaggatgggatgaacttcagcctcggccagttcttcgacaagatcaccatcaaggccgagaagaaggatgacgccgacgaggaggatgacacggggaatcagggtgacaaggagattgtttgggaggatgacaattacatcaagccgattagggatgtcaagacacaggattgggatgcgtccgtgttcactgatttcggaccgatggttgtgcttgtgcataacagatataagagaccacaggagaatgagatggcaagggctgagcttactaaggcgatcgagttgttttgggaacacaatctgccgtcaccaaggtgtgtggcggtagatgcctgtgccgaggctgaccttgtggacgcgctgaaggtttctggtttccctgagattctcttcactaatgcagggaggataatacaccgtgagaaagttgttcggtcggcggaggcatggtcgaggatgatggcgttcttctactacaaagcagcaaggccacctttcttgtgtgaagcagatgggaagggtcaagaaaaggtccctttgatgtcatgagaacaacgtggaagcttagcctcgtattagttatagtaatctagtgcctcgaattgcatcagtgtacactattaggattctagtgttgaaactctcaactctttcgacaaatctccactaagcaacctctttgtggtgcggtgcaatgtctggaaatttctgtcacaaggattgaacattagactattagaatatagatataaagatcacaaggatggagatgtctatgaagtataaaaaattatact

SEQ ID NO: 7177 - DNA, 598 bp, Setaria italica
  Peptide Sequence Number=SeqID_73151
agacctttttagacaaatggcaggataagttgcttccagaatatcagcatttgtgaaatcatcagtagttataaagccaatttcaaatgcatcatactgccgagcttttaccccaattttgtttaaaagtgctgcaaatattcttgtagacatgcattcaccaaatgagactagataatctcgtgtcctaagagtcagctctttcatcatagaaattcccttaagaagttgttcaagttcatccagcaaaccacaaacaattgaactatctagcccaagctggtcaaccgtcccaagatgcaatttctttataaaggagagctcgtccagctccgagacgttggtcgcgccgcagtgcactgccttttccccagccatgaggagtttgttggtggtcttccccatcgcggagagcacgatgaccggccgctcctcggggaagctgaggatgaggtcggccacctcgcgcatccgctcggccgaggccaccgacgacccgccgaacttcatcacgacagtgagctccggctcggccccaccggaactcgctccctcctgcgcatccttcttctccacaatggcggcgccgacggctcgc

SEQ ID NO: 7178 - DNA, 1428 bp, Setaria italica
  Peptide Sequence Number=SeqID_73152
ctgatggtgatgccaagctggttgattctcggcatcaactaataatgactgacacaagcttcagcatgctgggaactgaagcaagtctgaggctgcccgcgagctcggcaatgaccctggcagcgaacagcctgatatctctgtcttgttgagctgtccagccgagcataccgaccaaggtgcgcaccacgttgctggagctggagattctcaggaggagctcttcactgaagttcctctgctgcaggagggcgtcaaggacagaaacccctgctagctgcatttcacgtgaggtagagctcagggactcaatggagaagttcgctaggctcatcgttctccctgcagcgagcacgccggtttccatgcatgtgacgtaggcacactggtagtacacgttgacagcccttgctccccactgacctctgaaccttgaatgacggacgagcgatctgcgagggaagaagccgaagagctcgactatgcatgccatcaggtagagtgtcccttggcacagtgccagcacgtagaataccatgatagatggcaccaggttccggttactgtccttcccttgtgggtatacgttgagagctactagatcggacaggcgcaaggaggagagcacaattcgtgcaacagctgccgggatctgcaagttgccgaccagtatgactgttaacattattattacaaccatcatgcatggacttgaagtcgattccagttccccaaggaagcatatatacaggaagatgttagcccagcgaccaaagagggtactgtccactggagtctgtaggctgccaagtgatagtaccagtataatcaacgatatgcccaagccttgaagaggactatgcaaaaacagcatatcaccgcccaaacaaagggctaaaatcagtttggccgaagacagtagcttgcggccacacaggctacctgtcaggttggcaatacttaggggcctcaggttgagcagcagcactgcaagaaccagtactaactggaaaagacaccaaagtagcagatccaccagcatgtccgtcctatcaagtggccacgttactgtataaactctcattgctctgtggggtgtgccatgtctgtctctgtatatattttctattgatgtgtgtatctgtaggccagtgatgagcaagagggcaactaggagagcccacaagagcaaccgttggtgctgtcgcaggcggctcgttagctgaagagcacctggaaacatcttgctcgcaaaaattattgccacccctaggagcaaggttggaaatcccccacaacggaacctgcataatgaggctacagaacaaaccgacaatggccaccacttgattccattcctgtggccgcacgaacattagaccaatcgatcttataagtttgacagaccttgtagtcccaaataacgat

SEQ ID NO: 7179 - DNA, 313 bp, Setaria italica
  Peptide Sequence Number=SeqID_73153
ctcgagggccacttccccgtcttcgacgtccgcatgcggagctgcctgtttgcccctcggatggagacaaccggggccgaccccatctacatccccgccggcggcaggctcttcgctctcgccgacggcaccttcgaccggctcgacccgctcgacccgccgccggtgcagttctacaggccggcctacggcgaggaggccagagcgtggtcgtggcttgagctccccgaccgccgttcgagcgcaggcacgtcgccgcctacgccgtgcaccccgacgggcacaccatttttcgtcagcatcacgaagggcg

SEQ ID NO: 7180 - DNA, 232 bp, Setaria italica
  Peptide Sequence Number=SeqID_73154
gacacggcgttccgcagtgccgcacggagcgccgggtccgggacttcccggcacgcctcgctgtcgcgcgctctggtaaacgcggcgtcgaactccgccagaactttcgccggcttgcccctgccgcacacgggcgtctccaggagagcgatggccgtgccccagcacgactcggcgtagctcgctacgtgccgcgcgagccggcccggcgccgcgccgcccacgcgtcccg

SEQ ID NO: 7181 - DNA, 664 bp, Setaria italica
  Peptide Sequence Number=SeqID_73155
gtgcgcgcacatttcctttaaatcagaatacactttgcttgcatactgtggttgaggcaactacagtatattaaattgaagttggctgatcctacattcctacctcttgtacgtctaactttgcatagaggctgcatctgcaatatgcttattgcctgtccttttaccaaataaaagatttagtctctttgcaaaaaaaaagggaaaacaaccacaagaagaaaggtttagtctgcaaatacatggtggactttagcaatttattcaaagtccaaggtctcacttgagatgctatgttcttgaattaccatagactaaaagcacaaaaagcgtgtttggttattttagtatgttttcattatgaatttcgtgccctactgagtagaaatacctaataaaaatacacagtggagtggttcaattatgataatctcgtttggagggacccccaaataacttctagatattttggttattttttagctgtttttctctgagcagtgttgatgaaggatattttcttgattgtatgagggaaaatagggaaatattaactatttggatgacataatatgtcaaaaatataatctaatttatcaaacagtgtgctagatcttataacaattactttccacagtcatcttaaataacgtgcattgcgtca

SEQ ID NO: 7182 - DNA, 614 bp, Setaria italica
  Peptide Sequence Number=SeqID_73156
gctgggtgagtgttaaaatgacctaaatgcccctgaggctgagcatagctcatttttgttctgaatacgaggagtcaataattctaatatactttgtgtttgctaaatagaaattatattacaatactaccaaatgcatataaatataaagaataacaaattaaccaaagaatagatcagtctagtccgaaacatcggtggatgggtacaagggcagctaggctatatctgacaagggaaggcacaaggactgtcatggaacattacatttctgtagatgatcaacaatgtatatgacgtacaagttcatggtatgtgtactatctctggttactaggtttggttgattcattccaatgggatgatctgatgagtttggcatgccgcagctacttcatctacatgtacaatgcaaaaaaatcacacaacatcttcagagtatggtcatatatcaccaaatcacgagcatacaaattgagaaatcaaattgacttttgtgatacaccaaaattcaaaacaaaactaggttcccgattcttgtttgtgtacgtattctttagtatccatactctgatttagcatagtattctattagttaaactaattaattctct

SEQ ID NO: 7183 - DNA, 269 bp, Setaria italica
  Peptide Sequence Number=SeqID_73157
gtcgagcgcggtgcggtggttactcacgaagaggaccccgggcgtcccttcctgggaggcggcggcgggtggccgcgcaccaccagcttgacgcccacgagcttgtaggcgtaggagacggcgcgcgccgggaggagcaggtggaggcgcacgcgcagcagcgcgagcgcgaagccgagcggcatccataggaaggtgagcaatgtgttggtcgccgtcgggcggcgggcgaggcggccgtcgtggaggatggcgtggctccgcagctg

SEQ ID NO: 7184 - DNA, 380 bp, Setaria italica
  Peptide Sequence Number=SeqID_73158
ccctttaccagaaaagcccctggaaaagtaaaattacagcgcgcgcacagcttccagcagcttctcatcgtcatcctcacgcgcgagctccaccgacagacgccggagctcgagcagatcttcttcctccctgaacgaagtatttcaagccttggttaagccgcaagagcccacgcccgggactcgcctggacgcttcgatctcggtaatagcacatcggccatcacttcgccaagaaaaagaagaccacagatccgccgccaccgatgggaacagcagtccagggttgccggcgactgcaacccagacagacaacccagcagggatgcccagatctcccaccctttcgcagaaaagcaggagaacaacaaaattcagga

SEQ ID NO: 7185 - DNA, 426 bp, Setaria italica
  Peptide Sequence Number=SeqID_73159
ggcaatttctatagcctttatgaagctagcagtgtactgatgtagggagagggatctatcgtatggatggaaatggtacagggacaacaatttgcttccaagccacatacaactaagcgcatcaccttggatttcctacttgccttgggctatgcgatgtgctgatgaactatgtgattggtggctcagtgcagttgcacatacgttgtcctgatccgtgatccgttgtattcatagcacatctatgaataaccatgttatagctctttgttttgaccttagatagttagattgctatttgcaatgaaccgtaacctgaagtgtattttgagttagtggtgatgtgaatggcttcctatgagctaagatcatgtttaaacctgtgtccctgtctaactcaccacccctatccggccatccccttgt

SEQ ID NO: 7186 - DNA, 353 bp, Setaria italica
  Peptide Sequence Number=SeqID_73160
ttgcaggtgtagccctagataagctgcgaaagtctgtcgaactgcacaggctggccatataccatgactccgacagcaatccttggaagcttaataagaaatgggaagatctaaatcctactgagtggagcgagatattccaagatggcatcgatgatcactctggaaattccatttgggcagcaaatcggaactatttagtttcacctataaatggaacccttaaatataaacgacttggaaagaatgaaaggggggatccagatactcctgttgagaaagcctcacttgtcctcagtgatgtttctttaactgtgactgaggcacagtattatgatggcattaaactcgtt

SEQ ID NO: 7187 - DNA, 594 bp, Setaria italica
  Peptide Sequence Number=SeqID_73161
aaacttttcaacacaaggttagtgctggtctgatgcccacattttgctgtagattttctcaagttcatcggataactgttttttcctgagacatatggaaggactaatttaagacaacaaactaaactaagaaataacaaaaacctagaataggaaattaataaatctttctgctgatcttattgtcttcatcaggtgaagcattctgactggtacactctgcttttgcgcatgacagaatcatgatatcttcatctgtcctcctaatcactaaggagaagacatgtacatcttgatcatttgcaacagaaaggagactaacgcaagacgccaaggaatgaggaccttgatataggaaacaaatacggtgtcccaaaatttgaaatggaaacttagaattgatattcaattccagtattttgctgagacaatagtcccgtttggttttcgtcttataagcggcttatcggtggaaatagcgagaatctcgccaaacgttttgcttatttccaccgattctcgcaagcgtatccaaacagggctaatgaattgcaacagggaatcagaattccagctattccagattgtacttag

SEQ ID NO: 7188 - DNA, 1171 bp, Setaria italica
  Peptide Sequence Number=SeqID_73162
ttaagttttaacgtaactttaaattaaaagtacggtactttaattacggttaggtaacatgatcaatttgcttggagagcaagagcgttgggaggtgtggaagtaatgctatcagagatgaaggagcagggactggtaccgaacatcatcacatatactactcttgtggatgtgtatggaaggtccggtaggtacaaggaggcaattgattgcattgaagcgatgaaagctgatggcctgaagccatcgcctactatgtaccatgcattagtcaatgcatatgctcaaaggggtttagcagaccatgcgttaaatgtggtcaaggctatgaaagcagatggtctggaggttagcatcttagtgttgaattcgttgattaatgcttttggtgaagacagaagggttgttgaggccttctctgtgctgcagttcatgaaagaaaatggtttgaggcctgatgttataacatacacaacattgatgaaagccttaattcgtgttgagcagtttgataaggttcctgtcatctatgaagaaatgatcacatcaggatgtgcccctgatcgaaaagctagagcaatgctacggtcagctttaagatacatgaaacacatgagggttgcataggctatttagacacaactactgatcaaacctgatggaattataatctttctgctgatcttattaaacttttcaacacaagaatcatgatatcttcatctgtcctcctaatcactaaggagaagacatgtacatcttgatcatttgcaacagaaaggagactaacgcaagacgccaaggaatgaggaccttgatataggaaacaaatacggtgtcccaaaatttgaaatggaaacttagaattgatattcaattccagtattttgctgagacaatagtcccgtttgttttcgcttataagcggcttatcggtggaaataagcgagaatctcgccaaacgttttgcttatttccaccgattctcgcaagcgtatccaaacagggctaatgaattgcaacagggaatcagaattccagctattccagattgtacttagatgcagacgtctgtagaatttgtgtagggcaatacaaaggaaatgtattatatttttattgcctcaaaactaactattggctttgctacttaaaaaaaaaaaaaaaaaaa

SEQ ID NO: 7189 - DNA, 307 bp, Setaria italica
  Peptide Sequence Number=SeqID_73163
gactgaagcaaggatgatcacacaggtgctggaacttcctgtcagattggaggtcggaaggcatgttcatggtcatgtcagtagactggtatgaggcgtggttgcgagtaatttggtgctgcagaattggtaactgcatcatcctcttcttcctcttcgtcttcctcctcgctttctgatgaagatctatatgtttcccggctttcctgcagccaccgtcgacggtggaagcctgccattgctctgaccatcaccaggattgggaataggattcccgcagtcctcagcaccagaagtgagaacatgg

SEQ ID NO: 7190 - DNA, 705 bp, Setaria italica
  Peptide Sequence Number=SeqID_73164
ccattcattgtatatgcagaagatacttggttataagttaaactttactaaattgtcttacacagttacaccaccttgtttttttttgttgaataggctgttgtcaggaggaagaatattgctcttattgtagcagctgaggctcaaagggaggctgcagcagctgcatatcttgtaaaaggccttgggtaagtagttttattgattataatagtaagtttagttgcataagttgggaacgacattccaaattgatgaacttgagatgtttgtgtgttatgccagaagcacctttctactgcaattcaatgaaatctgatgaaactagaatactctgagcagaataactgaatagtacagaaatataggaataccagtgatcttgattccttctgtgaaacacatggtttattctttcttttacaaatcttttttctttgagggacccgcatgctttcctttggatcatgaacctacggataaatctaatctcgtgtgtgcttttacagtatttttgctgagataagggaatcttctgaagtggatccacatgctgcaattaccaagttctttcagctacaccggcttatagttcagcaaagtgctgtctggaaagcttactccccagagcctggcaaagaatctcggccagagaaggagaaaccattaagaaaagtttctgcctctcagaataaagctgctcta

SEQ ID NO: 7191 - DNA, 2067 bp, Setaria italica
  Peptide Sequence Number=SeqID_73165
gtaataagctggatcaaaggttatggcgtctcttactccagggatactattaaaggttctaaaaatatattaactccgatgtgaaagtatgtggagaataccggtccattcttctccaagttattagcatagtccctgcaattactggctcagaactttggccggaccatggtttcttcatcaaagtttcagattcgtcgcactcgacgtatgtttctttgtctaaggaggacaacgaactcatcttatcaaacaaactacaacttggacagtttatatatgttgaaaaggttcagtcaagtatccctgttccagttcttgttggggtccgaccagttcctggaaggaacccttgcattggaaacccaaaggatctgatgcaaatgtcaactccctctggggtcatggaagcactggatcatcaacggaagacttccaagtcagctgatctgtctgaaagtgaaaaggaaaatttgcagaggaaggtagttatcaaagagcagaagtcagttgttgcttcccgatacatgcttggagtatcaagcaacaatgggaaaattacaaatctaaactctagcattgatagtgacaaaagtaatggaggaagtagcgtatgtgaatcaaatcaaaaatcagttgccccgaaagtcagacaggaggccaaacctaaggaacggccaaataatacatctcctagcaatgctaagttagtttccacaaaacaagaaattaacaaggacgcacacaagaatagtggcacttcacctagttccaatggttctgctgtagtgaagaagcaaatgccaaaggagagcaaaaaggaatctgcaaccgaaagaagatcaccaccaaagctttataggagttcaccaacaccagtgaggacttcaccaacaaatctcagttcgccagcaaagcagaatggaaactctggtccagttccttcagtatctagtgttaaacgaagagttacagaagctatctcctgggactccctcccaacaagcctaatcaaatcaggaaaggctgttgtcaggaggaagaatattgctcttattgtagcagctgaggctcaaagggaggctgcagcagctgcatatcttgtaaggccttggctggtcttacttcacctggctcttattgtagcagctgaggctcaaagggaggctgcagcagctgcatatcttgtaaaaggccttggtatttttgctgagataagggaatcttctgaagtggatccacatgctgcaattaccaagttctttcagctacaccggcttatagttcagcaaagtgctgtctggaaagcttactccccagagcctggcaaagaatctcggccagagaaggagaaaccattaagaaaagtttctgcctctcagaataaagctgctctatgcaacacaacaaagaattccgaagatgctcggacaagtgaaaagatggaatgggcccaagatgatggcttcaaggagatctgcaggtcatgggttgctctgaaaaaggaatcgcagtcatggttcctgagcttcctggaggatgcccttgaatcaggattcaagtttgaggatcaaaccaagaacaccagggagcgcttgcgaggacaatccaagggtggggatgggaggatcgccgtccggctgtcgcagctcaaggaaacaagcaactggctcgatcagttgcaggacgaggccgttaatccggagaatggtttagtcgaaaccattgagcagctgaagcagaaggtgtacaagtgcttgctcggaacagttgaaaccgcggcatccgcactggaaggaaggtagcacacgagagaaatgaccacaccagtgaagaagggcgattaagttattgcagttatacaacatcacgtaggcggtgaagaaccgaagatgatggagaggtgtaaatagccgggttgctgattttaagttatgaattaattaattttttcggcattttccctaatgttgcgtacgtgtgaaatggcgaattattggcgattgatgcctcgatcttcaaaatactgtgtgttcatcacaaatggttgaatctttttacattttt

SEQ ID NO: 7192 - DNA, 216 bp, Setaria italica
  Peptide Sequence Number=SeqID_73166
catttagcattgttagtaaaggcaccaattctaataaaacatttagcattgttcgtgcacttaaattgtatacctctagatagataatcttgtctgcccttttggttttgttgtccagatgctgtcactgcaccacaagatatttacatctgctgaagagaaagatttgattaataggtatgcccctatgcagcttctctctctcaacccatttga

SEQ ID NO: 7193 - DNA, 528 bp, Setaria italica
  Peptide Sequence Number=SeqID_73167
tcgcatctcctctactatcttactacttaggaccgaccctctccgtcgccgccggcctccttcaaccgaagacggcagccagccgcccgcagtactccgcacctcgcaacgtgctctttccgttgaattctagctgctttgaatatggaggcgctgcttgggagcaacaaccatgtggaggcgaaggcagctgatttcgcccagctgctcgttgctgaggtcgccttggaggtgcaaaggtcgcttgttgggctcgtggccgtgatgctgtcactgcaccacaagatatttacatctgctgaagagaaagatttgattaataggattctgggtaaaagcaaaactgaaactgcacctgagaacaaggatgatggtgagtctgatgatgataatgaggaggaggagggagatgatgaggatgctgaaaaccaagaggaagatgatggtggcgaagaaggatcagatgatgacggaaacgaggaggaggaggaggaggaggaggatcctgcagccaatggtgaaggaggg

SEQ ID NO: 7194 - DNA, 426 bp, Setaria italica
  Peptide Sequence Number=SeqID_73168
ggcgaggtgatttatcaagtgcgaaggattcaggataatgacaggcttgatttgacaatacaaattgatatgcagtcaccgtaattgtattggtgtgactgaaaacaataaacattgccttcaaaaaatgtgttgggtacagactgatttgttgcacagaacactcatccttttatctctgggagtaatgagtaaaacacaacgaaaatgatggcaactaagatactgtcatattactttgactatgaccatcagcctagaattccatgaaatcgacatcgtgactgatgcggacagacatgctagctgattttgatcccgttcagacttactcccaagggacgtcgccgaccagcacccggtcgccctcctcgtcctcgtacaccagtgtgtactcgccgctgatcacgggcttccttcggtcct

SEQ ID NO: 7195 - DNA, 300 bp, Setaria italica
  Peptide Sequence Number=SeqID_73169
atttgccctccgccgccgacgagaagaggccctccaccgccgctgttcctcctccgcctcaatggcgaccccgaggccccgaatccgcgccgtccccttccgcccgctgctcctcctcctcctcgtcccgctcatctactccgtgtccaggctgcacccgtgggctccggagaagggcgtgtgcctgccacctcccgccgctccgaagcggcctgaccgcctcgtcatcggccctgccgccggacaaggccgccctgaccgcctccagtgccaaggacttaaagctctgaataatattgg

SEQ ID NO: 7196 - DNA, 526 bp, Setaria italica
  Peptide Sequence Number=SeqID_73170
gcgtggggtcgacgcctcgtcgcgtgtgggcgcggccagcaccggccggcgggcacacttggtggccgaagctccaagcgtcggccgccgggccactatatattgcccccatctactcaaacgctacatgcctgaagagaatgcctcagcgtaacacacgggatcggaggagggagttgtccaagtttcttgtcacttgttccttcggcttcagggagaaattttggtctaaatttaagcacctggcagttcgtcccagacaagcaaactgtgatatgatcaaatattcaattttgatgtaaaatatggatccggatcagtttatttttgttcaggtctcacatgacactcaggtcagcatagaactaaggaaagcttacattccatcggtgttttgagaggtgtactgtttagcatttgggagcatacagaagaactattcagcatttaagcatatcacgttctaaaaaaaaatttggtagtgctttgtgctagcttgtacgaaacaaaaaaaaaaaaaaaaaaa

SEQ ID NO: 7197 - DNA, 343 bp, Setaria italica
  Peptide Sequence Number=SeqID_73171
acgaacacggcgggcacgcgcacctcccgcccgcccagcagcagccgcagctcctcgcggtagcccgagtccatggagacgtcgcgctcgatcaccttcacgtcgtgggcctcgatcgcggcgcgcaccgcgttgcactcctcgaaggtcctgcggatgccgcggagggtggtggtgtagaggacgacggcgtcggcgccccccggcgggcacttgccatcggccacaatcgccggcggcgccgccttcgggtgcttgggcttctcggacccgaccatccgcttgatgtgggcgccttcctccgacagctcgcgctcgatggacgcgagcagctctgggtcaa

SEQ ID NO: 7198 - DNA, 530 bp, Setaria italica
  Peptide Sequence Number=SeqID_73172
aatctgttggagcacaccctggtccagtttgttacagaaaaggtggtgacctggcaattactgatgccaatttgattctaggaactgttattcctgagtacttcccatcaatatttggtcctaatgaagatatgccccttgattatgaggctacaagaaaggcatttgaggatcttgctgctgagatcaactctcacagaaagagtcaggattcatcagtgaaggacatgacagttgaagagattgcgcttgggtttgtcaatgttgcaaatgagacaatgtgccggcctatacgccagttgacagaaatgaagggccatgatactaagaaccatgccctcgcttgttttggtggtgccggtcctcaacatgcatgtgctatggcaaggtccttgggtatgtctgaggtgcttgttcaccgatattgtggaatactgagtgcgtacgggatgggccttgctgatgtcattgaagacttgcaagagccttactctgctgtttataatgccgattctgctgcggaggcatct

SEQ ID NO: 7199 - DNA, 340 bp, Setaria italica
  misc_feature (321)..(321): n is a, c, g, or t
  Peptide Sequence Number=SeqID_73173
cccgtgagcgcggaggacgcgccgccctgcgcaatgcggagcatcttgtgcacggcgccggcctgcacgatcgccgccttgttcgtgtcgttgccgatccccaagttgagcagcgcgtacagcgcggcggccgtgacctcctgcccgccgtcgccgccctcgtccagcatcgcgacgagcggcgggatggcgccgagcatcgcgagcatctccctcgcggcggcttcgtccttggccttcctccgcacggccatcgccgcctcgacgcgggacatgcacggctcacctccgcctgcctgcagcgccgccaccacgcccttnagctcctcgagcgcctcca

SEQ ID NO: 7200 - DNA, 474 bp, Setaria italica
  Peptide Sequence Number=SeqID_73174
gcgacttcaagacctccaacatcctcctcgacggcgggttcaacgccaagctctccgacttcgggctcgccaaggacgggccgggtgggggagcagtcgcacgtgtcgacgagggtgatggggacctacgggtacgcggcgccggagtacatgatgacgggccacctcacggcgtccagcgacgtgtacagctacggggtggtgctgctggagctcatcacggggaggcggtcgctggaccggtcgcgcccgccgagggagcaggcgctcaccgactgggcgctcccggcgctgccgcacaagaagcgggtgatggggatcgtggacccgaggctgatgatgggtgggggtggggagggcgacgacggcggcgcgccgccggcacgggccgtgcagaaggccgccatgctcgcgtaccactgcctcaaccgcaaccccaaggcgcggccgctcatgcgcgacgtcgtggcgtcg

SEQ ID NO: 7201 - DNA, 248 bp, Setaria italica
  Peptide Sequence Number=SeqID_73175
cgttgtaatcctctttatatattaagtttgttcatataacattgcatcaatcgcttaaacatttagtatatgcacgagaatatgttagtcttgtatatgttttggctcgcacggcacatggttttcacattagatttttgtaggtgcaggactgtctgatctactaacgttccactacattgcttgacaaattcacattaattgtaccattcattctgcattttatgacaggagaagtggttgaaaag

SEQ ID NO: 7202 - DNA, 535 bp, Setaria italica
  Peptide Sequence Number=SeqID_73176
gggggggaggcggtggcaattttggtgtgattcttgctaactcgttgggcaatttggtaataacacacgcaaagacagtgagggagccgcggggaaccagtttttttggctcccgctccaccgatttgctccagagagcgggtattgcggggctccctcggtggagctgttttcctggtgaccctttggaagggcttcgcatgaagccagtggtggagccggtgagggagccctgccaaagggggccttaatgtgccattttgctacaagcttggttcccttttagtgatgtcatctatcgatgattgacacactgcctcttcccacttaatcagctttgattttacacgtgctatgctttatttttacattaatctgtaatttttatttaaaaaactgtgggaaaggttcatgtacgcactagtatacaaatgaattaatataaccctcacacataaaaaatggtgctcaatagacaaactttttactaacaaaccttaaactaagaaaaatacttactaaaggttactaccga

SEQ ID NO: 7203 - DNA, 699 bp, Setaria italica
  Peptide Sequence Number=SeqID_73177
tcaatggattgtgactggttctgtcgagatgtcctcagccaactagctacactgaaatcagtcaagacagaaagaaatggctttgtccacagacaagagctggagaggattctacaagagaagctgcggaaccaacttcaaggatcaaactggagagctggtgcatccttccagggcagtgatgtcataaatttgctgttgaaactagaattgtgttatgaacaggatcctgggaacccaaacacattacttctagtgccagctattcttgaggaaagcaaagaagggactcaacagtggcacttaactattccagaatgcagatatgttggaaggcgtcttaaatgcaaagatacacacatgtttttgacaagtgatttctttccaaggcttcaggttcgtctgcacaacaaaatcatgtgcctgggacaacaacagggtgcactctacactttggagaaaaaccttatttatacagtgatcaatggtgtccatttaagagtagagctgggaaagaaagactcatccatagatgtgcttgcatgctccagcaaaagtgttactgacatggtcaggatattccacaagttgataatccctaccatactaaacttgtcttccagtttgatgtttgaggaaagcattatcagaccggactgtgtaaagtatctcataccacataggttcctccaaacacag

SEQ ID NO: 7204 - DNA, 635 bp, Setaria italica
  Peptide Sequence Number=SeqID_73178
tttttttttttaaagtagacatcagagatcgctgtgcacgtgcaaatgtatgacgcttgaatcaaacatcatcatcgcccaatatcccaaacaagcaaacttcatgaccatgactgttttactgaagtcttgatatagaacaagtcagggaggaaaaaaaattctgtgtagtccaacagaaagatggaggattattgctttgctcttagcatcatagccgaaccaagttgacagaaaacaacaacacgcagaaaaattgacaggcagactaatggtgagctgcaactgcaggggctccctcagcttcctccttggccttgcgcgcagcagctctgatctgacgttgctcctccttgtagatcctgttcctgcgctggaactccttggagtggtggaggcactcgatgtagtcctcgcggaggaggccgcagtcggagggctggcggcagcggctcatgcactcgctgaactccagccagaagtcgtagcagcggcccttgttcccgttgatgccccacccggacgccatcgccgacgagccctcctccctcgcctggttgatctctccctctccctccccctacccttggctggccgctgctcctctttttctctccacgccggtcgcggtcggg

SEQ ID NO: 7205 - DNA, 2492 bp, Setaria italica
  Peptide Sequence Number=SeqID_73179
ggggggtggaggtggacgacggctactcaccgagttccacgggcggcggcgggagcagctgctgcgactccttcggctgcgactcgcctttggccgggttcgtgcgcccagatggtgacccagacacagatctggagacagatgggttggccacttcctcctccagtgcttctgcagccttcacggagcggcaggacgacgaggaggtgctgtgcggggtgaaggaagaggagtgggcgaaggtacaagaatcggccaaaaatctagcaggccgtgccactccagaatgccacaacgagcggtacggaacggaggctgctgttcttttgcatggtaggaaggggtcgaaacagcgaccagcctcgctcgacctcagtagccctgggtttcatggagccacattttctcccagtttcgtggttggtggtgtggggttgatgaaagcatcacacatcaggtcagacgtgtttcatagtcctggaacaccgaactatccacggcaccgtgcatcagtgttggggttccagaaagggtggtgctctgagagagtgccgcatccttctaaagcaagtaggaggtaccctgggagcagcatggcatttccttacagcaatgggagaacattgccctcgaaatgggaggacgctgagaggtggatcttcagtcctaattccagtgatgctcttataagaagcacggttgctcatgctcggcgaccaaagtctaaaagtggccccttgggacctccgggaagacttggcggacagtattcatctgtttcttcggtgtcattgcttgacagtgggagagctgggcctattacatcaaattcacctttcatggcaggagtactaatgccggaacatgtttgtggtgggaaaaatgcaaatggaatgtatttgggtagaccagctggtgacgaaaccgccataggaagcagtgtcaggttttgcgcaccgaatggtgtgtctcatgctattcgatcatcaagagttcgtcgtcaattagatgctgctgtcgagtcatctgcttcattgcctagcacacaagaatctatccaaggtgagcaggttgaaatcacagaagattcagctactacttttgcctcaatgatttctaggaaagatgctgcaactcaaactagcccagagctaagtaggtcctcttcgcccaacaccagaccaacatttacccgttcattgtcgacgcaacaagtcaaagagagcgagagctgtttctcagatcttgagatcagggatgttcagatggatgatcgagtgactctgactaggtggtcaaagaaaaatgtaacacgatcatctaataagaattcaacaaacataatagagtggaaggaaaagacagtggaatcaaaatcttcgtcctggggctttgccgaagcaaagtgcatatctaggattgagagagaggacgcaaaaattactgcatgggagaatattcaaaaagcaaaagctgaggcagcaattcagaagttagtgattaagctcgagaagaaaagatcatcttcacttgacaagattttgaacacactcaagtctgcccaaagaaaagcgcaggtgatgcgtgagcgtgatgcagcaacagcaaaccaagatgaaaaaggctctaggaaggcgaaaaagacagcacagcttagcaagaatggccaaatcagttcgctgagtggctgcttcacatgtcatgctttctgatacatgtgcctccacaattgagattcggcccgaggaattcctttggattctctacatcaaaatcagggagaagttcagacatccatcatatttcagtacataataacgatacttctgcatctggaacttacgtactcaaatcttccaaagatgctagctgcagctgctacgatagggaccgtgcaatatctacagtgctgctctgtgttagtttcgattgcgccaaggggacaaaagaaaatggagccacgaacgaaagggggaatggttctgcatacaccccatgtggtcgatgccccggcataacgatagaggcttcctttatcattgttccatttcctagccagccttgtatgctgtagctaggcactgtgagcctgtgatggctgtgggcttgccagagctgatatggatcatacgaagtgcaattccagatcgagagacaacagaatcttcaggtatgaggagaaagcattgcctgcttgtgctggtgagcaccctgctgatgttgcaagggaaccatgctactttgttgcttttgtttggtacagtgctttacaagcatgcgatggtggtggctgcttgcatttgctttcagcatcagcgtcggtgtgtacctcttttaggaacttgagatgctggtttggcctggatactttagaatatctttgcaaatgtacatatatacctttggcattacagcatctgtttcctatgttgtgggtgtttttacagcagttttcatctggaatgttagtggtttctttgaacaaaaaaaaa

SEQ ID NO: 7206 - DNA, 381 bp, Setaria italica
  Peptide Sequence Number=SeqID_73180
ttttttttacttgttgcacttgcacctatgctggtgcatgtgaatgaatggatctttattaaatttccaccaaaagcagcacaagaaacaaaagctaattcgaatctgattcttctccatgaattcgtctatgtccctctcgtaacaaagcacaaaatgtaatcaaagcggacgcacggtcgatggatcgagcagagcactcggatcatcgatcagtgcttgatgtagatgttgtactcgacggtggcgtcgccggtcttgaggtcgaaggtgtgcgtgcgcgcctgcgcgtaccctctcgccatcctgaacacgccggtgcccccgacgacggccatctccctgacggcgttgaacacggcgttccggcccatgatggcg

SEQ ID NO: 7207 - DNA, 616 bp, Setaria italica
  Peptide Sequence Number=SeqID_73181
gtgatggagcctccaagtaacatcgtcggctcggatcatcgagtgcttgatgtagatgttgtactcgacggtggcgtcgccggtcttgaggtcgaaggtgtgcgtgcgcgcctgcgcgtaccctctcgccatcctgaacacgccggtgcccccgacgacggccatctccctgacggcgttgaacacggcgttccggcccatgatggcgacggtgctgccgttgtatttgccggcctggaagacgaagttcatgttcatcatcagggacacctcgtccttgccggcggcgatgtaggtgccctgcgcgcggccgaggggcttggaggacttgaggtcggggccctcggtgagcgggtcgtcgatgaccacgacggcgccgaagcccgtcttggaagtgttggtgacggcggcgtgcgccacctgcaccgccgtcgggctcggcccgctcaccacgtcgtgccagtagagcttgatgtgcgtctgcttctcgccgccgcccgacgacgccgccgaggcggcggtggtggccaggaggagaggcaggaggaggaggggaacggcggcggccatggcgcgcgcttggcgtacgttgctggtggttgtggtccttgtggac

SEQ ID NO: 7208 - DNA, 661 bp, Setaria italica
  Peptide Sequence Number=SeqID_73182
aattggcttagatgctacaatcatagaccaaacaaaacatataaaatgttaacaatgatacattgaaatttctccattgcactttagccatgtggcaccatgtcagtgaaacaggccaatcatttcaataacatgtaatcttacactcttagtaggcatgaaataagcagcgattgtctaacacttgccagacacacatgctaattggtcaaacttggtgcaacctagccatattttcgagcacttggaaacatataatttacgagtgcagcagtttataatcatcaacaacaaaaccttttagagtgctaagcaacttgggggaggcctcatcagtctataataacaaaaacatatctgaattggaaatacaaaacatggtagtatgtaggcaagcatagaaagcatcctagaccagcatggagctctataactagactggcttagtgacaggacacaaactgttttacttgaggtattagagacttgtaaagcagtgatcagtgacatactttatctcaatgcaatcaaccaatcacatttgacacgataaaacccatacaaaaatttaattcataacaaagggcctgtttagtaggaacttgtggagctagagcttggtgtacacagtgttgggtggtctcattttctttccaattta

SEQ ID NO: 7209 - DNA, 319 bp, Setaria italica
  Peptide Sequence Number=SeqID_73183
ttttttttttttaaaaattccatatagcatgccttccatcatgcatatatttcactctatttagattgaacttagcactccatgtttcacatgaacaaaattattatacacggatagagctgaggaccacttttcatcttccctctctctctaacacactgtacttacacgtttattactcgttagatcattgtattaaagatgacaacatattctcgccacccattactccaacaagggcaacttggaacattgctatctaacactggccgtcgacctccaagctcctgggagtcatctggaagaagtggtcccaggc

SEQ ID NO: 7210 - DNA, 349 bp, Setaria italica
  Peptide Sequence Number=SeqID_73184
ccagaacagatcgagcgccctcgcgactcggtggctccctctcccggcgacgctgctcctggcgccgcccgctcccggcgtctgcggagcccgtgcacggctacgcatcggcccctctcttcctttctttcctggcagcgataactgggcgatcggccgcatccggtcttcgtcaggccacattccatccccttcccttcccgctgtcgaaatcgagctccccatagcctaatggttgtgatttgatctcttggtatggttcatccgaggtttcttgttgcttgttcaggctccaagttgtgcttcatctcaaattgtggcggtaactataagagcatgattggtggcg

SEQ ID NO: 7211 - DNA, 286 bp, Setaria italica
  Peptide Sequence Number=SeqID_73185
ggtcctagcgagcgctatccacccatcaccggagctccgtatccgcgacgcccggaaatggcggcaccctcccacgtcctccccttcctctcccccgccagcaccgcctcctccgtccgcgtcagcccgggccgccgctccggcctcctccgctgcgcggccgcggccgggcaggcgggcttcttcacccgcctcggccgcctcatcaaggagaaggccaagagcgacgtcgagaagctcttctccggcttctccaagacccgcgagaacctctccgtcgtcgacg

SEQ ID NO: 7212 - DNA, 616 bp, Setaria italica
  Peptide Sequence Number=SeqID_73186
catttgggtcttggcaatgtgatgttcaggtgactggcaagccaggatagtagacacgtgcaatcttcggatgttacctctaaaaaattgggccatccgcatagcagtgtattctggcattgcacacggagatgcagtgtcttcatgccccgaaggatcaggtaggcagcatttgggttcagaacgccaccaactacatggtgataaatgcgaactttggaaactaactcatctctgccactgacacatccaccaacgacagttagtgccttctgattgatagggaggcaaaagtactgtcaatacaaagcagagctcccttgctatggcacatgttcgcgacaagctcaacatcaatgcatctgagaaatggattcgtaggagtctcggtgaagaaaagagatacattattattatccaatgcattttggagagcatccatgtcagcaggcctaataacagtcatctgggcacaaacagtatcacagagtaagcaaaacatggtaacattttgtatacaatataagtcaacaaagtggttccctttccactggtggataatatgaccatgtaataaaatcctgagacacgcaacagaggataggcaaggcacaca

SEQ ID NO: 7213 - DNA, 145 bp, Setaria italica
  Peptide Sequence Number=SeqID_73187
tttgagtattcatattcttcaatatcttttgttggtaatatgaatactcaaataaaataactggataaaatcaaaagcattgcaagtcatgtgctcccttagcagtgaccagtcatattcacacgggaagacatgacttgcaatg

SEQ ID NO: 7214 - DNA, 307 bp, Setaria italica
  Peptide Sequence Number=SeqID_73188
tatcagttcatggttgccctgctgtatttcatagagatcagtgagaatatttgagccgatgactgatatattttattgatgtgaacaatcaagtgcttagaccttctcaagggcctggacaagatcattcttcagatcctcgaaatcctccactccaatgctgaacctgatcaggttgtccttgatgccatagatgtccctttgctcctttgaatcccagtaagacataatggcatcaaggacaacctgatcaggttcagcattggagtggaggatttcgaggatctgaagaatgaccttctcaagg

SEQ ID NO: 7215 - DNA, 709 bp, Setaria italica
  Peptide Sequence Number=SeqID_73189
gttgccactgttactataaacttgtcaacacaaaatacaacagcaagtcagcaaccaatccattttggcacatgcactgtttggaaatatttagcaaagttctagataaattcacattgcagtgcatggaaaatattttttccttttccagttcaattcactttatggaagtttacagagtattgagtgcagcttgtaatactcagaaggggtagaagattttactaaactgagcagacacctttaaagagaatcgcaccattttctaaccaccacaaacagaagcttgtggctatggaaaatctattgatagtagcctatgaaagcaagataaaataaatggaaacagatttcacaaatctaaacttactgggttcagaacgccaccaactacatggtgataaatgcgaactttggaaactaactcatctctgccactgacacatccaccaacgacgtcattgtgtccagcaatgtactttgttgcagaatgaataactaggtcagcacctaaagttagtgccttctgattgataggggaggcaaaagtactgtcaatacaaagcagagctcccttgctatggcacatgttcgcgacaagctcaacatcaatgcatctgagaaatggattcgtaggagtctcggtgaagaaaagagatacattgttattaggcctgctgacatggatgctctccaaaatgcattggat

SEQ ID NO: 7216 - DNA, 236 bp, Setaria italica
  Peptide Sequence Number=SeqID_73190
cctggacaagatcattcttcagatccttgagaaggtctaagcacttgattgttcacatcaataaaatatatcagtcatcggctcaaatattctcactgatctctatgaaatacagggcaaccatgaactgatatatttattgatgtgaaccaatcaagtgcttagaccttctcaagggcctggacaagatcattcttcagatcctcgaaatcctccactccaatgctgaacctgat

SEQ ID NO: 7217 - DNA, 642 bp, Setaria italica
  Peptide Sequence Number=SeqID_73191
aagacaagtagttaatttacttaggtactaatttgcacacggagatgcagtgtcttcatgccccgaaggatcaggtaggcagcatttgggttcagaacgccaccaactacatggtgataaatgcgaactttggaaactaactcatctctgccactgacacatccaccaacgacgtcattgtgtccagcaatgtactttgttgcagaatgaataactaggtcagcacctaaagttagtgccttctgattgatagggaggcaaaagtactgtcaatacaaagcagagctcccttgctatggcacatgttcgcgacaagctcaacatcaatgcatctgagaaatggattcgtaggagtctcggtgaagaaaagagatacattattattatccaatgcattttggagagcatccatgtcagcaggcctaataacagtcatctgggcacaaacagtatcacagagtaagcaaaacatggtaacattttgtatacaatataagtcaacaaagtggttccctttccactggtggataatatgaccatgtaataaaatcttattgtgctagactcctaaaatccaggatctttatgcaagcatttctacttccttcaaaaccttgtagatggccatctgaacaatttaga

SEQ ID NO: 7218 - DNA, 428 bp, Setaria italica
  Peptide Sequence Number=SeqID_73192
gtcccgtcgttggtacggcaaggctggcgtcggagccgagcagtttacgctcggcctgtacgacggcggatggctgcgcaaccttagcgttggggattgcgctgacctccgccgccgccggagttggggcgggcggcggggcggtccgaccacgcggcggcgacgatctgcgcgacgccgatgttgctgcagttgcggcgggccttggtgctgagctggcgcacgaagtttggcgggaagcggaggatggtggcggaggagagggcgccgcccgactcggtggagaagaccacctgtggcgtgagcgagacggtggccatggctgaggaggcggagctagggtttcgctggtggcgcggcggggggcgggcggggaggggcgatcggctcgatcggttgcggcggctcccggtaggtgactgggtggc

SEQ ID NO: 7219 - DNA, 671 bp, Setaria italica
  Peptide Sequence Number=SeqID_73193
gcgctcgagtactggcaccgccgtcttcctcgcagcgacaaagggaaggcgccatggtgctcccgctggtccaacaggggtgagatccgctggctgcagagtctgaagcgcacttctgcagacgggtaccctgagcaaggtcgcaatggatttgcagtttgtgctgtggtattgactgttgtcatgggaataagatatttcaaaacaagaaagataatgcctgctggaattattgctgctatcagtgcaatcgtgttgatattctacgtgtacaagatatcaactggtggtaacaaggattacatcccggtgagtgccgagtgagtctgctggagcttgtgaaggcaacaacttgatcgctgctgtcatgatgcgcccatctagtgaggcaaacactgtaccaagcaagattatctcagctgtcatgatgtgtccatcgattgtactctagtgaggccaacactgtactacactattatacactagttcactaatattaaaccttctcctttgctgcgtgtggtgccacatgttcttcttgtcttactaaactagcgagggggcctgcgcaaatagcgcgggtagttagattttttttcatgctaacatttaggctcaagaattccattggagaggatttggggcaacctgttccgaggatttttttactt

SEQ ID NO: 7220 - DNA, 740 bp, Setaria italica
  Peptide Sequence Number=SeqID_73194
tttttttgttttttttttttttttttatttgtcaacatatttcctaatttcagaaacaattcgatcttgaatcatggcacatctgacagttcattagaagtcaatagtttaatgcattattcaagaacaagaagccacctagaagtaggaaacaggtttgcacacacaatattttgacatgaactccccaagcagagcttttgcagagcagctagggagtactaggtgaaccttctgatctttactaggagtacataccgatccaagaacgcgcggcgagacgcgaaccggccgcgggacgggtggatcacacggtgaacttgatctcgaacccggcggacggatcgacgggctcggccggggatgggacgacggcggtgacggtggaggcggggggcccgaccgggaagcggcgggttatcatgtcctcgatcttcgcgggatcgccggacaggagggcctccacggagccgtcgcggcggttgcggacccagccggcgaggccgagggactcggccgtggaggcggtccagtcgcggaaccccacccccgtgacgtggcccttcaccaccacgcggaccgccttccgtgcggactcgggctgcggctgaggagcgggtggagacggggcgtcggcgggggcggaggttgccatgtcgccgggcgaggtgcggtttcggacgttggggggggggggggccaagtttgcggcgcggcggcggcgaccgaatgaacgttct

SEQ ID NO: 7221 - DNA, 3103 bp, Setaria italica
  Peptide Sequence Number=SeqID_73195
tttttttttagaaaagtttaaacacacatcactttctcatgcagtaaaacactagttgggtcaatagcagcagtacaatacaagccaataggtgtagtcattacaatactggtgaaaggtacaaggcaaggcagaatatctagtatgaaacaattctctgacttccggtccataacttgagagaacattgacagcacaaactcatgaaaaatatgctgaatgaataaattatgcctgcgagggaacgaatggaaccagtttttacctcaccgccccttggggttcatgatctgtgagaagacggcgctaggcgtcagcccgtctgagtccatactcgcgacactttgatcgcccatgctgatagaagtggtggtggttgtggtggtgctcgattcaatggacgggtcattgggatccttctttcccaccatcacaaggggagtgccctcgtcagacatcccacagccaaggcttccactctcttctgcgctttcctgcatttgaagggcaaactccaagttccagagtacatcccccatagaaggacggtcaatgccctgatcagaaacacacttctcagctgtttcagcgaacttcttgaaacactgcggagcaatctttcccttcaggtagggatcaacaatctgatcgagaatgcccttcttctgacagtgcaatgcccactctgccaagctaacttcttcctttgcaagagtagggttcaaggcaggccgtgcacagaggacctcaaacagcacaacaccgaaagagtagacatcagatttctcggtgagctgctgcctgcggaagtattcaggatcaaggtaaccaaaactgccctttaccactgtgctcacatgagtgtggtccatagatgggccagtcttggacagaccaaaatctgaaaccttggcaacccatttctcatccaggagaatgtttgttgtcttcacatcacggtggatgatggtgtgctttgcaccggtgtgaaggtagtgaagaccacgagctgcaccaatgcagatatccaagcgctgcctccaggtaagcggtggcttctgggtcttgtacaagtgctcgcgaagagtaccatgagccatgtagtcatagacaaggatcatctcattcttctcctcacaatatccaatcagtgacaccagatgacggtggcggagcttggacaacatttcaatctcagtctggaactcatgaataccctgctcagacaacggattgccgcgcttgatagccaccttggttgttcccccatcaacctcgccacggtaaactttaccaaatccacccacaccaagaataagggactcatcgaagttgtttgttgcagccttgatctcagcgaaagagaaatggcggcacaggttggatggcaaagatgaagcatagctaccagtagtgtgcgacttggccgaactggaagtgtgtgaattgccataaagagacaagggcagccagccagaatggccgtcgctcatgcctgcatccttcccggcactcctgcgcctgcagaacacaaataagcagtacccaagtgcaagaagcaccaaacctccaaccacaccaccaacaataggcccaacagctgacttcttcttagtctccccatcatccgttggctcaacacttgggatagggttgagccctgcaaggctaccattgctaagctgtaacttgaacacctccaacccattgaggatagcatcatatctctctggcttcgagtcaacatccgggtggagagcaacccataaatccataggccctaaaccatatgtgctcaccacatagtcctgatacaccggagtgccaataccggtggtagcaccactcacggacgcccacgcaatcacatcagcaccattcatggccgtctggttgttgatgtaaatgtcgaacacccgctgattgatctttgtaattgggtactggatctcacagaaatgcatcctgacaaggtaattgaagccagcatccacctgcaacatccatgtgagattgtagttcaagttcacattcttgtccgggcccatcgagcgtgccgtggagtagacgtccatcggtgccacatactccggcacattgctcgggtacgtgatggtgacattgggatcactcgggtaagacaccccgaacgaggcgccgaagatgtagggcgagtcgtcatcccaggaccggtacccgccggtgtccttggagggggagatcgcctggcctccaacgttgagccgatacatggtctgcatcgcaacgctggcatcgatcgagaacggctggttgttgccatccccggtgaccatattcggcggggtgaggccgaagaggtcgggggaggagacgacctcgattccattgacgaacgcgtaggcgttggggtggctcttctccggggtgaaggtgaggtcgagcgtcgaggagacgttgacggagaactcccggacgaggtaggagaaggtgatggcggcggcggtctggtaggcgctgaagttggagaggagcgtgagcttgccgacagagacggagaagacgccgtcagcggcgtcgcggttggagtagttggccgggtagaagtgcagcctgaggaacttgcggccggggccgagcgggaaggagtaggtgaagggcgaggccgagacccgcgcggtgaggtacggcacctgcgggaccgaggggtcctgcccggaggcgggggccgcggcggcgaggttggagggcggagcgtactttgagccttcgtccccaccccacatccggccgtcggtgtcgttgccctgccccttcgcgccgcagtccagcaggatgtcgtcccgcggcacgaacgccgtggagttgcgccctcccgccgcctgcgccgccgccgcggcgcaagccgccaggagcagcgcgagcagcagcaaggccctcatggtgggggggcgtgtccctcctcacagatcggacatcaacgcggcgcgcccgcgccgatctgggggcggattcgcggcaggagtcggcggcggaggcgagatttgagggctagcagaaggagagaggtggcagccgcaggtggtggggaagggaggaggagatggaggggggtggaggcgtt

SEQ ID NO: 7222 - DNA, 927 bp, Setaria italica
  Peptide Sequence Number=SeqID_73196
tgattgaaaagttatgctccaaatcttctaccgcagaagatgacaattcccagaacgctgccccaggggcacatgacattgtgttagtcctttgtcccaatgtcatgctgtgcgaacaagttgttcggatggctaattcgttgcttgacgagtctggtgaaccacttaaaagtgctgctgctgtttgcggaccgaagggttggccagctgttcatccagatattcttgtagccactccagctgctctcttaaattatctatttgactatgaccctgaaaagaggcgaagagagagattcatgcgtaatgtaaaattcatagtgtttgatgaggcagacatgctactttgtggaagttttgagaaccaggtcattcgtcttatccatatgctgagatttgatgaaaagcaactgtctagagcacaagattctggaaaagaagtattacctgggagtgatgatgaatatcatgaggattcagactctgagggtgctgaattcagtggttttgatgaggaaaatgaaggcgatcttgttcgaaataaaccagttaaggcagagaatagtcctgttggagcacgtagggactggaggagggttagaaaaacatataaaaggagcaagcagtatatctttgttgctgccacccttccgcagagtggcaaaaagactgctggtggtgtactgaagcgtatgtttcctgatgctgtatgggttagtggaacttatctgcaccgccacaaccccagattagagcggagatggatggaggtcactgctgatacacaagttgatgctcttctagatgctgtaaaatatggcctaaagataagatcatgatgcaccgaaacgcactatggtgttcacaaacactgttgatgctgccaattcagtctctgacatattgcagcgagttggtattccatgc

SEQ ID NO: 7223 - DNA, 733 bp, Setaria italica
  Peptide Sequence Number=SeqID_73197
tgttaacggaagctccttttcctactaaacgctctctccactggctgggccaactcctctgcttgacggactgctcttacaagatcacgatttgcctctgtgtataggctggtcactatgccagactgcccagctctggctgtgcgacccacccggtgcaaaaaatcaacagcacaggcagcaaattccgcctgaatgacatgacaaacatttgggacatcgagcccacgggcagcagcatcagtgcatacaagcacaccaccattatcccgaaaagattgcaaattattagccctttcctccaatgaactctcacgatggtacaagatgcatggaataccaactcgctgcaatatgtcagagactgaattggcagcatcaacagtgtttgtgaacaccatagtgcgtttcggtgcatcatgatctttattctttaggccatattttacagcatctagaagagcatcaacttgtgtatcagcagtgacctccatccatctccgctctaatctggggttgtggcggtgcagataagttccactaacccatacagcatcaggaaacatacgcttcagtacaccaccagcagtctttttgccactctgcggaagggtggcagcaacaaagatatactgcttgctccttttatatgtttttctaaccctcctccagtccctacgtgctccaacaggactattctctgccttaactggtttatttcgaacaagatcgc

SEQ ID NO: 7224 - DNA, 303 bp, Setaria italica
  Peptide Sequence Number=SeqID_73198
agaatagaacggtagaatgacgaatgggcatcctgatggtggatgtgatgatgacgtctcggtggtggcagagagcacggtaacgaccatagtgaactgggaggggaatgttgcacccaagtcgctggaggatgatgagggttttacatctgcatcgccggcagaggctgcatccacttctgggtttgataagaccagcgttgacagtggtatgaacagccggagctgcaatggtggctcatgtactggtggcgccaccacatcaggcactgggaatgactggtggtggcggcaggacaatgg

SEQ ID NO: 7225 - DNA, 250 bp, Setaria italica
  Peptide Sequence Number=SeqID_73199
accttgttcagaccattgttccagggactagattaactgttgttggcatctacagcgtctaccaagcatctgctaaccagaagagtgctgttggtgttaaacagccttacattagagttgttggtttggagcaatctagagacaacaactcgaatggcccctcaaatttcactcttgatgaggaaatggaattcaaagaatttgcacagaggccagatgcatatgccaagctttgctcaatgattggccc

SEQ ID NO: 7226 - DNA, 254 bp, Setaria italica
  Peptide Sequence Number=SeqID_73200
gttcttcaggcaggtatgcatatgctaagatagttcaaacatatacagctagtttttctttgtacactctatgcacgaccgcacgtattgccattgtgaaagactttctgattttgaagggcccatgtccaaattgtggaaatgaaaacctttccttcttcgggactatattgtcagtgcctagtggtggtgcaaaaaacaatgtgaaatgtgcaaactgcggcactgagttggagtatgactccgcatcccgg

SEQ ID NO: 7227 - DNA, 467 bp, Setaria italica
  Peptide Sequence Number=SeqID_73201
gttgccagagcctttcagtttcatcttcacatggttcgctgcactgcctttaatattttggatagcccaggcaatcactaatgccattgtgaaagactttctgattttgaaggtattttcctttttcttgtaaatacattattgtatggttaactggagaacacagatgattattattcctttttcagggcccatgtccaaattgtggaaatgaaaacctttccttcttcgggactatattgtcagtgcctagtggtggtgcaaaaaacaatgtgaaatgtgcaaactgcggcactgagttggagtatgactccgcatcccggttgattacactcccagaactggcagaggcataaggtgatgtggtttagatttcactagcaggatggagggcccctggtgcttgatctacatctacagtacaattgtacaaagcaagacagactttgaagtcgggtagacaattg

SEQ ID NO: 7228 - DNA, 548 bp, Setaria italica
  Peptide Sequence Number=SeqID_73202
aaattgtggaaatgaaaacctttccttcttcgggactatattgtcagtgcctagtggtggtgacaaaaaacaatgtgaaatgtgcaaactgcggcactgagttggagtatgactccgcatcccggttgattacactcccagaactggcagaggcataaggtggatgtggtttagatttcacacacaacatcaagttcttcaggcaggtatgcatatgctaagatagttcaaacatatacagctaggttttctttgtacactctatgcacgaccgcacgtatcgccattgcgtcaactctgtatagtacaaatatctacatttgatcaagatatacatagagactagcatataccaaacaaacatcactacacaattgtcacccgattcaaagtctgtcttgctttgtacaattgtactgtagatgtagatcaagcaccaggggccctccatcctgctagtgaaatctaggaatatccaagtagttagtattatcttatacacagaagtggcaatgtatgtcctactcgatcttacgaactttcccaaa

SEQ ID NO: 7229 - DNA, 532 bp, Setaria italica
  misc_feature (73)..(73): n is a, c, g, or t
  Peptide Sequence Number=SeqID_73203
agatcacatatcttcttgagttgccagagcctttcagtttcatcttcacatggttcgctgcactgcctttaanattttggatagcccaggcaatcactaatgccattgtgaaagactttctgattttgaagggcccatgtccaaattgtggaaatgaaaacctttccttcttcgggactatattgtcagtgcctagtggtggtgcaaaaaacaatgtgaaatgtgcaaactgcggcactgagttggagtatgactccgcatcccggttgattacactcccagaactggcagaggcataaggtggatgtggtttaggtgagtcactcttctacgagccttcactcatcaacggtacaaattagtactccctccgtcccaaattgtaagtcattccaagaattttggagaagtcaaagcatctcaagtttggccaaaattatagagaaaaatataaagatttatgacatcaaatagattactatgaaaatataattgataaagaatctaatgatacttagttgacatcataaat

SEQ ID NO: 7230 - DNA, 509 bp, Setaria italica
  Peptide Sequence Number=SeqID_73204
atcccctgtgtgccttggcagttctctttttaaatttttggtcgcctgtctaagtaatcctttcttagtgaatttcacacacaacatcaagttcttcaggcaggtatgcatatgctaagatagttcaaacatatacagctagtttttctttgtacactctatgcacgaccgcacgtatcgccattgcgtcaactctgtatagtacaaatatctacatttgatcaagatatacatagagactagcatataccaaacaaacatcactacacaattgtcacccgattcaaagtctgtcttgctttgtacaattgtactgtagatgtagatcaagcaccaggggccctccatcctgctagtgaaatctaaaccacatccaccttatgcctctgccagttctgggagtgtaatcaaccgggatgcggagtcatactccaactcagtgccgcagtttgcacatttcacattgttttttgcacccaccactaggcactgacaatatagtcccgaag

SEQ ID NO: 7231 - DNA, 670 bp, Setaria italica
  Peptide Sequence Number=SeqID_73205
tagatatttgtactatacagagttgacgcaatggcgatacgtgcggtcgtgcatagagtgtacaaacatcactacacaattgtcacccgattcaaagtctgtcttgctttgtacaattgtactgtagatgtagatcaagcaccaggggccctccatcctgctagtgaaatctaggaatatccaagtagttagtattatcttatacacagaagtggcaatgtatgtcctactcgatcttacgaactttcccaaacactttagttgttttccgctgtaggtttgattcttaaaggagtacccatataactgtgaagtcaatagcatggtactccctccgttccaaattgtaagttattccaagaatcttggagagtgaaagtatctcaagtttgaccaaatttatatgataatataataacatttatgatgtcaactaagtatcattagattctttatcaattatattttcatagtaatctatttgatgtcataaatctttatatttttctctataatttttggccaaaacttgagatgctttgacttctccaaaaattcttggaatgacttacaatttgggacggaagggaagtaactaaatttagtaaccgttagaatagaagtagaaaggactacgtaagaaagaagtagaactacaacctaaaaccaa

SEQ ID NO: 7232 - DNA, 198 bp, Setaria italica
  Peptide Sequence Number=SeqID_73206
cgagcggaatccagacggagcagagcacacacacggcgtcgcatttggaacgctcgctgcccgtcgcacgtacgaagcccacgcgtccgcgcgcgtcagcacgtgccggagcccccgcacgggcgtccccgccggagaggaggatgacacggcggtgctcgcactgcagcaacaacggccacaactcgcgcacctgcc

SEQ ID NO: 7233 - DNA, 600 bp, Setaria italica
  Peptide Sequence Number=SeqID_73207
tggaggccaacgcctccgcggccgtccggtgctggggcccgcgcggtagcgccgtgcaggcggacttcgccaacgccacctccgtccgatacctcgccgcggggggcacccgcgcctgcgccgtcctggcgtccggcgccgcgctctgctcgggatccgactccacctctggctcggccaacgcctctgccgtgctgccgcgggacctctccccttacgggctggccgtcggcgactcccacgcgtgcgcgctccgccgaaccaaccacaccgccgtgtgctggagcctcggggggccgaccaccaccgtgtactatccggccgtggggactgcgttccagttcctcgtcgccgacggcaacatcacctgcggcgtcgccagcatcgacttcagcgtgatgtgctggtcgttgggctccgatgccaccaccgtttcgttgccgcggatcctcccgggcgtctgcgtccgcgacgagagctcgtgcggcggatgcggttacctgtggcagtcgcagcagttctgtgggggctccggcgggatctgccgcctctgcgacggttcgtcggcgcctccgccgcggggacctgtttcccctccct

SEQ ID NO: 7234 - DNA, 463 bp, Setaria italica
  Peptide Sequence Number=SeqID_73208
ctcaacttattgttgttgtcctgcaggaagtcaaggagcacgggcgtcttggcactgggggcaccgagggtcatcctgggggagcatgacgtagatgaagcagcgagggcaggcagcaagaaccatggacgtggcctcagggctgttggaccactgcaggccatgctcgttctcggacgacaggcaggagctcggggatgactcctcgtcagccatcagcctcctggaggagtctcctgttgccggaagtgagagattcagcttcaggtcaaggcccctagagctcttcctgttgctgcggctcatcctgggaggtatgtggctgcctgcatccataaacgtttgaatcagctgattgagatacacacttcagaatgaatttgctactgttatgaggattagcaagggaacttactgttttgtggggcagtcaggcgctgggtgtaagcaggtggagatgaga

SEQ ID NO: 7235 - DNA, 1565 bp, Setaria italica
  misc_feature (1525)..(1565): n is a, c, g, or t
  Peptide Sequence Number=SeqID_73209
gattctgaattacttaagtatgcctttgctgaaatggaagagtccagaggggcaatacagaccgctaagacaatatacgagtctcttctaggtgaaaatgctagtgtaacctcacttgcacacattcagtttattcggttcttaagaagaactgaaggcattgaagcagctcgtaagtactttctggatgctcggaagtcaccaagctgcacttatcatgtgtatgttgcttatgctacaatggcattctgcatcgacaaggatgcaaaggtggcacaaagtgtttttgaagcaggtttaaagagatttatgcatgagccaggatacatccttgaatatgcagacttcctgtgtcgtttaaatgatgatagaaatgtgcgtgctttgtttgagagagcactaagcttacttcctcctgagaaatccacagaggtatggaaaagatttgttcaatttgagcagacttatggggacttatcaagcatgcttaaggttgaacaaagaaggaaggaggccctatctaggacatcagaggatgtcctatctgcatcagaaaacacgcttcatgacgtagtttctcgatacagttatatggatctttggccatgttcatcaaaagaattggattatctagtgagacaagagtggcttgcaaaaaacattgttaagaaggtcgacagatcaactttgctaaatagcagtaatatgctagataaaggtactctcggaattagtgcaaatacgaggttgctaccacaatctgcaaaagttgttcgtcctgagacttcccaaatggttatttatgatccgagacagatgaaaggtccagagttttcagctgctaccagtgggtacacaaaggaggttgaagacatgctcaaaacgctttctccagcgacggcatctttcatcaagaacttgcctgctattgaaggaccatcaccggatattgatgtggtgctcagcgtactgctgcagagcaccttgccagtcacacagaatgctgggaaagcaagtggtgcgagcgagctctcaggcgtcggcaaatctggactgaaccagaatggatctgttcatagacctccaagagagaggaggaaggacgccggaagacacggggtgcaagaggaagaagatgccgcgacggtgcagagccaagctgcagtgccaagggacatattcaggcttcggcagatccagaggagccgtgggctgggcgtgggtggtgccgccgctgcctcgcagcagtctggatcctcggcattctccttctccggtggtggaagcgccttctccggggaccactctgcgagcacagactagttgttagtactgtagttactaatattttttttagcaaatcacagtacagacgtagatgttgtactttaatggaattcatctagtggctgtgtttcagaatttacattgctgcagagtaatgtaagaaccaaaccgagactgttgatgctaacttgctaagccgtgtgtaaggccaatcccaatagagtagttttaaaatttnnnnnnnnnnnnnnnnnnnnnnnnnnnnnnnnnnnnnnnnn

SEQ ID NO: 7236 - DNA, 502 bp, Setaria italica
  Peptide Sequence Number=SeqID_73210
gccttcttcatcttcggcaacgagatggcggagcgcatggcctacttcggcctctccgtcaacatggtcatcttcatgttcaaggtcatgcaccgccccttcaccaaatccgccaacgccgtcaacaacttcctcggcatctcccaggcctcctccgtgttggggggcttcctagccgacgcctacctcggccgctactggaccatcgccatcttcaccaccatgtacctgctgggcctcatcgcgctcaccgtcagcgccagcgtgccggcgctcgtgccatcccaggagggctgcgacacgctcgccatgctgctgggcgcctgcgcgccggccaagtcctggcagatggcgtacctccagaccgcgctctacgtcacggcgctcggcgccgccgggatccggccctgcgtctcctccttcggcgccgaccagttcgacgagcggagccccgggtacaagcgccgcctcgaccgcttcttcaacctcttctacctcgccg

SEQ ID NO: 7237 - DNA, 868 bp, Setaria italica
  Peptide Sequence Number=SeqID_73211
ttcgtgggcacgccgctgtaccgtctcctccttcggcgccgaccagctcacgcgggtggcgcaggtgctcgtcgccgccttcaggaagcgcaacgccgccttcgacagcggcggcttcgtcggcctctacgaggtcgccggcgccaagtccgccgtccggggcagcgccaagatcgaacacaccgacgacttcaggtggctcgacaaggcggcgctgcagctggagggcgacctcgccggcggcggcgaggacccgtggcggctgtgcactgtgacgcaggtggaggaggtgaagatcctgctgcggctgctgccggtgccggcgtgcacggtgatgctcagcgtcgtgctcaccgagttcctcaccctgtcggtgcagcaggcctacacgctcaacacccgcgtggctgcgctgcacctcccggtggcgtgcatgccggtgttcccctgcctcgccatcttcctcatcctcgcgctctactaccagaccttcgccccgctggcccgccgcctcacgggccacccgcacggcgcctcgcagctgcagcgcgtcggcctgggcctcttcttctccatcctctccgtggcctgggcggggctcttcgaacgctaccgccggggctacgccatccggcacggctacctcgccctcttcctcacgccgatgccggacctcagcgcctactggctgctcatccagtattgccttatcggcgtcgccgaggtgttctgcctcgtcgcgctcctcgagttcctgtaccaggaggcgcccgacgccatgcgaagcgtcggctccgcgtacgccgccgtcgccggcggactcgggtgcttcctggcgtcggcgctcaacaccgccgtggatgccgcg

SEQ ID NO: 7238 - DNA, 909 bp, Setaria italica
  misc_feature (1)..(28): n is a, c, g, or t
  Peptide Sequence Number=SeqID_73212
nnnnnnnnnnnnnnnnnnnnnnnnnnnnaccttagggtacgaaacattgcttgcaaatttagcaagaccaacgaacgaacaatgcatgcatggagtaattttggttcattcgtgaaatgaattcagatttctgggaggggaaaaatatcgtttcatcaatcactcacacccaagccatacatagcaggactacaaggtgccaagagacaatagcttcggcatcaccagactcactctttgaattcagcatgtataaaaatacgccaaaaagttggccaggatcaactagaaattgctcaattcaacagttaactgtttctaatgtgccatacgctgactggaacatgctcaaactttgtatggtctttagtgctcttctatcttcttcaagtccttcatatttgttgtgtccacggttgttccataaagcgcaatcttgtggatttttgtgacatcacttccactttgattgtcctcaataaatatagtcaggctgcgaacattttggaacttgacatattttagtgtcgcgggtttgttctctgccaagtgatcggcggatagatcaagagtgtcacttggtggatagtcatttacattgctgaaacccatatgctctttattggagaagagtttgactgttttggggccttcttcctcgggccctttgaagagcgcggaatgcagtttgaccacctgcatgaaggggatgtagatcagcagctgctcgtccgaatcgctggcgaggtacagcccctcgtcgtccctgtaaccctgcttgagcgcgttggtgatgctgtgggaggagtcctggttgaggcactcgacgccggtccagtcgatgaagtcggccagatccacctgcccgcgcggcacctgcacgggcgcggccggggcggcgggggcggg

SEQ ID NO: 7239 - DNA, 253 bp, Setaria italica
  Peptide Sequence Number=SeqID_73213
ctcgagtctctcaactctgtctcagactctccactcccctgaaaggcagcggtggcgttgactgcgcggccggcggcggcggcggctgcgcccggccctggagacgaggaagactagcaccctctctatttcctacttctctcccctaagcgacggctgctgctacaacccaccaaggcggcggcgactgcgacggtgccatggtccaccggcggctgcttcgtttgaggctgcaacgcgaggcaaggaagaa

SEQ ID NO: 7240 - DNA, 472 bp, Setaria italica
  Peptide Sequence Number=SeqID_73214
gttgtagagggttattaggaagtgaagggcacggcgtcggcgatgaggcggcggctgcgcttggggagggtcctggactgcttctccttgtccctgcagtgcgcgggcacctgcgcgtgcatccgcgcgccgggggacgaggacgaggaggcggtggccgtagagagggaggcgctggtggcgagcgatcgccggcagcagctgcaggaccaggtgctgcggctcagggacctcgtcgacgggtccaggacgctcggcttccatctgcaacccaagacggtggagctgagggtgtccatgcactgcaacggctgcgccaggaaagttcagaagcacatctccaagatggaaggcgtgacatggttcgaggtggatctggagagcaagaaggtggtggtgaagggggacgtgacgccgttcgaggtgctgcagagcgtctccaaggtcaagttcgcgcagctctggatcgccg

SEQ ID NO: 7241 - DNA, 1425 bp, Setaria italica
  Peptide Sequence Number=SeqID_73215
cgagggcgctcggacgggaggagtcggtgcccgagttttgggacttgatccaggaaatgaaggccgccggggtgcacgtggatatcgacacctatgtcaagctgtccaggaacttccagaagcggcatatgatcagggaggctgtggagctctacgagcacatgatggatggtcctttcaagccagcgcagaaggatgcgccgctgatcatcaggcgcatctcgctgtctccatcgccagaccttgaccttgccattcgggttgtcagcaagtatgagtccgtgtgggacaaaaagaccaaggagttgtttgatgccatccacagggtgctcacgagcaacgggagctttgatgaggctgcagaggttgtgcaaaggatgagagcagaaggtcaccagccagacaatgtcacgtatagccaattggtgtatggtctctgcaaggctggcaagttggacgatgctcgcaaagtgtttgatgaaatggaggctgaagggtgcatcccagatttgaagacttggaccatgttggtccaagggcactgtgcagctggagacgtggacagagctctgcagtgcttgacggagatgatagacaagaacttggatgcagacgcggatttgctggatgtgatggtcaaaggtctgtgtagccatgaaaaggttgatgctgcttacactttgtttgttcagatggtggacaaggctcatctgaggccttggcaaggcacctacaagcatgtaattgatgagctgctgaggctaaagaagcttggtgaggcactggcccttctgaggtcaatgaaagcccgcagtttcccacctttcacggaaccattccctccttacattgctaagcatgggatggttgaagatgcaagggactttctgaaggccttgacggtgaatactaagtgtccaacacctgctacctacctgcatgttctcaagtcgttctttgcagagggaagatattctgaggctcaagatttactgtacaaatgccctatccatatccgcaagcacccccatgtcactaaactgtttgaatcagtcaaagttgagagtgcttcttgaatggtgttcaagcaagcaacggttggtgagcatatggtgaaagcttagctttttggcattgttgagtaaccttggttagtttgatgagaataaatagatgaggttttcgtttatcagatatcttttaaggatataccactcaactaagttgaatttcaggatatatcactcccatgtatccctgatacattctccatatgacttgaattaggagggtggcatatcctcagaactgcagttttccttttctattcattgctgctagtattatgttgcaagcagttggcttctcccacaaattggtctaaatgaatcaaagcacttgcactcagtatttgagcatcatgtt

SEQ ID NO: 7242 - DNA, 352 bp, Setaria italica
  Peptide Sequence Number=SeqID_73216
tactacctaagtaacctaaaacttacttttacaagacaaacctacaagacaatacgtaaggcgagaagctgttgcgccatcggtgtccgaggcgtcaagtagctggaccggaagagaaggcgctgtagtcccagtttggtcacctcctgctgcatcaggccattcagaaacttttgctgctgatgaagctgacgtttctagtaggagttatttggataggcatccacagtcgcaccggttgatgaactggagtcagctaccccagtcattgacaacaggctgggaactggaaaattccgtgcagccaaacttaattggttagggttttctgatggatgtgcaaaccaggcag

SEQ ID NO: 7243 - DNA, 1978 bp, Setaria italica
  Peptide Sequence Number=SeqID_73217
atgggaagttgtcgatgatgaagggcaaccattcaccatgtttgccccgttctggaacaggtgcctaagcatgccgtatgatccccccgcgccacttctgcccccaaagaagatcaattcaggtgacttaacaatgtgcccatcggatgatcttatctttgaggatgagtcagagaggggaagcaatgctcttctggcccgagcatggacaccaggatggcagaatgcagacaaggccctaacggccttcctcaacggtccactggctgactattcagtgaaccgcaagaaggctgatagtgcgagcacatccctactgtcacctcaccttcatttcggtgagcttagcgtgcgcaaggtcttccatctagttcgtatgaagcagcttgtgtggagcaacgacggcaaccacgctgctgaggagagctgcaccctgtttctcggttccattggcctgcgggagtactcccggtatctgagcttcaaccatccaagcagccatgagaggcccctcttggcacacctcaggtttttcccctgggtggtcaatgagtgctacttcaagatttggaggcagggaaggactgggtacccgcttgttgatgctggcatgagggaactgtgggcgacagggtggttgcatgaccggatacgtgtggtggtgtcaagcttctttgtcaaggtccttcaacttccatggcgatggggtatgaagtacttttgggacactttactggatgctgatcttgagagtgatgcactgggctggcagtacatcactggctctcttcctgatggccgagagcttgaccgcattgacaaccctcagtttgaaggctacaagttcgacccacatggggagtatgtgcgacggtggattccggagcttgcaaggctgccgacagaatggatacatcacccatgggatgcacctgtttccgtgctgcaagctgcaggaattgagttgggctccaactatcctctccccataattgagctagacgcagccaaagccaggctgcaagaagccctgtcagaaatgtggcagctggaggccgcatcaagggccacaatgaacaatggaatggaggaaggcctcggagactcctcagaggttccaccgattgagtttcctcgagaattacatatggaaatcgatcggcagccagcccaggcaacggccaatgtgccgactactgctcggaggcgtcaggatcagatggtgcctaccatgacgtcttcactgaacagagctgaaacagcggtttctgccgacctggggaacagtgaggatactagagcacaggttccgtttcatgcacatatcgaacctcgagttcaaagggaagatgcaaatgcaatccaaaatgcagaaggccctgctcttagaatccatggtgttcaccagccaaacttctttcagcaacctcagcatcgtaggcgagaagctgttgcgccatcggtgtccgaggcgtcaagtagctggaccggaagagaaggcgctgtagtcccagtttggtcacctcctgctgcatcaggccattcagaaacttttgctgctgatgaagctgacgtttctagtaggagttatttggataggcatccacagtcgcaccggttgatgaactggagtcagctaccccagtcattgtgagttcggatgcaccataacccattgttctcagacaacaggctgggaactggaaaattccgtgcagccaaacttaattggttagggttttctgatggatgtgcaaaccaggcagctcgttcctgtatgtgataatagttgtgtaaatctaatccactagaacttgtgcgatcggtatagggtggttggcttaaaaagaatcactgttgttgatcagacaatgaaggttttcctgtaatttcgagcttttttcttggaggtgtgttatgtatgtaactgtgcattcccttgtgtttctctgtttgaccaaaaaaaaaaaaaaaaaaa

SEQ ID NO: 7244 - DNA, 232 bp, Setaria italica
  Peptide Sequence Number=SeqID_73218
ccgagtcgtttgaaagctgtttccggcgactgccgcgcttgggtagcagagccgcctcatactctgggccacgctccgtcttgcccttgtggtacgtctgctcgctgcacttgaccaagatctgcagcacgtcgttcatggttggccgcgacgacggcatatcggcggtgcagagcacgccgagcctgaagacaacctcgatctcgtcagagtacccgtcgtatctgatgct

SEQ ID NO: 7245 - DNA, 362 bp, Setaria italica
  Peptide Sequence Number=SeqID_73219
aaacaaaacccgggaaaaatactactgttgacaaatcctccgaaaaagaaaaagtggcagcttggaggactatgtcagggaactttccaaaattgtggtaacgaggagccagaaacgtggcgaccgtgagcaggaggaactggaccgtgcaatgcagcttatagaagaagatggtatcgaggaggggtctgagttgtactgtcatgcactttatttatgtaagaatgtagtgtatcgcagggccttcacgaagatgaaaatgaaagagggccgactgaattggatccaattcaacggggacagggagaacaagtagtccattgtggcataaagtttgttttattctagtgatgtgtactgat

SEQ ID NO: 7246 - DNA, 438 bp, Setaria italica
  Peptide Sequence Number=SeqID_73220
gcatttttcacgtttcattgaattggctacaagaagccaagaagatggagtgtgttcgtctctattctttcctgcaggaagatggttctgtcggagaaatatgatctcacaaagctcaaggatgagcttgcaattgtgtgcgctgatcctttcctactcgccaaagaacgagagcacatggagccacaggagatgggtgttaaaacaagttgcagagcaaaaccaagatatggcacagcttgtagagaaggaatctgtactagtgaaagagatagcagagaggtcaaagatgaactaccgtgcatggaggcatcgatgctggcttattccttacatgacaagaaaacaggtgcagataaatcatttcagactacttgtctctcattcttaatcttgtaaccgaacttcctagcactaccatgaagagcaaagctttaa

SEQ ID NO: 7247 - DNA, 974 bp, Setaria italica
  Peptide Sequence Number=SeqID_73221
cgcccgcgatgcgtactacaacacgagaaatgctccatcacaagcagttcatctgatgagcctcaccaaggtgctactcatactttgccctgacatgcttaccgcatggaactccaggtttgcatttttcacgtttcattgaattggctacaagaagccaagaagatggagtgtgttcgtctctattctttcctgcaggaagatggttctgtcggagaaatatgatctcacaaagctcaaggatgagctgcaattgtgtgcgctgatcctttcctactcgccaaagaacgagagcacatggagccacagaggtcaaagatgaactaccgtgcatggaggcatcgatgctggcttattccttacatgacaagaaaacagttgcatttaatttctgtctctgaaggtgctggatgaactgaagaagtcaacaagatggagtgaactacatgttgcttgtaactgctgctttcactaccgcaggtccctgcttcttgcactgctagacagttgtctagggaatggagaggattctgtcagttgggagtcagaaacttgcatgctctggaagaaaacaaaggatgcacacgcatgacgcatatcattgtattttaaaacattggttcctctttaggccatggttagttgatatgcggccatcttggtgcaaagttgattgtatatgatctgacaggatgagctgaggtggaatgaaatgcttatcagacgctaccaagggagagagtccttgtggaaccaccggaggttcctttcacaatggtggattcggcagttgttttctgttgaagaaacctgcccctcaacgacatcccaggtggatctgttcatcacccaggagataggcctgctgtcagagtgcctgaatgtccctgcggatgagttttggggagtcatgcgtccaagcagagctttcagcactctacattctgtggatatcgaagcaagtcccagctgtg

SEQ ID NO: 7248 - DNA, 395 bp, Setaria italica
  Peptide Sequence Number=SeqID_73222
tggagaggattctgtcagttgggagtcagaaacttgcatgctctggaaggccatggttagttgatatgcggccatcttggtgcaaagttgattgtatatgatctgacaggatgagctgaggtggaatgaaatgcttatcagacgctaccaagggagagagtccttgtggaaccaccggaggttcctttcacaatggtggattcggcagttgttttctgttgaagaacctgcccctcaacgacatcccaggtggatctgttcatcacccaggagataggcctgctgtcagagtgcctgaatgaccctgcggatgagtttggggagtcatgcgtccaagcagagctttcagcactctacattctgtggatatcgaagcaagtcccagctgtgaaagg

SEQ ID NO: 7249 - DNA, 1430 bp, Setaria italica
  Peptide Sequence Number=SeqID_73223
caaatcgcctgccgccgccgcccgctcagctcctgctccacgcctgcggcctcctcctccaatcctccgaacgggcgctccacggccgactcagcgcctcgacctccgatccagcggccgaaggcagagagaggtgggagcagcgagcgcatttgcaaacaattcgactggcccaatggagcaagaagacgaatcagaaggtgctgcagcggagcaaccggcggacgaagcagaggagcagctcgccgacgatctcctcctgcacttcgagcgagtcctccactccgaccccctcatgtatgcacatttcccagtgacgaggtggggttcttgcatccgacgcagttcggctcgctaggctgcggccaagatggcgattctgcatcccaggctccggagttccagcacaggtacttctggtgcagagaccacaagcttgccatctgctctgagatcctgcccaagctctaccgcgccgcccgcgatgcgtactacaacacgagaaatgctccatcacaagcagttcatctgatgagcctcaccaaggtgctactcatactttgccctgacatgcttaccgcatggaactccaggaagatggttctgtcggagaaatatgatctcacaaagctcaaggatgagctgcaattgtgtgcgctgatcctttcctactcgccaaagaacgagagcacatggagccacaggagatgggtgttaaaacaagttgcagagcaaaaccaagatatggcacagcttgtagagaaggaatctgtactagtgaaagagatagcagagaggtcaaagatgaactaccgtgcatggaggcatcgatgctggcttattccttacatgacaagaaaacaggtgctggatgaactgaagaagtcaacaagatggagtgaactacatgttgctgacaactgctgctttcactaccgcaggtccctgcttcttgcactgctagacagttgtctagggaatggagaggattctgtcagttgggagtcagaaacttgcatgctctggaaggatgagctgaggtggaatgaaatgcttatcagacgctaccaagggagagagtccttgtggaaccaccggaggttcctttcacaatggtggattcggcagttgtttctgttgaagaaacctgcccctcaacgacatcccaggtggatctgttcatcacccaggagataggcctgctgtcagagtgcctgaatgaccctgcggatgagtttggggagtcatgcgtccaagcagagctttcagcactctacattctgtggatatcgaagcaagtcccagctgtgaaagggaagctggaagagaggctgcattctgctcccagccttccctttcacagctgggacttgcttcgatatccacagaatgtagagtgctgaaagctctgcttggacgcatgactcccc

SEQ ID NO: 7250 - DNA, 616 bp, Setaria italica
  misc_feature (571)..(616): n is a, c, g, or t
  Peptide Sequence Number=SeqID_73224
ctggtatgtctttgcttattgctagttgagggtgagtagtgctgcagtccttgtggaaccaccggaggttcctttcacaatggtggattcggcagttgttttctgttgaagaaacctgcccctcaacgacatcccaggtggatctgttcatcacccaggagataggcctgctgtcagagtgcctgaatgaccctgcggatgagtttggggagtcatgcgtccaagcagagctttcagcactctacattctgtggatatcgaagcaagtcccagctgtgaaagggaagctggaagagaggctgcattctgtttccattgtggggttgaaggatgttctagtaagagcctgccgaccggagaagaggtggctgtggatgaatctgcttggcctgcctgatcgatcacagtgacgacatagcattgcttattgaaattgagggtgtctgcttcgattgcagttgtgacgaaacacaatggattgcattttgtaaccaaacaaacggcaaggagacctttttaattaagcgtttgcttcaggtaccaaaaaaacaaaaaacaaaaaacaaaaaannnnnnnnnnnnnnnnnnnnnnnnnnnnnnnnnnnnnnnnnnnnnn

SEQ ID NO: 7251 - DNA, 214 bp, Setaria italica
  Peptide Sequence Number=SeqID_73225
cttggagacaaaagccaggcatatgttcggcgcaacaggtcaaagccaagtagggagagtgcgaatgttgcttctgttagatcttctatacctcctgccaaagtttattgaaactaaggatgaaaacggtgtactacggaaaagcaatggaggtgatcatggtgtattatctgtttcctagtataaaacagtctggatcaaactgtgacaatgc

SEQ ID NO: 7252 - DNA, 272 bp, Setaria italica
  Peptide Sequence Number=SeqID_73226
tttttttttgtaaataaagggctctttgaacaaaatctgctcatatttgccagcagtttacaattcccaactttcctatcctagctaggattctagaaaactaaattgtaggggatgaagattttactagtctctatatctgcatctatttacatttacccagttacatatacagtaagctctttttgttgcctctcgctaccaagatagacaagaaaaatggcaagaatctaaacgttgtcacactcatactacttgatccggcatcggag

SEQ ID NO: 7253 - DNA, 710 bp, Setaria italica
  Peptide Sequence Number=SeqID_73227
cgtgcgcgcgacggcgaaccaccagcagcagcgcccggcggcggccaacaactgggcgggcaacgacgccaacacgctgctggtggtggcgacgctcatcaccacgctcacgtaccagctcgggagcagcatccccggcgggtactggcaggacacgcagctcccggtggacggcaagcggccgcacaccgccggcgaccccgtcatgcgcgacctgcacccccagaggtactgggtgttcatggtggcgagctggatggggttcgcggggtcgatgctgatgacgctgagcctgctggtgcggatgcccgtggactcgcgccacgtccggtggtcgttcgcggtggcctacgccagcctcgtgctcaccttccggttgtcgcagcccaagacgcacatctcgctggacatcctcatctgggtggccgtcaccgcattcctctggctcatgatcagcgtccggacggagcaccgggcgcgcatcgtccgcctcttctgttgcgccggcgacaactgacctgcacgggtccctcattgaggtcgactagattgccaccgcgattttatcgtagtttctcctcctcttgatttctgatttggggatagcatgaacattggcaatgccattgttaggctctgccggtagtatgtctgaaagtgagctctaggagttgggggaaatttgggggtaattttctgtaagaaaaatc

SEQ ID NO: 7254 - DNA, 269 bp, Setaria italica
  Peptide Sequence Number=SeqID_73228
tcacctgcacctccagatcgagtgcttgtgcgaggatgggttaataatgtcgtccgacggatcgtgtgtcgtcgccgacgccgtcatctactgcactgggtacgacttgtcgttcccgttcctggacacgggcgggctcgtcaccgtcgacgacaaccgcgtgggcccgctgtacgagcacaccttcccgccgtctctggcgccgtcgctctccttcatcggcctgcccaggacggtggccgtgccgctgttctacgaggtgcaggcga

SEQ ID NO: 7255 - DNA, 331 bp, Setaria italica
  Peptide Sequence Number=SeqID_73229
agccgcgtttcggccccacggtggcgcttcaaccagcgcccgcagctgccgcagcgccaggacgaggaggtggagtcgcgccgccgcttggccgagaattgcgtgtctcagcgggagcgccacttccagagcaatcgctcgcaccaccaccccggcttccgcggtaaccagtcctcgtcgtcggccaagccctccgtcgacatccagcccgactggaccatgcgcgagcagatccctttcgccaacttcaccaagctctccttctccgtcgccgaccagcccgaggacctcctcgtctgcggcgcagtcgagttctacgaccgcacctatg

SEQ ID NO: 7256 - DNA, 528 bp, Setaria italica
  Peptide Sequence Number=SeqID_73230
aactaacaaacaagaacaaggtaaactagactaccgacaaataggtagaagaaaggtacaacttttagaatagagcccaacccgtttgccactgaaggggaggaagctgcttctgttgcttatcgctaccgccgttggaagcttgatgatgaaaccagcttggttgctcgctgcgaggttcatgctgtgaatgttgatccacgtggtgagcgccagttccttacactcaatgctctgaatgagtttgatcccaaggttactggtgttgactggaggaagaagcttgagacccagcgtggagctgtgcttgctactgagctcaagaacaatgccaacaagcttgcacgttggactgcccaggcattgctcgctggtgcagacatgatgaagttgggttatgtttcgcgtcttcacccccgtgatcactacaaccattccatactcagtgttattgggtacaagccaagggactttgcttgtcactagtattctaattcttctaactacttgtctaaactattgttggga

SEQ ID NO: 7257 - DNA, 707 bp, Setaria italica
  misc_feature (652)..(652): n is a, c, g, or t
  Peptide Sequence Number=SeqID_73231
gcacagatcataatcaatactgcaaacatgtggggaatcgtcaagtcaattgtggacatttgcatgaagtttgaagagggcaagtatgtgtttgtgaaagatccagcaaagccccaggtgaggatctatgaggtgccttctgatgcgtttgagaatgattatgttgaagagccacttccagaggaggagcaagttcgcccgctagcagatgttgatgccactgcacaggaaatggatgcagctgctgaggcagaggctaatggtacatcagctgctaatggtggacagggtgacaagagtgcagaggtgactgctgcttgaagggtataaatcctttgcgagataggtctttctttgagctaattacctgttttgatggataccttaaagagttgaactgcttgttattgatacatttgttttggtcactgagaatgctgtaactctcattttacatgcttaggcatgttaaattttgttagcaccagttggttcgaatttagtgactttgttggtagttaatcgtttctgctgccatgtttctgtgttcaagccattgagtctgcctgaatatctatgtttgggctaagcattgtgaactgtgcatcattaatctatctgaatgatgtatgttttaactttaaaaaaaaanaaaaaaaaaaaaaaaactaaaaaaagagaactagaccaaaggacacacagggata

SEQ ID NO: 7258 - DNA, 1469 bp, Setaria italica
  misc_feature (1435)..(1469): n is a, c, g, or t
  Peptide Sequence Number=SeqID_73232
ctccgcctccctcaccgccgctgctgccgacgggagtcccctcgggttcatgaggtccaagctcgtgctgctcgtctcccacgagctctccctctccggtggcccacttttactgatggagctggcatttcttctgaggcatgttggctcacaagtggtgtggataacaaaccagagatcagaagaaacaaatgatattacacatagcttggagcataagatgttgaaccatggagtgcaggttttaccagctaggggacaagaggcagttgatactgctcgaaaagctgatctggttgtcttgaacactgctgtcgctggcaaatggcttgatcctgttctaaaagatcatgttcctgaagtccttccaaagattctgtggtggatccatgaaatgcgagggcattactttaagcttgaatttgtcaaacatcttccctttgttgctggggccatgattgattctcacacaacggctgaatattggaagagcaggactagcgaccgtctgtaaatgccacaaacttatgttgtccacctcgggaatagtaaagaactaatggaagttgctgaagataacattgcaagaagagtcctacgagaacatattcgtgagtcccttggagtacggagtgaagatctcctgtttgcaataataaacagtgtatcacgaggaaaagggcaagacttgtttcttcaggcattttatcagagtttgcagctcatccaacagcagaagttaaaagtgcctacgatgcatgccgtagttgtgggaagtgatatgaatgctcagaccaaatttgagacccagctacgcgactttgtggtgaagaatgggattcatgaacgtgtccatttcgtgaacaagacattggcagtggctccttatttggcagcaattgatgtgcttgttcagaactctcaggcccgtggagaatgctttggaaggataacaatcgaagcaatggcattcaagttgccagtactgggcacggctgctggagggaccacggaaatcatcctggatggcttgactggccttctgcaccctgcagggaaggagggcgtcgcacctctcgcgaagaacatcgtgagactcgcaagccatgctgagcagagggcctccatggggaagaagggctatgacagggtgagggataggttcatggagcaccacatggctgagaggatcgcggcagtgctgaaggaagttctgaagaaatcacaggaacaacacactcgttcttgagctttaccgtgcccatcagcttgtgctaacatgtagatctagatcttacggactatgaagttcggactcggggtaaactgtagattacagtctgtttcacctgttgttctgcttcgtggtttgctgtatttcattcatttctcattggtgaggtaatcaggtaaactgtctgttcccaaaaacctnnnnnnnnnnnnnnnnnnnnnnnnnnnnnnnnnnn

SEQ ID NO: 7259 - DNA, 289 bp, Setaria italica
  Peptide Sequence Number=SeqID_73233
agacaacatccatggtgatgaatacaggaaacttgggagtctgtcattgaagatccatctaacattaaagaagggacatcatcctatttccttagtgccaaaaacggattatcattgccacctaaaatgtttcaacagtcgtatagacttcgtgtactgaaactgtctggatgcaatttcagcttctattcccctccattctgttgttgccatagcctaagattccttggattagacaaatgcaaagatcaaccgcaggaagaagaggacaagcaaaggagaccaacaa

SEQ ID NO: 7260 - DNA, 416 bp, Setaria italica
  Peptide Sequence Number=SeqID_73234
ctccaattgccctcgtcctcctcaactcctagacgcgcagccgccgcccctcctctccccttcgcaacgcgagaagaactcatcagcggaagcgaggcgaaaccctagaagaaccctgcggaggatcatggcgggtccggcggcggcggcgtcggaggcgtgggataaggtcaccgggttcctgcactcgcagatcaacgacgaggagaactgggcgaacaactacaagatagcaaaggctattggtctattcgctggatccatcttcttcatgcgtacctgtggtgatataatggctgtctaaagaggagttgataggatggcggcaatggagatcagtggagctgtgtttcagtgctctttctctttttgttagcattgtcgtcagacctgttcttagtgtgggatcaggaagt

SEQ ID NO: 7261 - DNA, 951 bp, Setaria italica
  Peptide Sequence Number=SeqID_73235
cgtattcttcctatgtttgatgtgtccccagattcttagcagcattttgtcagtatcttctattgagccctggttgataatattttgagcttccaatagacgtgctcgccacggctcagcacttgaatgtgtacatttcaggcatgcagagaaggccctcttcaaagcatggaatgcacctgggactcgcaatttaataatggaacttgctgggtccaaggagagtaaaactggcagtatgcgtccgtaaaaggaaggccttctttgggcaatagctgagagactagtaacgaagacaatgatcatggaagtactgagtgattttactttaggagacttgagctgctctagcaacaatccgaggttctggctggcttccatggctagatctccgacattaagcaaagagtgacctcctcgtaaccatgctacattgaatcccatatcttttgtagctttgcttggtggatctgatgggatattaggatctggtgtgtacataagaactgttttttcaacaaacttaacagccagtaaccggacaccttcattgccggtggtctgaaatgccatgagcgagacggtggatttgaacttgagaagccgttcccatgacaatttaagtgcatcatcaatccctccagtggagaataatccctggataactaggtgttgaagtagttgggcaaacaacacggttcctgttttgatagcttgcctgacgactgcaggcacctcatcattcagaaggtgcagcaaacaagggatgatatcgggtaggtacgccatgtgtttggacccaacctcaccaatgatctcggcgacatgcttgcgcacggggctggcctcgtcggtgtggaggtcggcgatgcgggcgaggcggctaggggagcacgcgccctgcgaaggtcgcgcaggtggcggaggcgctccgcgatgtcatgtgccggc

SEQ ID NO: 7262 - DNA, 433 bp, Setaria italica
  Peptide Sequence Number=SeqID_73236
caccccgagttcgtttcactcagtaaagtgaaggtgaacagccgatctaatttttggagaggagcagccccacaggccatccgccgcttcccccttccccgcggccggcgcctcctcctcccctcagtcgcagccgccggtccgcgacctccgcgcacccgccgcctccaccgcatccctcctcgcggctctcctgccacgagcccacgactcctccgccgtcagtggttgcgccgaagagcggggcatgggcgccggcaccatggggctatgaaatggagttgccatggatacagggttcggcgcattcagactttcagaggttcctgctttagttcaagttctcatgacatcctgagatctagtataaaaccgaatctggagaaccactgatggtatggtttttagcgttttcctccgctcttctacttgg

SEQ ID NO: 7263 - DNA, 579 bp, Setaria italica
  misc_feature (558)..(558): n is a, c, g, or t
  Peptide Sequence Number=SeqID_73237
gccgggagatgaggcggatggcggcgcgcatcatgcgcggggagtcgaagggcatcgggtggcccgaggcggtgaggtcgcaggtggtgtacacgggtgcgtagaaccagtcggcttcctcggggtccagggtgcgcacggcgctggagaggagggaccggtgcacgaacacctccgtggcgaacatgtgcgtcaggcaacgcgggtcgtcctccaccagcttcgtgttgtacttggccgggaggtcgtagacgtagaccttgagccggccacggggtcgtcctccagaacatcgccggcgctgcctgagatcctatatgtacggtggtccttcttcacctcctgcgcctcagacccaaggaagagcactgctgcagtggtggtggcaagaatggcgatggccaagaccgacctcatcttcatgatcaccacaaccacaagccccttggcagcacctgtgcctcctcccaagcctcccccgtctgatctcacattctcatgagctaggtaatcgccacagtggtagttaaaggtgtaaaggcaagggggaacttttgngccaattctcctaccaagaag

SEQ ID NO: 7264 - DNA, 1219 bp, Setaria italica
  Peptide Sequence Number=SeqID_73238
ggaataaaatcttgtaaatgatattcacatacgctgtacaaaacacctgtagatatacgtacatacgtgtcacagttcgcagctatcgtctatggtggaagaagatgcacccaaaactgcgcatttggcaattcgacggctaccagctacctaccacggcttgaggtcccccggcgggccatccgtccagttgaggaccgtctgcccggggctcaagaagacaccctccccgtgcgggagcttgcgcgcgagcccgttgagtatctggtggaacgcgtcccctggctgcgacggctgcgggaactgcaccgcccgcttcacggcggggctcgccaggaaccgctgcttcctgagcacctcctccggcgggatggacgtgaggatggtgtcgagcctcgggacgtcctcctcggcgacgaacaccccgatctccgcccacgggatggcgtcggcgaagggcagcacgatgccgtcggcgatgaccacggggatgcacccgaacaccacggcctccaccagccgcgggctccacggcgcccaccccagcgggcacaggcagaacaccgcccgctgcatgtcctcgtagtacgtcgcgggtcgctccgccgagatgtcgaacagcgggctgctccggaagttctcccacaccgccgcgcgggcgccccgcgcgtagtacccacccccggggtcgttgccggcgtcgtagaagaggccccggaagtaggcgaacacggagcgcggcgtgccggggggaagcagccgcgcctccatcctccccggcggcgcgtacggcgggacggtgatggagccgccgccctcctccttcatgcacgcgtggccgctctgcccgaacgtctggaccagcgtggcgcgccggagcaccgggaggatcccgcgcgccacggccttggcctccttgaagtggaagcaggcgccgaagtcgtggggcgtgacgaagaagtggtcggcgccctcggtgcggttccagtacggccagcgccgggagatgaggcggatggcggcgcgcatcatgcgcggggagtcgaagggcatcgggtggcccgaggcggtgaggtcgcaggtggtgtacacgggtgcgtagaaccagtcggcttcctcggggtccagggtgcgcacggcgctggagaggagggaccggtgcacgaacacattgctctgctacatggagacggcctcggcaacttcgtaggttacgtta

SEQ ID NO: 7265 - DNA, 1454 bp, Setaria italica
  Peptide Sequence Number=SeqID_73239
aacatttactgagcttgaagaattgataggttcaaattcaagcacaagggtttacttctccaagcatttgtacaccttcattcataaacattctggaggatgctaccagaggatggagttccttggagatgctgttttggaatatttgatggtctcatacctctactctgcttacccagatctcaagcctggtcaaataacagatctgaaatcattagctgtcaataacacttcatttgcttatgtagcaattaagaaatctatgcataagtatcttataaaggattctaaatatcttatggcagcggtaaataaatttgagaattattttaatctttccaattcagagaaagatttgtcagaagaaccagcatgtccaaaggttcttggtgatattgttgaatcttgtgttggtgcagtgcttttagattccggcttcaacctgaaccatgcttggaagctaatgctaatgcttctaaagccaatattgagcttctgtgacatgcacataaatcctctgagagaactccgtgaactttgtcaatgtaatggttttgacttaggccttcccaaacctattaaggctgatggagagttccatgtcaaagtggaagttaacgtaaacggcaagatgataagttgtacagcagcaaaccagaattcaaaacacgctagaaagttggctgcacaagatacactttctaaactgaagaattatggatacaagcataagagcaaatcactggaggagattttgcgtactgccacaaaaaaagaaccagaattaataggctatgatgaagaaccaatcaaagttgatggtgtacctttagaaatgaagaatctacagatgaatggagaaatggaggaaaacatcttttttggaaataatgaagcatttttcattgggaggtctgcaacctccattcagagaacaggagaagacaacaaggttgacaggaatgatgccaataatggaaggatcaataagtccaatgtggttacgcagaatggttgtctacctagaggggaagctgctaaaataacaaaaaagagtatcatggtgatatggtacacaaaacagcaaggtcattcctttatgaactatgtgctgcaaactattggaaacctcctgaatttgagttatgcaaagacgaaggaccaagtcaccttcgaaagttcacttgcaaggtccttgttcagatcatgggaccttcagcgactcttttggagtgctacagcgatcccaagctacaaaagaaagccgcgcaggagcatgccgcccagggggctctctggtgcctcaagcaacttggatacctcccaaaagatgaaactcatgtctagcaccattttcaggttttttgtggccttcagtcacatacgtagagcccatatgtttgttaggatatgctttatagactcaggaaacatttgtgtaattgtgttaaggt

SEQ ID NO: 7266 - DNA, 943 bp, Setaria italica
  Peptide Sequence Number=SeqID_73240
tcctacaagctcgccggtcggcgcgccgcccggccgccgttacttttttaccatcgaacaatctgtttcaagcttgtttgagcagaacactggttctagtaaagagtaattctaggaacaagttgaactccttggttcatagatgaagggcttcaaagagacaccaaagcggtaaatcatgaatgtgacaaaacaagaatgaaacctttgtttagcatcgatccatataagctatttcacagctatagaatttgcagcagctgatcatatcccaatgattcgtctatgacactcatcaaagctcaaaacggaacacccagcagtagtgatgttacacaaaaagaaccaaacagaacttaaatacatggtaatgcgacttattcctcctgggaggaagatgacttcttcttggcaactgaagccctctttcccttgagtgtccggcagttgttctttgtcctctggccacggactgggagccccagcttgtgcctgatgcccttgtagcacctaatctccttcaacctctcaatcgccacacggttgaaccgtttaaggtctccctcaatcatgtacttgccgacctccttacggagggtgatgacctcctcctcagagagttccttggtgatcttgttgtcgaaattgaggtccaaaaggatctgacgagagcgtgaccgcccaatgccatggatgtactgcagtgagtattccaccctcttgtggtttgggatctcaacaccaccaatacggatgcactcaatccgcaggctgccgtgaccgatccctcccttcttgggagaggggaaggagacggaggagcagcggccccgggtggagaggggaagggaggagggtgcgatggggacggagaccatggagagggtcgccattttcgctctcctggagccgcgaggtgaggtgcgtgcgtgctgtgtcacgg

SEQ ID NO: 7267 - DNA, 1172 bp, Setaria italica
  Peptide Sequence Number=SeqID_73241
tattgtctaaaaactaggtcgtctaggtctttaggtttgtcttatagaaaactccagcactgcatggttaagggttaagaggcccaagcataaaattatcctcatgaaaagaagttagagaaaggttcaaacctccaccctgtcaggatcaatctcttcagcgcttactccttccacactttgctctataatagctttagtaacaatacgctcaccaatcacatttttttcatcatcatctactggtgctgagctaggagataaaatgttctcaggtgcccactccaaatacagaggagtatccttgtatcttgtatatagtaacttcttgaatgcatgtcgggcctctgttgcttccacaaagattaccaaggccaatactctggtaggaggtagaatgattttatccaaactaccatgtttctggaacattgctgcaagttcttcctcagaagtactaaatggcaagttcttaactagtatcacattgttgcttcttttagacttctcgtttttgttggaagcaaattcttccaatgcagcaacattaactccagacctagatagatatttcttcgtctctccaatgacatatgcctcaccaagagcaagacgagtggcaagatcatccgcttctctatcaagtaattgactcttactgataccattcttccttgcaatgttttcagcaacagtatcttgacgcatataaaagatgttccaagctctcgtatctccactgatttcagaagctttcttttgttctaacttttgctgcttgagattcattttcacctcaacagttgcatgagtagactccaacttcttattatttagtggtttagcagccttaacacgtaacagtcggccctgaaaacttgagttatctagttcatcaagtgccctcactgctgaatctggaaggttaaaaagcacataacctctgccggttgagaacctagtggttttatcgacaacaatatgggcctgttcaacatcaccatactggctgcacagctccaccaaatcatcttcagtggttgcatatggaagattgcagatatatagacggccagtctccagggccaacttcttttcatcagtaattaaagaagcatcttcatcttcattgtatttatcttcacgaattttagtttccttttgtctgccgt

SEQ ID NO: 7268 - DNA, 253 bp, Setaria italica
  Peptide Sequence Number=SeqID_73242
tcttgtctagtccgcgcacacatccaaactcccgagtcccctgcctgtctcgctagctcagctccacaccacaccgccagcgagctagcacgtcgtcacagaaccgaaccatggactacagcggtgaactcgacgacttctccctgcagctcatccgcgagcagcttctcggcggcgaggctttggcttgcctccccgtcggtcctgacgccgcggcggcgtactctgcgtcgtcagttcatcccgccgcgcg

SEQ ID NO: 7269 - DNA, 1396 bp, Setaria italica
  Peptide Sequence Number=SeqID_73243
cgtttagttttttttttttgttcctggaacaagcctcatgacaagggctgcacatgttaatggtcttgttttgttgaatggcatgacaaagaaacccggagatgggctcaagggctgttgttgcataatggaaataaggatgggaaataagaacaacaaacaaaatctcataacaagaacataccaacaactatgaagctgtctcagctaaacgaactgagcgtggaagcaaaaactcagcaaaaatgggaaagtgtgaggatggataaacaccgtctatgttatcatttatgacctcacaaagtgctggtacgagtgggcgccctctaaataggatccagtcaatatgcaagtcctgtgtctgtcgatcccagcacaagcaaagagctctaaatattaatttgagaaattctaccgcgccttgtttctcccctttaaatccatgatatgtgtgtattaatgaaacattttttcgcacccgagcatttggccaagcatctcgcatatcacccacaacaccatgttctctggatctgccaagcaaaaaccgcccggtcatagattccttctgcgtgttgaagcctccacaatagataacaggcaaattgggaggcaaggatgctatatgttgccatgtaagcaacgcacttcttcgtcgagcacgagggctaacttcatcaagatttgtatttacgatctggaagctgaatccaggtggttctactcttttgagttgaaatgtttgcccatgttgcaatgcagggtgcagttgctccccatgaaatgcttcctggcactgatggtgattctgataaccaaaatgtgccaccttcagtaagctccaccttctctttttctataaaatattgtgcagtattcatcagcggtgtcctgtgagccttttcttgagatgccaaactgttcataacctagatgagtgcaaaggcttagtcattcgacttctcgacacatattgatcagggaacattgtatacctcagaaactcatatctgtgttgaacagggtgtaaactggacttcttgtttatagatcagagagaacacatgactctgtgtgcaacaatagattgtgggcagggaaaagtacttatacagatttggataccaaggattgtgcctaactgactattcataaggtacccttgggtactccaaaggattttgtacatgccgatgagcaataaattgtccttgtaaacgttaattccaggcaagcactgttgtaggtagtccaactgccatctcaagccaatagggccaaacaactgctagcattgcccaatccaagcaccacacctcttggccaaatggggaaaaaaggaaaggaaaaacctagctcagactgtcatcatgttcagtacaaaaaaaattcaaag

SEQ ID NO: 7270 - DNA, 536 bp, Setaria italica
  Peptide Sequence Number=SeqID_73244
gtgctgattgtgccgtccggcttgaggcccaggacgtcgggataccgctcgaggacgcgtggaatgtcctggcggtcgacgtcgaggccgcggagggccttgacgaccggggagaggtcgacggcgacagaggcgtggaggcacgcagggtaggcgcggacgaaggcggggaggcgggcgcgcgtgacgccgagcttctcgaggtaggagagcacggggatgacgttcttccgaagggagcaagcgaggagaagcgggtaattggagaggtcgtcggtggacaggccgaggcggaggaggaagtcgaggcgctcctggagcacctcgagggaggaggggagctcgacggcctctagttcgccggcggggtcggacacaccggcggagcggaggaagtcgagcgccagcacgcgggagacaaggcgctccttccgcccctggatcacgccccacgtcaccgacggcatctcgtactccggcggcgtggaggaggaggccaacctggtggaggagagccacgcgaggaggggcccctc

SEQ ID NO: 7271 - DNA, 416 bp, Setaria italica
  Peptide Sequence Number=SeqID_73245
ctcgccttggtggagttgaagaagaagaatggtgagcatcttccatagcttcagcatttgcctcagatctcctattaattttcattgacatacgcttctgccttgaaagtaacaccttgcgcgtagtctgaactgtttctgcatatgcatctttgttgaaacatggttggcatccacactttttcagaacaatagccacctccagcaaaacatgggcaatagagcttcaagcatctggacttcttacaggcgcaatgcttgcacccgttcccatccgcggtttcctccaccttctgccgcttggggtccggagtgactgcgactgcgagctggttcatgctgctcggctccacctcggtcgtcgcaacggcatgcgtcggcaagtccctggtctccagagccgcggggggtggcgc

SEQ ID NO: 7272 - DNA, 717 bp, Setaria italica
  Peptide Sequence Number=SeqID_73246
tcattgtgtgaattcttgtagtttgcagagtcgtccatcgcccggtcgttgctgttcctcttgttggaacagtgccatgaccggggcggtgcctgccactgcaacacagcctgtgggaacacatgcgcatctctgcttgaggctctcagatgaggcggagtttggtggaaagaagactcctttgagataggtgattgcagacgaggtgaacgctccacaacaaactcatgttcaccctcgctgtgatccaaatctgcaccggtgtatagatagcgcttactatcttcagccattatgccttcatttttcccaaaaggattctggcaatcatcacagcggcaaaacaaggagcacccagtcccgtcctgatagcaatcacagtatttctttaggcaacttgatttcttgcagttgcaacctcgccttggtggagttgaagaagaagaatggtgagcatcttccatagcttcagcatttgcctcagatctcctattaattttcattgacatacgcttctgccttgaaagtaacaccttgcgcgtagtctgaactgtttctgcatatgcatctttgttgaaacatggttggcatccacacttttcagaacaatagccacctccagcaaaacatgggcaatagctgcaaatgcaaacgatgataatatctgattgagattcaaagcattcttacactcctatcatatttatcacagtgatc

SEQ ID NO: 7273 - DNA, 283 bp, Setaria italica
  Peptide Sequence Number=SeqID_73247
ggggttttggttagtacgtatttcttggtggggaaatcttggctgctatggagcactgtgaagagcttcctagatcccaaaactaccgccaagatacacgttcttggaaacaaataccaacctaaactgcttgaaataattgacgctagtgaattgccggaatttcttgggggcacttgtacatgtcctgaatacggaggctgccttaagggtgaaaaaggaccatggaaggacccaaacatactgaagctagtccaaagtggtgaggtccagtgtgctcgaa

SEQ ID NO: 7274 - DNA, 2426 bp, Setaria italica
  Peptide Sequence Number=SeqID_73248
gctccgtcccgtcccgtcccgtccaatccatcccccacctcccctccgcgacgccactccccaaaaaattcccctcgcctcggattcccacgcggccctccccgcccccgcgtcgccggcgcccgccgacgcgcccgaggcttcggaagcggcggggggaaggaggaggaggaggatcctagacggagccccggaggagaggaggaggatccggtgcccgccgccgcccatgtcgggccacctcgatcgcctcgcgcggccatgttttgaagggtgctcaagtcatgatgaacgtagagaccataagtcggactttgaaatctccgaagatgaaaagaagaccagaatgggctctttgaagaagaaagcaatagatgcatcaacaaagattaggcattccttaaagaagaacaggaggaagagtggcagtcgggttctctctgtgtctattgaagatgtgcgtgatctagaggagctgcgagctgttgaggcatttaggcaggcgctacttttggatgagctgttgcctgcaaggcatgatgactatcatatgatgctaagatttctgaaagcaaggaaaatggatatcgaaaaagcaaagcaaatgtggacagatatgcttcagtggcggaaggagtatggcactgatacaattgttgatgattttgagtacagtgagttggacgctgttttgcaatattaccctcatggttatcatggagttgacaaagagggaaggccagtttatatcgaaaggcttggtaaggttgacccaagcaagcttatgaatgtcacaacgatggatcgatatgtaaaataccacgtgaaagagtttgagaggagcttctcgatcaaattcccagcttgctctcttgctgcaaaaaggcacattgattccagcacaacaattctggatgttcagggtgtggggttgaaaaatttcagcaaaactgcacgagaattaattcagcggctgcagaaaattgacaatgataactacccagagactctatatcaaatgtttatcgtcaatgctggtcctggctttcggctgctatggagcactgtgaagagcttcctagatcccaaaactaccgccaagatacacgttcttggaaacaaataccaacctaaactgcttgaaataattgacgctagtgaattgccggaatttcttgggggcacttgtacatgtcctgaatacggaggctgccttaagggtgaaaaaggaccatggaaggacccaaacatactgaagctagtccaaagtggtgaggtccagtgtgctcgacaaattgtgactatttccaatggcgaggaaaaatttatttcttatgccaagcccaagcaccacaatacgcgagggagcgacacatcaactgccgagtctggctcagaagctgatgatgttgcctcccccaaagctctcagaagttacatatcacatcctaagttgaccccagttcgtgaggaggtcaaagtggtcagggctactagcttttctactcgtctccctgaatatgatgtgcctgttgttgacaaggctgtggatgccacatggaagagagagcaacctcgaaagacgcctttaccacccaaagactcttctctgaaaacggcaaccaggccatctgacagctctttggataagatcgtagcgactcttatggcttgtcttatggctattgtaatgttggttcgatcagtcaaagatcttgctacaaagagattgccatataaaaccgagtcagaagaaagctactctacactgtatccagactccacgaaagaggagttccgacctccttctccaactcctgggtttgctgaagccgacctatttgccgcagtcttgcaaaggctgggagaacttgaagagaaggttcagatgcttcaagagaagccttctgaaatgccttgtgaaaaagaagagttgcttaacgctgctgtccgccgtgtggatgcattggaagccgaactaattgtaacaaagaaggctttgcacgaggctcttatcaggcaagaggagctgcttgcctacatcgacagtaaggaggttgccaaggctcagaggaagaagaaaacaatgttttgctactaggacctggagagaccctttgtgcggtttctgccttccgagatgagatgccaaagatggcatcggagatgtaacaggcggtgggtgcgttttcttgacatgtgaatcaacaggcttccgttgtaaatcgagaaaattctgacagaaataaaaggagttttgtttccatcttgacttctacctttttaaattcatggttgtctcctctttccaactgaacagttgtacgtttgacatgatgttgcttgtgacttcttttaggtagatcatgcaaaagttcacccatcactcattatatgtattcgcaaaatttctgtaggctttgcac

SEQ ID NO: 7275 - DNA, 1001 bp, Setaria italica
  Peptide Sequence Number=SeqID_73249
ttttttttttttatttaggcagctcaaagtgtcaggttcagcacataggaagaaagcaggaatctaccaaatcaatgtgcacacagataatcggtgcgagtgtgaggacttcagagtagcagcacatcagcaaatccataggctgactgcagataggtacaggggtgcatagcaaatcatattccttttgaactcgttttcagttattcaggcacggtacactcttgcttattctatatatatatatatatatcattgatggtgataatatattcccaaactcgacacatgtgtgcaactcatttacataccaccacagcaaggtaagctttgcagtccaatagaggggtataagcctaaatcatctcatctccccttggaagagatatatcacggtaaggaaggatggcaagcatgccactgatgctcattacactgtgtcgtcatggaaccaccatctggtctcctttggcgacctcccattgcggcagttcctaacatagcggtcattgtcggccgggcgttgctttgctggcgaactagacaacatagacaggatactgatgcagacagaactcacagtcatcgctggtgaccacgaatcatacaaaatatctaagcagatgtggccgttgctgtaaatgtgtggatgcatcggggcgggattgagaaaaatgacctgaggagcctccatgggataatgctcggggaagtcaacttgcaactggtaggtttcgccggcatagagggtgcctgccgctccggtgacctcaatcacccacctttggagattatcggagaccttgtgcttgaacccggccggggggctgagctgccactccgcgagctccttctgcagccgattgcaagcgatcttgctcagcgcctttcgggaaggagaggaggagctcgtcatggtggggggatgggttcttgaggaagggaatcgaattgtggaggaagacgggaggcggagacgaaggcggaggggtggggaggag

SEQ ID NO: 7276 - DNA, 200 bp, Setaria italica
  Peptide Sequence Number=SeqID_73250
cctggtacacggtttcaattatccagaaggtaattacagcaacagcatagctaatctctggctctgcaaagcttcgaagaaacctgtggtactctatattggatttgaggggtgaaacacttgctagatcaacaccccatcttgggtggagtagcttctctcagtgatgagctctcttggttcaagaatgaagctagcta

SEQ ID NO: 7277 - DNA, 979 bp, Setaria italica
  misc_feature (1)..(10): n is a, c, g, or t
  Peptide Sequence Number=SeqID_73251
nnnnnnnnnngtaggctgacatggtgtttggatctcagatgcaaacaatatttcaactctttatgtctgagcccgcaggggaatataattgtcagttgacaaagatacaggaggcaggtgaaatgaaaccgatacaggggggaaatacagtacatgcttgggtctgagactctctgagaccgcagcaccatttatttcgttcgagtatacgatgccagttaagactgagaagagctcatttcccagaaaccaacttccagctcgagtacccggatgaatgcctcttcagcgctcttgacagcatcagctggtgcattctccaagctgcgatccgcgattctctgcagagactggcagtactgtttgaactcagcgctgccccatctctggcaggtgcccaggagctccggtggcgtcttattaccttcttctatacagaaaccgaagctgtcctggtacacggtttcaattatccagaaggtagttacagcaacagcatagctaatctctggctctgcaaagcttcgaagaaacctgtggtactctatattggatttgaggggtgaaacacttgctagatcaacaccccatctggcagcttcattcttgaaccaagagagctcatcactgagagaagctactccacccaagataatttccatgtccatgctgtcttcttgtttgcaacacttgagcagtacactagctataaatgcgacaaattctctcacaaacaggtaatcctggctcagccagcgcttgaaggcggacaggtcgatggtgccgtcgcggatggagacggtgaacgggtgccgcgtggcccgatcatacatctgcccgtgcctctccatccatgccgccgtcgtgctcgcctcgaccccgccgccgtccatcgccgccgtctgggatcccggttgctgccttgctgaaccccaagtccgccgctcctggtccctggggggtggggggctctcacgct

SEQ ID NO: 7278 - DNA, 397 bp, Setaria italica
  Peptide Sequence Number=SeqID_73252
cgaggagcgtccccgactcaaccgacagttgttggtcagtctcaccggccgggggagcagaagcggaagctcaagcgaaggacccgggcagcgccgccgccatcgcgggccgcgagatcgcaggcgcggggtccggttgcgagcgagggccacgcggcggtggagaggagaggaggggggcgtcgggttgagccgtgaggcgagccagtcagatgcgctcggaatggggaagcccgtcgatgtggagctcggcggcgcggggggcctcgggatcgcgggcggcgggggcgggggcggaggctgcgtgggaggctgcggcgcgatcgggcgggcggtgtcgttccggtgcgtgttcgtgctcctgctcgccgcggggtgctcgtcccggcgctgttac

SEQ ID NO: 7279 - DNA, 442 bp, Setaria italica
  Peptide Sequence Number=SeqID_73253
ttactcatcatggcccaccactggatcttgtagcactgaggagatgcaccttattcttcagaagctcagaaggcagtatcctcgctaatcctttcagccgttgaacagacagcagcttcagccctcggtggttcctccctgattcccagaagagagcgacgacgacgaccaagacgaagatggagacgagggctatctatctggctggctctggtgataggagagaggattacaagtggccgcacgcagcttatgttacgagagctccatgccacggccaggaaactgaggagaagtgctgagctgcaaaacgtgcaacaacctatcacgctagaaaaaggagtagagagagatgggggtgggggagcctatggagcgaggagcacatgcatacggtggtggtggttcttgtggggcgcggtgccgtcagctgccggtgccg

SEQ ID NO: 7280 - DNA, 1083 bp, Setaria italica
  Peptide Sequence Number=SeqID_73254
ccctcgtcagttgctgaagtaaataacacccatccggatgttttccaaaaaattcttgcagcttacatacatagatcaactgacaaaacgttaaccgaaaacatgctaacacacacaaaagcagccattgattacccaacccgaggaaacccaatagataacatttcttcctctctatgaggtgaccaaatccttggataactgtaaacaaatcgccatcaactcttactgctcctcttgtaaccagatgagaggcgccgaaactcttactgctccttctttggttttttcttccttgaagcgaagctacttggcccgactgcttctagtgacattcgctttgtcctgcttgaagcaagtacccttgattcagcatcatccttgtcagccatatcctcactgttgtcatcatcattatcaccaccaccaccatcatcagaaccgccttcattcttccccggtgaggactcccatctgtctttcccatcatcatcatcccagcgacttccgacaggaggcatccaaaattctggatcatccgaatcatccatctctggtttaggttctcgtggcaaagaagcactggcaacattagttttcttcttgcccttcttgtccttcttgcttgacttgcccttctttgccacttcatttgactttgcagtttcttcattagccttctcaccagaaaccatctgttcttctagcttttctagcttgttaagaaatctcttcccgttgatgtgcttccatatatgctcctccgacttgttgattgtatcccctgtaatgttgcataccagcttcgatttgtgctcggggtgggcttgaaggcgttgagcggcggcttcttgcgcgcgacagcgtggtcgatgagcgcgaggcggcaggcgcgggaccgcgcgtacgcctccttctcccgctccggcagttcgtgccccgtctccgcgcaacgccaccgcccgccaccggcgtcctcccaggtcggctggcccagaaggaaggcgccctccttctccccgctgccctcgctgccgtgggcggagccctggggactcgagacgcccatctcatccgccgcag

SEQ ID NO: 7281 - DNA, 334 bp, Setaria italica
  Peptide Sequence Number=SeqID_73255
tcatcatcctaccaggcaactatcccgggattcctagctagaggaatgactctggacgaggcagaagatttgctgcaaacaagtgtaaaactggccctggaagcacgggatgaattctggaagtctacactgaggaagtcgaagcctatttacaaccgtgccctagtcgctgcatccatcggaagctatggagcctatcttgctgatggatcagagtacagtggatcatatggagctgacatcacaaccgagaaactgaaggacttccacaggcgcaggctagcaggtccttgcaggtgccggccctgacctgattgcattcgaggccattccc

SEQ ID NO: 7282 - DNA, 253 bp, Setaria italica
  Peptide Sequence Number=SeqID_73256
cttcagccatggagacctcggcagccgtcgaatcgtcggccgccgtggccgcattcgaggtatccaagcgtccggacacgggcaagctcgtgctgaacagcccaagcccgccgagcctgcgcgaggagctcgtcggcgtggtcggcaaggcgttccggccacgggcctccggcggtgctggcggccgggcgccgccgtgcgcgtgggccctcacggcgctgcagtgcgtgttcccggtgctgcaggtggggaa

SEQ ID NO: 7283 - DNA, 366 bp, Setaria italica
  Peptide Sequence Number=SeqID_73257
catcagcacaaagacgtaacacaagaaggaagttgagacaaagggcactccagcacctaagtcttcaactaccaatcctttgtacagccaaaatcttcacaagatacgaagggcatgcaagttttccatgaaacaagtagaaatgaagactcattgaaagagcaagcaacaggagattcttctacttctgcagccttggagacctgtgaaacctggcgtactagtggaaataaagcctatgcaaatggccactttgctaccgcagaggattattatacccgtggaataaactctatttcccatcatggcacttctggacgctgctcccgtgcattgatgctgtgttatagcaaccgaccgttgtct

SEQ ID NO: 7284 - DNA, 2564 bp, Setaria italica
  Peptide Sequence Number=SeqID_73258
tctattgtctaagtttttcctattgtaaactaagttagtaaattgtaagtacttcacttgattgcaaagcaacaggagattcttctacttctgcagccttggagacctgtgaaacctggcgtactagtggaaataaagcctatgcaaatggccactttgctaccgcagaggattattatacccgtggaataaactctatttcccatcatggcacttctggacgctgctcccgtgcattgatgctgtgttatagcaaccgtgcagcaacaaggatgtcacttggcatgatgcgggaagcgcttcaggattgtttgactgctatgtcaattgaccccagctttcttaaggctaaagttagagctgcaaattgctaccttgcattaggcaatcttgaagatgcctcaaggaactacatgtcctgtttgaacagtaacacttcgagttctgaccccaaaatgtttactgaagcttctgatggtttggaaaaagtcaagagagtgacagagtgggcatcccagtgcaagggacttcttgagaaaagacatctcctgaagcaacaacagccttagaattgatctccaatgcattgcacataagtccacattgggatagcctcaaggagatgaaagctgaggcactgctgatgctacgaagatacgaagaagtgattcaactatgtcaggaatctgtaaatccggctgaaagaaattcagttttattcaatgctaatggagaaccaaagagttccagtgtctctgaaaagacacaattctctggaaggcattggcggccctaccttatttgcaaggcttatttccattcaggcaagtttgatgaagctcttgatttgttaaagaaacatgagcaagtcacacctgtcaaagaaagtgacgagagcttatatcaagaacgtttgtcatcattgtcagcaactataagacaactactttcccttaaggctgctggaaatgaattatttcaagctggaaaatattcagatgctgtggaacagtattcggcggctttggcatgcaatagtgaatcacgcccgttttcagctgtctgtttttgcaatcgtgcagctgcataccaagcactgggtcaagttactgatgcgatcgcagattgttcacttgccatggttcttgatacaagttatccaaaggcaatttcaaggcgagccaccttatacgagatgataagggattatggacaagctgctaatgatgtaaggaagctaatcttgcttcttgagaagaaagtcaatgtgtctggagtatcaccaaaattttttaacaagcacagtgatctcaagcaagcacgcgcgcggctttcatccatagaggatgaagcaaaaaaggatactcccctgaatttgtatttaatcttgggagtggagccatcctgctctgcagcagatatcaagaaggcataccggaaagctgcattgagacatcacccagacaaggctgctcaatttctagtaaggaatgagaatactgacgatggattttggagggatgttgtcaaggaagtttatgcagatgcggatcatctgttcaaagcaatcggggaggcttataatgttctttcggacccagacaagcgtcaagattatgacttcgaagaggatgtaagaaaagctagtaagagagtatctaagtccaggagtatgcataggtcacctgaacaaaactacagcaacagaggctttaatccacgccagtggcagtcaagcagaggatcacgctcacgttggtatggacactcagatgattactggtaagcttattgggagctacatatggtgcgttcattgggcgaggagcaacttttgcatcagttggcagttgcatctagagcaaggccatctttcaccaaagatgagtagcacctgtctggggtttttaggtgccactgtcaatccaccctcacagcttccccatccgtttgatgcttttattttttgagaggatggaaacacaaggattggccacttgggaggattgtggtgttgcagcttggctggcacatatgcaggatctggaaacgggacctcaagttatctttggttggcttgatggtgtctgaacactaactgcttgggagtggggccatccggatatcatggctggcatgatggtctctgctccgaacactgacaacatcatcaaaggttagaaacacggagaaagatattggtttctccataggcaaaggcattcttttgttgagtgtatggctgctgtctcaggtttacagaaaaaagatcagctgaaagaagaggcgtcatgttcttttctgcgtgcgctgttcaattttgtttataaattatccagatgatgtagcgtgcctggcaattggaaacgagtgtacatattgtaactgcacaacgttggaatctaattgtttgttctttactccacttgttcgccatgtatttttggctttttgctagcagatgtaaggcatcattttaaacatctgcgagatgttgtggaatctccttccagagtgtaactttcggaagcgaggtcgtttcgaacctggaaagtaatcgagtc

SEQ ID NO: 7285 - DNA, 317 bp, Setaria italica
  Peptide Sequence Number=SeqID_73259
gcaccactagacaccctcgggctgtagcttgcccgccgcagctcgtcggcgccgccgttcagatgctgcaaagatgtggacgccggcgggctaacgatggtctccgaggacggagagctctgtgggtgcaagggcggcaagctgtagagctggtgagccgggatgaacgacgacatttgctccgcaagcgcgacggccgccgcgctatgatggatgtgcgccgcggcggcgccgcctccgccgccgcgctggtacgagccaatgtggtggcagtgctggccctcgtaggtggtgatcaccacggaggggtcggtcga

SEQ ID NO: 7286 - DNA, 523 bp, Setaria italica
  Peptide Sequence Number=SeqID_73260
tagcttcgccatgatgtggaggaatatgcaaaacagttcccaacaattggatttgagaaagagaccatgaaatacaagaactaagatctgaatggtaaggtatgctccatctttatccagtcgtttttttttaaaaaaaaaacctatgcagtaactcagttgtagtagggactagggagtaccggagcagtaatgcagttgtttaaagaagaactaaaatctgaatcttgtgtcctttcctcttgatcgcctttgcagaagatgagaagaataatgaatgcaatcactcaacaaattatcttttttttcctagcagcaagaaaagatgtcgaggcaattattgggggtgtttaagtgggcatgatcatgtaaacataaacccaagccccatccccaaggtggaagtagaatggcatcttatcttaaaagagagattggcaatttacagcatgtggaacttgtgtcgatagcccatactgtagacacctactactgcaagaccctatactgatgctctactaag

SEQ ID NO: 7287 - DNA, 615 bp, Setaria italica
  Peptide Sequence Number=SeqID_73261
gatgcagcagtgaacttggctgtgaagattaaggctgcaacgacaggtggaacaaagctgaaggacttcgttgccactttgcaatctgatagcatccaagctgagattgcaaagcttcgccatgatgtggaggaatatgcaaaacagttcccaacaattggatttgagaaagagaccatgaaatacaagaactaagatctgaatgaagatgagaagaataatgaatgcaatcactcaacaaattatcttttttttcctagcagcaagaaaagatgtcgaggcaattattgggggtgtttaagtgggcatgatcatgtaaacataaacccaagccccatccccaaggtggaagtagaatggcatcttatcttaaaagagagattggcaatttacagcatgtggaacttgtgtcgatagcccatactgtagacacctactactgcaagaccctatactgatgctctctgaataatatgtgtgcttgcggtgttgtcatttgccttgtatcattgtaagtaagccttagccagacgaagtattttacatttacattccaaaaggtccacgggatacttgagcatagactcagtagcttcttctgcacctgtagttctg

SEQ ID NO: 7288 - DNA, 909 bp, Setaria italica
  misc_feature (896)..(896): n is a, c, g, or t
  Peptide Sequence Number=SeqID_73262
acaagaagacttaggtaagacaaaaaggaataacgagcttgtctctggtgggactgataaccatttggtcctcgttaatctcaagaataaggggatagatggctcaagggtggagaaggttttagaatgtgtgcatattgcagcaaacaagaacactgttcctggcgatgtttcagctatggtaccaggaggcatcaggatgggaaccccagctcttacatccagaggatttgtggaggaagattttgctaaggttgctgacttctttgatgcagcagtgaacttggctgtgaagattaaggctgcaacgacaggtggaacaaagctgaaggacttcgttgccactttgcaatctgatagcatccaagctgagattgcaaagcttcgccatgatgtggaggaatatgcaaaacagttcccaacaattggatttgagaaagagaccatgaaatacaagaactaagatctgaatgcaagaaaagatgtcgaggcaattattgggggtgtttaagtgggcatgatcatgtaaacataaacccaagccccatccccaaggtggaagtagaatggcatcttatcttaaaagagagattggcaatttacagcatgtggaacttgtgtcgatagcccatactgtagacacctactactgcaagaccctatactgatgctctctgaataatatgtgtgcttgcggtgttgtcatttgccttgtatcattgtaagtaagccttagccagagaagtattttacattacatccaaaaggccacgggatacttgagcatagactcagtagcttcttctggcaccctgtagttctgaattcggcggctgtagcccgtcgtcaggtctccattctgtcatacttagaaaagaaaaaaaaaaaaaaaaaanaaaaaaaaaaaaa

SEQ ID NO: 7289 - DNA, 2095 bp, Setaria italica
  Peptide Sequence Number=SeqID_73263
taacccttacctcccaaactcgcgagtcgaggttgcaaccccccggcacaggaggtggacgcgcccaccaccgcccaccatggccatggcgacggccctccgcaagctctccgccaacgcgctccgccgccagccgctctcccgcatcacgccgctctactacatggcgtccctgccggcgacggaggagagatccggagtcacctggacaaagcagctgaacgcgccgctcgaagaggtcgaccccgaggttgctgacatcatcgagctcgagaaggcccgccaatggaaggggctggagctcatcccgtcggagaatttcacgtcggtgtcagtgatgcaggcggtgggttctgtcatgaccaacaagtacagcgaggggtaccccggcgcaagatactacggtgggaatgaatacattgatatggccgaatccttgtgtcagaaacgtgctttggaggctttccgcttggacccagcgaagtggggagtgaatgtgcaacctctatcgggttcacctgccaacttccatgtatacaccgccctattgaagccacatgaaaggatcatggctttggatcttcctcacggtggacatctttctcatggttaccagactgatactaagaagatttcggcaacttcgatattctttgagacaatgccctacagactggatgaaagcactggcttcattgattatgatcagttggagaaaagcgctgttcttttcaggccaaagttgatcatagctggtgcaagtgcatatgctcgcctatatgattatgaccgtatgaggaagatatgcaacaagcagaaagcaatacttctagcagacatggcacatatcagtgggcttgttgcagctggcgtcattccatctccttttgattatgcagatgtagtgactaccactactcacaagtcactccgtgggccacgtggagccatgatcttttacaggaagggagtgaaagaaataaataagcagggaaaagaggttatgtatgattttgaggacaagatcaacgctgccgtctttccaggtctgcaaggcgggcctcataaccataccattactggcttggctgttgcgcttaagcaggcaactaccccagagtaccgagcttatcaagagcaggttatcagtaactctgctaaatttgcacagagcttggtagcaaaaggatacgagcttgtctctggtgggactgataaccatttggtcctcgttaatctcaagaataaggggatagatggctcaagggtggagaaggttttagaatgtgtgcatattgcagcaaacaagaacactgttcctggcgatgtttcagctatggtaccaggaggcatcaggatgggaaccccagctcttacatccagaggatttgtggaggaagattttgctaaggttgctgacttctttgatgcagcagtgaacttggctgtgaagattaaggctgcaacgacaggtggaacaaagctgaaggacttcgttgccactttgcaatctgatagcatccaagctgagattgcaaagcttcgccatgatgtggaggaatatgcaaaacagttcccaacaattggatttgagaaagagaccatgaaatacaagaactaagatctgaatggtaagataagggccatcaaaatccaagcattttttttaacttagcagcaagaaaagatgtcgaggcaattattgggggtgtttaagtgggcatgatcatgtaaacataaacccaagccccatccccaaggtggaagtagaatggcatcttatcttaaaagagagattggcaatttacagcatgtggaacttgtgtcgatagcccatactgtagacacctactactgcaagaccctatactgatgctctctgaataatatgtgtgcttgcggtgttgtcatttgccttgtatcattgtaagtaagccttagccagagaagtattttacattacatccaaaaggccacgggatacttgagcatagactcagtagcttcttctggcaccctgtagttctgaattcggcggctgtagcccgtcgtcaggtctccattcttgtcatacttgagaaacaaggtcgtcact

SEQ ID NO: 7290 - DNA, 1432 bp, Setaria italica
  Peptide Sequence Number=SeqID_73264
cggcgcggttcatccgccgcacgggagccggcgcctgatgcgggagccatccgtggcggtgcgggagacggccgccgagcacctcgaggagcgccagaccgattgggcctactccaagcccgtcgtcgtgctcgacgtgctctggaacctcgccttcgtcgccgtcgccgccgccgtcctcgccgcgtcgctgggcgagcagcccgccgtgccgctccgcgtctggctcgccggctacgtgctccagtgcctcctccacgtcctctgcgtcaccgtcgagtacaggcgccggagcagggacgcggaccaggacggcgcgggtgatggggatttcaagctaagtattgcaaagcacttggagtccgcaaacacgatgttttccttcatttggtggatcattgggttctattgggtgtctgcaggtggccaagctttatcacatgatgctcctcagctttactggctatcaattgtttttctagcatttgatgttttctttgtggtcttctgcgttgccttggcttgtgtgattggaattgctgtttgttgctgtcttccgtgcatcattgcgatcttatatgctgtaactgatcagcaggagggagcatctgaagaggacataaacaacctttctaaattcaaattccgtacgatgggtgatcacgacaagctagttgctggcattgcggcgcctgtgggcggagtgatgacggagtgtggcaccaatcctcctgtcgaacacattctttcagctgaggatgcagaatgctgtatctgcttgtgcccgtatgaagatggtgcggaactgcgtgagctcccttgtaaccaccattttcactgcagctgcatcgacaagtggcttcacataaacgcaacatgcccgctgtgcaagttcaacatcgtcaagagcaaccttgacagagaagaggtctaggtatcacaagacaaaattcgtgccaaagcttctcgacatgtcccagctgtcgtgctcttcagtactactgcatttgcaaacagagttgtgattaccgatcatgtagttgcaagttgtaggtgatgcacagatgattgcgatggtggttctcgtgaatattcttttagtagtttcttgcagcgattgtacatccttactctttcttcttgatctgattgcattgcagatttatatgtgcttagctgtgttggatatggaacgcaggcatccatttgtaaaataattcatgaattggaggctagtatacagtttcttggtgtaaatgttttgaggatagtatggagtatggggtgtgatcatctaggcagatgacgcgagattggtttacgcgcatttgcaaactattgtgtatgtgttcactttcgaaacattgcagagccctttttgttaggcacaatgtacggttattctattctttcttttttgttaaaaaaaaaa

SEQ ID NO: 7291 - DNA, 324 bp, Setaria italica
  Peptide Sequence Number=SeqID_73265
cggagcggctcggcgatggaggccgggtcggggaggttggagagcaggtaggggatggagggcgggagcaggaggaggtcgtcgccgaggtcggcggagaggtgggcgaagtagaaggcgatgaggcggtcgttgatgaagcggggcccgcggaggatggcgaggtcggagcggatgagcacgacgtcgccgtggctcagtacccactcctcccccttcttctcgccggtggaggtggaggtggaggtggagcacgagcccgtgcccatcgccgccgcgccgaggattgccaggcaggccgcaggcgtgcgcctttgcaggttg

SEQ ID NO: 7292 - DNA, 436 bp, Setaria italica
  Peptide Sequence Number=SeqID_73266
cctcctcgaatcgctctggagcaggggcggagcgcgtcggcgaggtggctggcgacggggaggttgggcgcgccgcggatgctgtcgtggtggacgaagcgggggcccgaggggctggtggtgttgtcgatgacgaggagggtccagtgggagccgccctcggggacggaggcgtcggggttgtcgttgacggggagcagcacgaggcggcgggaggcgaggcggagcggctcggcgatggaggccgggtcggggaggttggagagcaggtaggggatggagggcgggagcaggaggaggtcgtcgccgaggtcggcggagaggtgggcgaagtagaaggcgatgaggcggtcgttgatgaagcggggcaaatatttctctgcggtatgcgacatgcgaggtgttagagaaagtatgtgctgctgtttgaagaaca

SEQ ID NO: 7293 - DNA, 330 bp, Setaria italica
  Peptide Sequence Number=SeqID_73267
atccaacagtatattgctagatccgatgttaccgtatccgcttggggtaggccccactgagtgcaaatatgctaacatcggatccaacagtatattgctagatcataatttcttgcccaaggtctccgtatcattttgcgaaatgactaaaatcatcaaaggtcttaaatatgggatttcattcagtccctacgttgacccagtttactggaaaactggacgcttcatacgaaagagtaatgtctactctttcggaacggtcctcttggaactcatcaccagaaaaggagcagaatatcgggacggggccaccacccgttggccccgtcc

SEQ ID NO: 7294 - DNA, 2188 bp, Setaria italica
  misc_feature (2135)..(2188): n is a, c, g, or t
  Peptide Sequence Number=SeqID_73268
catcaatatcagtgaaaaggcaaagtgtagaccagtcaacaatcacaatataaattgcttcacagaagatgagatcaaacggatcactaacagctatagcactctcatcggtgaaggtggctttggacaagtttacaaaggtgctcttgatgatggtactacagttgcagtaaaaagatacaagtgccagaatctgacagaagggtttggcaaggaagtaatcgtacattgccaaatcaaccataagaatgtagtgaggctcttgggctgctgcatggaggaaaatgctttcatgattgtcacagagtatgtctcgggggggaacctccataatcttcttcatggcagcgacgatccaatttccttagatgaaaggttgcgtattgctatagaatgtgcagatgcattaggatacatgcattcctccatgtatcaaccaatcattcatggtgatatcaagcccgataacatacttctggacagtaaattggttgccaaactgtctgactttggattgtcgaggttgctttgcatggataaaactcaatacaccatgcatgtcgcaggcagcagaggttacacggacccggagtatattgagacagggcttcttgatccaaaaagtgatgtttatagttttggggttgttctcttggaactaattaccggatccaaggcaagtcaaagtgggtttggtactagcctcaaaagagacttcactgatgctctaaggaaaggaaagaaggaggcacgaaaattgtttgatactaaaatagcaaatgataaatacactaagattctcgatggaatcggaaatctagcagcagaatgcttcacaaagggtatcaaggaacgtcctgaaatgaaaaacgttcaagaaagactccaatttctcagaagagctcttcaccgtgagcaagcccaggaaaaagtcagtcaaaagtcaagtattctgggcatcttcaacgggaataatgcacgcaggaagcatttcgagaggaatggaggcctaatactacaagaaacttctggtctaaatattttcaccgaacagagtatagaaaaaatcacctgcaactattcaaatgtagctggcaagggttattttggttgtgtctacatggggtgggttgatgacaatacgagggtggtggtgaagaggtttatcgtgtcagaagaagacagaacagattccattgttgacgcagtacaatctgcatgccgcatttcccataaaaacatcatcaggcttgttggctgctgtttggagacggttgttcctctgttcgtatatgagtttgccgcaaatggaagtctgtacgacgttctgcacggtgataacggtaaatgtcgtctctcactggattcccgcctcaatattgctattggatcggcagaaggattagcatatttgcactcagtggggcctaccccaagcggatacggtaacatcggatccaacagtatattgctagatcataatttcttgcccaaggtctccgtatcattttgcgaaatgactaaaatcatcaaaggtcttaaatatgggatttcattcagtccctacgttgacccagtttactggaaaactggacgcttcatacgaaagagtaatgtctactctttcggaacggtcctcttggaactcatcaccagaaaaggagcagaatatcgggacggggccaccacccgttggccccgtcacctcgggattgaatataccaaagtctggaaggaacaaaatagtggaaaacccatgtttgacaaggaggttgcagtcgaggggaacattgctatccttgaagagatggggaagctagcagttgagtgtctcgacgaagatgtagacgagcgaccagaaatggtggaggtggcagaacggcttcagaacctgagaagagactggaagcacggcgaaggtggctgcgggagctctcatgccaaggaggagacaacaggaggccactgattcatggggcaaatatttctctgcggtatgcgacatgcgagttgttagagaaagtatgtgctgctgtttgaagaacattcagctagcggatggccgtgtattgtaataataacaaataaattctctcaagattattgtggttaactcaactgaattagtgagaggnnnnnnnnnnnnnnnnnnnnnnnnnnnnnnnnnnnnnnnnnnnnnnnnnnnnnn

SEQ ID NO: 7295 - DNA, 621 bp, Setaria italica
  Peptide Sequence Number=SeqID_73269
catcatatacataggtaagctgctgagcactgagttaatcagtgttagtcatcctcctgtacacaggtgtttacctttccagctgctgagtcttttctcaaaacattcctctacccttttccaattcacatttgatagtctcctataatgtgtaggaatacccaaatacttcattggaagagctcctgggttgcagccaaatagttcagtatactgatcgattgattcttgtgcttcaccaaagcaaaatatttcacttttatggaaatttattttaagccctgatagttgctcgaaggcacaaagcaatagcttcatgttacgtgctttctccaggtcatgctccataaaagaattgtatcatcagcatgttgtagaatagatagcccattatcaactagatgcggtactattccactgatctgaccatccactttggctctgtttattaagaccctagcatgtcgaccacaatgttgaacaatattggagatagagggtccccttgtcgaaggcctttcctagtttggaaatatgacccgacatcctcattaacattaacagctacactaccacccgaaacaaaagattcaacccaggagatccacttggggtgagaaa

SEQ ID NO: 7296 - DNA, 368 bp, Setaria italica
  Peptide Sequence Number=SeqID_73270
gttttcttcgtttgcgaggccgcctccgcgctgcgcaccgggctctgcatctcaagcatctgcacgacccccgaccgaaatttaatattcactttacaaacccggggcggcatcacctggcacgcgagctagtaaaatgttgatgcagatcggccccgcttatttcgagattcaagccgtgagttttacaggtagctctacttcatcagccatcactgagcgaaacaaaattattctaggacatgaacagttagcaaatgtgaagcagcaagttaattacagcctgacaacagtcctcgaagctttttatcgcaactactgatgcccaactctatcacccatcatcatctcccacgaatggagaagca

SEQ ID NO: 7297 - DNA, 285 bp, Setaria italica
  Peptide Sequence Number=SeqID_73271
gcaaggagcttggcatacctctttccggcaattagccagtgtcttgaaattctctggagttgaggagtaatcaagcatcccgagaatttcaagacactggctaattgccggaaagaggtttgcaaggagcttggcatacccgaagagcaatgcgagttgtcgatgggcatgtctgctgattttgagcaagcgattgaaatgggcagcacaaatgtaagggtaggatcaaccatattcggtgctagagagtacccaaagaagaactaggatgattgtacactcagg

SEQ ID NO: 7298 - DNA, 514 bp, Setaria italica
  Peptide Sequence Number=SeqID_73272
gtctacgacgctggccaccgctgcttcggcgagaactacgtccaggagctcatcgacaaggcgcctcagcttcctgaggatatcgagtggcacttcattgggaacttgcaaagcaacaaagccagagccctacttgctggcgtgccaaatcttgatatggttgagagtgtagatgaccagaagattgctagccgtcttgatcgtgtggtagctgacttggggagaaaaccccttaagattttggtccaagtcaacactagtggagaggaatcaaaattcggggtagatccgtcaggatgtgtggaattggctaagcatgtcaaattgaactgcccgaaccttgtgttttctggcttgatgacaatcgggatgcttgattactcctcaactccagagaatttcaagacactggctaattgccggaaagaggtttgcaaggagcttggcatacccgaagagcaatgcgagttgtcgatgggcatgtctgctgattttgagcaagcgattgaaatgg

SEQ ID NO: 7299 - DNA, 1061 bp, Setaria italica
  Peptide Sequence Number=SeqID_73273
tagatgaccagaaggtatgtggtcaatctatctttccttatgtttcatcaacttcatttctttctggtttcattgtacactcacattttggtttctttctagaattctattaagagggtatgttcgagaaattttattaagagggtatcctttgctgagtcaagaaaaagggaaaacgacatttttcagtcttcatgcctatcttcgtcccagtaggacttgtgatttctagtgagatttggccattcataatgtatgctcaatcatgtttttatagacttcgtgtttatcaaaaataatcgagcaagattttattgcatcatttatttaggacctaaaaacaatagatggtgtcacagttatttcgatagattttggtattcttgatcctgcacctgtaaccagaataagtgtaatgttcattctttcagattgctagccgtcttgatcgtgtggtagctgacttggggagaaaaccccttaagattttggtccaagtcaacactagtggagaggaatcaaaattcggggtagatccgtcaggatgtgtggaattggctaagcatgtcaaattgaactgcccgaaccttgtgttttctggcttgatgacaatcgggatgcttgattactcctcaactccagagaatttcaagacactggctaattgccggaaagaggtttgcaaggagcttggcatacccgaagagcaatgcgagttgtcgatgggcatgtctgctgattttgagcaagcgattgaaatgggcagcacaaatgtaagggtaggatcaaccatattcggtgctagagagtacccaaagaagaactaggatgattgtacactcaggttttgttgtgactgccgcatgcacagaacattgaggagtatccttcagcagttgcaatatttgataatatatgtgtgtgtggtatgtccccattttggccgtcagaaaacattttgacacttcatataccatgtgctacaaataaaggcattggtttgccattgggcgcctttttattcaaccaataaagattgcacatgagttagttgttaaaaa

SEQ ID NO: 7300 - DNA, 857 bp, Setaria italica
  Peptide Sequence Number=SeqID_73274
cgagtcaactgaggaccaaacctcgccggagcgccgtactaccaccgaagactacagcatgtcgccagcgacctccgccactgccgtttccgtacccggcgtcctcatccgccaatctctatcgaccctacgatccttccccgccgtccgcctcctcccctcgggggctgcgaggcagctccaagcgacgtcagcctctcgccgcctccccgccaccgccgtgcgcgcccagagcgcggcccacccagggtactcgcctgaatcggagttctacaagattgaggccattatcagaccgtggagggtgtcgcacgtgtcctcgggcttgttggagatggggattagaggtgtgacggtgtcggacgttcggggcttcggggcgcagggagggtcgacggagcggcatggagggtcagaattttcggaggacacatttattgctaaagtcaaaatagaaatagtggtctgcaaggagcaggtcgaagcagtaatcgacaaaataattgaaaaggcaagaacaggagaaattggtgatgggaagatattcttgatccctgtctcagacgtggtaagaatccgcaccggcgaacgcgggaaggaagccgagaggatgaccggaggactgtcggataggctgtcctctgttgtgtcaatcttatgaggcaaacagattgcctgcctgttatgaggtcaggtcaagactcaagtgtgccacgccctgcattgcaattgttagcttgcgcaataaactgcaatgtgctccgtgcaagtgccgcccgaatcatacattgtgcactgggcatgatcaatgtatgattcgggcggcacttgcacggagcacattgcagtttattgcg

SEQ ID NO: 7301 - DNA, 577 bp, Setaria italica
  misc_feature (554)..(577): n is a, c, g, or t
  Peptide Sequence Number=SeqID_73275
ggggtcttttatagagatcggtggcggggttggaggaggggaaggaagaggggatagacgctagggttatctatctcgcgaggagggagggtcagaattttcggaggacacatttattgctaaagtcaaaatagaaatagtggtctgcaaggagcaggtcgaagcagtaatcgacaaaataattgaaaaggcaagaacaggagaaattggtgatgggaagatattcttgatccctgtctcagacgtggtaagaatccgcaccggcgaacgcgggaaggaagccgagaggatgaccggaggactgtcggataggctgtcctctgttgtgtcaatcttatgaggcaaacagattgcctgcctgttatgaggtcaggtcaagactcaagtgtgccacgccctgcattgcaattgttagcttgcgcaataaactgcaatgtgctccgtgcaagtgccgcccgaatcatacattgtgcactgggcatgatcaataaaattcgatggaattgatgtgaatgcggcttcgctgttgttccttaacctgtgtaagatgagannnnnnnnnnnnnnnnnnnnnnnn

SEQ ID NO: 7302 - DNA, 566 bp, Setaria italica
  Peptide Sequence Number=SeqID_73276
gtcccttgtagcatagcataatcgacgcaatgaaacatatcagacccattggagctataagctgttgacgtgtataacccaccaagaaggaatacgtactacgtagcctcaaagataaacgctattagaacactctacgtctactgcaagaaatccaagaatggccatgacaagtaaaatacgtagcaaataagatacgagtggaattactggcctcgattgattagctagcctatccacgcgagcggccccggagcgagtcccagaagacgggccagttgcggcgcgcctcgttccagccgagcagggagccctccctggcggggtcccagctggccgacacgatgccgtagctgaccccgagcagcgcggcgccgaagaagacgaaggagacgccgaaggggatccacgtcggcacgtccaccttccgcaccgccttgaggtagtagaacaacgggaagaagcccacgcccagcgccagcggcgcgcccaccgacacccccacgcgccgcatcatccggttcgtcaccacctccgggattgccacgtcgcgctcgtcgtcgtcg

SEQ ID NO: 7303 - DNA, 313 bp, Setaria italica
  Peptide Sequence Number=SeqID_73277
ctgcagcgtcgtcaagaaccccaagcgacgtttccgcttcaccgccaacctcgagaagcgcggcgaggcggaggccatcaagcacgccaaccacgagaagctgcgtgtcgccgtgttggtctccaaggctgcgctgcagtttatacagggtctctcacttcggagcgagtatgttgtccctgaggaagtcaaggccgcggggtttcagatctgtgccgacgagctcgggtccattgtcgagggccatgatagtaaaaagctcatcatccacggtggagttaatggaattgcggagaaactcgcgacatcgaaa

SEQ ID NO: 7304 - DNA, 327 bp, Setaria italica
  Peptide Sequence Number=SeqID_73278
gccagacatgaagatattgacgaaggaatgagaagctcagagtctctgttgtatgatttgagcatgctccgagctgccaccgacaacttttcagaagaaaacaagctgggcgaaggcgggtttgggcctgtctacaaaggtacactgcaaaacgggcaggacattgcagtgaagagattgtccgcaacttcgcagcaaggacaagtggagatgaagaacgaggttttcctgttggcaaagctccagcacaggaacttggtgcgactgctcggctgctgcatcgaggaacacgagaggctcctcgtctacgagttcctaaccaacaac

SEQ ID NO: 7305 - DNA, 677 bp, Setaria italica
  Peptide Sequence Number=SeqID_73279
ccttggggaaccagaaaaagacagaccatgttggagactaaaagagattacaaattaacaaaaactatttctctgggtagtggcttcatcgttaaagcgtctaaccctttttgaatgatttcgagtgggttgaacttctctgtggtcgatgcctatcacctcttgggtcatacccttctcagggttcacttgttccggctgatggccgtctacgactcttcaagtgctacacatctacagaacttcctgttatggggcctcatgatgtgtttaggggacatacattggaaaagaagtttttagtctgttgctcgaagttgcagaagatgaaatatcttttcgtacattagtcagagatttgaaaccaaaaggcccatcctgcaactagttcttcttagttcaaaagcatggttatcttctggttgctgcgatgaaaatgatatggatggttcacatggaacagcagatctgcagcctagtgttaaactcttgtattcggattatagcaatgcttcagaagcagacttaaggatagtagaagagtggtcatccaaatatcgggctgaagagctgtacacaatgaagcgtcaaatagatgaacttactgattgcctaagctcagcaactggacaactttccggtttcttgttcttcccttgaagggatgcacctgtcat

SEQ ID NO: 7306 - DNA, 856 bp, Setaria italica
  Peptide Sequence Number=SeqID_73280
aaactttgaacatggatgctttacaaatgaaagcagtttgactagtttcacaatttgcataagcagcaaatgcagtatggaaagtgatgcatcagttacaaaccatcattgaacagattaaatggcctcacccccagtgcgatctccgagtgcttgaagataaatgcaaatttatgggcacaattgatgactaatgaaatctttgaaaatgaaagcagttacagaatgggaccataaagatgctatgaatgccctacaaaaggaacagctatttcctccaccgttccaccaataaaatcaactgataaagtacattggatttggaagcttgaaggatctcgttgccattggaggtcctatcaaatcactccactgatcccctgaatttccaagtatcttgaatccttcagcctccatcgctgctcgtctctctgatttgtacagcacagcagtcttgccaatatcagaaggttgccttagtattagtttttcccatgattggtatccagcaaacaaaagatttgcttctgttgaattacgctggaattcagtccggccagtcaagaggataatgtggaaaccaagtccctgaagctccttgtacagtttcaggctagatggtaatgcaggcgcctttgctgcatctacccattcatcaaaggaggtctcattgaattcctgagatccccatccgttgaccgcgtagtagggcgcgttggtgagcagcgtctcgtcgacgtcgaacacccacgcgggcttcgcagcgcccgcctcggcggcggccagggcgccggaggcgaatgcgagggagtcggcggcggcgacggcggagtcggacgcgtagcggggaccctcc

SEQ ID NO: 7307 - DNA, 379 bp, Setaria italica
  Peptide Sequence Number=SeqID_73281
caaaagcatttcttttctcctctttccaaaagatgtctttgattagtgtaacgcgtaagctctactgctactcagcattaaggcttctaaaaaggggcagagggaggttagcagttcttcgtgtcagtcttagctcgtgccaggggagagagaggtccatggagcccaaggaggcgacgaatgcggatatggtggcgccggcggccggagccaagagtggacctccagttccagttgacaatgcagcagcagctccggctgacagagatgccgttcttgcaaaggtggagatggacaggaagctgtcgatgatcaaggcttgggaggagagcgagaagagcaaagccgagaacaaggctcagaagaagatgtcatccat

SEQ ID NO: 7308 - DNA, 502 bp, Setaria italica
  Peptide Sequence Number=SeqID_73282
agcatcaagatttccttctcggagaactgcagaagcattctgtccacccaaagctggtgctcctactggtgcagtcagttctgcacctggatcagctgttgctgctctggttgacttatcaccaggggttttaggtgaggtagggcctgctcctttaactggttctgtaatttgttgagaacctgaagttggttctgctgcccttttgttaataatagatttttttgttgtgtcccggtcaccgatatctcgaacaccggggatttcttcttggccaactggtgcttgcttcccacgggtatcaagaattggttcttggatcaatgctgaagtaccttgactgtcagaagccttccttgttgcctctggagcttttccacccatggtggaattcttgtatgtctgttcatcactgataacacgagcatgtgcatcagctccttgcacaagtgctgaaccacttctagcatcaactgtggtttgctgtggtgctccttgtggt

SEQ ID NO: 7309 - DNA, 364 bp, Setaria italica
  Peptide Sequence Number=SeqID_73283
cgaagctgaagtcgtcgcgctccgcgaagtcctcgcccctctccttcctcccgtccgctgcaactttgcgcggggaggcaacggccatgcggacctccttgacggcggcggcgtcgttgtactcggcgttgccgttgccgaacacgtcggagacgggcgacgcgctggagctccagacaaacatgtggaggtccttgccgtcctcgcccttggcctgcccgttggccgccttcttgggctgccccttggccggcgccgccatggccgggttgggcgccgggtactggccgtacttgttggccttgccctgcgcgtcctcctcgtagttggacggcgtgggcgtggcgccggtgcgcacccgagg

SEQ ID NO: 7310 - DNA, 379 bp, Setaria italica
  Peptide Sequence Number=SeqID_73284
cttcagccctggcacgagagaaccccatctctacaatcagtgaaattgcattcttcatcagggggtgaccagctaaacgaccactaccattgccaacagtgtttttcacttccactccagtgcaaacatgcctcatgatggatgtgactgaactgatcaactcaatgttgcattctggaaactgggagtgagcccagatgggaagaactgtcttcaacacctttgactgaagcaacttcatgaacctctctgcatcttgtggaaatctgacagatccattaaaaataggctgctcaagtaattgtctagtagatgaagagagaataaatgatgaggtcacaagatggtccattactgccccatagctggagagggggcc

SEQ ID NO: 7311 - DNA, 558 bp, Setaria italica
  Peptide Sequence Number=SeqID_73285
acagatccagtcgcctcgcttcatttcgatattttgccctggaggtctggaaaatcgttcaggttgactcaaggaacttggtttgggagttgattccacagtaaaacttactaactctgccatgatatttctcacagctgaatcaataagttccttggcttctgagaagctgtcggaagaactgtatgtgtaacttaacagatatcgaataatatcaacagtttcagctctctctgaaacaatgacatcggtttcttcccccgcgaggtaccgccgcagccgctgtgctgaagactccccatccttgaacagaacaggcgcggcgttggccaccaggacctccacatccttccttggaagcgacctgaggaggtcaggccggtcacgcgcgaaggcgaggcaggtggagacagcggcttctgcactgtccgacaggtcgcatccggaagcgagggcgagctcgtcgccgaggctggggacgcgggaggcgtacccggcggcggcgaggcggtcgacgaggcgggaccactcggggaaaggagctcggggcgggggcgg

SEQ ID NO: 7312 - DNA, 255 bp, Setaria italica
  Peptide Sequence Number=SeqID_73286
tcagtgccacatagtttacactctctttctccgatagcctcttccagtttagctgcctggggaatgcagaacatagtgctttaattgtagggttttgaacccaggatgatgaaagagattcttcaacatctgctccaccacaattaaccataattcgaccaccgggcattagctttttttgcaatttgcaaccaagtttcaacttcttgcagctgaggaatgatctttccatcatatactaaatctacaacaatt

SEQ ID NO: 7313 - DNA, 228 bp, Setaria italica
  Peptide Sequence Number=SeqID_73287
caagagtgtctgtttgcagcatatgcagtagagcatgcagaggattattattatattagtagaatgataccacatattgttccaccatcctgatgttcttcttcactcactgaggcagaagcactcgtcaaggcccaacaagatatgggtgaaacaatgggagcgcttggactggcatttgttagactaacaaagtttgagactgaggaggcaatgtatgattcgacg

SEQ ID NO: 7314 - DNA, 1667 bp, Setaria italica
  Peptide Sequence Number=SeqID_73288
tcctccgcctccgccgcctcgccccgctcgccccgctcccctccggctcgcgccgccgccttcacgctctccccgacctcctcctcctcgttcgtcgacccgccctcctacgccgacgccaccggcgccggcgccggctcctcctccccacgctccgcctcctcgccctcctccgcgtcgccgagatccgcgcgcgcggcggcctccgagtactccctgctcgccgtctccgacccggagaccgaggccgagcccgccgccacctcgctcgtccccggatccgcgcccacctacgtctcctacctcgtcaccagcgtccgccgcggggaccccgcccagcgccgccacgccgtgcggcgccgcttccgggacttcgtcacgctcgccgaccgcctcgccgaggccttccggggtcacttcgtgccgccgcggcccgacaagaacaccgtcgagagccaggtcatgcagaaggacgagttcgtggcgcagcgccgcgccgcgctggaacgatacctgtggcggctcgccgagcaccccgccatcgggcccagcgacgagctgcgcgtcttcctgcagaccgagggcaagatgccgcttccaggcagcactgatgttgcgtcgcggatgctcgatggggcggctaggctgccgcgccagctcatcgctggggaggaggccgtcgctgctccgcaggacgtcgtgcagcctgccaagggcggcagggacctgctcaggatattcaaagagctcaagcagtcggtggtcactgactggggcggcgtgaagccgccactggtggaggaggatagggacttcctggagaagaaggggaagctgcaggagtgggagcagcatctcaccagtgcgtcacaacaggcagaagcactcgtcaaggcccaacaagatatgggtgaaacaatgggagcgcttggactggcatttgttagactaacaaagtttgagactgaggaggcaatgtatgattcgcagaggataagagcagctgacagcagatgcgtagctactgcagctgttaaagctagcagggcatgccgagatctgaatgctcaaactgttaaatatctggatacgctgcatgaacatttaagcataatgctgtctgtccacactgcattgtctgatcgggcaagtgcattattgactgtacaaacacttatgtcagatttggcatcattacagtcaaggattgagaaactcgaagctgcatcctcaaagatatttggtggtgatagagctaggattcgcagagtcgaagagctaagggaaacaattagggctactgaagatgctaagttctgtgctttaagagagtatgagagaatcaaggaaaataacagaagtgaactccagcgactagacacagaaagaaaagaagattttttggcgatgctaaaaggatttgttgcaagccaggcagcctacgcggagaaaattgtggatggttggcagactgtggctgaggagaccagcggatatgcgcgaggatctgataatgccatcttaggctcctagcttcctcaagttggatgacaaaagtatttgtactcctacgatgtaatctgttatatgaattatgaaatagaaagatgcaccagattcgatttgttttcatttagttgattaatcaaagggcgctggctttgcgc

SEQ ID NO: 7315 - DNA, 464 bp, Setaria italica
  Peptide Sequence Number=SeqID_73289
cttttgtagcccttatctatttgccttggtgattaaggatgaaagcggtcaggaacggttgggaaaatcccttaaccattcccgctattgtattttttagccgggaacgagagcgggaatgggaaagtcggacagaaaaacgaaatcgatattacgggatattgggaacggaacatttcgatcgggaacatgttgatcgtaatcggatcgtaatcgataactcaaatcgggaacaccaatgcatgtaaccacttcaaacatttagcttgacgtaatagttacaaccatgcatataagcaaacaaataaacaatacaaagataagaacatagatgcatataagcaaataagtcttagtctcttagatgcacatgcacaaataaatcttagtctcaactcacacacatgcaacataacacaacagtacagaacacatgcacagcttttgctgtgcatgcaacaagc

SEQ ID NO: 7316 - DNA, 1309 bp, Setaria italica
  Peptide Sequence Number=SeqID_73290
acttacaatgcgttaattgatacctacaagatccatttgcagcagccactgttacatgtctaaattttgcatgctgaagacgcaatacataatgattgatctgtacatagaccacagcccactgttacaagtctaaagaactggtagctaatattgcaaacccatcagtgcaaaactgtaaacactatgcatacttgggtacgatgcacaggaaattcccaacactcttgtcaaattttcttactggaaggaggataagatgttattatggatggggtcggataggtgttcaaccaggttctgaacagggcccttgccagtcacagccgcctgaatgtaaaatccaagccatgctaccatcgccaggcgaccgttcttgatctccttcaccttgagctcttcaaatgccacaggatctttggacaggcccaagggatcaaaaagcgctcctcctgggtagtttatgtcaccaggaagatatattcccagtggttctagtgcctcgatcccacagtacctcgcatattcaggtccaaccatcaagagggcttgacagatagcaattacgatgacaccttgacctccagcaatacggaatccaggaatcccaaggtaatcaagggtatcaccctgaagttttgcataaccaactttccaccagacaggctcaacaaaatgaactaacccaaatagatctaatagctcaggaataacaacaccgagagcagcaagcatggcccaccgacaatgcaaaatctcaaagctgcaaggtatctagttggtcattactaggaaagtatatattgtacagagaaaagtaaaagcactaacaaagctacaatgaaaaggtatatacatcatggtttcagaactgattgttggttttgtgaagctgccaaaagcagcagccttgttgatcacaactaggaatgtataaactgtgcagggaaagttgaagggacttacaaatctacaatgaaaaaataatcacatcatgattacaagagaaatagttggctttaaaagctggccaaagcaggacaccataatgcttcactgatagggacaagcacaacaatatattgcctggttacacgataccaacatacatatagtagatgctataggttccatcaatgaaggaattgtttaatttcgtatgagtatagcacactagcactacctgaagcagacaaacaagctagatgcaatgtgccggttggaatcatgcgggtactaattgctgttctagtgctacttgtttaagggagacaaaagaaggcaatacaattaactgatgagaaagaac

SEQ ID NO: 7317 - DNA, 315 bp, Setaria italica
  Peptide Sequence Number=SeqID_73291
tcgtctccaacgctacctcacggggcgcggcaaccgccacgaacctcccctcctccgcaaccggccgccaggcgcaggtaacggtaccaaagtgccattctcgtcccttcctcccgccctcacgcttctccgcttgtccggcgcaactgtttgggcgctttagggtttcgtctgattcggcgttcctgaggatcaggaggagcgcccgttcttggcgccccggtgaattccgttgtgggtttcgcttactggttttgagttgatagatttcaatggattttcctgtggatccaatcatgatgtataagtacaaag

SEQ ID NO: 7318 - DNA, 302 bp, Setaria italica
  Peptide Sequence Number=SeqID_73292
gtttcttccttttccccccgtaccttccacccttccaagaaagcaagaacaggggacaaaagcgagtgaagcaatcaacgaatcagcgccatccaggctccaatccaatccggttgcttcgtctccaacgctacctcacggggcgcggcaaccgccagaacctcccctcctccgcaaccggccgccaggcgcaggttttgagttgatagatttcaatggattttcctgtggatccaatcatgatgtataagtacaaagccgaactgtttcttaaggaatacttgctagcagattcatatgtt

SEQ ID NO: 7319 - DNA, 3311 bp, Setaria italica
  Peptide Sequence Number=SeqID_73293
ctcctccaaccccctccccgccctccggctcacggattccttcgcctcgcgaaattctcctcgccaccaccaccacctcgtcctcccacgaatttccctgctctagaagcttcccgggacgcggttcgaggcctggatctttggccccgaggcgctgctgcggttgcgtgggggttcagagccggcgcgggagctgctgtgattcgccgggggcgccgcggggaatgctctacctcaagctgccggcgggggatttagggttccgtccaggggcggcgcggcggggatccggcggtggtggggcctgaggtggcgcgagcgggtgatccggcggaggccggccatggcggcggtgtctgccgcgatggagcaggaggcggaggccaccttcctgcagagcttcgagctccacgagagcgagtcgacactttatattcttggaactaactctgacaaaacactttggagattactcaagattgatagatcagagccatcagagcttgttatagatgagtgttctactgtatatactgaaagtgaacattatgacctgctgaaaggtcttgatgaagaccacaggtcaactggcggagtaaaatttgttgcaaagttttacggcataattggtttcatcaagttccttggaccatattacatgctaattattactgagcagaaaaaaattggggagatctttggtcatccagtgtaccaggtgactaggactgcaatggttgaattagcaaattctaagacaagatctacctttcaaagctccaaggatgagaacagatacaagaagatcttgaacgcacttgatcttaggaaggatttctttttcagttattcataccacatcatgagaagtcttcagaagaacttgagtgatccacatcaggaaggatggaccttatatgagacaatgtttgtctggaatgagtttctgacacgtcggatccgtaactgtctcagaaatactttgtggaccgttgcattggtccatggtttctttaagcaggataaattctcaatttctgggaaggatatcatgcttacactcattgctagacgctcaagacattatgctgggaccagatatttaaaaaggggggtgaatgagaagggcagagtagcaaatgatgttgagactgagcaaattgtctatgaagctgtgccaggacctagtgaagtaagttctgttgtgcagaacaggggttcaatcccactattctggtctcaggagacatcaaaattgaatcttaaacctaatataattttgcatgaaatggacagcgattatgaagccaccaaacttcattttgaaaatcttagagcaagatatggaaaccctatcattatcttaaacttgattaagacacgtgagaggcgagagtctatacttcgccgtgaatttgataaggcaatcaagataataaacaagggcttatcagaggagaatcatctaaggttcttacattgggatcttcatcaaaactctcaaggcaaacctacaaatgtgcttgatgttctactgaaagtggcatttcgggctctaagtttaaccgagtttttttattgtcaaattgcaccaagttcagagactgctggtcactggccgactctgttgagtggtcttgatccatacttatgtgatgacaacagcaatagtgacaacacagaatgcactgagattgttggtgatatatcccaagaggatatctctggcagctctgattcctctggtaatgcaactgcagaagacaaagttgataatagtgaactgccaccactaaaacctccaaaattccaaaaaggtgttttgcggacaaactgtatagattgcttggatcgtacaaatgttgctcagtatgcgtatggtttagctgctcttggacatcaactgcatgcgcttggttctatagaatctccagagctaggtttagaagctcccttggcccatcacttgatgcacttttatgagagtatgggggacacacttgctgtacagtacagtggttcggctgctcacaacaagatattctctgcaaagagaggtcacttgaagctttttattcagtcacaagagttcttcaggacactacaacggcactacagcaacacctgtatagatgctaacaaacaggctgccataaacttatttttgggatactttcagccgcagcaggaaaaacctgcactgtgggagctagaatcatcttctggggagcataacaatgaactttttgatgaccacccaagtacattgaaaagaataaaatcagatggaggttttcttcatgaaagcaatgcatctatatctggctcgggtcattgccataatgaaccgttgagtgaatcacagcctgatgttcagagtgggttacaagttccaaatttggaatctgattcagttcatgagaatgaagtttcatcaggctatgaaagtggggtatcacacctaaggtatactcccacagcctctgatatacttcatgtaccaagggctgaaactgaatatgtcaatgattctggtgattcaaacttcctggatcttgaatggctctctacttcaggcaactcaagtgatgaaaggtctattgcaactagcacaccagacgcaaacctatcaaccgagaatgtaattagtggcataactcctgacgtggtggaaaaccaagttgctgagattcaggctcagaagttacctgaggattttgtgcagtgggtcaatcacggggacaccttttggttttaagattacaatgatgctgtcccatattcccatgtatttctggctacctggaatatccagcttctcttcctgggtactcattggacggatttgagtaggagattaggaggtgagaatgagatgatggtacagcagttcaggcatttcccttgctgtatgcccgcaccattccagagtcctttaggcaagattcgaaaaaaaaagagtcctttagggaagcataacatctgtttatttggtcacatcctttttactatgggcgagtaggtagatataccttttcttttgaatgaaaatagaaataggcgtggtgattattattcatctgaaattgtatcattattcagggaacttctattttcatgtgtaaatatatatgcttgaggtgcctttagtggaggtggagagcaaaccaccgtttattcccccaacatctttcccctccttttttgttctggtctcgcggaacagtctgttaagaaaaaactgcttggttatcatttatcatgtacagtgaactttattgcgagcgtatattctgatgtccaaaaatgtt

SEQ ID NO: 7320 - DNA, 507 bp, Setaria italica
  misc_feature (1)..(90): n is a, c, g, or t
  Peptide Sequence Number=SeqID_73294
nnnnnnnnnnnnnnnnnnnnnnnnnnnnnnnnnnnnnnnnnnnnnnnnnnnnnnnnnnnnnnnnnnnnnnnnnnnnnnnnnnnnnnnnnntttttttgcaagaaaaattagcgcttatatatattataagatttatatatagtttgccctcgcgacgagttcgccagagggccctcagaaacttaggagcggcactgcaacttgataggagaagtaatcaaacagctgatactctgccttcaccatgtggtatgcaaccaactcagctcgcgtgggtttgatggtcctatgaactgggttgcgtgatgtgctccgagtgcatctttaccaggagctcggttagctgcttttccaggtcttcctccttgctgctcctgctcacagtcgtcctcccactgcttgtgaccatgaccactacatctttgtagttcgcaagctcatttgcaaccaccacgttcataccgtacttttcaaagccatctctgccttctgtaggaggatgttgga

SEQ ID NO: 7321 - DNA, 466 bp, Setaria italica
  Peptide Sequence Number=SeqID_73295
gcggtggggtcggcctcctggtagcgggctcgcggtgtggggtcttgctggcggtggcggagaacgcctcgtcccagatctcggtgaaggcccggaggatggcgtcgtggtggtgcggcgcgttgagcgccaggaagtggcggagcagctcgcggagctcgtcgcccgtcgcgatccggttctccacgaccatgttcaccatggagcgccggaagtcgctcagcgggtcgtcggactgcttcaccaccgccacgctcccgtccagcctgccggcgccggtgccgtcgcagctcttcgctctccggtgcttcggcggggccgcctgcggtgtcgggaaaatgctggcgtcttctttctttccgcctttgtccgtgctatgcgccttaagctgctccggcggcaatggcaagggtggtggcggtgtcggctgcttggaggcgatctctccagcttgtctgtcggcttt

SEQ ID NO: 7322 - DNA, 1271 bp, Setaria italica
  Peptide Sequence Number=SeqID_73296
accaactaggatttacgtactgaaaatatagggttccaagacacaactgggggaggagccgtgcagtatgactcaccactgcacggcaactccccacgttgtgttttggacctctcaaagccactcaaatgttattgtattactaccattctaatgtcgctatgctatatatacattgcccctcaacgacggcatggaagcagctatcaagacatgccgtccacaaggacaaccgccttgtactattaaagttggacaccaactaaaatatgtaaaaaaaggtgcattagaaaaacaattaagtggcgtatcaccttctgcgttacagtaccaagcggagcatcagaggcagtgttgaaacatcaggttcgcatgaagggcactttcctcttcgtctgcttgaagcccttttttatatccgaatatagatcttcaacctttttctctgtatcctttgcaaatgaccacattctgttaaagttcatcttcccccactcaccagttatatgttgaaccttttttatatccgaacatagaccttcaacttttttctctgtaccctttacgaatgaccataatctattgatactagagttcatcttcccccattcgtcagttaaaacttgacccttcttgatatcagagtgtagagcttcgaccttttccgttgcatcttttgctaatgcccacacactgtgtatatcagagttcatcttacttgattcatcctttatgagacgaacctcatcttccattgccttgatattgtcaccaaaatctgagctgcatgatgattccttgatgttttcttgctcattgatcagagactggatgtcaagccccattgctctcataacgcggccatcctcctcctctaaaggatcacctttcttacctaacaccttctccaaagtatcgcccttctcattcaacgctttcaaattgttatcccagagagattcaagccgggcgagctggagcttgagctgctcaacctccgaccgcagttcctcgccatctattacggtggtgccggggacggcgcactccccggcccggtcgcgcgggagggcgaagatgacggcgaggagcgcgcccgcgacggctaaggcggcgcaggaccggcggaggtgccggccgctggcgccgcaacccttgtaggccaggcggagggcgagggagatgaggcggagcgggaggaggaaggccacgacggcggcgaggagcgcggcgtccaccgtcatggccgtccgtgcaacggggagttctat

SEQ ID NO: 7323 - DNA, 1179 bp, Setaria italica
  Peptide Sequence Number=SeqID_73297
ttgcatgttactgcctccacacactttttgtagaacgtaaaatgaattcattgaagactcaattggcgtatcaaaccacgggagaactccctccatacgaatggtattatgagagggataagcatctcgtccagtagcagaaagattgcaggattttagaagcttcaagagcacttgaagctgctggccagtacgcaaaagaggatggcatatctcctttagaaaacatggagcagatacatgatttcttcccttcaaggggaagagtgtaaactcatctagtatgtcagaagagtctcctcgagcatccttattctcagtttgtgtaatgagaaattcctcataagggtcatcaacagaagctcggtaaatccatgacttaatgaagttaaagtatggttcacaagaacgaatgaagagatacttcagaaatccatagtgaactggatcagcatcacgaagatggacatacagataggaaagcaaatcagtgccccgtgggaaattctcaaactccacatttgcatcagtattcaaaccctcctggcacaatgtaagacctgcaaacttagggtaaccaatatttccaagggacttaacatgccttcttaattcctcagtgtgtagataaacttccagaagagtgacttctgaagtggaattgcaactcactccatctgaaatcttggaaggcatacattgtgcaaatgaacgcctgagcttaattgatgctggtaaagtattcaaggaacataaatagccttccagggccttttcaactgctgcagcaaatgcttggtttactagactgaaaggttgatgctgctcagtgtctttatcatcagaaccttcacattcatgtcttcctccacttgcacaattcttttctcggctttggataagataaaagtgcacaaacttgcaaaggaagaagaccgcaagacctgttgagcgtatagatttgagaatgtgccccacggatgtagtgctggatgaatgtgaccacacattagcgacacgactagaggtcctgtcagccggattcgaggagaacaccatgaaaagctcatcaatctcatctaacgatgatttgacaccatgcagggcatgtaaagccaaacgaaccaaagcatcatcagtaaccgatgcgagctcgtagatcggctcgtgacgggggct

SEQ ID NO: 7324 - DNA, 337 bp, Setaria italica
  Peptide Sequence Number=SeqID_73298
acgacgcgcgtgcgcgcgccgcggaggccggcaggcggccctcgaggagctcgtccacgtcccgccgcagcggggcctccgagggatcgacggcggcgaggcggagcagcgtggcgttgaggcgcgccgggtcgaggggcggttcccgcgcgggcgcgggcaccacggcgcgaaggagcgccgcggagaacgaggccgcgccgaccagcacgacgaagacgagcaccgcgaaggagcgccgcagcggccgcttcatcgccgccgccgcggacgcacgccccaggccgggggctaaccgtgtcggagccgccgcagtggggcacgccacacgcgcatc

SEQ ID NO: 7325 - DNA, 345 bp, Setaria italica
  Peptide Sequence Number=SeqID_73299
gaacatctgcagggaaaagcttgcactcctctgaaaaaatctgggcttgcttctcagcaattgaatctacgagttgcacatcctttgccaattgctcatcaacactacaatagtgaaatttgttatgtacttcatgttaagtgccctcacatgcaaattaacacaataagtttctgtgtaaaagattccatttggcatcaaatcacaatgttagaaaaaaataccaaaaactgcccatgatttatgtatagtatatcctgtacaattatcaatcatcatagtaggtacatttcattttggatacaaatagttgtgtgtaaactcaacctccattctggattgtca

SEQ ID NO: 7326 - DNA, 1313 bp, Setaria italica
  Peptide Sequence Number=SeqID_73300
ttttttttttaaaattcagaagatctgatcaataagagaaagcttttcaaggataaaagggcatacatatacaagtccagttaatcctcgaaaagaactcagatatgatgtttagtaagttctttcaatctctttgagttacaaactacagtcacaaaagcacaccaacaaatggcactaaatctttactgcacgcctcagctgaaactaaaagcaaatgaatcactacaggcttagataggttccctgaaactgtatcctgatataccagtgctgtaaaatcagagtgtttccccttgctcccgtgccacggaagttgaaaggatggaaaggctgtgattcaagaatgtcagtgcagattcacagtctgaaatgattttggtgactgatgaaggctcattggacgctgacagtgacccagcagccattgcagtatatgaatctcgcaggctcctcaaatttcctaggaactttaaaagggtgttatatgcctccaacaggcgattagcggctgggccaaagccatgcagttgtggcacctccatcatatgggtccaaggatgaatttccttcgtatatattgtattgaaggatttaaccgtttccaaaaatgattgcaaatgttccctcaacttcaactctgtttcggcatagtcttcattgggattgtaatcatactttgatgctaactcctgaaccatctgttgcaaatttgacatctttttggtatactcagagagcttcaactctagttctgctatgtccggcaaagggtaaattgattgtatttgaacatctgcagggaaaagcttgcactcctctgaaaaaatctgggcttgcttctcagcaattgaatctacgagttgcacatcctttgccaattgctcatcaacactccattctggattgtcagcatagcaactagcttccactagatcgacaatgagacggagcagttccacgcgctcctcatagctgcctctaccctgaatcgcttcggtgtccacagaaggtgtgatgcccaggaagttagctatctccgccaggtgctgtattctgttgttctcctcgtcgcggtccaggctatccccctgccagttctgctgcgtgaacggcgatctgtcgcctaggagccggaagaagagccactcgaggaggcggtagcgctcgacgccggcgaagaggagagattgagcgggggcgttggcccgcgggtaggcgagcaaggacagcttccgctggatctcctccatctgcttggacgccatggctgcttctctccgctcaccgcggcggccggccggtgctgctgg

SEQ ID NO: 7327 - DNA, 2111 bp, Setaria italica
  Peptide Sequence Number=SeqID_73301
tgatgagctccacggggatgcttctatggatgaagatgaagatgatgatgatactgacagctgctcaactcctctacccccacccctcccaccaggtgtagcatgggaggacttggatccttacaactccttgaattttccatctccatttgctgataggaacgatagagaagtggcctcacaggttaccatggatgatgatccttgggtggagacaaacctcgaatttgatggagaggaggatgaaagtgtgcttgacaatgatgatggcgttgtgaatagggtccagatgaatccagtgaagagtagggctctgggtgatgacaactcttcaatggtgggctgggtgacaaaggattcagactctacgtcagtgccttggaggaatcagaagtcacttgtacagattgttaaggagatcgacgagtactttctgaaagcagcagcaagtgggagtgatgttgtcattcttttggattctgctggcgggcggccggatgccttagagattgagacaaagaaagttacaggaaaaaattccaaatctgcgaaggttttctccacgctttcttggagctggtctttcaaatctcagcatgctaacagtgaatcctcagttctgaagtcaagtgatgcctctggatacggttaccatggcaaaacactggagaagctttatgatgaggagcaaaaactctataagttagtcaaggatgaagaatttgcaaggctccagtacaaaaggcacatctcaatgctacaaaagctggaatcaggggaccatgataagctacatgcagaaagagttcgggatgctattgaggaattgcaaactcggataatttcattggaggaagctgtgagtttggcgtgtttttccatatcaaagctcagagacgaggagttgtatcctcagattattgaattatctgcagggcttgtgcatatgtggagaaacatgtacgagtgtcatcaggtccagaacaacattgctcagcaaggtagtctcctatataacggacctgggggtgagccaacaagtgacagtcaattccaggcaacatctcagctggaaattgaggtctctggatggcacagtgccttctgtaatctcatcacattgcagcgcgaatacataagcatccttaaccaatggattaaactcacggactgccttcctgatgatgatggcttaatgaaaagctcatccggaatccgtagtctctccgaggaactccagcgtgctcttgagaggctacccgagaaggtagcagctgaagcaataaagacttttatgtcagccatacactctatagttgtacaacagagtgaagagcgccaactgaagaaaaagtcagataacatggagagcaagttccagacccagttagagaaacacagtgaaaatgcaatgcaaaactcagcccagcctccaaataagaatcagtattcagtatcaaagaatgaaatgaaattggatgcatttagaaagcaggttgaggaggagaaggcaagatacctaacctctgtaaagacaagccgaaccatgacgctgaacaatctgcagacaggccttccgaaggtgttccatgctctgatgggattctcaggagtgtgcgtgcaggcatttgaaggtatcagcaggtgcagtgaagtcgctgttagccactctggagcggtttcgccagccatttgcgcatgacccttgcttggatggctgtgattattcattgtaagtaggcaaagtataaactggttccacgtgaatacccttctttctaaaacttctttaaatagtttttggggatgatttttaagtcaatacgggcatattagtcttgaatagatcacagagtctcagtttgtgaggaggttgttactatgaggttagtggtagaaatatgaagtaccataattgaattatgtggctgggattgtcgaaaggattcatgcagattttaacagcatgttctcacaatatggtgatgctatgttactcatcgcaatacatttcctgtgtctagaggctgtcctggatcacaaccgacacatgattttcttgtcatgaataaatgcatgggaagcactactctgtgcataatcctcaaaag

SEQ ID NO: 7328 - DNA, 1975 bp, Setaria italica
  Peptide Sequence Number=SeqID_73302
cccccatcctctcttgtctctccatctctccgacaccctctttctccctctaaactctcctctctctagaaccatcaccagtagttctctctctccgacgcacatcgtcaaccatggttgttgagatgaaggagaacggcgtggcggcggcggcggacgcgggcgagaaggtggcgcagccgcagctgaacgtgaagcgcggcgagccgacgctggtgccgccggcggcgccgacgccgactggggagcagtactacctctcgaatctggaccagaacatcgccgtgatcgtgcagacggtgtactgctacaagccctcaccccccggcgatggcaaggacaaggacgacgtggcgacggcgctccgcgacgcgctggcgcgcgtgctggtgcactaccacccgctggcggggcggctggggatcagcccggagatgaagctgacggtggagctcaccgccgagggcgtcgtcttcgtggagggcgacgccgactgcgacctcgccgtcgtcggcgacctcaccaagcccgaccccgccgcgctcggccagctcgtctactccgtccccggcgccaagcacatcctcgagatgccccccatgaccgcgcaggtgacgaggttcagctgcggcggcttcgcgctgggcctggcgatgaaccactgcatgttcgacggcatcggcgccatggagttcgtcaactcgtgggccgagacggcgcgcggcgccgccgagctcaccgtgccgccgttcctcgaccgctccctcctgaaggcgcgcgacccgccggcgcacaccttcccgcaccacgagttcgccgagatccccgacgtctccgacacggcggcgctctacggctcccaggagctcctctaccgctccttctgcttcgacccggaccgcctcgagcgcgtccgtgcgctggcgctcgccggcggcgacctggcccgctgcaccaccttcgaggcgctctcgggcctcgtgtggcgcgcgcgcaccagggccctgggcctggcccccgagcagcgcaccaagctgctcttcgccgtcgacgggcggcgccgcttcgtgccaccgctgccccgtggctacttcgggaacggcatcgtgctgacgaacgcgatcgccaccgccggcgagctgctgtcggcgccggtgtcgcgcgcggcggcgctggtgcaggacgcggtccggatggtcaccgacgagtacatgcggtcggcggtggactacttcgaggcgacgagggcgcggccgtcgctggcgtcgacgctgctcatcaccacgtggtccaggctcgagttccacggcgccgatttcgggtggggcgagcccgtcatgtcgggccccgtcacgctgccggagaaggaggtcatcctcttcctcgcccacggcaaggagaggaagagcatcaacgtcctgctcggcctgccggccaccgccatggacgccttccaagagctcatggacgagatatgatggattctgccggtgatgacgacgagctccgtggccgcggcgggaacggcggttgggacagcgacagacatgggtgctatacatacatacatatatataaatgcagggtgcttttatgcttaagttgctcggggtttatagtatggttgtgttgattatggtgcgtgtgtgttgatatgcaatctatgttggtgtttactggatatatgagaattcattatcagctgtaatggttttgtttaatgaaaaatagcagctgccgttgctttaatttgcaaaaacttccgtccaacgaaaattaggctaattgtttttcaatggtttttcttgtacatctgtgtctttctgcaacagcccaaataccacaagcatgacacggatcatgtcatgccgaagaaaaaaaaaacgtgttggcagccggcaccgaattctggacctatttggtttcacatgcttatgcataagcaacttaaaataaacaaataaagttgcttatg

SEQ ID NO: 7329 - DNA, 355 bp, Setaria italica
  Peptide Sequence Number=SeqID_73303
gacgagagcacggacgtggcgtcggcgtcctccagcgacggcagcgccgccacgtacgcggcggccttgcggaagagcgggttctcggcgccgtcgcacgcgaagcgcggcacctcgtggtactggtacgcctgcgcccactcgtcggcgcaccgccacagccggcgcagcgcgtagagcgccgacttgtaggacagcagcaggcgcagcgccgcgagcgcgacggcggcataggcgattgcgaccagggcgccagcgccggcgccgctcgcggcgcgcagcggcatgacgccttggctttgtgacggggcgcgctggttcgggctcgtgtcgtcgtgtgtgcggtgtgcccctg

SEQ ID NO: 7330 - DNA, 435 bp, Setaria italica
  Peptide Sequence Number=SeqID_73304
aggtggtctcagatcgcgcggcacctgccgggccggaccgacaacgaggtgaagaactactggaactcgtacctcaagaagcgcgtcgagggcggcgcgcaggccaagtgcgcggcggacccggcgacacccgccggttccgacgtccgcgccgggagccccaacccccgcgacaacggtcgggaacgcgccaaccaccccgcgagctctgactcgtcggagccggtcgagtcgtcctcggccgacgactcgagctgcctcaccgtcaccgagcccgccagggcgggcgcggtgcggccgcacgctcccgtgctccccaaggtcatgttcgcggactggctcgacatggactacggcaccagcctggcggcgctgggtccggacgccggcgtcttcgacgtgagcgggcgcagcccggggcagggcctgagccac

SEQ ID NO: 7331 - DNA, 291 bp, Setaria italica
  Peptide Sequence Number=SeqID_73305
aggcaaaaacaattgatgtttgtgcatgtaaaccctgaaacagactcttttattgaaacaatgagcactctcaaattcgctgagcgagtagccacaatagaacttggtgcagcccgtgctaataaggaagtcggccaggtcaaagacctaaaggaagagattgccaagctgaaattggcattagatgaaaaggaacgtgaagcagcgcagtttaaagatcttgctaaccgtgtgacctctgaggtgagaaatgcaagaacaaggtcacctttaacaccagcatgtccttag

SEQ ID NO: 7332 - DNA, 722 bp, Setaria italica
  Peptide Sequence Number=SeqID_73306
tatactcctggtgccgtcgtgtcatggccggggcgcgcagcggccgacggcgtagcgtagcccggcgatcatagtcacagcttggagtagagctgcggcgtgcaccacttgaagaaggtccccgtggggagctccgcgggcggcagcagcgcgaggcgcgcgccgacgtcggccacctcctcggcggtgcgcttcccccagcccttggtcatgtcggtgcgcgtgaacccggggcagaagcagttgacgctcacgcgggcgccgcgcgcctgcagccgccgcgccagcacccgggagtaggcgttgagggccagcttggagaccgagtagtccgtccacaccttgggccacccctgcccgccccacgtcccgtccttcacctgggacaggaaccgcgacaccatggactcgatcgccgcctccgtcagggtgtcctcgtccaggagcagcgccgtcagggacgggtcgctcaccttattgagaaggccaagctgcgagctgatgttgaggatcctgctagtggccggcgactgccggaacagaggcaagagcgcctcggtgagcatcttggcgccgtagaagttggtcctgagcaccgtctcggcgtgctccaccgagtttgtgtcgatctcgttgaaggacacggcggcgttgttcaccaggatgtcgaggccgccgacggcgtcgcggagccaggcggcgaactcggcgacggagtcggg

SEQ ID NO: 7333 - DNA, 165 bp, Setaria italica
  Peptide Sequence Number=SeqID_73307
cgctccaagtgccaaccgtcgacggccaattgaggattagttcatgtcagcaagaacgcgcactgccgcagctgccagtgccacaaggctctcctctcgcactagcttatattgctgacatgaactaatcctcaattggccgtcgacggttggcacttggagcgc

SEQ ID NO: 7334 - DNA, 938 bp, Setaria italica
  Peptide Sequence Number=SeqID_73308
cgtgggggcggtgccccgagtggtgctcggcggcgggcgtggcgggggtcctgcggcggcacccgctcccggcgctcttcgcgtgcggcctcctgctcttcatggccgtcgagtacaccatccccatggtgaggccgggggcgccgccgctggacctgggattcgtcgccacctagggcatgcacgacgccgtcgccgcgcggccgtggctcaactcgctcctcgccgcgctcaacacggtgttcgtcgcgatgcaggcggggtacatcctgtgggccatcctcgtcgagcagcgtccccgggccgccgtcgccgcgctcatgatgttcaccagccggggcgtgctcggctgcgccacgcagctcccgctgccggcggagttcctgggctctgggatggacttccccgtgggcaacgtctccttcttcctcttcttctcgggccacgtcgccggcgcggtgattgcggctgccgacatgcgccgcgaggggagggtcgcgctggcacggctctacgacgcgctcaacgtgctccagggggtcaggctgctcgcgtgcaggggacactacaccatcgacctcgccgtcggcgtcggggccgggatcctcttcgacacgatcgccgggtggtacttcgacgtcatgaacggcgacggcaagaacgcgcactgccgcagctgccagtgccacaaggctctcctctcgcactagcttatattgctgatatgagtacattttggtagcgctccaagtgccaaccgtcgacggccaattgaggattagttcatgtcaaattctttttgagtttttcttttcttttttcggaatcattttgatgtaagagaacttaaatgctacttaccgatatgtaattgtacaaattggtcaccccatgtcagcggttaacttctgtaatgcaagcatcagaagtttcaagac

SEQ ID NO: 7335 - DNA, 408 bp, Setaria italica
  Peptide Sequence Number=SeqID_73309
gccatctcgctccattttcccgttgcctgtgctgcaccactatgtccggagtcggatcctcacttggcaactctagataactgatgttgatctagataacttatgctttacacaggcaagaacatttcgacaacactttcagcttatgtggtggtgatgccacgtcaggccagcgtggacgtccgtggcgccactcccggtgtcaggcggtgccatgctgagtacagtgacgtgtgcacaacgtcacggtcatgtggcccgacgtgttcctcccgttccccccggtagttcgacgaggccatgaagaggttctccttgcgatctgcaagggaaacatgagtgtcattatccaagtacagtaccaaatagcactacctggctgagctgattagtcatccgtgaactgaa

SEQ ID NO: 7336 - DNA, 476 bp, Setaria italica
  Peptide Sequence Number=SeqID_73310
agttcgcggcaagagggttcagcagaatggacatgacagcagtaacgtgttgcgaggagaacaacattcctgataaacatctggcgcgtcctgaagacaggtgaatggtatctagcaactgagtggtctatcttcatcaaagaacaagacaaaacaaggatagaatgaagaaaagcaagggcagtgtggatatttagatatttccttgccgctttcaggatccatacaagaataatccttttccttatctgtgccattgctttcttgactcaggtacaactattaattcgattactgtatcgattttccatgggaactgctcaaactacacgaacgttagatatttcagaatctggtgtgatcgcgaggagcagacggtaaaacattgggtgcactcagagcagggaggcttatggaatctagcagataagaagaacgtcagcggtagcatagatatttaagattatttcctttga

SEQ ID NO: 7337 - DNA, 1532 bp, Setaria italica
  Peptide Sequence Number=SeqID_73311
aatcgaaaggagtggacggacggcgccatcagcagcctcctcgatgcctacacggaccgattcgagcagctcaaccgggggaacctgcggggtcgggactgggaggacgtggccggcgccgtgaccgacgggcagggcaagactaccgggggcaagagcgtggagcaatgtaagaacaagatcgacaaccttaagaagcgctacaaggtggagtgccagcggctcgccagctccagcggcggcgctgtcagccactggccctggttcaaaaagatggagcagatcgtcggaaactctgcgtctcctgcctcctccaagccgcttgccacagccgaggatgaaaaaccgagtcagcagcagcagcagcagcacggcagcaaaaggtatcctctttccagcgctggccctattacggtggttggtagctccagagcgaaccctctttcaaatccaagatggaagagggtgcttctgaagattgggggcactgccttggcaggaccagctcctcaaaacgttgaccccaagatcattatgctgattgctagagaagttcaagtggcatgtcatcatggtgtggaggtggcaattgtggtaggaggacggaatatattctgcggtgacaattgggtagctgcaactggcaccgatcgagcttcaacatacccaatcggaatgatggcatcagtgatgaattcggtacttcttcaagcatcgctagaaaaaataggtgtggagacacgagtccagaccgcactgatgattcaagaagtcgcagaaccatatgttagacggcgggccatacgccaccttgaaaaagggagggtcgttatctttggtgggattggtgctggcatagggaatccacttttcacaacagatacagctgctgccttaagagcttctgaaactgatatggagaggaagtctgactagatgtacttgtcaatcagtcagtgcagatgttgtccttaaaggtattgttggtgatgaggaatatggttgccctcctaggagcaataataatgcaccatttgagcacatctccttcagggagttcgcggcaagagggttcagcagaatggacatgacagcagtaacgtgttgcgaggagaacaacattcctgagcttcaggacatgtcaatactatgggggacatcatgcattctttgcttgcatggaattttctggataggagaggtgaagcatgttcatcagacggaagcctgcacacttacatgccctgggatgcttgttgtgtattatgtgttgtggtagcaattgtccacatcgaaaagaatatttatcttgtaatatctgtttgtaatgtggtatgtagattagtcggaagggcttatgtaaagtggttcacgggtacccagatcagaatgtagtgttgtaagttgtaactctattgtttgagttgtagtgtttgagatatcacctctcacacgataaacatgcctgtggccttccagaaatcaatcctttttttactgttcaatgatgagaaattatatgctacaaaaaa

SEQ ID NO: 7338 - DNA, 1204 bp, Setaria italica
  misc_feature (69)..(69): n is a, c, g, or t
  misc_feature (1124)..(1124): n is a, c, g, or t
  misc_feature (1152)..(1204): n is a, c, g, or t
  Peptide Sequence Number=SeqID_73312
cagtcattattacaagtaaaatgatggcatcagtgatgaattcggtacttcttctagcgatgcttgaanaagtaccgaattcatcactgatgccatcattattacaaagtaaaagttcaagtggcatgtcatcatggtgtggaggaggacggaatatattctgcggtgacaattgggtagctgcaactggcaccgatcgagcttcaacatacccaatcggaatgatggcatcagtgatgaattcggtacttcttcaagcatcgctagaaaaaataggtgtggagacacgagtccagaccgcactgatgattcaagaagtcgcagaaccatatgttagacggcgggccatacgccaccttgaaaaagggagggtcgttatctttggtgggattggtgctggcatagggaatccacttttcacaacagatacagctgctgccttaagagcttctgaaatcagtgcagatgttgtccttaaaggtattgttggtgatgaggaatatggttgccctcctaggagcaataataatgcaccatttgagcacatctccttcagggagttcgcggcaagagggttcagcagaatggacatgacagcagtaacgtgttgcgaggagaacaacattcctgttgtcatctttaacatgttagagcctggtaacatctccagagcgatttgtggagatcaaataggcaccttagttgaccagtctggaaggatcacttaaaattatgatgattctctgtagcagagcttcaggacatgtcaatactatgggggacatcatgcattctttgcttgcatggaattttctggataggagaggtgaagcatgttcatcagacggaagcctgcacacttacatgccctgggatgcttgttgtgtattatgtgttgtggtagcaattgtccacatcgaaaagaatatttatcttgtaatatctgtttgtaatgtggtatgtagattagtcggaagggcttatgtaaagtggttcacgggtacccagatcagaatgtagtgttgtaagttgtaactctattgtttgagttgtagtgtttgagatatcacctctcacacgataaacatgcctgtggccttccagaaatcaatcccttttttacngttcaatgatgagaaattatatgaactnnnnnnnnnnnnnnnnnnnnnnnnnnnnnnnnnnnnnnnnnnnnnnnnnnnnn

SEQ ID NO: 7339 - DNA, 245 bp, Setaria italica
  Peptide Sequence Number=SeqID_73313
tgtcgatgcccgactaaaccaagctgtggccatattggaggatcttctcaaaccagttgtatgtactcttacttgcttccaatatttatcttgctttctcactggtattactcatctcattaactgttgtcatcctcaggatgagtccatggactactacaagaagcaacagctgagggaattggctatacttaatggcactctaagggaggaaagcccaagctcccatcttagtcccagtgtat

SEQ ID NO: 7340 - DNA, 643 bp, Setaria italica
  Peptide Sequence Number=SeqID_73314
ggaagctgagttccagcagatagtgtcgatgcccgactaaaccaagctgtggccatattggaggatcttctcaaaccagttgatgagtccatggactactacaagaagcaacagctgagggaattggctatacttaatggcactctaagggaggaaagcccaagctcccatcttagtcccagtgtatcccccttcaattctaccgggatgaagcgcgcaaagacagggcggtgatcatagtctgaaatgcagagcttgaggtgatcaagatatgtatatcagattgcgaatatgctccactgtcggaaatgattgcatatgagggatcagcacggctggctccaggcctgtcatgacatgagctttactgtggacatccttggaatggacaatcgatgtgcaaaatatttgtctattcaagggtttgctgtttggtcttattctttgtgtatctgactttgaaatattaacattattggttgggtggttctaggttttgggattgtagtgttgacaaatgacaataatcagggttttgaatgtacaagaaatagttgcaatttgttaaaaatagtttatgttcttgcggacaactgtgttctcagtaagattttgtactggagtattctttcattctctcctt

SEQ ID NO: 7341 - DNA, 419 bp, Setaria italica
  Peptide Sequence Number=SeqID_73315
gcggcgggcgcggcgggaggtgctgcgcgcgggccttggcgtgcccgttcgcgttcgcggcgccgttgccgttggccctgggcgccgccgcgttcttggcgcggatggcgtccagcgtctccacgtacttctgcacccgcttctcctgcattcgccgctgcaccttgacctcgccttcggcggcgatggagtccagcttgaccagctcgttcatgagcgcctcggtgagggtcaccacgtcggcgtccactaccttgccgcccttgcccacgatggtctccagcgccgacaccttggtggcgagcttgtcgacgtcgaggctgacgcgggagatggacttggcggcgcgctcagccttgtcggtgcgccgctgctcgaggaggcgcttggcctgcgcggcggggttccttcgtagtcta

SEQ ID NO: 7342 - DNA, 584 bp, Setaria italica
  Peptide Sequence Number=SeqID_73316
ttcagctcaccgaaggaggcctgcgagttgatgtagatctcgtggtagacgccattgaacttgaccttgacgcggatggtgggcacgggcgcccccgcgggggcgtccgcgtccgagctccgcttctgcaccagcatcccgccgggccgcacctcccactcgtcctccttcaccgccgcggccgccgaacccggagcaggagcagcaggaggggagctctccctcatcgcgtccgcgaatgtacctttgggcctggtgcgcatcatcttctcatggtacgcccagcacccccacgcgcgtgcagaaggctccgcctcaacaaccgctcctgcactctctcctcaacggcagcgaccaagcagtcgagctctgctccgctctctcccgaaaaagatctctctgctctgccaggcgcggacgggtcccctgcttgcgcgggaaggggcgagtctgccggcgccggatctgggcggggcgggcgacacggtttctcagctgcagcgagcgcaggtgtgccctcctcccctgacctcaattggggaaatcgggcaggatcagggccgggggcagcgggcagaagaggt

SEQ ID NO: 7343 - DNA, 1752 bp, Setaria italica
  Peptide Sequence Number=SeqID_73317
acttgccctaaaccaactctctcttctctcttttctctctcctctctctgaataatatgcacacaaaagaatctgaaaaacatttggtgaacaagaagaagaagaataaggaaaaaaaaaagtaaaaaaaaaactctcacatgcatcctcacatgatgaactgaactaccagtggtaccataccatgcaatgcagcgcgacgcgatgcgatgtgtgtgtgtggccaagcaaagcaaagcaaagcaaagcaatcaccggcgcaaagctagctaggctagcccaatcatggcctcatcaaggacacgagcgctctcatggatcctatcagatttctgccggggcacgcacgggggtgggtgcaattcttggcacacaagcattgcatctcatctgcactgcatttccgcctttcgcttttccgattcctcctcgcccttttgctgcttgcgctggtgatcgatcggtcagaagagcatccagtccagccggttcgtcggcggcgcgccggaggacgccgtcgagctcacggtggtggtcgacgacgccgaggatgtggatggaagcgacgacagcaggtcgaacatctcccaccgcgtctgccccgccgccgccgccggctgctgctgctggtggtggttgtactgctgcctcggctgctgctgctgctgttgcggcggcggtggctgctgcttggcggcggccttctcgccggatttgcggatgatggcggcgttcttggccgccaccgcgtccagcgtctccacgtacttctgcacgcgcttcacctgcatccgcctctgcgccttgacgtcgccgtcggcgaccaccgcgtcgagcctgaggagctcgttcatgagcagctccgtcacctggaccacgtcgttctccgccactttctcccccttgcgcaccgacgcgtccagcgccgccaccttgggggcgagcttgtcgacctcggcggtgaccgcggcgacggccttggcggccttctcgaggtggccgttgcggcgctgctcgatgagccgccgcgccttggcctcggggtcctcgacgacgacgagcttggagcggtccttgacgccggccatgtccaggaacgccttggagtcccgctccttgtccttgtacagcaccttctggtcgtccgggtggagccccgtcttcgccgccaccagcttcttcagctccccgaaggacgcctcggagctgatgtagatctcgtgcgtgacgccggcgtgcttgaccttgacgcggatggtgggcaccggcttcacgttgcgcgacggctcgtcgtccgacaccccgccgctcctcttctgcaccagcatcccgccgggccgcacctcccacacctcctccgccgtcaccctgccgttccccgccgccgtcggtgccgcagccggcggcgcctccttggccgaccccagcttcgccggctcgcctttcctcgccttgggggtcgctcccagcatcctgtcccctccctgctccctctcccctcgcaagctaccactacctgtaagtaaagctcgggggggcgccgcctggccgcgcctttgaccgaggcaagaacgaacgagcgagcgagcaatggcgcgccaaggaagcacacgccgcgggtgcagcgaatttgaaggcggctagcgggggggatcggagtggagaatccgaggaaggagacgaacggatggatggatggatggattggcggacagcgaggaggaggaggaggagggaggaggagaagcaaat

SEQ ID NO: 7344 - DNA, 1114 bp, Setaria italica
  Peptide Sequence Number=SeqID_73318
ccgcgccttgttgttggccttgggcgccgccgcggcggcggcggcggtcttgttcttggcgcggatggcgtccagcgactcgacgtgcttctgcacctgcttctcctgcgcccgccgctgctccttcacctcgccgtcggcggcgatggagtccagcttcacgagctcgttcatcagcgcctccgtcagcgccaccacgtcggcgtcgacgaccttgccgcccttgctcacgatcgtctccagcgcagacaccttggcggcgagcttgccgacgtcgagggcgacgcgggtgatggccttggctgcgcgctcggccttgttggtccggcgctcctcgaggaggcgcttggccttggcggcggggtcctcgagcatgagcatcttggagcggtccttgacgccggccatgtcgaggaaggccttggagtcgcgctccttgtccttgtacaccaccttctggtcgtccgggtgcaggcctgtcttctccgacagcagcttcttcagctcgccgaaggatgcctgggagttgatgtagatctcgtggtagacgccgttgcacttgaccttgacgcggatggtgggcacgggcgcgccgccggggggcgggtccgcgtcggggctccgcttctgcaccagcatgccccccggccggacctcccacacctcctccttgggcaccgccgccgcctccttcatcgtcggcgagaaggccaccctctgctgctccctgcccccgcgcatcattttcttcgacctcctcctcctatatctatcgaccgtcctagcaggaaggtagagtatgtatgtgcactcgagtcgagctgatcaccaaagctcaaaaaagaaagggctagctctagctagaggcaatgatccgtgtggttaactagctgctaatggctgctgctggcttaacctgctgcggcaccagaacctgaaaaattagttcttgcttggggggtactactagactagaagcaaaatgcctgcaagcttcaaatggagaaacgaagaggaggaggaagagagaggacggagacgagagaggcagaggtgaggaaggaggaggagatgggagggaaatggtgtgtggccggtaggaggaggaaaagac

SEQ ID NO: 7345 - DNA, 382 bp, Setaria italica
  Peptide Sequence Number=SeqID_73319
cgacacttgtcagtgcatattgaacatcgctgtctgaaatttggtaatggaggacgaacctgatactttttgaacttgctggcattgcaagaacattgtgctgttccaagacttggcatagattgtcaggtgatattcgtggattggtgatatcaaagaacaccatattggtctcgacagaagctgaagtgaacttagattccagaaagaaaatatgaaacctgccaaagctttagcctttctgtggtcatcctcaagctttcccaaagtgtcacgaacggcgacttgagcagcagcacagagaactccaacctgcctcattccaccacctagggtcttcctaagaattctggccttgtcaatgaaggcctttgatcctaac

SEQ ID NO: 7346 - DNA, 479 bp, Setaria italica
  Peptide Sequence Number=SeqID_73320
gcccaggacgtcgtcgtcgacgtcggccgcggccatggctgcgcgcatggcctccgtgggcttggtgaccgtgtccgaccgcaggtccaccaccttggtcaccatcctgcagcggctacagctcgctcaccgctgcaggggagcaacggaggctttcagggtgcaatagaccgggatcacgagaggggtcgcgtcgcgccccggggatccggcgatgggacggagcacctcgacctgccgggagcccggccgggacgggcggtgagtcggtgacggaacgcgcggtcggcgatcagaccgaagactgccggagagcgcggggcgcggtggtggccttggccttcgcgatgcggagcggctgtcctttatagaggacgagaggcgcagggcgcgcgcgccttggaagaggggaactgggcgcgggcgcaatctgggtgccctggagctgccgccggaggccggagccatctgcctctgcc

SEQ ID NO: 7347 - DNA, 524 bp, Setaria italica
  Peptide Sequence Number=SeqID_73321
gggggggggggttggtccaaaggaagtgatctagtgcccatatgaacttctcgtagtaccatttgtcagttgatccaagtttgttccacccttcagtagctcttcaatagctttctcgacacttgtcagtgcatattgaacatcgctgtctgaaatttggtaatggaggacgaacctgatactttttgaacttgctggcattgcaagaacattgtgctgttccaagacttggcatagattgtcaggtgatattcgtggatccatgatatcaaagaataccatattggtctccaccgaagctgaatccactttaaactgtttaattttcttcagtccctctgctaaagctttagcctttctgtggtcatccgcaagctttcccacagtgtcacgaacggcaacataagcagcagcacaaacaacaccaatctgcctcattccaccacctagggtcttcctaagaattttgcctgaaggtattgttcagatttccatcattgttacttgagctaagcagttctccg

SEQ ID NO: 7348 - DNA, 610 bp, Setaria italica
  Peptide Sequence Number=SeqID_73322
tagttgaagactagtgagcagtggatatcgaaatgaagtgaagttaaattccagaaaaaacatagaaaacctagaccaaaagctttagcccttctgtggtcatccgcaagcttctccacagaatcgcgaacggcaacatgggcagcagcacagagaactccaacctgcctcattccaccacctagggtcttcctaagaattttggcctgaaggtattgttcagatttccatcattgttacttgagctaagcagttctccgttctttttcaaacagaaatgcatctctgcattttaaacttagaaacacaattgatcagaccttgtcaatgaaggcctgcgaaccaacgataactgatccaacgggggcgcctaaaccttttgataggcataccgaaactgaatcagcagctttcacgagtctatctacaggaactccaagtgccacagaggcgttaaaaatgcgtgctccgtcaatatggagcttcaggccatgactcttggcaacttctccaaccttatcagtgtattctgcagacaaacatttcccaccacaatttgcatgtgtgttctccaagcagatcaacctggtcgtcgggtacaacagcgccc

SEQ ID NO: 7349 - DNA, 789 bp, Setaria italica
  Peptide Sequence Number=SeqID_73323
ggagacagagcaatgcttggtttagcacaactctgtggaagatgatatcagaaattcagaatcggactgcccatgctatttaccacagaggcgttaaaaatgcgtgctccgtcaatatggagcttcaggccatgactcttggcaacttctccaaccttatcagtgtattctgcagacaaacatttcccaccacaatttgcatgtgtgttctccaagcagatcaacctggtcgtcgggtacaacagcgccccggcccggttcctaatggcagcgacgatcttgtcgatgtccatggtgccgtcggggttgttcttgacggtcctggggtgcacgccgccgatggtggagatgcccccattctcgtagatgtggatgtgcgagtgtcgccgaggatgacctcgctgccccggacgtcgcagtgcacgaggacggagacgaggttggccatggtgcccgagggcacgaagagcgcggcctccttgcccatgagcttggccatctccgcctcgaagcgctgcgcggtcgggtcggcgcccaggacgtcgtcgtcgacgtcggccgcggccatggctgcgcgcatggcctccgtgggcttggtgaccgtgtccgaccgcaggtccaccaccttggtcaccatcctgcagcggctacagctcgctcaccgctgcaggggagcaacggaggctttcagggtgcaatagacctgccaaaatgccaaagctcctaaatcagatgctcaactagtttggggtctctatgatggatgatatacaaactgctccaggaatt

SEQ ID NO: 7350 - DNA, 954 bp, Setaria italica
  Peptide Sequence Number=SeqID_73324
tttttttaggtccaagcaaagagtgaacagcaaacacttattcttcaatagctagcgtcgatcgcaaacaagccggggcactgagctgatacatcagaacggtagaaacgaactgaactagtgttctagtacccgtatgagtttttggatgtaccatctgccaaatgctcgatttttgcaccacccgtcagcagttcttcaacaactttctcaaaacatgtcagtgcatattgaacatcgctatctgaaatatggtagtggaggacaagcctgacactttttggactccttggatttacatgcacattgtgcttttccaggatttgacacagcttgtaagatgatatgcgtgaatccacaatgtcaaagaacaccatattagtctcgactgaagtcgaatccactgtaaactgttccatcttattcagtccctctgccaaagctttagcccttctgtggtcatccgcaagcttctccacagaatcgcgaacggcaacatgggcagcagcacagagaactccaacctgcctcattccaccacctagggtcttcctaagaattctggccttgtcaatgaaggcctttgaaccaacaataactgatccaacgggggcacctaaacctttcgataggcataccgaaactgaatcggcagctttcacaagtctgtctacagggactcccagtgccacagaggcgttaaaaattcgagctccatcaatatgaagcttgaggtcatgattcttggcaatttcaccgaccttatcaatgtattctacagataaacattttccaccacaactgcaggaacaattagaaaaatatacgaattaaggtaggataagcaatattctagtcgggtgtttctctcatgttttttttctactcctattcacttcgggttcgagttggaggttaaaggagggtaaggaagaagtaaagtcgtcggggtgt

SEQ ID NO: 7351 - DNA, 349 bp, Setaria italica
  Peptide Sequence Number=SeqID_73325
cgggggcggcggcgccgtcgttgttgatgacctccagcttggtgaggttgatgttgcgggaggagaaggcggagagcaccttgagcagcaccatcatggagccgccccggtgcgcgaccaccatgctggtcttggcgtcggcgtccacggggagcgccacgggcggcggcggcctggagaggagcaggaaccgcgtgacgttccaggactcgtcctggagcccgtgcgcgagcacgtcgaggccgtacaggtcggcggcgcgcgggctggcgatggcggcggtgtcgagcatccggttggagcgcagcatctcgacggcgcccgcggtgtcctcgacgggctcgcggtc

SEQ ID NO: 7352 - DNA, 288 bp, Setaria italica
  Peptide Sequence Number=SeqID_73326
ggcgccgccgccgccacgctcgctggaacagactcttgcaggaacggcttccgcttccttggcctcgcccgccgcccggggctagctagcaaagctagctactccgtcacgcctccgtcggtggcggcattgcaatgccgcgcgcggaaggagccagagccaccgggccgcgtgacgccaccatgcttggcatcgcggtgcgatgcggtggtgtggggtgctggtggttagttggagcgcgaagaccaccaccgccaccacatggtggcagagcgagcatagagcgtg

SEQ ID NO: 7353 - DNA, 502 bp, Setaria italica
  Peptide Sequence Number=SeqID_73327
gatatgtatggtgtcaccagcgttgttggcatagagggtggatacaagggttttattctaaatactattccgttgacaccgaatcggtgaatgacatccataagagaggcgggactgtccttggaacttcaagaggagggcatgatactgccaaaattgtggattgtcttcaggaccggggtattaatcaggtttatattattggaggtgatggtactcagaaaggtgcttccgtaatttatgaggaagtccgtagacggggcctcaaatgttctgttgttggtgtcccgaagaccattgataatgacattgcggtactttcttctttctagtggccctggatctttaaaaagtagcgattcattgttcatgcctgcttataacttgatattgaattgcttacacaggtgattgacaagtcatttggatttgacactgctgtggaggaggcccagagagctatcaatgctgctcatgtcgagctgaagtgcagagaatggca

SEQ ID NO: 7354 - DNA, 1915 bp, Setaria italica
  misc_feature (1863)..(1915): n is a, c, g, or t
  Peptide Sequence Number=SeqID_73328
accaggcggacaagaaccctgctttgtgttcaccgacacggggccccctgcgatggaagccgttggcgtcgctcctgcgcccctggcggcgccggtgaagaagaagctgcttgacctgaaggaccccttccacggcggctccgccgccgcggcctcgaacggcgggaagccgtccccggcggggaagtgggcgatgaagaagaagctggcgggcggcgacgcggggtacgtcctcgaggatgtgccgcacctcacggattacctgcccgagctcccgactttcccaaatcccctccaagacaatccggcgtattcggtcgtcaagcagtatttcgtcaacccagacgacaccgtcacgcaaaagattgttgttcataagaccagtgcgaggggcactcacttccggcgtgctgggccacggcagagggtttatttccagtctgatgaggtgaacgcggccattgtcacctgcggaggcctctgccccgggctgaacacggtggtccgtgagcttgtttgcgggttgtatgatatgtatggtgtcaccagcgttgttggcatagagggtggatacaagggtttttattctaaaaatactattccgttgacaccgaaatcggtgaatgacatccataagagaggcgggactgtccttggaacttcaagaggagggcatgatactgccaaaattgtggattgtcttcaggaccggggtattaatcaggtttatattattggaggtgatggtactcagaaaggtgcttccgtaatttatgaggaagtccgtagacggggcctcaaatgttctgttgttggtgtcccgaagaccattgataatgacattgcggtgattgacaagtcatttggatttgacactgctgtggaggaggcccagagagctatcaatgctgctcatgtcgaggctgaaagtgcagagaatggcattggtgttgtgaagctaatgggtcgcaacagtgggtttattgcaatgtatgctactctagccagtcgcgacgtggattgctgtttgattccggagtcacccttctaccttgaagggaagggagggctccttgagttcatcgagagacggctcaaggacaatggtcacatggtcattgttgtggctgagggtgccgggcaggatctcatcgcaaaaagcatgaatttcgtggacactcaggatgcttctggaaataagctgcttctggatgttggcctttggctatcccagaagataaaggatcatttcaagaagaagcccaacttccccataactctcaaatacatcgacccgacttacatgatccgtgccgtcaaatcaaacgcatccgacaacgtctactgcaccctgctggctcacagcgccctccatggcgcaatggcagggtacaccggcttcaccgtcgctccggtcaacggcagacacgcttacatcccgttctacaggatcaccgagaagcagaacaaggtggtgatcacggaccggatgtgggcgcgggtgctgtgctcgacgaaccagccctgcttcctgagccacgaggacgttgagaacatgaagcacgacgacgatcacgagcatcacctgcacaacacgcagctcctggaaggcgagagctcgccggtgaagaactcgcccaagtgcaatgggtcggcaccaccggcggtgtgaggggggcacaagaatattaagcatatgtaattatagatgattctttttttaaccttttcttctgatttttttgtttgggtgctggcgttgtagagatacactacgatagaatcgaatctactgtgagcattgcgtaataatatatgcttcgctgtaataagctcagttttgttcgtggactaaaaaaaaannnnnnnnnnnnnnnnnnnnnnnnnnnnnnnnnnnnnnnnnnnnnnnnnnnnn

SEQ ID NO: 7355 - DNA, 393 bp, Setaria italica
  Peptide Sequence Number=SeqID_73329
accaataaatatgtcaacttcagtacaaaaataaaagaacagttattcacctatttttgcacaatttccttcgacaaggtctcccaaccctatttcttcccaaaaacattgtcccatccacatgcctccatatcgcgtgaatcagattctttccactgttccatgtgtgcatgtccaagatatgtccatttgcagacagttgtgcataagctgcgggtgtcatcacctgttgctctatatgctagcaattcaccagtactgcaatactgcggtggtggcgtttcaccagaaatgcaggctccaaagctcttatgggtgaaggaaaatctgcaagagtcttggtctatggtttgtaggtggatggacctcagtgactggctagcatatagagca

SEQ ID NO: 7356 - DNA, 582 bp, Setaria italica
  Peptide Sequence Number=SeqID_73330
ttacaatacttaaccctagactaatactaataaattacaataacaaggacaattttaatcatcacttgtatcgatagaggttacatgtaaataatccaagaaaacatggtgatgagagtgaaacccaggtttttcaaatagcagagaatacagtgataagtggtcatagagccctactgcaatgcctgctccatggttgagcgatgagagagttgttgctcatacagggacctgaatatctgatattttgcatcatggtatttcttgactctaggatctgatgacggatttacaaccttccctgctgcattaagcgctttcattgcatcacgaacaccaggaaacttcttggcagcaacagcacccagaacagcagagcccaaaagcacaggctcgttctctctaggaagtattattggacatcctgcacagtacgatgcaaaaggtgatgcatcagaagaggtaagaagttgtagaggcatgattgcaggaagaagggacttgccaataatatctgcatgttcttggatatacacagagttctttgcaagtcctccacaggcaaggaaggtgtcgatcttg

SEQ ID NO: 7357 - DNA, 1735 bp, Setaria italica
  misc_feature (1)..(48): n is a, c, g, or t
  Peptide Sequence Number=SeqID_73331
nnnnnnnnnnnnnnnnnnnnnnnnnnnnnnnnnnnnnnnnnnnnnnnnctcttagttttttttttgttgcactttaaccacaagatatatctttattgatttacataggcgttttatcatctccttcctttattaacaccacacaaacttgtggattccccattcctgtgaaaaggatcatcttaccctgctatctataattcatacaggcattttatcatcacttgtatcgatagaggttacatgtaaataatccaagaaaacatggtgatgagagtgaaacccaggtttttcatatagcagagaatacagtgataagtggtcatagagccctactgcaatgcctgctccatggttgagcgatgagagagttgttgctcatacagggacctgaatatctgatattttgcatcatggtatttcttgactctaggatctgatgacggatttacaaccttccctgctgcattaagcgctttcattgcatcacgaacaccaggaaacttcttggcagcaacagcacccagaacagcagagcccaaaagcacaggctcgttctctctaggaagtattattggacatccaataatatctgcatgttcttggatatacacagagttctttgcaagtcctccacaggcaagaagggtgtcgatcttgtgtccatgagcattacagtgctccacaatatgacgagtaccgtaagcaatgccctgaattgttgctaggtacagaagagccaaatgcttctcacttgtatcgagtgtcaagccataaatcacccctttggattttggatcagccatgggagaccgatttccatgaaagtctggaaggacatggatgtcttgagtcaatgctgaaagaaaaggactaatttgctcatgcgacattgaaagcagcatcttgttcaggagctcatatatggatatgctttgagaagaagcacgattagaaagaagaggagaagcaacatggttttcgataatgtaatcaagtagagcaccagttgcactttggccaccttctgtgagccagaactcaggtaccattgcagaccaaaatggtccccagacaccaggaacaaacaatctgttctttgaaacagccatgtggcatgtagatgtcccacaaaccagtaccatccgatggcatattgcttcttcatcagacaaatcagctttaagttcttcatctgggatgctttccatgactccaactccaccagcatgagcatcaataagtgaagttccaactggagtaccaggaagcaagcctaattcctttgcagcagtagctgtcaaaccagaaccaagaggatgaccaggaaaagcaacactgcgtcctatttttgcacaatttccttcgacaaggtctcccaaccctatttcttcccaaaaaacattgtcccatccacatgcctccatatcgcgtgaatcagattctttccactgttccatgtgtgcatgtccaagatatgtccatttgcagacagttgtgcataagctgcgggtgtcatcacctgttgctctatatgctagccagtcactgaggtccatccacctacaaaccatagaccaagactcttgcagattttccttcacccataagagctttggagcctgcatttctggtgaaacgccaccaccgcagtattgcagtactggtgaattgctagcattgattctctctgcctggtttacagctctatggtccatccacacaatgatattcc

SEQ ID NO: 7358 - DNA, 378 bp, Setaria italica
  Peptide Sequence Number=SeqID_73332
ctataaatcatttccccttttctgcacatccacaaacgtcatgccgcaagagctgaattacagtctgcagcgcaaccaaaagtccaaaacacagctctcaacagctactttgtatgtgaactacaagagctatgttggaacacaaattggtattgactgatgactgatgagaaaaacaaaccgagtgcactttgtagttctcatccattgatccaaagttcctctaatatgcactgatcactgcttctacgtagtgacctgtattttcgatcacttagggaaaggacatgcattcaggtatgtaatcattcgccaatttagcaggcagacaatggaaattatagatgagaatagaagttgatgagagaccggaagaat

SEQ ID NO: 7359 - DNA, 1060 bp, Setaria italica
  Peptide Sequence Number=SeqID_73333
ttttttagaagcttataagtgccactttaaattagaccttttaaatagttactccggaatgaaaaaaaacatcaatcctccatgtaatgcttttacacttctaccgaaaatgcaggtagtagtgaacctcggagagggggctattgtcggatgtagcactatgtgttactatcacaaagccataattcaaaagaaccacaaaagaagagaacgatacgacaatagtatttacaatggaaggaaccatctcagataactttgtttgtaaatgtagattcctgtacatggtgatcttgtacaatcatatcaaaccaattgtctgcaagattttatactgcacatacaaagttcagagacaaataccaatttatttagacaagatatatacaagctacctacatctatatcttgttctcatagaactgctagcatgatggtacgcaatatatagcagcttgaaaaaaagggcatgtggaatgagagtttcagtcttttcattttctttcagagctagagatatcattacccgtattctattgtaatgagagcttaccctattctaccaaattactctcgtactcctcatacttaataagttaattaagtgagaagcacaataactgaaaatttcagagttcagactacgtaagaggaagacaagctctatagtactgggctacttttagaagtattaagaccaagatgcagatggaaagtatttcatagtataagatttgaagttaacttgggaaggataaggccatggatgcaaagtgaaataatgcttcagattataggatttcatagtttccttgagaaggataacaccaagatgcaaactaatataatacttcagattataggattttgttgctttctctgaagaaacaatgtagggattgttagggattggcggccggcggcggcgacgagcggccagcggcggcgagcaggcagcaggggctggcagcgatgatgagcaagcgacggggctaggggcagcagcgacaagcgggcggcaacgacgagcgggcggcaaatcgggcgggtggagagtcgg

SEQ ID NO: 7360 - DNA, 1449 bp, Setaria italica
  Peptide Sequence Number=SeqID_73334
gtaaaaaaaaacatcaatcctccatgtaatgctttttacacttctaccgaaaaatgcaggtagtagtgaacctcggagaggggctattgtcggatgtagcactatgtgttactatcacaaagccataattcaaaagaaccacaaaagaagagaacgatacgacaatagtatttacaatggaaggaaccatctcagataactttgtttgtaaatgtagattcctgtacatggtgatcttgtacaatcatatcaaaccaattgtctgcaagatttatactgcacattgggggctaggggcagcagcgacaagcgggcggcaacgacgagcgggcggcaaatcgggcgggtggagagtcggacgagtggtggccgtaggtgtggcgcaggcaggcgacgagtcccaagcgcggcaccggggagacgagtggcggatccggcggtttccagaccagagacgagggacgagcagcagaggcggcgagtggagaagcgacagatctggcgggtgagaagagcacgcaagtacaacgtgcgttggaaaaaaaaccctgggcagattgagaagaaacctaaccctagtttgacttgtaccatgttaggaatagcacttgtattcataacagggcactaggcccatatatatacatgtacaaggaggggaaatataccaaaaaccccctaatagaaaaaggtaaaataccaaatacatctaacagggataatggtctgatctatgcagctatccaaatatgagattgagctatgatttgaagaaaaaaaatcacctagctgatgacgataatgataattctccagaatagacgtttcatattttaccttccctttttccacataccttctgtaatttgctacgccaaactggactgaaatgctgcagtctgacactactgcttcagaaaaaaaaactttgcattttgcagagacacgtttgagctcattcagagaagaaaatatgcagggaaccaatggatcaaatcagacatggcgagccacgaagctgaactttcctgaaatgtcaattaaatcattatcactgttggtaattaataggatctttatatcattacttgatatcttgaatgaatcaagtgaacactggaacaaaactgaaaccatcaagaggtatgggcaaccagagttttgagtacatttggcaaggcctaatcaacttgccaaggcattctccaccatctcttccaatctttctgcttggtgaacatccaaccgtcctgatgaaccatccaaagagctcagctctggaacaccaacatcccacctgtgcaatatcaacagctcagctcgaaatttagctataaatcatttccccttttctgcacatccacaaacgtcatgctgcaagagctgaattacaagtctgacaagacgacaaaccaaaaagttaccaaaaactaactaagtacttactta

SEQ ID NO: 7361 - DNA, 347 bp, Setaria italica
  Peptide Sequence Number=SeqID_73335
cgcaccactccgccgagctcccatcctcccccaccgacgacgagggcgccggcgacggcgacggcgggccccaggcgctgccgccgaagccccgccaccagaccgcggtcacctttgccgagaccagcggctcactcctccaatcctctgacgacgagggcgagtacgaggatgaggatgaggaggaggacgacgatgccaccgcaggggaggcccggccccgcgctgctgccggccagtcgagcggctccctctccccggcgcactggaggggcggcaggtcccgcggctgctacaggtgcgggaagggggcggcttctggggccgcgacaaggagtcgtgcctcg

SEQ ID NO: 7362 - DNA, 1106 bp, Setaria italica
  Peptide Sequence Number=SeqID_73336
tccccgtcgagggaggagaagcccagggaggggtcgccgatggatggcgtcatgacaagaaaccaagacaagcagcagtccccaaacgatgccgtcggggcagcagtcgcagcagcagcagaaggttgcgctgatcacgctgcccccgcccagggaggtggcgcggccggagatgcccagggattcggcgcctgctgctggccgggttgacgaggaggagtgggtcaccgtttttggattttcacctggtgatactaacttggttctgcgagaattcgagaaatgtgggatagtcctgagacatgttcctggtccaagggatgcgaactggatgcatatcttgtatcagagccggcatgatgcacagaaagcacttgtgaaacatgggcagcagttaaacagtgttcttattattggggtgaagccagtggatgcacggcagcaacagtacctgaacgagagcatgaacgagaactatcagggcagcgcaacagtcccatttctgtcaccgcctgtagcacctagcggatttgccaccaggaacgcactagcacctttgcctagcaactcgatgccaaatggcagctgcaacgagagcagtcgtggcgcttctggagccattgcttcaccttcaaaatccatcttgtccaaagttatggacttgatgtttggcctttaagttccatcattaaatcaaatggtggcaatgcgtttgtattctgttggaaattctaggccaaaatgaggatcatggcgataacattttttggtcaatggggttttcattgggtatcaatgcacggattgtgtatcatacggcatctgactttggtgtaaactgtaataggagtcgtcccttgcaaaggctggtgtaattgactcactcggtggcaaatgttcaatcacaaacttcaccgatctattgtgatgatatggatatttttcctccagaaaagaaaagtgtggaaagtgatatgattgcatagagatttttaggacaccagctgagtagctaaagtcagacggttgtatttttgcagtgtatgttttgtcagattgggtttcttgtaattttcaacacatcttgtaggttcctaaaaaaaaaa

SEQ ID NO: 7363 - DNA, 748 bp, Setaria italica
  Peptide Sequence Number=SeqID_73337
agacgggggttaaggaagaaatacaaccaaggggtagccccaagggaaggacctgcaagtaacagagaggatgccgagcaaatagggggcggcaccacatcaggctgctccaccaaaaaatcaaaatcctcgttagtcggtggcgatggctgcttagcaaagggaaaagtggcctcgtcaaacaccacatgacgggagatagtaacccgatttgatgaaaggtcaaggcagcggtatcccttgtgattagcaaaatatcctagaaaaatgcacagggtggaacatggaacgagtttgtgtggcgtggtcgcggataaatttggatagaaagagcaaccgaacaagcgaagatgagtataggacggggtgacaccaaacaaagccatgtgcggtgtcgaggaagtaagtgttttggtgggcaaaagattgagtaaatgggtggcggcgttgagggactcgacctagtaagagggaggcagactgacccgaaagagaagggagcgaacaatgttgttgacgctccgaatcatgcgctcagcccgcctattctgcggcgatgtgtaggggcatgacatgcaaaaataaaccccgtgtgtgaggaagaatgtgcggaagcttgagttatcaaactcacgaccgttgtcgcactgaacgaccttcacaacaacgccaaactgagtacgcacaaaagaacaaaagagaagaaattagtcaaagttgcaaaggtgtaagatttgagacgaagcgg

SEQ ID NO: 7364 - DNA, 443 bp, Setaria italica
  Peptide Sequence Number=SeqID_73338
ggctcccggcgccactcccccgtggtcacgttgtacacggcgacgccgtacgccggggtgctggccggcgcgtcgccgtccttgggcccgtcgtcggcggacgggttcccgaactggagcatgtagacgaggtcctcgttggcgcccgctgcggcgcgagccgaggcgaaggacggcgcggcggcggcgctccgccagccgcggcagacccggcgcagagcgcggtaggaggcgtgggggacgcgcgccaggcagtcgacggcgacgtcgtcggggatgcccgggatcaggtcgacgtgctccatgggaccgccacggccgccgccgactcctcttgggttcttcatcttggccgcttttctttttgcttgcaagctcagcttatctcttctctctctcctcctgagacacgcgaaaggggataggcaaggcacacgagggga

SEQ ID NO: 7365 - DNA, 654 bp, Setaria italica
  Peptide Sequence Number=SeqID_73339
ttagtgtccaagcttgagtgactggaccctccacctgagagctcctttgttatatagtttggttaaccacaccgccctgacctacagccctccatgccataggtttgtaccgccttcgagctccacctgctcacttgtacagcgaggttggtcccaccacgtcttcctccttccaacagctcgcaacttcgcctctacgactattaggttttgtaaccacctttgcagccttgcacttgaccgcaaatgagatttgagtaccggtcgttgacgagacgactttcttctcctgattaggatatttactaaatctcccaatggttgcaccacctttaagatttccaatcactcggtatcctttattaatccaaatacttttcatgattacttgctctttgcaagtaactcgcataactccaccttgaagcgataagccacaaccttggagttctagcatcctcacagatattaaattcgttttcaaacccaggatataccaaactcccatcattgtgcaatgtgttccattatgcatctccaatataaccattcccacctcagtgaccgcatactccttgcaatctgccaagtgaatagttccatttaccgggcgtagagatcgttcgtcgaacatcttcccgaatctaatatcca

SEQ ID NO: 7366 - DNA, 277 bp, Setaria italica
  Peptide Sequence Number=SeqID_73340
ctgtggtggggggaggagggagaacatggccgagtaatgcctttgccaggtgttatgatcatatgagcatcaaattaggggagcaggctcctccgtcctcggtcgccgtatgcactggcaacacctctcgtggtaattgaggtgccccgtcttttcgttgtgcagctttatgtactgggcgtactgtggcaacatgaaaccggaaaacacctactaccttgcgtccttgggtgctagcctgttatgtttcatgatgatcacatgaagtggatagaaa

SEQ ID NO: 7367 - DNA, 1242 bp, Setaria italica
  Peptide Sequence Number=SeqID_73341
caacaaacaaatccccttccccacttcctcacggcagtgaaagaccagcggccatgctcggacttcgagcccgcgcagcggcgcagctcccttgcccttccccgtctccctcctccactcccacgacctcgctcgcgaggttcgcgcgcctctccccgctcgccgccctcgcgcctctggcgtctgcacctccgccggcgagggcgagggctccgccgccggcctccctctccaccaattggggcgtgaccatgcgtcccgggggaaccggaagcaactcaaggcctaccacgcgggttttctgcaccgctgccagcagctctcagagagagggaaaagagttgctagtccagcatttgcttgttggtgagaaggatgtcaggcttctggtcgatcttgaaaagagcatcattgcaggaggggcagacttgagtgatttggctgtggagcactccttatgtccatccaaagaaaatggcggtatgcttgggtgggttcgaagaggacagatggttccagaatttgaagaggcagcatttagtgctcctttgaataaagttgtacggtgtaagacaaaatttggatggcatttattgcaagttctcgctgagagggatcaatgcgtactgcaagacattgacccacaagatcttcacacgaagatgcaagatcctagttttcttgaaggagctcaactgattgatgttcgggagcctgatgaagtggctaaagcttcacttccaggcttcaaagttctgccacttcggcaattcgggacctggggaccagttatgacagatgagtttaatcctcagaaggatacttatgttctgtgccaccatggcatgcgctcgatgcaggtggctaaatggctgcagtcacagggtttcaaaaaagtttacaatgtcactggtggaattcatgcctacgcggttaaagccgactcctccgtgccaacttactagagggacgggacgggactggactggactgttgtcatcaacatgtggtttcatcttatcaagaaaacccgtggccagatactgttaatgtgaaaccaaatgcagtgcgccattctaggatttggccatgggtttgacccttgaccaatgccagaattcagagctcagttttctttctggcaacctggcatgtattagagttagaatccctttggacgaaatgtatacggctattctttttctaaggaaaaaaaaggaatacttgaggattggttattgg

SEQ ID NO: 7368 - DNA, 595 bp, Setaria italica
  Peptide Sequence Number=SeqID_73342
ggccgccgcggagtccgcgctgcggctactggcggaggccgcccgctgcggcgacggcaaggcggccatcgcggcagacgcggccgaggtggcggccgccgtgatggggcggatgatccgcgtcgggccggcggggagggaggccgccgtggtggcgctgtggctgtcctgctgcgcgggcggcggggagcggaggatgcgggaggcggtggcgtccgcgcccgaggccgtggggaagctgctggtggtgatgcagggggactgcgccccgaccacctcgcggatggccggcgagctgctgcgggcggtgcggctggagcaggagcgcaagggcatggccgcctcctacgacagccgcaccatccatgtcatgccgtactgatcgacgcggcgggaacgcaccgccccgcgcctagctcgcagcagctgtaacgcagtcgtagtggtgtatgtaatgtagggtatcgggaattggatcatctgctttgcaaatatgctgctcgaatcggatgagaaaatcgttgtagaaactcaaataagaacgagaatttcgtcgcacaggcaggacgtagaccgaaattaaacaaaaaaaaaa

SEQ ID NO: 7369 - DNA, 873 bp, Setaria italica
  Peptide Sequence Number=SeqID_73343
ttttttccagcaaagcctagtacatgatcatatagcaagtacgtagcttaggttcacaactcgattgatggtatcacacatgatacgtacaatctcctcatcatcccatgggccaacgatagggtctccatcttcactatagctagttttttggggcggagtgtgcaaagcttgtactactagttccaggcacttccatattgcagtttgtacatgaacccattaagcagtgaagaatatctcattctcagtggcatggcttgaaagcatcagtcgtcgaccgggtcctgcggcgcttcggtagccttcctcttgatggtgatgacggggcattcagcatgcttaacgcagaactcgctcactgtgcccacgaaaaccctctgaaatggcccaaggcccctacttccgacaactagaaggtcaggctggactctcttcacttcgctgcagatgacctcctttggatccccatgtctgatccatgcctcgcattttatccctagctgatggcattggtttacaaagtactcaagcaagtgaagccctcttatcttgtctctctgtttcatttggcggaagtcctccggtgatgcatagatgctatccatgtcatcaaatccgtcctcgtccgggacctggacgtggaggaagaggaagtggaagccgccggggttggagcggacaagcttggagagcgtccagtcgaaggcggtgcggcagctgatggagggatgcgggtaccccttgagcgacgactcgttcaccgccatcatcacccgcgtcggcgccgaagagtccgccattgcagcgcacgcacgcctcaatcgctcgggctgccttcctcggcaagaagaaagaagaaagttttgggga

SEQ ID NO: 7370 - DNA, 319 bp, Setaria italica
  Peptide Sequence Number=SeqID_73344
tgccacccgcggcgaggctcattcttggcgattttggcggcggcaggattcgctagggcggcgcgacggcgggattcggcccgagtagccgccggcaggaggcagggaggagccctcgtcggtgcgcctctgcgcactcaaggggtgcggccgcgcgggaggggcagcgggtggccagcggcgaggtctgcagcgggttccggcgagctgccacccctcgagcgccggcggcgaggtctacaacggtggcgggtcgggcgtggaaacttccccgcgcaggtcgttgggctctggcgcgcgaggagaaacaatattgcag

SEQ ID NO: 7371 - DNA, 1459 bp, Setaria italica
  Peptide Sequence Number=SeqID_73345
ttacatcaggattggtgggctacttggagaaaattttgttgtcaagcaaattcttccattgcttaggaatgttatactctcatgtatcgattcgtcaaagatgaataagcctgagccacagcatagttggaactcttttgctctcattgatggcttatctgccttggaaggccttgtctcagttcttcccataaaagctgttcttaaagagcttcttcaggaccaagtctgtcttcatgtaaaggttcttatgcagattcacttggatcttcgtgtgattcaggtggcggctaccgcacttgttgacctttgtcgacgcattggaccagagaacacttctatatatgttttgccacaactgaaggagctttttgctgaactagccttttctcatgagtcatctggtcttagccttcttacgaaagtgttaaaaacttctgaaggaaacaaaagtgagtcaattacaatggaatctcgaattgatcttgtgtttcttttctttccttttttttcatcacttgttgggatagagaagctccgggagtgttgctcaacatggtttctattggagcaagctcttcaaaggttgtacaattggaagtgggagccttccggtgattgttctaagaatgctgaaaatatgaaagggcaaaggtttcagcctggaaactctatctcatcagagtttgttccaaccaaactgcttttcaatggggcaggttggtccgtgccacaatcagaaaccactaaaacgggtcggaatgctgcgtcctctaagccaggatctaagcttgagaatgagactaacagtgacaattcatatacttcaagttctggaaatcagccatggttttggttccccagccctgatagtagctggggtgctccagaatttcttggacgtggtggtggtgtgagagatgaacttccctggaagattaaagcttctgtcctttactcagcccgtgctcaccctggtgctctacggtcattagcagttcatgatgatgagtgcacagtttttactggaggagttggtcctggttttaaaggaagtatccagaggtgggagttgccaaacatgaattgcacgtctggttattatggacatgaagaggttgtcaattccatccgcatcctgtcaattactggcagagtggcttcttgtgatggcactattcatatatggaatgggcagacaggaaagctcattgcagttcatgctgagtcgtctactaccttcccactccaaactgcatctattgagcaggcaaacatgcttaatcaggatgcactctcaggtggaatattgtcaaatgcatttcgtggtagtttgtatacgactatgcattatatggaatctgatggtatccttgttgcgggtatgggaaatggttcaatcagatttattgacatatctcgggatcagaagctacatatatactgtctgagtcggaga

SEQ ID NO: 7372 - DNA, 468 bp, Setaria italica
  Peptide Sequence Number=SeqID_73346
ataacagtgaaccgacaaatataatcacctttcagactgaatttcaaccccgccctattatggacactggaaaaggttgcacataatgtcgctgctaagacttaccaacaagtagatgccagatcaaagggcagatttgatggtgtagcgccagaaccacgggaaggagtaagaagtggacacataccaggaagcaaatagtgttccattcccagagatgtttgatggtgcaccaaggcttctctccacagatgagctgaggcaaaaatttcagcaagcaggaatttcccttgaccaccccattgttgtcagttgcggatctggtgtaactgcctgcatacttgctctggggctctatagaattggaaagcacaacgttccagtttatgatggatcttggacagaatgggaagcacaatcagattctcattacccaaaagctaccaccactgcttaaattccccaact

SEQ ID NO: 7373 - DNA, 301 bp, Setaria italica
  Peptide Sequence Number=SeqID_73347
ccgcgacgacgcgtcggactacgaaactagccagcttccggatccaggcgctggagcaggagatcatctcgctgaagcagaccctgcagcggcacaacaccctcaagggctcggcgcgcagggacggcgccggcaaggagccgagcttcagggtcgcgacggacgcgaacgcgccggcggcgatcaagcggcgcgccacggtctccggcagctgcatcgggtccatgcgctggggctcgcagcggcggtgcgccagcaggatcctgcgcgtcttcgcgaggctcgccgtgttcgggagggg

SEQ ID NO: 7374 - DNA, 476 bp, Setaria italica
  Peptide Sequence Number=SeqID_73348
cgccgaccccggcatcatcccgcgcgccgtccgcgacgtcttcgacaccgtgcgtcagaccgatgatcgcgagtttctcgtcagggtgtcctacatggagatctacaacgaggagattaacgatctcctgacacttgagggccagaagctggcgatcaaagagaacctggagcgtggagtgtatgtagctggtttgcgggaggagattgtgaacagttcagaacaagtatttgagctcctccagcttggagaagcaaacaggcattttggagagacgaacatgaatgttcggagcagtcggtcccacactattttcagaatggtcattgaaagcagtgctaagaaccagatagactctggggatcctattcgcgtctctgtcttgaatttggtggacttagctgggtcagaaagaaacaacaagacaggaactgaaggggtccgtttgaatgaggcgggttatattaacaagagct

SEQ ID NO: 7375 - DNA, 250 bp, Setaria italica
  Peptide Sequence Number=SeqID_73349
caggtgggggcattcattgacatcgtcaaatccaatttgcctagcgacgtaatgcgagaacctctcgagctcctggacgcggctggagggcgacaccagcagccgcggcgacagcagctccgccgcggagcccgccgccccgtcgtccctcatgccggcgcccctgctccctccttcccaccctctcgcacccggtaggcaggcaggcaccaggcagcgtcaggcggccgagcgcgtgcggggcacgacg

SEQ ID NO: 7376 - DNA, 250 bp, Setaria italica
  Peptide Sequence Number=SeqID_73350
agcgcggccgccgcggtgcgctcgtcggtggccagcggcaggtcgacgtagagcttggggtcgaagccgtcgggccccaacgcgcgcagcgcctccgtctgcacccgctgcaggagctccagcagcgcgctggccgcctcgtcgtcgggcccgccggcggcggcggaggctgcggtcggcgccatctggatcgcgcggagacggcggcagcagcagagaagggaaaggaggaggaggaggacgtggtgga

SEQ ID NO: 7377 - DNA, 357 bp, Setaria italica
  Peptide Sequence Number=SeqID_73351
gttcttctgatgaagcaggtttagattcattacacaaagaatcaccaaaatctgaattacagtcagctagagctggtgttttgccttttgaactaccacaacatggcgcctgatccgcacatactgtagattccactgattccattaaaacagcacattcagtattctggtgattgtgggaatcaaatcctcgcgataaatcaagacctggagtgcaactttcacttttggacaaagaaattgcagttgtggtctcttcaacacaagagtttcccaagtaaattgattcaccagaaccactctctgacttgctttgacaggtgagatcactggaggagcatactcgagaagaaatgg

SEQ ID NO: 7378 - DNA, 838 bp, Setaria italica
  Peptide Sequence Number=SeqID_73352
ctgctacaaataagataaatatagcacaagtattcgaggaacctctccaatgtgctaataggtagaaacagcacaaagtgttgaaggaaccacttcaacgtgccgagctagatatcgttctagagtcgaagatggatcaaaaggttgaattcgaatccatggatagcaagagcttagtccaaagcccttagtgtacaagatttaaagggtacgttctattcataaggtagtgggtacatcaaaactaagttacaaacttgaggcttgcctctatttatagggtcataagactgacacaatttacgcacaacaaatatgacaactagataacaactcacatatgccaactaggtaacaactcatgtatagctagacaactaagcttcaagatatttcttgatcacactagtgtagtagtattgtagtagtgaaaaccaagaggtcaagaggagcatatggaaagaaaaagagaagaaaagaatccgcacacctgaaataaagatgaatgggctgaaaagaaaaatgagctgcaactgtaaaagaaaagaaaatgaagaaaaatgagtagaaacacctgaaatgaagaatccgcacgcttcaatatcaaattttaaaggaagaagtcgggaggggagatcatgcaaagctgtacacatgagaatcaagaaaaaaaataaaaagaaaacaaaaggagagtggtatcacaactttctttgaggcctaggtgatatcacaacttttttctaagcacttccccgaactacctctcactctctccctattttctaagcattacggaggtagagctttaccttggagtggtggagctcttcttctc

SEQ ID NO: 7379 - DNA, 1071 bp, Setaria italica
  Peptide Sequence Number=SeqID_73353
ccacttgatttgctttggagaaagacaacaatagttcaatggcggcgatcctcgggcggatcttggtggtgcccagccagaaggtggattaccagtacgatcgggtgcttgatatccaccacattaatgattgcatcgggaggaaggttgtgatcacctacgaggagtttgtggacaagaggaagaaagtgagcattgatcagttcatatgctatgcggcctcgcctccatgtttccttgatgaggaccatattaagaagttgaagggattggggatttctctgggcaagattgaggcagcttggccagaggatgcgaagctcaaggagccaaagaagagatacgtgggggatattacgccaaagttctcgacggatgctgaggtccttgccattggtgacatgttctatgctgatattgaggatgagtgggtgaatcagcctggtggtccgttggctcacaagtgcaagactttgatccagccaagcaggctcataatgctcactgctcagcgttttgtccagactttcttggggggaaactatattgctttgcattttcgaagacatggattccttaagttctgtaatgtgaagaaagagagctgcttcttccccatccctcaggcagcagagtgcattctgcgaatagttgagaaggctaatgccccagtgatatatttatctactgatgctgccgatagcgagacaaatcttctccaatccttggttgtattcaacgacaggcaagtccccctcgtgaaaaggccagagcaccacagttctgagaaatgggatgccttgctgtacagaaatcacatgggcggagataatcaggtcgaggcgatgctagacaagacgatctgtgcactatcgaacgtgttcatcggatcgtcaggctcaaccttcacggaggacatcatccggctacggaggggctggggctcggcgtcccactgcgacgagtacctctgccggggcgagctgcccaactacatagcagagcaagactgagaaagcaaacgtcctaggaacatccgtagctgctaattttccccggtcatgtcgatat

SEQ ID NO: 7380 - DNA, 704 bp, Setaria italica
  misc_feature (535)..(535): n is a, c, g, or t
  Peptide Sequence Number=SeqID_73354
aaataactttaaatagaatacttaattcaggtaattgtgtgcatgtacacttctttgttattgtaaaattagtatctgccatgctgtatttagcattggcattttattttaggtttttgttacaggaaggaatgcaaggccttataaggggagctgaaaaatttgatgcgtcaaaaggttttaggttctctacatattctcactggtggatcaaacaagcaatgcgcaagtctgtctcagagcagtcccaaatatttcgcttgccagctcacatggttgaagcaagttaccgtgtaaaggagtgcacaaaacgacttcgccgtaagcttagaagacgaacccactaatgaagaaatagcagtggacactggtatgccaatcaaacgagtagaggcagcagtaaacctccctaagtacagtgtatcccttgacagtaaaattggttccacagacatgacttatcaggtatggctgttctatgctttaatctcactctgtgcttcctaccatacaactaagtaacagctcaatctcngttttcaggaagtcacagccgatcccagtgccgagacagctgaagagatgctgaacagattgtccatgaagaaggatgtgcaccaggcactggacactctgaccgcgcgcgagaagcaagttgttgtgctgagatttggacttgaggatggtcggataagaaccctgca

SEQ ID NO: 7381 - DNA, 1920 bp, Setaria italica
  misc_feature (1920)..(1920): n is a, c, g, or t
  Peptide Sequence Number=SeqID_73355
ccaagagcgaaatccatccccaccgtcccctccctccacctcctgacctccttccttccgggcagcaatggtgacgggcccctggtgagccgagcagccagccagcccgccctggctcgccgatggcgtgcctggcgccgcagttcaagtgggctccttccgccaccgcccacgcgacctcctcctcatccaggtgctccgccctccgcgtccactgcgccgttacttccgccgccgccgtcgtcgacaccgaccgcgccaacggcggcggtgccgcgcagctcaggctcgccttttccgcgccggcgcttcagagaaactttgagtccactctggcatcagaggcacttctgaatgaagaagctgtagtagaagctgcagcagcagaggcagttgctcttgccagagcagctgctgaagctgctctagaagttgttcagatggtacaaaataacaatcatcagccagtgattagacaaaagaaggtcgtggacagctacttggcaaatgaaattcttcgcacagagatacaaccaagcagccctgatggatatgctaatgatgttttgctggaggacttcgagtcctacggtatcatggccggtggtggtgaattagatgatgatgcacagtacactgagaacatagctgtgaagtctgctcgccagtccgagagaagagctaggagaaccagagcagcaataaaggctgcgacaactgtccgcgcttcacaaaaaactgcaacatcctcaaagaagaaacgacccaagggttcctcacctagcatgaatcctttaggttccttgtggaagatgactggcaggagacttcttacagctaaggaagaagttgagttctcagaaggtattcaggatcttttgaagcttgaggcaatccaagctgagcttacagaatacaatggtggacaaccaacattctcgcagtgggcaacagcagcgagaactgatgagaaaactttgcggaagcgtctagatcatggtatctattgcaagaacagaatggtaacatctaatgtgagacttgtaatctccattgccagggagtttgaaggccctggaatggatctttatgatcttattcaggaaggaatgcaaggccttataaggggagctgaaaaatttgatgcgtcaaaaggttttaggttctctacatattctcactggtggatcaaacaagcaatgcgcaagtctgtctcagagcagtcccaaatatttcgcttgccagctcacatggttgaagcaagttaccgtgtaaaggagtgcacaaaacgacttcgccgtaagcttagaagacgacccactaatgaagaaatagcagtggacactggtatgccaatcaaacgagtagaggcagcagtaaacctccctaagtacagtgtatcccttgacagtaaaattggttccacagacatgacttatcaggaagtcacagccgatcccagtgccgagacagctgaagagatgctgaacagattgtccatgaagaaggatgtgcaccaggcactggacactctgaccgcgcgcgagaagcaagttgttgtgctgagatttggacttgaggatggtcggataagaaccctgcaggagattggcaatatcatgggtgtgagcagggagcggattcggcaaatcgagtctggtgcttttcggaaactaaggagcaagaaaagagtgaaggctctgaaggattatctggtgccagtaggcaattggtgaaccattttgtttaaggatcatttttttccgttttgaatccctcagttttttctttgaggattctttacttgcccatttacacgagtcctcatgtacaacacattatcagaacactcgttttacaagagaaaatagtttagtgaccttaaaaaaaaaaaaaaaaaaaaaaaaaaactgaagaacn

SEQ ID NO: 7382 - DNA, 1091 bp, Setaria italica
  Peptide Sequence Number=SeqID_73356
cctcgcagtctccgcctgctccggtccactccacttcggcaccaccaccagcgcagtcgcggcggcggttacgactcgaggcccgagcccgagcagcggcgtcgcggccaccgcgatgccttcgtcgtcctcctcgccgccgccgccagccgaggagacgaccgccgccgcctcccccgcgggtgggttccgcctcaccgagccctccttcctcgagtcgctgatgccgaagaaggagatcggcgtcgaccgcttcctcgccgcgcaccccgagtacgatgggcggcggcgcgctcatcgccatcttcgattctggagttgatccagctgctgctgggttgcagactacttcagatggaaaacctaaaatccttgatgttattgattgcaccggtagtggtgatgttgacacatccaaagtggtgaaagctgatgctgatggtgctattgttggtgcttcaggtgctcgtttggttgtaaactcctcgtggaagaacccttctcaagagtggcatgttggctgtaaattgatatatgaactgtttacttatacacttacatctcgattgaagaaagaaagaaagaagaaatgggatgaggaaaaccaggaagcaatttctgatgctctgaagcagctgaatgaatttgaaaagaaacacactaagcctgatgatgccacgctgaagaaggctcatgaagacttgcaaagcagacttgattacctgaggaaacaagctgaaggttatgatgacaagggacctgtgattgatattgttgcatggcatgatggtgatgtttggagggttgctgttgatacccaaacccttgagggtaaaaataatggcggaaaactagcagactttgttccgttgacaaactacaggcttgaacgaaaatatgcaatttttagcaaattagatgcttgctcttttgtagcaaacatttacgatgatgggaacctcgttagtatagtaactgactgctctccgcatgctactcatgtcgcgggcattgctgctgcatttcatccagatgaacctttgctgaatggagttgcacctggagcacaattgatttcgtgtaagattgga

SEQ ID NO: 7383 - DNA, 565 bp, Setaria italica
  Peptide Sequence Number=SeqID_73357
actcattccctgacaatatccgatgtctttatcaacccacgagtacactgcaagaatgtcccacaaccttgccaagtttgcttgactctcatagtacactagtacacgatcagtacgattaacatcaagaccaatctgatgtagagttagcttccattgaataacttcttttgggagtgttgctccacttgtttgctgttcagagcccactgaagaaggccttgcccctctatctgaattagggtcttcgataggttgaccgtcctctgttattacaggcatagtaattacccttccactaccaactgttgtgtccatttctcggcattttgttttcagattctcatactctaaccttcgctgctgtcgcaattggttgcgctgttcagtagtgctttttgggtcatagcagcccagcaaaaattcccaaacttctcctttgatcgttgggtggacgcccccacgttgcactcttttgatcattccagctatgtccaggacaccttcctcattgtggagcagcttccatctctttgggctcagcgtcaggtcaggccggggctta

SEQ ID NO: 7384 - DNA, 336 bp, Setaria italica
  Peptide Sequence Number=SeqID_73358
gatcaagctgctcatttccgggaacatcgtcgcgccggagagccccagcgactggggggccggggggaccggcacgcagtggctccacttccaccaggtccagaacctgaaggtgaccggcggcggcatcatcgacggcagggggcggcagtggtgggcgcggtcgtcgtgccaggagaagaagaattgcaccgcgcagcctgctcccaaggcggttcactttgaggactgtcaagggatcagcgtgctgggcattaccttgcagaacagccagcagcaccacctgacgttcacccggtgctcacacgtcaaggccaattacctgagggtgacctc

SEQ ID NO: 7385 - DNA, 501 bp, Setaria italica
  Peptide Sequence Number=SeqID_73359
catgataactgttgcctttcttattgttctcttcaccttcattaacacttgatattccaaccttcaaaccattaaccgcagacataactgacattgccggtgtgacaacaccatctgctatcaccattgaagtaccaaatagaacaagcatcaaaagcagcttctttaacatagatgaagtctcaagacgctccttgatcttcaaagacctctcaagctccactgaaggcaccttcagattgaaacttgatatgcgggtatcagatggtagttggttaggaagcaggcttgcctttgcatttctgcatattagcgaatacaaagcaaatgttcctccttctccatcatcgtttccccacaaaacaatcagggtatacttcagaaatggtatcagaatgagagtgtatatcacaagtgagagtgctccaagcacatcctcctttgaagtaatagggtatttattaaacattacatccaaggtatacagtgggctggtaccaa

SEQ ID NO: 7386 - DNA, 256 bp, Setaria italica
  Peptide Sequence Number=SeqID_73360
cccagctcaaaattcccctccactactgctccaaaccctaagcttctgcttctaggcgccgcgcgcggcccctcgctccccgccgctcccacagtctactgcggctcggcggcggcggcgctcctcgctcgaccctgcggagcggagatccacgcgggcgtggattggtttcgtgtcgttttttgttgtgcttgtgggcatacacttaaatcctgagcagttatcacaacattttcttcattcccatgagatgtca

SEQ ID NO: 7387 - DNA, 508 bp, Setaria italica
  misc_feature (23)..(23): n is a, c, g, or t
  Peptide Sequence Number=SeqID_73361
cttctgctctaggcgccgcgcgnggccccctccgctccccgcccgctcccaagacggactacggacggacggacggacgactcctcgctcgaccctgcggagcggagatccacgcgggcgtggattggtttcgtgtcgtttttgttgtgcttgtgggcatacacttaaatcctgagcagttatcacaacatttcttcattcccatgagatgtcactgctaagtagattcttctacaagaggccgcctgatggactattggagtttattgacaggatctatgtttttgattcatgcttcagcactgaagttttgcctcagggaatgtacccagtctatttgaatgagattcttacagagttgcatgaagaacatgtagaatcctcattcctggcgattaactttagagatggagataagagaagccagcttgctgatatactgcatgaatacaacattccagtcattgattacccccgtcatttcgaaggctgccctgtccttcctctg

SEQ ID NO: 7388 - DNA, 491 bp, Setaria italica
  Peptide Sequence Number=SeqID_73362
ttagtctagtacgtattaaagtaaagtcttgttaaactaattcttcgtacttgttacagagctagatgaagcctaaacatataggacgaaagcgaccgcaggacagcgagagcagagcactgagctggcacgctcgaccaatcgagcagcggatctcgtctgctaggctccgaaacgacggtggatcgaccagatcaggcgtacccgcccttccagccgccgtggtaggcgttgtccctgcggttattcctgaaagcgcagcatccgatggagtagacgatgatgatgaagacgaggaagacgatgcagacgatggcggtgcgcttccagtcccgcttgacggtggccaccacgccggccttgcacgactggcagtcgtagcagagcgcatcgttgctccaggtgttgtcagtccgggtcccactacgtacgtagtttggtttggttcggttttggttttcttttttggttttccttttagtttttctttt

SEQ ID NO: 7389 - DNA, 1395 bp, Setaria italica
  Peptide Sequence Number=SeqID_73363
atgaagacgaggaagacgatgcagacgatggcggtgcgcttccagtcccgcttgacggtggccaccacgccggccttgcacgactggcagtcgtagcagagcgcatcgttgctccaggtgttgcagtccgggtccgacgacgagttggtggcggtggtcttggtccagtccgtgccgctgacgtaggtgaagccgcagctggtggggggcttgcagcacccagactgcacgagcaacaagaacagcgatgagcctttgaaacagagcagcacatatgcagggctactactcaatactcatgactgggaactttcaacatcacatgacgttgtttaggtaaatactacaagtaaataaaacagtttcagttgtttatgatagtttcaggtggagccgtttcgtgaaacgattgggttacgcgacctaaaagttgagtgcaagtgcaccagagcgttgaaatgaaagcatgtgcgatgaacgaaaattcttccttcaataatgcagcggtcagagcatcgggagcagttcagacttcagagcaggtagtaaaggttgatatggaccgaagatatgtcactataaaataggagtaatccgttgacaatatcaacgctaagcccaatgcatttttagacagaattccaaattgtgtacgtctgatcgagatgcacaaccgtacaagtaaccatcagccgggcctaagataaggttttgcgtttcacaagctaccgtttcttcaaagtcttttggcattactactatcctcccaaagtcacatcgcaattcgcgaccactaaagtatgaatgacacgtgaatgaaaaagaagtgttctttttctgtaagacaaaacgccggctacagatagatagagtttgttttagaatctgtcttggtgatttgtcaaaaaaaaactgagactgaagattaagggaagaaaaatgcatttttcacgtaattaagcaagtacctcgatcggggagaggtcggaacgcatgaagtcggtgaccgactccttcttgtcctgcaggttcttgcagaccttggagccctggaggcagctcctgatcctgttccagttcttgtggttctccacccgcttctgcagccagttggagtagtccccaagcctgtactccttgtaccccggcccgacacggcctccccggcgccccggttggtgacgacgaaggcgaagacggtgaagcagaagagggcgacgatgaggacgaacatagcgaggaggtagacccagagcagccaggtgacgcggcagcaggcgccgacgagccccgcgatggagacgacgaggaggaagacccccagcgcgattacgggcgccgagaggtagcgctcgcactcggtgccgtcggcgcggtggcccagccaaatgcccg

SEQ ID NO: 7390 - DNA, 667 bp, Setaria italica
  Peptide Sequence Number=SeqID_73364
ttttttttttaacgaaataataagaagacaagtaataatacaaaaatcaacgaacagcatgtacaaaacctactgctgaccagtgatcagatcataacaaagtgactagcagacgataagaagctgtaacaatctcgactgtacagagctagatgaagcctaaacatataggacgaaagcgaccgcaggacagcgagagcagagcactgagctggcacgctcgaccaatcgagcagcggatctcgtctgctaggctccgaaacgacggtggatcgaccagatcaggcgtacccgcccttccagccgccgtggtaggcgttgtccctgcggttattcctgaaagcgcagcatccgatggagtagacgatgatgatgaagacgaggaagacgatgcagacgatggcggtgcgcttccagtcccgcttgacggtggccaccacgccggccttgcacgactggcagtcgtagcagagcgcatcgttgctccaggtgttgcagtccgggtccgacgacgagttggtggcggtggtcttggtccagtccgtgccgctgacgtaggtgaagccgcagctggtggggggcttgcagcacccagactcgatcggggagaggtcggaacgcatgaagtcggtgaccgacttcatgcgttccgacctctccccgatcg

SEQ ID NO: 7391 - DNA, 1226 bp, Setaria italica
  Peptide Sequence Number=SeqID_73365
gttttttttttttttttttttttttttagaataaaggcatccacatacgaatatagagcagtatatcaaaatcaacgaacagcatgtacaaaacctactgctgaccagtgatcagatcataacaaagtgactagcagacgataagaagctgtaacaatctcgactgtacagagctagatgaagcctaaacatataggacgaaagcgaccgcaggacagcgagagcagagcactgagctggcacgctcgaccaatcgagcagcggatctcgtctgctaggctccgaaacgacggtggatcgaccagatcaggcgtacccgcccttccagccgccgtggtaggcgttgtccctgcggttattcctgaaagcgcagcatccgatggagtagacgatgatgatgaagacgaggaagacgatgcagacgatggcggtgcgcttccagtcccgcttgacggtggccaccacgccggccttgcacgactggcagtcgtagcagagcgcatcgttgctccaggtgttgcagtccgggtccgacgacgagttggtggcggtggtcttggtccagtccgtgccgctgacgtaggtgaagccgcagctggtggggggcttgcagcacccagactcgatcggggagaggtcggaacgcatgaagtcggtgaccgactccttcttgtcctgcaggttcttgcagaccttggagccctggaggcagctcctgatcctgttccagttcttgtggttctccacccgcttctgcagccagttggagtagtccccaagcctgtactccttgtacccccggcccgacacggcctccccggcgccccggttggtgacgacgaaggcgaagacggtgaagcagaagagggcgacgatgaggacgaacatagcgaggaggtagacccagagcagccaggtgacgcggcagcaggcgccgacgagccccgcgatggagacgacgaggaggaagacccccagcgcgattacgggcgccgagaggtagcgctcgcactcggtgccgtcggcgcggtggcccagccaaatgcccgcgcccaggatcgggatggagagaaggaaggtcaccgcgttcaggatcccgatcaggttgttgctcagccggaacgccatggttgagactgggaggcggtggtttgggggatcggaggatatcgttctggggctcggtggtttgtggggttttcgggggatgggcacggtgggggtga

SEQ ID NO: 7392 - DNA, 352 bp, Setaria italica
  misc_feature (313)..(313): n is a, c, g, or t
  misc_feature (332)..(332): n is a, c, g, or t
  Peptide Sequence Number=SeqID_73366
gatttgatgatcagaatatatacattaaatcccagttccacctttcttgatgaaatcatctaccaactcacatacataactgaactccaagcgtttcaaaagcacaagagatcacaatgccaaatgttgtgttgccgaggggataacctctattttcatcttatccacaagctcaactgcctctttggccatgccgttcttcgagaggcaatacagcaaggtgtgataagcattttgatgatgtagagcaggatgactctcaagccacttactcaatatcctgtatgccttgtctgtacccagggaacaaacncaccatgaatcagtgttcngtacgtggcctctgtcgttg

SEQ ID NO: 7393 - DNA, 706 bp, Setaria italica
  Peptide Sequence Number=SeqID_73367
tgctggagggcgagggggttggtggtgcgttgccagacgggagcggccgctgttctcaagaatgaggaggccacggcggcggcggcgcacaaggcccgcacgggcttcaccgtcgtcatgaagttcggcggctcctctctcgcgtcggccgagcggatgagggaggtggctgacctcatcctctccttcccggaggagacgccggtcattgtcctatccgccatggggaaaaccacaaataacctcctgctggccggagagaaggcggtgagctgcggtgccccgaaggcgtctgaaattcctgagctcgccgtcatcaaggacctgcatcataggacgattgatgagcttgggttagataggtcggttgtttcaggcttattggatgaattggagcagcttcttaagggagttgctatgatgaaagagctgactcttaggacgagagattaccttgtttcctttggtgaatgtatgtccacaagaatatttgctgcatatttaaataaacttgggaaaaaggcacgccagtacgatgcatttgatattggctttataaccactgatgatttcacaaaaggtatgttgctgttgctctactctgcttggtaacataattaagcgtcaatgtaactatacaaatacaaagggtcctccttttttatgtgcaaaagttttccctgcgcagtttgaataataattttag

SEQ ID NO: 7394 - DNA, 1126 bp, Setaria italica
  Peptide Sequence Number=SeqID_73368
aaagaggctacatggagattggatggatgaccctgccatccctatagtcactggttttcttgggaaggcagggtggtagtgacttgactgctacaactattggcaaagccttgggattaagagaaatccaggtttggaaggatgtagatggcgtgttgacgtgtgatcctaatatttatgcaaatgcgatacccgtgccctacttgacttttgatgaggccgctgaacttgcctactttggcgcacaggttttgcatcctcaatcaatgcgacctgctagggatggtgatataccagttagagttaagaactcatacaatcgtcatgcacctggtactgtcatcactaaagccagagatatgagcaaggtctgttgtgtacttgttagtagattatgattaactccatgtgtaatatcttgttactgctttatgtaatttcttgaaagagccagagctagcttgagtacatcttgatcataaattgttttttcagagtattttaaccagcattgtgttgaaatcaaatgttaccatgcttgatatagtgagcacgcgcatgcttggccagtatggttttctagctaaggtcttttcgatatttgaagatttgggcatctctgttgattgcgtggctaccagtgaagtcagcatatctttgaccctggatccatcgaaactatggagttgtgaattggttcagcaaaagattgaacttgatgacgtcattgaagagcttgagaagatagcagttgttcatctgctgcagaacaggtcaataatatctttaattggaaatgtgcagaggtcgtctttgattcttgaaaaggcatttaacgttctacgaagaaacggcgtcaatgtccagatgatctcacaaggggcatccaaggtgaatatttccttggtagtccatgacagtgaggcaaaacagtgtgtccaagccctccactctgcattcttcgagaacggcttctcctcggaagtcgataaaatggatgttctgcacaatgacttcacatcacattccaagggaaccgttcacacccattagctgagattttaatagtgtcccccgttttgctactgtagggtcatttgtaggttttcatataagtatgattaaa

SEQ ID NO: 7395 - DNA, 1633 bp, Setaria italica
  misc_feature (1623)..(1633): n is a, c, g, or t
  Peptide Sequence Number=SeqID_73369
ttaattagtaggttattgtggcaactcatggtttttcttttcccctctgtctaacaaaactcgcgacagtgcccttcctaatagttcatcttcccattaaagtacctttcagcagcactatcaaacaatatgccttcatcaatgttcatttcaacaggcttattggatgaattggagcagcttcttaagggagttgctatgatgaaagagctgactcttaggacgagagattaccttgtttcctttggtgaatgtatgtccacaagaatatttgctgcatatttaaataaacttgggaaaaggcacgccagtacgatgcatttgatattggctttataaccactgatgatttcacaaatgcggatattcttgaagtcacttatcctgctgtggcaaagaggctacatggagattggatggatgaccctgccatccctatagtcactggttttcttgggaagggatgtaaatcatgtgctgttactactttaggcaggggtggtagtgacttgactgctacaactattggcaaagccttgggattaagagaaatccaggtttggaaggatgtagatggcgtgttgacgtgtgatcctaatatttatgcaaatgcgatacccgtgccctacttgacttttgatgaggccgctgaacttgcctactttggcgcacaggttttgcatcctcaatcaatgcgacctgctagggatggtgatataccagttagagttaagaactcatacaatcgtcatgcacctggtactgtcatcactaaagccagagatatgagcaagagtattttaaccagcattgtgttgaaatcaaatgttaccatgcttgatatagtgagcacacggatgctcggccagtatggttttctagcaaaggtcttctcaatatttgaagatttgggtatctccgttgattgtgtggctactagtgaagtcagcatatcgttgacactagacccatcaaaactatggagtcgtgagttgatccagcaggaacttgatcatgttgttgaagaacttgaaaaatttgcagttgttcatctgctccagcgtagatcaatcatctccctggtaggaaatgtacagaggtcgtctttgattcttgaaaaggcattcaatgttctgcgaagacagggtgttaacgtccagatgatctcacaaggggcatccaaggtgaacatttccttagtagtcaacgacagcgaagcaaaacagtgtgtgcaagccctccattcggcattctttgagaatggcttcatgtctgaagtcgagggagctgatgttccccagaacggcgcctgtctgaactcaaatggcgctatatatggaaactagtcgactctgcaattgcattctcctcaattggtgtaccattgataggttatctggtgattcgtagcaatttatttaggtcacccaaacgaattccttgctgttgtaagagcttaccaagaacagtttgcatggtatgccattgtttaccatgcgatcgggcgctaccgagtagtaaccattaagcatccccaagcttatatgtatcagagagttgtattgcatatgaatgttattagagaattatattgcaccctttgggtggtgatgaaaaaaaaannnnnnnnnnn

SEQ ID NO: 7396 - DNA, 402 bp, Setaria italica
  Peptide Sequence Number=SeqID_73370
gattacgatttctatcctgaggagaggatcatcagatgcgttgtgtgcaggatttgggcgatgatagtcgattcattgaattctataatctcgtctttatgcaatacaccaaaaaaggaatgatggatcgctagaaccattgaaacaaaagaacatcgacacaggaatgggccttgagcgtatggcacgtattcttcaaaaggttccaaacaactatgagacagacttgattttcccaattatagaaaaggcagctagcttggcgttggtgtcctatgctaaagctgatgatgctgtgaagacaaatcttaaaataattggcgatcacatgagagcggttgtttatctcatatcagatggggttcttccctcgaatattgggagagggtatgttgttcgaag

SEQ ID NO: 7397 - DNA, 738 bp, Setaria italica
  misc_feature (60)..(60): n is a, c, g, or t
  Peptide Sequence Number=SeqID_73371
ccgacgatctcgttgtgatcttggcgttgttgccggggtagccgacgacgtctctgccgnttccccctgctggtcgccatctgaacggaagacggggatcgccggacacggccgtggcgcacaggtgaggccgagagctgcttccgatggaattggcgaagtctgcctcccttcctgtctctgccctccgctcaccggtggcggcagcagcgccggcgtcagtgaaaggccaccaccgcctctcgctcctcagcaacgcggaacctgcaagtgggtgcgtctgatgcggtgcagtcgacggcggtgtgacgtccttcctggagatcatggcttctctatggctcgacgcccattcatgattcctggagtttctgaaatcgaatgtttgcggagtaggccgatgctggagaagtccatagagccggctgagctccggggcgctgcagttcctcgacgcgaagaagctgccgtgctccagcttggaagaggagagcacggccgctctttggaagaatgacatttcttggaagcgccgatcgcctctcatgaaatggaaatccactggggaatacactgaggaaatagctcccctcgggcgaccatcttggtctagcttcttgcttctgtacatctgcaggtggcttttttacatgagcaatgctgagtcccctaacattcatcatctgaagtaccagcttagggggttgctctctcttgcccaccaagcctctcgacggc

SEQ ID NO: 7398 - DNA, 233 bp, Setaria italica
  Peptide Sequence Number=SeqID_73372
cctccatctcatcactctcatctctctcacgcccagcttcgttctcaatctcgttggcagagctcagttgaaagttaaaactagctcaagtttgcctagtcgggtccggagataccaattcaattcttggggctcttgccttggtatgcaggaccagctgatctgcagcggctgcaagcgtgtccttgagtaccggagaggagccaccggcgtctgctgtccaggctgcaact

SEQ ID NO: 7399 - DNA, 452 bp, Setaria italica
  Peptide Sequence Number=SeqID_73373
gaaggaatagaaggtaggactagactgcggagggggatgagaaagatcaggaagatggggagaattccacgaaagcgaacaaacccaagaagaaagccgagaagaggcagaggcagccccgcgtcgccttcctcaccaagagcgaggtggatcaccttgaggacggctaccggtggcgcaaatacggccagaaggcggttaagaacagcccttacccaaggagctactaccggtgcacgacgcccaagtgcggcgtgaagaagcgcgtggagcggtcgtaccaggacccgtcgacggtgatcacgacgtacgaggggcagcacacgcaccacagccccgccagcctccgcgccggcggcgcccacctccttcatgtccggcgcgcacggtctgccgccgcaccttatgccgtccgccggcggcttccgcccggacctgatgagcatgatgca

SEQ ID NO: 7400 - DNA, 1492 bp, Setaria italica
  Peptide Sequence Number=SeqID_73374
tgtcgggtaaggtcggcaagaagaataccggcgcacgcctttggatgcggctggaccgatggggctcttccgaggtcgtcgagctcgacaaggcctccatcatccgccgcgtcggcctgccgccgcgggacctccgcatccttggccctgtcttctcccactcctcaagcatcctcgctagggagaaggcgatggtaatcaacctcgaattcatcaaggcgatagttactgccgaggaggtgctcctgttggaccctctcgcgcacgaggtgctccctttcgttgaccaattgaggcagcatctccctcagaagagcctggtgggtgggaatggtgaatgtgcccctgatggcaatggggaaaagcaggatggctcgcctggaggtcaggtgccctgtcttaatgaggcgaccggggcagagcacgagctgccattcgagttccaggtgctagaggtcgcactcgagattgtgtgctcgtcgctggacttgagcgtgtctgaacttgagaggcatgctactccggtgctagacgagctgaccaagaatgtgagcacgaggaaccttgagcgagtgcggagcctcaagagtcttcttacccgtttacttgcccgtgtgcagaaggtgagggatgaaatagaacatcttctggatgataatgaagacatggaacatctgtatctaacaaggaagcaagtacaaaaccagcaggttgaggctataatgtcatctgctgcttccaacagcattgttcctgccggaacaggtgtggccaggctgaactctagctttcggcgaagtgtgagcattgctaccagcatgcatttggataatgatgtggaagatctagagatgttgcttgaggcatatttcatgcagctggatggaattcgcaacagaattttgtcggtccgggagtatattgatgacacggaagactatgtcaacattcaactagacaaccagcgtaatgaactcattcagctccagcttacactgaccattgcatcctttggcatagctgcaaacacatacatagttggggctttcgcaatgaacatcccgagcgctctgtacaacatcaccgacggcagcctcttctggccatttgttgggggcacctcatcgggctgcttcgtaatcgtcatcctcttgttagggtacgcctggtggaagaagttgctgggtccttgaacgcaaaggaaaaccatggaagagaaccttgtcattgttgcagaaaggaagcaggcgttctaaggatagaagaatcaaggggatagcaagaaaaccgtatataacgtctcacgagtagtcaataagatgagcatactgtaatttctcatcggcataaactacacgacgagatgatgtaatgatcgatacgctttcatgttaacatcagcagatgtagctcttgctggcaatgaaaaaaaaatgttagccatgaagctaatagtatgtgcaaaggtttgctttgtatacagatttattcc

SEQ ID NO: 7401 - DNA, 314 bp, Setaria italica
  Peptide Sequence Number=SeqID_73375
tttcagagacttgttctccgaagttgaagttgagaagaagaaattgcttgagcagtacgaacatcataagaagatggagagcaccatgttattcagaacttgcaaaaacgttctctgagaagataacacatgcagaactatctgtcagaaggatgaagaaggatgacaagtcttttatcatctttcgcaagtctattggctcatttcttgagtgtggctccgatgatgattttgacattgatgacgagtgaagcctctacacctacaatagacagtccatgaaacggaatttcttcattacttcttggcctttg

SEQ ID NO: 7402 - DNA, 1261 bp, Setaria italica
  Peptide Sequence Number=SeqID_73376
tatataaggaaaggtactgtcttcatcacctaaattaagctccaatgtcttcaagccaatgcccgagtggtttcttcagaatcctgtagatattccacttgagcagtgtccacctatgcatggtttgaaaggttgggatgacatctccaggatcatagaaaggcatgagaaaggcaagcagcacgagcaacatcacgcatgggcattagggtatgtatatgataccagatgtcctgcatgtacaagcatgggttacaatttcaaagttaagaccaaacggaatgtcaacattaaagccaaaatggaatattgtctaccccatgcatggtttcacaaggtgcactgtattacataggtatatgatgcaatggaatgcaacggtggtcgataaattgagcagagcattgcatagagaagtttttcccaaatatccacttctggactagcaaaagtaaaatttcatcccacaaacaagaggaaaatggaatttaatgatgtttgccatgctttatgccaattggccaacataaaatgtgtccatcttattaggttgtaattgtaccttctaaggaacctagaagcagtcttaaacttcatgtcaagtgcatcaatgtagatgctgctgacaataattttggcatactctgtgctcaaagatatatttaatacgtattcacagggagaagatgaatgcgattttgttatgtttaggaacgagaaatatataactaagattctgatggttctcttgctataactgtccgctctgcaaagcctggtgatatcacagttgaatctctcaataactagcaaagaggacagccaagaactgggggatcctaggctgttctgattatattatatagtttatcaaaaacagcatgtagctctggatggcaggacatacgcaggagaagtgagaaaatagtggaatgtgtattgatccgagaatctcaagagaatatcgatccgacaattttggagaatttgaggttatttaaccttcacaaatagaaaagagcgtatggatagtaatataaatgcggtagtgatgttaccagtctttgcacagagaagttagagcaaagcaaagctaccaattcactaggagcaggactgtgagcaaatgcagcactgaaggatcttatgtctgttacaaataatatccagctagcactagcagagtcctatgaattagtttagttagagcagtcacagtaaatgcgtatagataatacctaaggaagccatgggatttaaa

SEQ ID NO: 7403 - DNA, 289 bp, Setaria italica
  Peptide Sequence Number=SeqID_73377
cgcgggacagggccgccgccctccctctccctctctccaccgggtaccgctctctgcgccggatcatcctaaaggcttggcgacaaagtttccctttctgctgactacgcttgcagttgatgtaaagatgctgagaaatattttgagccagtcatggaggaatggagcacatgtgctgcaggaaggaaatccaggaccggcactgtatacatgctggaggcgatttcacagtggacagatcttaagctcttccaggagcttctttggcgtggaggactttgtggatgaa

SEQ ID NO: 7404 - DNA, 431 bp, Setaria italica
  Peptide Sequence Number=SeqID_73378
catctccaagcgcttcgtctcggcgtccctcacacaccgctcgacatgcagacaggtcgcggtcgccgggacgaattcaaaggacatcaaggcggcgctcaagtcgaggtccgacataccggcctgcctggccgtgggccgtttcctggcagagagggcgaaggaggccgacgcctacacctgcacctacacgccgagggagcgggagaagttcgaggggaagatcagggccgttgtccaatcgctgatcgataatgggatcaatgtgaagctctaccttgattgagcttttgttgtctcttctggtactcgcaaaatgagcagcctgtcgcgtcgtgttgtgctgtcgcgaccctgttgtgatacgccactctgttctggtgccgatgcgttgagttgttaacatgatgctgttgcgttgtccttggact

SEQ ID NO: 7405 - DNA, 1000 bp, Setaria italica
  misc_feature (987)..(1000): n is a, c, g, or t
  Peptide Sequence Number=SeqID_73379
taatcactacgttgtccctcaacaccacctgctaccgtctttcttttcgtgctcagcctcctccaggctccattatcatgtgcatccgatctgttattgcctgtttgtttgacgcacgtccatagatacaagcatctgacccattttcctgcgtctgattatccttgtgtaggttaattgcctaggcaatggttgatttgcctgctctgctctatttgggaataatcagataggaaccaggagagagaggcttggctacaaagttccctttctgctgaccactgcttgtggttgagggaaagatgctgaggaatattttgagccagtcatggaggaatggagcacatgtgctgcaggaaggaaatccagcaccagcactatatacatgctggaggcaatttcacagtggacagatgttaagctcttccaggagcttctttggcgtggaggactttgtggatgaagacaacagtagaccctacacatacaagaaggaaaagagatcgaagaacccacacaagcacatttctttcaagcagcgcaccatcgcctacatggagcccttcacgctggacgtcttcatatccaagcgcttcgtctcggcgtccctcacgcaccgctcgacgtgcaggcaggtcgcggtcgccgggaccaattcgaaggacatcaaggcggcgctcaagtcgaggtccgacataccggcctgcctggccgtgggccgtttcctggctgagagggcgaaggaggccgacgtctacacctgcacgtacacgccgagggagcgggacaagttcgaggggaagatcagggccgttgtccagtcgctgatcgataatgggatcaatgtgaagctataccttgactgaccttttgttgtacggatgattactgttctggtacttgcgaaatgagcagcctgtcgcgtcgtgttctgacttcatggctgcgatcagggccctgtgatatgccactctgttgcggtgccgnnnnnnnnnnnnnn

SEQ ID NO: 7406 - DNA, 284 bp, Setaria italica
  Peptide Sequence Number=SeqID_73380
tttttgtttatgtttgtaacacattgtctttagcaaacacatgactatcatgctctaagtaatttagctttgaatttcatttcttttgttcactacgaaacacacattagacaataggtgaacgatgtggcatcaaggattaggtagcttataggttcaaatctgctcctaatctaaacaaaagaattgttttacacaggttaaaaatatgaaactttttgttaaaaaaaattgtttgttgacagcttatgctaatatgctattaaccaccttagtttaattaa

SEQ ID NO: 7407 - DNA, 1141 bp, Setaria italica
  Peptide Sequence Number=SeqID_73381
cgagagcatttataacacgacccaagtaagcctcgctcacgggtatctgagcaattcttcctgttgcttttacaaaacttccctcttgtatcatcaacccatcgcccattaatacaattccaacatttttggattccaaattcagagcaatacctctcgtcccttccgcaaattcgactaattcacctgacattatttcaccaagacctataatacgagcaatcccatcccccacttgaactacgcgaccgatattctcaatccctactttcctattatattgttcaatacgttcgcggagaattttattaatttcgtcgactcgaagggttgccattagtgtttcttgaatcttttttttttcggaagcaaggggaaaaataatgcctaaattctaaacgaaagtagaagttcaaaacctaataaatttcattatctcttccattctatggccccgagaatgccaatattagcacgaatcgtacggaaatgtaactcggtattcaaacaactattcagagttcctagagctccttgtacggcttgttggaaaacccgttgtcgaacctgattcatcgccctttgtttttcaaaataaagggtttcgtttttagacttttctaattgttccaaactaatagaagtagcattaatcaaatttgctttttctcgttctatttcagagtatccattcattcgatactcatctgcttctagttcgactttctgtaatcgaatccgagctttttcgagttgttcaagggtccctctacgcaattcttccgaatttcgaatagtacttaagatcctctgttttcgattatctaataaatcttttaatgaaagtagattatcttgctattaagtttacaatttttatgatctcttcccgaaccaaacatgaatctttcgattcatttggctctcccgctcctttttttctcttttgctatgtattatggctatttccatatcttttttttatgtaatgagcctatcctctcttttcttgtttgtatttctatatacccaaacttatataagactagatgaatattaagataagaggattcttccaactagataaaaatctatcatggtcagcaaagttgtttccttatattttgttgttttgtcttct

SEQ ID NO: 7408 - DNA, 206 bp, Setaria italica
  Peptide Sequence Number=SeqID_73382
attttccagcgcttgtttgacactcttcaccattttctctgcatcttcattgaaggtgggctcatgcttctttgttcatcgtgatgctcatggccatgatcatgatcatgatgagccccatgtcccttttcaactaggtcagacaagtactctgtaccaatgatatggccatacctatccaagcgaagcttccaaatatttgtatg

SEQ ID NO: 7409 - DNA, 253 bp, Setaria italica
  misc_feature (5)..(5): n is a, c, g, or t
  Peptide Sequence Number=SeqID_73383
taagntaaaactgcagctcatgcacgaacaatgtaaacattataattagcccaagaattgtcacaatagcaccggagtaagtcttcttcaacaagtgctcctcggcgtgcggaaacgcattgaggctctttagggacggtatcctcgccatcttcagctgttggatgcttgtcgccggcgaagcgccggacgaagatctggcaaagggtggccgctcgccctgtcgtcgccggctcgcgggtcgcggctagga

SEQ ID NO: 7410 - DNA, 1024 bp, Setaria italica
  Peptide Sequence Number=SeqID_73384
ccaccgagaaccgcacatagacgagttaggaaatgaaggaagttccgtctttcctctttgatggtgaccgtaattggcgagagatcataaaggaagtaaacagctggccaggccctgtcagttgggcgaatgggaagaaaatactccgtgacagaaaattgatttgttagcaatactttctttgagagatatctatactcagttggaacaacctttatatagtatttgaaagttccacttgtgtcatgaagtacccttgaggtttcatccagtggaaaaattggacataaatcgttgtagtcctgatctgccatcatttatggaaagaaataagaaacctaatttctatcataatgggtgtacacagcgtatccatgcacttaaacagcggactaaaggaacaggtgcatccctgaaacaaaatccaaagcaggctactgcattgaatagctgttcaaagaccagaaagaataatgctgctaaaaacccatgccacacaaggtccatcatggaagacatacttcaaacaaaatttctgggcaagtacaagggcaagagaggcagaagaagcaggcccagtggtaagcatgataattccagtgagcatggggaagcagaagataagttatctgatacatctgatggaaatgggtgtttgctgctaattcaggctcttgaacaggaactttcaccaccacagatgtctgctggacagggtgtggatgccttaactgacatgaaggaagacttaaaaataagcaggagggatgctggcttaaatcaggggactgccttccctgaactgcttgatgtccttgcagtcaacaacatgcaagtgaaaaagagaaaaagaacaaagactatcagggttttggaagatgaactttccgattccaaaagtgttcctggatctgctaacaccctgcttaggacaaccagcgagaaaagcgtgtctgataatgaattgatctctgaggtggcagagaatcgctcagatacatctgaccaaaaacatggtcctcct

SEQ ID NO: 7411 - DNA, 634 bp, Setaria italica
  Peptide Sequence Number=SeqID_73385
tagtccatggacttttagcacgcaattgatgataaaaaaaaactaacgacatattttacgttaaccatgcatggagcaaataaacatgtaaaccaacatggcttgaccagttagcttggacaagatgatctataactggcttgactagcaacaagtaaccacggtttcccttcgtctacaatggaattcacagctaccgcagcacgcttctggtctttgagttggtgacagactcaataagccggtacatccatcggtcaagcattcctgtaaaacaaaagttggcaagagtgtttaacaagcaacgaatcgtagcaacaatgaactattgatgttttctttttccgagttgtgttgttagtaccaccttgcatgcaactaatattatcagtgaatccaaatctggaacaatgcatgactcgcataagataaaacataaaatcatcgcgaaggttaaacctgtcatggcaaatgtgccaccgagaaccgcacatagacgagttaggaaatgaaggaagttccgtctttcctctttgatggtgaccgtaattggcgagagatcataaaggaagtaaacagctggccaggccctgtcagttaacaagcaatgaatcacaacaatgaactattgctg

SEQ ID NO: 7412 - DNA, 286 bp, Setaria italica
  Peptide Sequence Number=SeqID_73386
aacggtgtaggtggtaagataaaactgcagctcatgcacgaacagtgtaaacattataattagcccaagaatggtcacgatagcgccagagtaagtcttcttcaacaagtgctcctccgcgtgcggaaacgcattgaggctcttcagtgacggtatcctcgccatctttcagctggtggatgctcgtcgccggcggagggcccgacgaaggcctggccaagggcggcgttgggggcgacgggccccgccaggagaaaggccgggagagccggagaagggggagagg

SEQ ID NO: 7413 - DNA, 515 bp, Setaria italica
  Peptide Sequence Number=SeqID_73387
cctatttaagtatttcacacatcacaattgagctttttttagcagcttagacttttatcttatgaaccttataattaaagaaagtatgcatacttcagaaccaaaatggataaagggtagaaacgtcacaaggtatctacaattttagattactgaccttttcagcgacaaaaatgtttaaaccatgcactgagatatggaagttaccagcaaccctctgcacatctaacatcccatagactcgacaaccttcaccattttccagtgcttgtttgacactcttaaccattttctctgcatcttcattgaaggtgggctcatgcttcttttgttcatcgtgatgctcatggccatgatcatgatcatgcttctaatgagcaaattatgaagaactattctaaccaaagcatattggtcaatcagatggaacattcaaactaaatcatgcccaacaatagatgggatattctaactcaaacatctttggtcaatcagtttagtcatcattgttgtat

SEQ ID NO: 7414 - DNA, 1705 bp, Setaria italica
  Peptide Sequence Number=SeqID_73388
tttttttttttttttgaaacaagatgttcgtattgattttcgcaataacaaaaaacttggattatactggagccatgtttttcttttcttctacatgattacaaaccacatgcttgttgtcgttggtagttctaagatatgacaaaactgtagtcggtgcacttgagcacgcaattgatgataaaaactaacaacatattaagagttaaccatgcatggagcaaatgaaacatctaaaccaacatggcttgatcagttagcgtggacaagatgatctataactgacttgactagccacaggtaaccacggtttcccttcgtctacaatggaattcacagctaccgcagcacgcttctggtctttgagttggtgacagactcaataagccggtacatccatcggtcaagcattcctgtcatggcaaatgtgccgccgagaaccgcacatagacgagttaggaaatgaaggaagttccgtctttcctctttgatggtgaccgtaattggcgagagatcataaaggaagtaaacagctggccaggccctgtcagttgggcgaatgggaagaaaatactccgtgacagaaaactgatttgttggcaatactttctttgagagatatctatactcagttggaacaaccttgatatagtacttgaaagttccacttgtgtcatgaagtatcctcgtggtttcatccagtggattatgaattcctggatacttagggccaaaggacagatcgtgaataacatgactaacattcacatggcttgacccttcaaaaatcttttcagcgacaaaaatgtttaaaccatgcactgagatatggaagttaccagcaaccctctgcacatctaacatcccatagactcgacaaccttcaccattttccagtgcttgtttgacactcttaaccattttctctgcatcttcattgaaggtgtgctcatgcttcttttgttcatcgttatgctcatggccatgatcatgatcatgatgagccccatgttccttttcaactaggtcagacaagtactctgtaccaatgatatggccatacctatccaagcgaagcttccatatatttgtatgcaaatcaacttcatgtttcccagacatgtcaattgcatcgacactcaatacttcgcatggcaaagaaggaaatgacatatttatatggattggaagagtttctcctcgcttcagatctacagacatctggtgaacggtgtaggtggtaagataaaactgcagctcatgcacgaacagtgtaaacattataattagcccaagaatggtcacgatagcgccagagtaagtcttcttcaacaagtgctcctcggcgtgcggaaacgcattgaggctctttagggacggtatcctcgccatcttcagctgttggatgcttcgttcgtccggtcggtagggtcccgtacgtaaccggttccttaagggttcggttcgttttggttcgttatctgtatgaaaattacaaatattagtaaattatattaaaagcccagtagaaaaaaatgtactaataaaggcaatggaagtacaaaattgcagaacagccctctgttaatgggtaaggcaagaaagaaaagtttgctcgacaaaaacagtgatttctttcattaattggaaactactcatatccatagaagttaaccaaacttgtggggaaaaaacaacgaattct

SEQ ID NO: 7415 - DNA, 473 bp, Setaria italica
  Peptide Sequence Number=SeqID_73389
gagtgtctggatggtgctcagcaattcttgaagccagatgggatttccattccttcttcgtactggacctttttcttatagatatctttccttaaattcctgatgtttaaaatatatttgatatcatttgattgtttgctgatgatgctgtgcagatacaccagtttcatccaaccaataacagcatcaaaattgcacaacgatatcaaagcacacaaagatattgctcattttgaaactgcatatgttgtcaaactacaccgcatagcgaatcttgcacctccacaacaggtttttacttcacccatccaaatttctcaccagacgccaacaatcgaaggtataccaagctgcaatttgaaatgctaccagatacgggatcatgccttgtgcacggatttgctggatatttcgactctgttctatacaaggatgttcatctcggaatcgagccaaacactgctactccaaac

SEQ ID NO: 7416 - DNA, 1996 bp, Setaria italica
  Peptide Sequence Number=SeqID_73390
ctgcaggcgtgcgttcttcctgcccccaggagaccttcttgtgccaattatgctagagctgtgaatcaaattttgcaaggcctgaccaacatgcatgtaatgccctcctcacccactcctaattctggtacttttacatatgttaaacatttgcttatatttgatttttttttcttctgcttctttctcaagttgtggcttaggttacctctggagaagtctgagccaatggatgatgatcttgataaagtaaagaataacagccaaatgagtgaaaaagtagactcgtgggaattgtggaattcattcagattgctatgtgatcacagtagccaactatgtgtggcacttgatattttgagcacactgccatcaataaactcattagggcggtggtttggggagcctgtcagggctgctattcttcaaacaaatgcttttctaacaaatgcaaaaggatatccttgtttgtcaaagcggcatcagaggctactaactgcattttttaaccattctgttcaggtaataatctctgggagatcaaatcacaatgtttccccagtgtctgaaggagtgctttctggtgatgagaactacattgaagaagctcctgttcgacatgcattaagtccatacctggactacgttgcatacctatataggaggatggatccgcttcctgagcaggagcgctttgagatcaattacagggattttttgcagtctcctctccagcccctgatggataatttggaagctcagacttacgagacatttgagaaggatgtagtgaagtatagccagtatcaaagagcagtcgctaaggccttggttgatagggtcccagatgatgcagtctccacaactaggacggtgctgatggttgttggagcaggccgagggcctctagtacgagcatcattgcaggctgccgaagaaactggtcgcaagttaaaagtatatgctgtcgaaaaaaatcctaatgctgttattactcttcatagtttgatcaaattggaggggtgggaaagcttggttactgtaatttctagtgacatgaggtgctggaatgcccctgaaaaagcagatattttggtcagtgaattgcttgggtcctttggtgacaatgaactatctcctgagtgtctggatggtgctcagcgattcttgaagccagatgggatttccattccttcttcatacaccagtttcatccaaccaataacagcatcaaaattgcacaacgatatcaaagcacacaaagatattgctcattttgaaactgcatatgttgtcaaactacaccgcatagcgaatcttgcacctccacaacaggtttttactttcacccatccaaatttctcaccagacgccaacaatcgaaggtataccaagctgcaatttgaaatgctaccagatacgggatcatgccttgtgcacggatttgctggatatttcgactctgttctatacaaggatgttcatctcggaatcgagccaaacactgctactccaaacatgtttagctggttcccgatcttcttcccgttgagaaagcccatctatgtgccggacgggtctcctatagaagtgcacttctggcggtgctgtgctcccacaaaggtgtggtacgagtgggctgtgacaacaccgtctccgtcgccaatccataacagcaatggccggtcatattgggttggtctatagctaagatcgtcgttttgttttgtgataagagggaaaaaaaaaggaatgtagggtttagttctatatgagtggagttttggtggttcctccctggacgcagtgccagggagccctggaacctgttgtatctcgaaggggtagtttgactcccaacgtcgtgtacttaatttttgaattttgatagcataggcgtctgactttaaaattttggcaatatttcttatcatgtcaatttcggaattgcttacgttccttttcgatcaatcaatctatgtgggtcgttggcttt

SEQ ID NO: 7417 - DNA, 410 bp, Setaria italica
  Peptide Sequence Number=SeqID_73391
cacccggggtcggctgccacggcggaggcggcggtcgccgcgctcctggccgacctcgggctggcgcacgtcgcgcacacgcgggtctccccctcaaggctctccggcggcgagcggcggcgcgtgtccatcgggctcgccctcctccgaaaccccggcgtgctcctcctcgacgagccgacctccggcctcgactcctcgtcggcgcacgtggttgtcggctgcctccgcgccgtcgccgccgcccggggcacgacggtggtgctctccatccaccagccgagcgcgcgcctcctctccgccgtggactccctcctcctcctctcccgcggcaccgtcctccaccacggctccctcgcctccctcgacgccacccttccttcttccctacggtcccgtccggcgcagct

SEQ ID NO: 7418 - DNA, 313 bp, Setaria italica
  Peptide Sequence Number=SeqID_73392
ctaatcatgtttggaatcgtattctggaaaatcggctcaaccatcaaggacgagcaagatgtattcaacatactaggagtcgtatacgggtcagcttggttcctgggtttcatgaattgcagtatcctacagccggtggtggcaacggagagagtcgtgctctaccgtgaaaaggcagcaggcatgtactccaccatggcctacgccattgctcaggtaacaacacacttcactgatggatctgtttgttttggccttctaggtaaatcaactgttctgaacgcagaaagcttattgcacgaattatgaaccg

SEQ ID NO: 7419 - DNA, 674 bp, Setaria italica
  Peptide Sequence Number=SeqID_73393
gggatggggggctggggatgcgccccgccatttagaccagcatgatggagcattctgcaaggatgatgagatgcttgatgatgatgatactgattttggctcgagccttggacctattgtctcctgggataggatggcagcagagtgtgaggatagaaagatgctcctgggtgatagcccaaagtgtgacaagtggatgctgaaggatgatgtgggtgactttgatgcgaagagtattcttaactgtggggatgatgactgcgtggaggattccaagatcatcaaaccattgatgcatgatgataacatggtaactgacccaagtttggtaggtattcatgtagaaggattttacactggatcaaaatggtatgattcaccagtatgtttggattccagtgttgatgcaggggatagtagttttaggcatggtggaattgtgtgagagttgtgataacctgatacctgaagggtcttgtaaattctgtatactagctgtatttagctcacaccaatttgatgtagtgcctgtaggtggagcttcagtcaaagtaacctgtcagccctgatatatacaggctgcatttatcaaatcaacttttcattaacttgtacatagtccctgtattgattactggtttgcttcaagataataaagctatggttctgttctt

SEQ ID NO: 7420 - DNA, 716 bp, Setaria italica
  Peptide Sequence Number=SeqID_73394
tttttttttctaagcaatcttctccatctctttattccagcactaccaaaagtgaaatacaggcacacgcacacgtccgctactttgtttatcaacacgaaaagaacgatgcgagcatcagactacaaaggcctaagtgagaccgcaagaagtaagttgtcccgttaattcagtctgcagatcacgtgtgaacctgaacttcagagtgtctcccggatgaccaggttgatgccgaaagatgccgtgcagatgatcagcccaaacacagccaggaagttgagccccccaatcttgagacggttgtccgggacaccggtggcgtatcccttgaagtagaagaacctcgcgaccgtgtagaggacgcccagcccagcggcgatggtcgggtgctgcaggccgccgagcagcagcatgacgaagaacatgggcatcatctccagcgagttctggtgccccctctgcacgcagttgaagagcttggcgtccttgttctccgactcgacggcgtacatggtggggtagaataccttgtactttttgcgggccttgcccacctggaagctcatccagaagttgaggaaggcgtaggccaccagcaccaggacgacgtaaccgtactccttcgtgagctcgatcgccaccgccatggttgcttcctcggttctttcttccttggaaatggaggagtggaggagatcggggaaacagggggttat

SEQ ID NO: 7421 - DNA, 549 bp, Setaria italica
  Peptide Sequence Number=SeqID_73395
ggaaatagttgacttcaaaaatacaaggattatacaacaggccatctcgagatgatcgaaggagaggctccaaatccaaaaagactgagttggataaaacagacgctgatggaagcatgcaaagtaagatggtaacatctgaaaatcatcaagatcactgttgcccttcagataaggaatcagctgtgaccgttcagtcatgataagagactcgttactgatccactgacacgtgacatcagatcagaccaaaaccagattctgccagcacttgcaatcttgatgctctcagtacaggtttgctcttagtagctgtctagctgatgcagggatgcagccaatagtgtgccgtaatttggaacatgccacctccttttgttttcctggtgctgtcaatagttggtgctattcagaatttgattttttttatagcttggggcaaacatgtcatcccactgccatcaattattactctctgtgtaagctttggccatagaacaagggcatttgtatttgtagggaaactggaaactttctgatgttactaaa

SEQ ID NO: 7422 - DNA, 865 bp, Setaria italica
  Peptide Sequence Number=SeqID_73396
atggcatagaattgtccaggtgataaaatggatgctaagcaaagggcaaggaaatacaatgagaacttatgagcaattagtgtgtgcacttgagaagaagaatagagctgaggaagcacataaaatctggcagaagaaaatatcccatgacctccattcagttccttggcgtttctgtcatcttatgctggctatctattatagaaataataggctagaaaggcttgtgaagctcttcaaagaactagaagcatgtggtcgtaaacctccaagcaaagatattatacggaaagttgaagatgcatatgaaatgcttggactactagaagaaaaggaagcgttgcttgaaaaatacaaggatttatacaacaggccatctcgagatgatcgaaggagaggctccaaatccaataagactgagttggataaaatagatgctgatggaagcatgaaaagcaagatggaaacatctgaaaatcatcaagatcactgttgcccttcagataaggaatcagctgtcaccgcttagtcatgagaagagagattcccctggaactctgaaagttaaagaaaaagtatgtgtcaaaggagaatatgggtagttatgataacaagtgaagtggtaagctaaagcaggtggccatatctttgctttcttgatgctttgcctaccttttccccactgtgtgacaaagcaggccatcagaaatcacggaaacatacgatgggaactttgaagcttgcatttttgttgggcccaggccaacctgaagagctttggatatggttaattggttatggggcttttgtctcaaggggacgcacttgatgtacgcctacctctagttttggcttttgaccctga

SEQ ID NO: 7423 - DNA, 773 bp, Setaria italica
  Peptide Sequence Number=SeqID_73397
acaagaataagaagcaatgctactagagatttctcgacttccaaaaatgttgccggaggtcgagtatatcagcaaaaggagttagaaccaactacgcctgcaaaggatactgatataataatcaaacgtatacaaaagagcacaagggagttggaacaagggcctgttggaaaaaattttgtcttcggcagagaaaaggaaatttcttgtcaacactctccttggcctcgaagattcaagagaagttgtttacggcacccttgatgcttgggttgccttcgagcaggattttcctctggcttcactaaagcaagcactttcagctctcgaaaaggagcaacaatggcatagaattgtccaggtgataaaatggatgctaagcaaagggcaaggaaatacaatgagaacatatgagcaactagtgcgtgcacttgagaaggataatagagctgaggaagcacatataatgtggcagacgccatgacctgcattcagttccttggcgattctgccatcatatgttgtctatctactatagaaacaatatgctcgacaggcttgtgaagctcttcgaagaactagaagcctgtggtcgtaaacctcgaagcaagatattatacgaaaagttgaagatgcatacgaaatagcttggactagaaggaatcctttaactttgtaactttctgatgcagttttgtattttatttttattgctatttttatttcatagcatgacatatgaattacttcaccttgccttgtgctgatgactt

SEQ ID NO: 7424 - DNA, 478 bp, Setaria italica
  Peptide Sequence Number=SeqID_73398
agtactaacaacgttcaaaaacttacgagaatacttgggttggctgttttctgtaaagaaataaagaattcttttacaagaatgtgtggatcacggtactagattattatgattcaatttttacgacaatactagttaccagaagttatctgatggtttactataattagttaggaaagatgatttaatttgaatatatctactattttagcggtatgaattacgataatgcatggcttgtgtactggaatctatttggtggattacgatgatacattaacatagagggaaggtttaaatttgaacacagctattttggtgggacatacttcattgaagaacgacttggcttaaacactgtccaataatttagaaggctcatagatacatatgtctacacccagaatttgagaaaatcatttatttggtagcttctctcgttttgttgcagctagttggccagagatattgaaatcag

SEQ ID NO: 7425 - DNA, 597 bp, Setaria italica
  Peptide Sequence Number=SeqID_73399
tcctccgccccgctcccgtccgcgcggcctctggcggcgttgatgggatccccggtgacggtggcggcggtgatggcgcgcctcacggcgcacccgggtgccagcgcgcgggcgtgctgcgagctctcacaggggagtgggaaagatggttgatgttggaggctgcacaacttgatggggaccttgcgtcctagaatagtgtacttgaagctgttgtgtagattccatccttttgaaaggataaaagatgtgtctttggaaagctattctggcatttcatctactgcaaagttagaagacttcacccagcaatgcctttccagcctaagttagaatagactgaaataaattttatgctacacggcatggcgtgtgcccatggacctatcttttctttttgatggtatgtgataccattattaccgtctgctgagattctttgggtgtcaaattttagttgacctgagttaagtgaaagtgttaccacttttgtacccttgcatgaggtctttgcttacttcgcattgtcatttgtagtttctacttacattcatcgttgagggtgcaaatctgtgatctgcattctgtccgacaaaa

SEQ ID NO: 7426 - DNA, 495 bp, Setaria italica
  Peptide Sequence Number=SeqID_73400
ggtaggtgagcattattcaaattgacctaaaactgatcaggttcaaagattgtaactgaagagcatagatcggaaagatctatcagataaatggccaaagttataaacaccaaagacaaagttgatgatgcatcaatatgcagtgtagaaagtaaagtttataagccttttcagccatacaagttgtgtttttttccagtttcttctattttctatcaagtcatataagttagttcaggaacactctttctatgcgcaagacaggagatcagaatgctatggagcactgttaccttttgtgccggcaatgaagcaatgcctacaacaatccagataaaacaaaaacatgtatgagtccaagagtgataccaacatcagaagaaaaaaaagaaacatatgtattagatgaaacattccagtcatgctgccctgtttacatatatttttgcataaccaagaagcaccttttagcaaaaaacaaccatgaactaaagg

SEQ ID NO: 7427 - DNA, 224 bp, Setaria italica
  misc_feature (183)..(183): n is a, c, g, or t
  misc_feature (202)..(202): n is a, c, g, or t
  misc_feature (219)..(219): n is a, c, g, or t
  Peptide Sequence Number=SeqID_73401
gttttgcatcctgcaaaaaggtattctgatgcagctcaggaggaccacaaactgaccatcaggagtaaaatgcaaaccagatcttgctaatgaaatatttcctgcagaagactggtccaaggagggcagtagaagggttgtgtaaccaacaaaacacggtggtgcatcttgctggtctttagngacagtataaacataaacngatctttggtagcctcncagag

SEQ ID NO: 7428 - DNA, 460 bp, Setaria italica
  Peptide Sequence Number=SeqID_73402
cgaccctctccgtcaacaacaccagcacgcgcgcccgggtggagtacgacaacatctacatcgacgtgagcaacagcacggtggcgggaggactgtcgttcagggccgacatttcggcggcggtggccgggccgctgctccagccgaagctcaaggagaccaggatcaacgcgacgctgttctcggccctcaagggagagccattaatggtgcgcgccttcacccgcaacatgaccaacaatgccttcgccgtgacggtcaccgcggtggcaagatttaaggtcggcttcgcgcagacgcggctgtacgacatcaaggtgacatgcgcgccggtcagcttcttccccgccgccgctgaattgagcggcgtaccaccagctcccctgccggttctttgcggctagttaaataattaactggcatgagtgcatcatggacaaggaatcgacgacacgattat

SEQ ID NO: 7429 - DNA, 243 bp, Setaria italica
  Peptide Sequence Number=SeqID_73403
cttccttggaccgtaagtcgtcaataataacaaggcactgtttttcttccagatgcttccaaatcctatggaagatatcttcaccttcaggtggtttcaagtcgtcaactaaatcctgacagaagttcatgatatcgaatggacgggatgcactgactacagcagaactcccaaaacatgctgcaaaatggtcaaagtaggctcggacgagaaaagatttcccaacaccagcaatcccgcaca

SEQ ID NO: 7430 - DNA, 835 bp, Setaria italica
  Peptide Sequence Number=SeqID_73404
ttttttttttttttttgttcccaaaaagatggcaaacttaaattctccaaagaatcgacaaaatacaacgagttatcatcagctgttcaaatttcattctttctagaaggaacactggtaacatgagttaacctacatatatatatccatctgcttcaggttccattaccgagagttctaaactgaacagagtccaaagcatttcacgcgcggccaacttctgcctgtaatcttcagtcctccgccgcgcgcaacatctcttctactttatagacagggtagcagggaacgcctcctcaacctcggtcaacctgctcccagccgtctctgcctcgagcgcgtcgatctcgtagcgcacctcctccatgtgctcgtttatgctggtcacggcctcctgcacgccctgtatggcctccttgagggctgcgtcatattctgcatccgcctcggcatcctcggtgccggcagcctccgtgatctccttgacgtgcacgcacacatgctgggtcacgctgcgtgacctgcagtccgcatggttcaccaggcgctctgaaggccggcccgctttctttaacacctgaatcttcgctgtcaaatgcaacttctctttctcatgtgcttgaacacccttcagtaaatcggcaagatcactacgacaaaaatctggcattgagaggagggaaatcacttcaaggacttgtttcgagcaatcgttgaactccgctgtaatatttccacacagctgttgataagctaattcacctccattagccatatattcagaaacccctccgtagcgtggagtaggcctcggcgcggcgctgctgcacggcga

SEQ ID NO: 7431 - DNA, 313 bp, Setaria italica
  Peptide Sequence Number=SeqID_73405
cagcgcaccacggcgcctacaagctcccgccacgccgccgccgttggcggcggcggcggcgtctgccgtcgccctggctgctacgccggcacggacgccgcgctctgcgacgacctgctgcaggaggtgttccgcctcctgccgcccgccgccgcgccggccgtgtccctcgtctcccggcgctggctctcgctcctcgagggccctccacatcgtccctgaccctccgcctgccggcctccccggatgccgcgccagcggcggggacggcgaccctcgccgccctgctgtcccactacccgttcctctccgc

SEQ ID NO: 7432 - DNA, 262 bp, Setaria italica
  Peptide Sequence Number=SeqID_73406
ggcccctgcctgaccacggcgtccgcggggtatctgaatcccgcgtactccttgggcacggcgtagcctttgggcatcatgccaacaagctgcggctgaggctgatggccctggtggtgatggacctgatgctgctgctgctgctgctggcgccccttgttgttgtcagccttgccgtcgcccttccacgccgcgggcttccccggcgcgaacttgatctcgaagccgtcgtcgatgtcgtggatcatggcgcgggagctcg

SEQ ID NO: 7433 - DNA, 602 bp, Setaria italica
  Peptide Sequence Number=SeqID_73407
tttgtacttgcatgacctttcctgagagcggaaaattcaggggtattgcaattctcacatttaagactgatgctgctgcacagagggcattagctatggatggtgcagatatccttacaaacataaccgtgagaaggaagattttgcaccaaagttgatagagggatataataggacatatgttgggaacctaccatgggatataacagaagatgatctaaagaagttcttttcagactgcaaaatctcgtccatccgattcggaacagacaaggagacgggtgatttcaaaggctatgcacacattgactttgctgatggtacctctcttgctgttgcattgaagcttgaccagaaggtgattaagggacggccagtcagaatcagatgcgcagttcccaaaaaggagaaccaaaaaatcagtgataatgggaactcagatccttcaaagagtaagattcggacatgctatcaatgtggcacccctgggcacctctcttctgcttgcccaaataagaaggattctgatgtaaggaaatgctatgaatgtggcacccctgggcacctctcttctgcttgcccaaataagaagaactctgaag

SEQ ID NO: 7434 - DNA, 561 bp, Setaria italica
  Peptide Sequence Number=SeqID_73408
caggaggttgatggaggctgaggccgcggcgtccgcggcggagacgcagcaggtgggaggggagacgggggcggaagcggagggggaggaagagacttcggaagaggccgatcctgctgtcgggtctcaccagccagtcgtggcagaggatagtagtgagcaaaatatgaacaagatggaagtgaccaaacttggagttgggtccaacagtcctgttgttgcagagaacaggcagcaagatcacaaagtggaattggctgaaactggtgttgggtccaacaatcctgtcgtcgcagagcatagggagcaaagtataaagaaggtgtatgttggtggcatcccatattattcatcagaggatgacataagaagtttctttgaaggatgtggcagtatcactgcaattgactgcatgacctttcctgagagcggaaaattcaggggtattgcaattctcacatttaagactgatgctgctgcacagagggcattagctatggatggtgcagatatgggaggattttatctgaaaatccagccttacaaacataaccgtgagaa

SEQ ID NO: 7435 - DNA, 581 bp, Setaria italica
  Peptide Sequence Number=SeqID_73409
ccgccgagagccacctctggaaccaagtcctcatgggcgccggcggcgaggtcgggaggagcatgcaggccgtgcacgacgcccatgacgacagcgagaacttcctcgagctgctcaactcgaggacgctcgcgccggagctcttcgccgagccgccggcctgcgactacctcaagaagatggagtacggcagcagccacggcggcggcggaggaggaggaggatggccggaccaccagttcacggccgccgcgctggagaagcacctgagctacggcgccgcgctcgcgcaccaccagcaccaccaccacgcggcggccggagcgcctgagcggctcacggcgaacctgtccgacctcgtgagtaactggtccatcgcgccgcccgacccgtgcctcggcgacgcgcatcaccgcgccggcgccgccgcggcatgcgataacgccgcggtggcgtccttgggccacggcgccaagcccggcttgttcctggactccggcggcctctgcaagcacgagatgagcggccacggcgggatgctgcaggaagcagctggcggcggcggccaagaattcctccgg

SEQ ID NO: 7436 - DNA, 1859 bp, Setaria italica
  misc_feature (1836)..(1859): n is a, c, g, or t
  Peptide Sequence Number=SeqID_73410
ctggatgaaaaatttggtgcaacacaacatattatggcaggacatgaaattaaaacatggaaattccaatcttgaaaggtagtgcaaggatatcatcgcgcctcaattttgtatgccctcagctcttcccatcctctggattttggtctgtggaacctgcaaatgatgtcatggagaatgataagaggacttcatcggaaatctgtggaagtgtgtttgcgcaaaatctgctcaagtttcatctgcgtccatatgctcaacttgggttggatagtgcttctattccaagcttgttcacctacaaggatattgtagaagagcttgtatccgagatcccagaggttagagaagttcctgaacaggttcacaaattctggcaaaataatgtgaactataaaaatacactgatggttgaagagccatggatcaatcaaaaatcagataagctagatgatggcactattttccaaaagcatccaagggacaatcaagagatcccttgttgtgtggaggatgcaacgagggaagatatggagattacatttttgggtacaggttcatcccagccttcaaaatatcggaacgtaagttccatatatattaacttgtttgctcgaggaggtatacttcttgactgcggtgaaggaactttaggacaactaaaaaggaggtttggtgtaaatggtgctgatgaagctgtaaaaaatttgaggtgtatttggatttcccatattcatgctgatcaccacacagggttagctagagttctagctctaaggtctaaattgttaaaggggatgcctcataaaccgttgcttgtgattggaccaagaccactcgagagattcctaaatgcatattcaacgcttgaagatcttgacatgcaattcctagactgcaggcatactttgaagcctagtgttgaggcttttctcagtgaaaatgttactggatcagccacacctcaactggagaacaccatgtttgcccctggcagtagaatggagaactacaacaggaagcctgcaagtccaagggataccacagctcttgctaattttaaagaggttctgctggaatcaggtttggagattctgtacagtgtccctgtagtacactgtccacaggcatttggcgttgttttgagagccatggagaaggtgaacagtgctggaaaggttattccaggctggaaggttgtatattctggcgacacaagaccctgtccagctcttatagatgcatccagagatgccacagtgctaatacatgaggcaacattcgaggacagtatgaaggacgaagcgattgcgaggaaccatagtacaacaaaggaggcaatagaagtaggcacatcggctggagcataccggatcattttgacccacttcagccagcgatacccgaaaatcccagttattgacgaggtcgacatggagaagacgtgcattgcctttgacctgatgagcgtaaacctcgtggatttgccggttttgccaaaggtcctgccacacctgaaggtcctattcaaggacgagctggtagttgaggaagctgatgagatccaagaggctgctgcgtactgatatagataaaaacaatgtacattaattttgatctcctgattatagcttaacattgttttcgagctgagaatgtaattgaagcatcgccaaccactgccagagccagaagcaggagctacatctgcatggttcctgttttgcagaatagaatagagctgtatcatcttttctttttgtcgttgattgtgacggttgatttgttgtgtaggttgtgaattgtgataatataaacttgtgtcaatttgaaacnnnnnnnnnnnnnnnnnnnnnnnn

SEQ ID NO: 7437 - DNA, 600 bp, Setaria italica
  Peptide Sequence Number=SeqID_73411
gcggcgcagcaccgcacaagcgtcgtccttgatcgatcgatccgctcccgccaccgccaccaccatgacgccagcgagcattgatccctgctccgaccacagctacgagctccccctgcgacggaacctcctgctcctgctcgacctcctaggcctcctccgcttcgtcgcggcggtgctcctcgatcgcctcggcgtcgtgtcgtgcgagggcggcggggtgcagctgcccggacggacctgggggcgcggaggagtgcgtgccgactacgacgatgcggccgtggagcgcttcattgaggcgatgttgtgggcgccccgctcgccggtgaccgggacaacgcgggcgcgcacggcggcgctgtacaggcgacggcggcgggttgcgcagccggcggacgacaaggacggtggcgagggcgcggccgtctgcgcgatttgcttggcggggctgggggccggagggtgcgagacggtggtggagctgggtgtgtgctcgcacgcgttccacgccgcgtgcatagacgcgtgggccggcaccggcgaggcggccacctgcccgctgtgccgcgcgccgatgtcgttgcccacggcgtggga

SEQ ID NO: 7438 - DNA, 278 bp, Setaria italica
  Peptide Sequence Number=SeqID_73412
tcccaactgctttcacccatcatttacgctccagtactcatcgacataccagtttaaataaaaaaaatctgaagttggccgggaaaccaataagttcagcttgcaactagatacacatccatcatcgggcagtccgatgcgttcggacagaacagaacagtaatggccatactatcgtataggtgatctgacatttgaaagctgaaaatagcttcaggattgatgtggttagttcatgtgagatgttatcagagactcaatgatcagcaaagcgacaa

SEQ ID NO: 7439 - DNA, 957 bp, Setaria italica
  Peptide Sequence Number=SeqID_73413
cgccgttcagcagctccccctccgccgcctccctcaccaagccaagcccccgggaggaggcgaaggtggtggtgagcgtcacggtggaggggagcgtcgggccggtaaaggcgatggtcaggcttggtgacagcgtcggggaggctattgcggcggtggtggagaggtatgccagggagggcagaagcccgcgccttgacctggctgcctcggagagcttccaactccaccactctcacttcagccttcagagtctgaacaaaaatgacaaaattggagatgtgggaggaagaaatttctacctacacaagaatgattcaagtaataggctttacctccagagtgaagaacactttggagattctactggtagtgaaactacacggaccaatggacaactatccggtgctcaataccactttgagatcttcaccattgtcctcaagaagcttgacaaaattggccggaggactaaaaggatctggaggttcatcacctgcgacaactgtacatgacatatcgacatggatgcgcggatggtgcggtacgcattcaagtactaggtaaaccaatcaacggtgtggcatgattcctagtaggcttaaccaatgtattgtgtggtgtagattctaattcctagcagcagttaactagtatacagcgtgccgaacttcgacttggtacacgtcccgttagtggttaagccatattttaacggtttgccagcgggagataatcttcttcggaattgaaaccatggagaaaaagataatggctggaccctagtgatgggtttccggctaccactactggggaaagcctctttagtatgctccaaccagatgtcggctacttttatctacagctgacgatgtatcttgtgggtcatgtatgacttgtaagatatgaaactgaaacatgaaaaaggtgtaattccttctctggctagaaaaaaaa

SEQ ID NO: 7440 - DNA, 831 bp, Setaria italica
  Peptide Sequence Number=SeqID_73414
gcggacgctgtgggaggggaaggggcgggccctcgcgcgctccgcgtccgagccggcactctggttcggtgtgcgggtccacgccctcccggacgagcttgaccacgactccccgccgtccccgccgccgccaccgctcgagcgccctcacacctgcttcgacgtcttcgcgccggactcgccgttcagcagctccccctccgccgcctccctcaccaagccaagcccccgggaggaggcgaaggtggtggtgagcgtcacggtggaggggagcgtcgggccggtaaaggcgatggtcaggcttggtgacagcgtcggggaggctattgcggcggtggtggagaggtatgccagggagggcagaagcccgcgccttgacctggctgcctcggagagcttccaactccaccactctcacttcagccttcagagtaagccgctacgcttttgctgaaccttcaattggacaattagtattgcaagggtatcatcttttttctagaaggcgatgcctggtgtaagaacttgcggccaaacatttggtggttgtatgtgctattgtggttgcaatttggatgttagtgtgcaaattgtacatgtggcttctttcaaccatcccaatggttgtggaggctaccaaattcataatattgtttctgatttagttttttgaacagcacggtattatttctccctttgtttaaggtaaactcaaatgcagattgagatggtcttagtgaatttgtgatccaaatttctatgtaatcctctggactttttagcaccagagaccattcttagaaggccaatatgaaatatttatctgtccaa

SEQ ID NO: 7441 - DNA, 719 bp, Setaria italica
  Peptide Sequence Number=SeqID_73415
ccttgatctgcagtactgtgtcagcaccattttggtcctctggctcctccgacggaccggtagcttgtgactcacaagattgcttattacagctttcaagtagggaacagatgcattgcagtgtatccgggaagtgagctatattgaggtcactggcaaggtgtgctacaatccttgcggcacgctctctgttctcgacgttatcagctgtgcctctcagaccaatcataccgatcagattctgaaccgagatcctggaagacagtagcttctgtcttacagacttatccttacagaacaactggtctaacacccttgctccccatagatggtcgtcatccccagatgcagactggagcttctctacaccgtatgcgatcaagttccaattgtcaggcagctccccgtccttcctaaacttcctagctgtatctgaatagtagatgcgaatgatatcttcacgcctttcttcaagcccacagtgtcttttcgttcgtgattccaatggttcctccgccactgaaatgaatatgcagtagaaggcgaataaactctggaacagaattaggccatagaagatgtctagtgcggcgttcagttttgatctgttgccaatatctccacccgcatcgccataatctcgttgtacaagacgccacactgcgacacccaggttcacaaatggcgaaagataatagagcaagataaaacacatgaaa

SEQ ID NO: 7442 - DNA, 268 bp, Setaria italica
  Peptide Sequence Number=SeqID_73416
ttcggccagtcccctgcttcgccggagctcggccgagagggaagggctgggccatggcgggagccttcgctctccgcctcgcgccgcgtctcgccgcggtgccaccggggagggggaagggcggtggaggagccagccgcggtgcaggcagcagagcgctggtgacaaagaaaccaaacaaggagcaccatttgtggatcaggaaggagacagctgggtcagggaagaaggctctccgtcttattgatactgtttcaaagttaccaaa

SEQ ID NO: 7443 - DNA, 704 bp, Setaria italica
  Peptide Sequence Number=SeqID_73417
ctcagtgccttgagcgttatgagaaactgcttgatgctgcctgtgcaaaagatgagaattatgaacctaacgatgacccaaggaaattgcgacctggtgagattgatccaaatcccgagtcaaaacctgctcgtcctgatcctgtcgatatggatgaagatgaaaaggagatgctttccgaggcaagggctagattagctaacaccaggggcaaaaaggctaaaacgaaaagcaagagagaagcaacttgaagaggctaggcggcttgcttcactgacaaaaaaaggagagagctgaaggctgctggcattgatacacggcagaggaagagaaagaggaagggtattgactataatgctgagatcgcgtttgaaaagagaccacctccaggcttttatgatacggttggtgaggacaagccacctgagcacgtgcaatttccaactactattgaggagcttgaagggaagcggagagtggatatagaggcacaattgagaaagcaagacattgccaggaacaagattctgcagcggcaagatgccccagctgcaataatgcaagccaataaactcaatgaccctgaagctgtcacaaagaggtccaaactaatgcttccaccaccacaaatttctgatcatgagttagaggagatagcaaagatgggtagtgctggtgatcctgctctagctgaggagcttggc

SEQ ID NO: 7444 - DNA, 1434 bp, Setaria italica
  misc_feature (1)..(82): n is a, c, g, or t
  Peptide Sequence Number=SeqID_73418
nnnnnnnnnnnnnnnnnnnnnnnnnnnnnnnnnnnnnnnnnnnnnnnnnnnnnnnnnnnnnnnnnnnnnnnnnnnnnnnnnntttttttttttttttccctaacggacacgattggactatagcatgatccacattttaacatgtcacggtagctgaggagcaaaaactactatgacgcaacaaaatggtaacagaaccatccccaaaaagcctatgctcaatgccagcaaagcagaaatgctagtctccacatcattgtgactttcggcaaaactatggccagaacaccaggtagagaacaccaatggtacatggccatccactagcagagcaggtacaaaactagtagtagctgtcatactggcgtccaccctttttctggtgcccagttcccttcgatcgattagtatactccccatcataccggccaccagcttggtcccttcctcgcccccgccttctgccacttgggaatccacagttaggcctcctctcctccacatgtactaaacggccattcaactctatcggagatgcatttaaagcattctgaataccagatatgtcttcaaactcaacaaagccaaagaagactccagcctccttgcggcttcgaatagcaactccatcaggtttaattcttccgaaagcctgaaacaccttctcaagatcaaaggcctgaagtagatggtgaaagattcccaacgtaacatgaaataaactacttcttcatcgtcaggggcgctaacagtccggttgttgtccaagttagatttttcatgcactgggacactctgcacctgctgagccaactgttgagactgttgtgactctgcagtccccactgtggccttcgcttttgtacgcaacactgaagcatatgtcttgggtgctccttccacaggctcttctttgagggtaggcggggaaggagggtggggagatgaatcttgtttaacatctattgaactggggaatgagggcatatgctcttctgactgagtttcatcgtaaacgacattcacagacttatactccgaaggatcctgctgctgcacatgattttcagcaggagtgacaacctcctgcggttctccatccaaataatcagatcctgtttcagccattgtataagaagcatccacttggggcatgttgtcagcacaattgtaatcaggaacatggtattggttgtcatactcatcacagatgagcttaaagatgtcactgaatatataatacccatctttctttggagcaagaacaatattctgaacaaatcgcttgcgaacagggtagtccttcaattgcactaggccagtgaccagcagcgtaattgctccaccccatgactccaagaaatttgctgttttaacctcaaccttggttacattcatggacatcatcatatcattgataacctccaccgtctc

SEQ ID NO: 7445 - DNA, 598 bp, Setaria italica
  misc_feature (138)..(138): n is a, c, g, or t
  Peptide Sequence Number=SeqID_73419
atgaggaaaatgaggaggaggaaggatgaggagcgcgaggcacaagagagacaactggaagaagaagctagagcacggaaagcaaaggaggaggaggctgctgctctagagtttgagaaatggaaaggggccttttcngttgatgctgaaggtacaacagagagtgagacacaagatgatggtcagggtttgctccacaactttgtggaacacatcaagaagcagaagtgtgttcccctagaggacctggcggcagagttcaggatgcgaacccaggtacttaaagtctatgcattagaggcttgagtcttgttatgaataacttaattaacttccaatgcgctatcagggtcaaaaatagaaataatgataaaatccattagataggtgttgacaacttacatttgataccctttttctactctgcttttgcaatgttaaactggcattgcctcaagccattaacttttcatttatctgatacatatttagttaatttaaaatgcgaaatgatatgtagttttattctgagtatgtcatatttgttttaggacaagcattttaagtttgtttgtactatttgttttggtaacttgtt

SEQ ID NO: 7446 - DNA, 933 bp, Setaria italica
  misc_feature (884)..(933): n is a, c, g, or t
  Peptide Sequence Number=SeqID_73420
gaggacgatgcggaggaggaagacgaggaggtcccggacgcccctagatcctccaagaaggagaagaaaaggcaagagcgacaggcgcagcgtgaggctgaagaagctgcacgggattcaaggaggaataaacaagaccggtatgaggaaatgaggaggaggaaggatgaggagcgcgaggcacaagagagacaactggaagaagaagctagagcacggaaagcaaaggaggaggaggctgctgctctagagtttgagaaatggaaaggggccttttctgttgatgctgaaggtacaacagagagtgagacacaagatgatggtcagggtttgctccacaactttgtggaacacatcaagaagcagaagtgtgttcccctagaggacctggcggcagagttcaggatgcgaacccaggactgcatcaaccgaatcgtgactctggaaagcatggataggctatctggtgtgatggatgaccgtgggaagttcatctacatatccactgaggagatgaaggctgttgcagagtacatcaggaaacaggggagagtgagcatatcgcatctggccaacaactcgaaccaatttatagatttggagccaaaggcccagtacgaggaggagagccatcaagatgacagcgctgcagcagagacggagccatgagagcgcgttagcgtggcgtgtttaggtgctcagagatgtttgtattgatttcaaagctgcgttaacatgggttgagttggatatttgagaaggtgtgttaagcaagccactggtcatatatagtggtatataatacattgatacttgtgctgacatgccgaatatcatgactagtgctgaaggaggtttgttgcaagaaccaaaaaaaaaaaaannnnnnnnnnnnnnnnnnnnnnnnnnnnnnnnnnnnnnnnnnnnnnnnnn

SEQ ID NO: 7447 - DNA, 556 bp, Setaria italica
  Peptide Sequence Number=SeqID_73421
aggcccgcccgacgatttcacgctcggggtggcgacggggcagaaggtgatggtgtagtcgcggccgccggcgcaggtgaaggtgctggtggggtcgtcgtaggcgtagctgtaggacttggggcacgccgacttgaacacctgcgagtaggccgtggggcggcaggtgttggggttggcgtacgcgccgctgcagcagtactcgggcttgccgaaggcgtcgcacgcgctgcggcacccggcgccgccctcggtgcggagctccgcggggcaccgcgcgttcaggtccgccgtgcacccggccgccgcgcacgtcgtggcgcccgtggcggcgccagcgggctcgatcaggatcggaaggttgtaaccgtccacgaggctcacatcgtagaagtcgtcgccggcgccgccggcgagcgtgaactcggccagcgtggcggggtcgccgcgttctggccgttgcactccagggaccccgagccgcagtcgcccgtggcgcagaccatcttcccggtggcgtcctgcgcgcagccggtgcgcgcccagacacggccgg

SEQ ID NO: 7448 - DNA, 303 bp, Setaria italica
  Peptide Sequence Number=SeqID_73422
tttcgtggcgccggactacaacgacgggaaggaggcgcagcgggaggccacgatgcggcgggtcgcgcacctagcgcggcggggcgtgttccgcgggtggcttaccgagccaggggccgaggccgagctccgcaagctcgcgctgctcgagagcctcggcgtctacgaccactccctcgccatcaagatcggcgtccacttcttcctctggggcagcgctatcaagtttcttggaacaaagcgccaccacgacaaatggttgttccgccacagaaaattatgatatcaagggttgttttgcaa

SEQ ID NO: 7449 - DNA, 603 bp, Setaria italica
  Peptide Sequence Number=SeqID_73423
gttataagctaacaggtagcatattaaggagctccaagttccagatggacctgttctgcttaagggagagagatttactaaagcagttcgcagaggaggtttctctccatcttgcgcgagagcttccaacttgctgaagacttagctagagcatttactgagcgtacaatcctccaaatatttttggaggacgagatgaatgttccttctggttccctaaaggagctgctgggcttgctgaggtctctatatgttatggtcagcatagatgaatctgcatcttttttaagatatggatatctgtcacgtggcaacgtagctggtgtgcggaaagaagtcttgaaactgtgcagtgaactcaggccccatgcccttgctgttgtcagttctttcggaattcccgatgctttccttagcccacttgcttttgactggattgaggcaaatgcgctgtcaaccgggagccactgatctcaaaattccatatggcagccaggtatccagtgcaagtactgaagaacaacggtggagcatagataccatacaacttattaggttgtctattttgtcttgtcgttccttgttagtttctattactagttt

SEQ ID NO: 7450 - DNA, 1243 bp, Setaria italica
  misc_feature (8)..(8): n is a, c, g, or t
  Peptide Sequence Number=SeqID_73424
aaaataanaaaggaaacaaaaataaagaaaatcgaggcaatgccagcctcaggcaccgtcagaggagcacgcagggctgcccgcgggaggagtaggcgcggctgcccgcggagggagctcgcgtggctgctagccaggcgcgtccgcttgcgggaagctcgcgccaccgaaggacctcccgttggccacctgatactcgctggccaaattcgtcaggggcagcgctatcaagtttcttggaacaaagcgccaccacgacaaatggttgttcgccacagaaaattatgatatcaagggttgttttgcaatgacagaactaggtcatggaagcaatgtgcgaggaatagagacaatagcaacttatgattcaaaagcaagagagtttatcataaatactccatgtgaatcagctcagaaatactggattggtggagctgctaaccatgctacgcatacaatagtcttttctcaactccacataaatgggaaaaatgaaggagtccatgcttttgtagctcaaataagggatggtgatggaaatgtgttgcctaatatccatatagctgactgtggccataaaattggattgaatggcgttgataatgggcggatttggtttcagaatatacgtgttcctcgcgagaacttgcttaattgggttgctgatgttttgccagatgggcaatatgttagcatgatagatgatcaagatcagaggtttgcagctttcctgtctccgcttacacttggtcgagtaaacattgcagttaactcagtctacatttcaaaggtaggcctagcgattgctgtgaggtacggtttgtcgaggagggccttttcattaacaccagatggtcctgaaatgttgttgcttgattatcccagtcaccagcgacgccttctaccactgctagcaaaagtatgtctgatgagcagtgctggtaattttatgaaaaagatgtatgtaaaaagaactcctgaaatgagcaaagccatacacatttactctagtgctctgaaagccacactaacttggcagaatatgattacgcttcaggagtgtcgcgaggcatgtggaggccagggtctaaagactgagaaccgcgtaggaattttcaaagctgaatttgatgtccagtccacatttgaggtgataataatagttactaatagacaagacaaggtaaagaacaaaagaacaaactttaaataagaactaagaaaatttttaaggaactaagaa

SEQ ID NO: 7451 - DNA, 1754 bp, Setaria italica
  Peptide Sequence Number=SeqID_73425
gatgcattgtacagcatcgcttttagtgtccagtttacgacgatgattgatgatgtcttataggctactactacatgccctgacttgtagccattgtcgtcagacatcatgaaacttaatcgcaagctcggcctagttgaatagagaagcaaccaaaacctttcggactgttacaaaggaatcaaaattatggatgttttacatcaagaaatactgtatacattctggacaagaactgtcacccctttttctgaggggtgcatctgaagtgcacacaaaatcgttcaggatccgccaaaactgtcaaaactcgctctaccttcttgctagggattctgctttgtgctcgctgccagcagtcacaatataaccagctccaatctggcagtctttcagaacagcccgttcttgcagttgaacattattacatacaacagaaccttggatgtggcagccatcttcaataacaacatggttcatcacaacagagttgacaatctttacattggaaccgattcggcaatgacgaccaatcacagatcgcttgacactacacttgtcacctagctgcgaaccctcagcaagaatacaatgtggccctattgtagtctttgatccaagaacagaggatgggtggatgatgttgttctgtgcagagaaggaataaccagacagatggctagcttcccctataacatctcgattgatatcacaatatgactgcatcgagttcaagcggtggcagtatttgtttttagtagcaatataagcacagcacctatgtccaccatgtgaccttgatagtacatcttgcttgaaagcagatggtgcaatgacacgatgctgcgataaacactgcaaattaccactggacagaacagtactattcccagtttcatcacctgtagttccattgccaccagatggagctgatctcaattgactcctcactaaatatgggaggacttcaagtctaatgctacggtatgattccttctgttccagtacatcctgtaaaattgtcctcttgaaagcataaagatgtgcatccatcaggtcacttcgaatttccatctgaccaacagcctggatttttctcttatgaactcgaacatctttttcaacatcggttcctgatatgatatgcaacaagaattgtttagtcttgtccagcccaactatgttcaaacgatttggctttttagctttatctttcccactagaagaagcagtgtctgaaggaccactaacaggaacagaacatagtaaagcagtaacagctgcgccattccttctatgagtagcagcaacagccccaggcaacacatctgttaccaggtcaccgctaattaccaaaatatcatttgctgtcagtcgctttgaaatagctcgtaatgcaccagcacttccaaggtcttcagaaactgcaactacctctacacgaagtcgatccaggtatgcgctggagacccaggcgccgaccagccgtgccgcctcctgcccctccaccaccacgatgaggtccttgaggtcgctggcctcgaggaggtccagagcgtaggagagcaagggacggttcgcgaccgggagcagcgccttggggacatccttggagacgaggggcgagagcgtctcggaggtgccgccggcgaggacgacgacctggaagtccatctccggcgaaaactgcggcggccgagggcgtcgccggcgagggttttggggctcgtctgattacggcggcggggaggtcg

SEQ ID NO: 7452 - DNA, 385 bp, Setaria italica
  Peptide Sequence Number=SeqID_73426
aggagacgcgcgccgctcgtttcgttctcgtccgatgcgggccggcgcggctgcttcctccgcacggcccccttgggctccagctccactccacctcacccgcgagaatccgagatggcgctcgtcgcgtgcccgcgctacaacataagccacccccgtgccttcgcttccgctcccggaagccgcggactcctccgcgcctcgagatctgccgcctcacggccgcggggccgtctccgccgcgccatggccgccaacggaggcggccattccaccgccaccggcgccggcgcttccgacgcgcccccgtcgctgctcgtcttctcaggtggtacggcatttaatggcgttgttgaggagctgaagaaagtcactactcgagttg

SEQ ID NO: 7453 - DNA, 988 bp, Setaria italica
  Peptide Sequence Number=SeqID_73427
acttgatctcgattctcgaagcctcagctcctagcttgctgtctctcagtctctccaaagcatggcgtctataagacactttgccgacccacaccacccgcttctggagacgcagtacagccatgatcagactggccgctgcagcatctgccttctcaaactcgccggccacaggggctacggctgctacttctgcaacatccacctccacggtgcgtgcgccggttacttcgaggagaccatctccttcttcgcgcaccagtctcacgccctcaagctaagccgcagcagccctggacgggtctgcgacatctgcagaggggattgccctgaggggagcttcgtgtaccgctgcttcggctgccgcttcgacgcgcaccctctctgcgggatgctcccagagagagtcggtaaccctttccatccggagcatgagctctgtatggtctcttcggaatcacctgggagctgctcggcctgccaccatcctttacccaagtggcgctacacctgctcttcctttgaactacacgttgggtgtgccattgacccgccgcccaccgctgccggcggtcagggtagcaacggccatgcggcggccttcaagggcagctacgcctacggtggcgcccaaggtagccatggagctgccggccagcacagccttggaggccctgcaggccaaggatggtggtatccgtaccacggacctgtcaccccaggctactaccatgtcatccaaggtggatatggatacggccatcctgtccagcagggcagctcctacgcctctttcatgcctggcgccggccacggtgctaccggcagcagtggacagagcactccccaccacccgggcggcctgatgagtgccatagccaggtttctcctcagagtcgcgatcaacgcgacagtcaacgaattcgcatcccaacttgtgtttggggctgacctcgaattgaatgattgactgccgcacacaagtcat

SEQ ID NO: 7454 - DNA, 320 bp, Setaria italica
  misc_feature (245)..(320): n is a, c, g, or t
  Peptide Sequence Number=SeqID_73428
ggatcggcatgctctttgctgaacagtaaaaggttgaagcagtatgaggttaacttccaatccggccagtccctctgcagcttgctcccaacattgcgttttgtcgtagtaattctgttttccggtgccagattgctctgtgttaattgtccaattcatgtaaatggatagacttcttcaagctcccagtttatgttcttcaaatcgaaatatctgagctgaaccttttcaactcaataaaattnnnnnnnnnnnnnnnnnnnnnnnnnnnnnnnnnnnnnnnnnnnnnnnnnnnnnnnnnnnnnnnnnnnnnnnnnnnn

SEQ ID NO: 7455 - DNA, 300 bp, Setaria italica
  Peptide Sequence Number=SeqID_73429
cgttggcggagcgagtccgcggcgtcgtgcgcgcgtccagagcggcgagtcgttgccgtccaaacggatggtggtgccagccgttgcacattcgcctaacagattctccatctcctggtccaggcttataccaagtacaaccatttctttgtataagaaattaatgatgcactcagcaataagtttccagtatttttaattaagctttcttgaattgaaatatacagaaggaaggggagctatcaatccaaaagggttacagtactacaacaatcttatagatgagctagtgagacatgg

SEQ ID NO: 7456 - DNA, 1064 bp, Setaria italica
  Peptide Sequence Number=SeqID_73430
tcagaaaaccctcatttaatacctcaattaagaacttgtctaagtaactcttcaccacatcatagaagttcatgctgctaccatatgacaagtatctgaccaagtcctcgatgaaagcacgcacaatacggcaagcagtgggaacagaagaggaaaacggagccacatatggcaaatctggtactacatcaatgggttcaagttgaagtgctgcaacattcatgtcatattcattttccttctttataaccatctgctcatatgagtctttagacaagacattctttatctgcttacggcaatcagagataagcagctcaagatacttgtccctattttgccaagaatttcaaccaacgatgtagcttggtatccatatttcttcatggtggtacccaaaagactgatataacctttgacattgaggaggtagttggcagtatccatgagagataactgttgctctaagatcgatgtgaccttagatatagctgtttcccacattgtctccacctgactctcagatagaagcccatctgcagttcgaaggacacggtcctcaataatgaaaaaaccagctatctgagcaaggaaaggttgatgggactcaacaaagggctgcgatgtagaaatctccaagtccgaattgagttgcatgagcctattgttaaagtaatattctcgaaacttctccccaagaccaaggccaatgtggatatggtatgctctgtacactggtgcaagatcaaattctagcattgcttcctcatccatgttctccacatccaagatgtaagcatgctcattgaacccaacacggctacattcctctgcttccctctgtcgggcacacatcccctcatctttctgacgagccaggttgacctggcctattgcagcatgcccaatctcctttcctatccttctgatgtatacaagccactcattgaactcaccacaaactttcttctcgatgtacagctttacaataggaatttgttctgaataacctttttcagaagtttcagaggaatatttgcatgtagtccttctcaatcaactcc

SEQ ID NO: 7457 - DNA, 328 bp, Setaria italica
  Peptide Sequence Number=SeqID_73431
ggcgccgtcgctggagtggcgctgggtgtccacggaggaggatgacgacgaggaccgcggcaggggcgccgcggccgtcggggtggtgggcaggggcgggagcttcgagtcggaggacgacgaggacggcgacgacgaggacgaggaggagaaggaggagggcaagaagaggctgatccggaccgtgccgtccgtggactggttcgacgtcgagggcaacgaggtctccgcggggcagcagctcggggacaccgaggagtttgattttggcaggacgatgtttcttgctcttcagactcttgctgtagtgttggagattattggaatt

SEQ ID NO: 7458 - DNA, 345 bp, Setaria italica
  Peptide Sequence Number=SeqID_73432
tctgggctagagtctggtagctcttcggggcaaatcaaccatcctaattatttggttaaccttttgaagaaccttgctgctgttgccagcacacaggcatatcaagatattctaaataatgcaaattcaaatccaacatcaaatgctggtaataatgctgcaaatggatctactatgcatgaactaactatacagtcaattcctgtcggcagtgaacctttagctgaagggcctccagtgaaaaaacgagtacaagattttgatttgaatgatgcttgcatcgaagaagttgagagacgaacagataaaattgtgttcaagctctttggaaaagagccgaaggat

SEQ ID NO: 7459 - DNA, 407 bp, Setaria italica
  Peptide Sequence Number=SeqID_73433
aatattgaaaccttgtacacagaattttgcagttgaagaacaagcaactgcaataggggttacacagagcctctgaagcctgtcacctattactggttgccagggagatgctaacataagcctaccattgcaactcaatgtcagacattcctgtaccctagcatacacccatcctgttctccagaagccatcattggacatgctaataagcttttctatccaaggagctggatcatcatcaagctcatcccacatccaattagggaggcgaaggtaaacagttagaataacacaaccaggcctaatatagctttccatatcaagatattctaaataatgcaaattcaaatccaacatcaaaatgctggtaataaatgctgcaaatggatctactatgcatgaactaa

SEQ ID NO: 7460 - DNA, 897 bp, Setaria italica
  misc_feature (578)..(578): n is a, c, g, or t
  Peptide Sequence Number=SeqID_73434
ctgattgtggctgcaatatgaagaggtgtaatatttgacgggccagtcatgtcaggagtgaacaaaaaactgaactggatcaatatctggagcataatttgttattgtgtatctcagtaggaactgaaccaaaggctttgatcgtttgttgacagcggtaagcagtaaattttctcctagggcaaactcgactggtgaggggacatcaagaccaatatcaccccggaacatggtgttcagaagcttgtttacaacagcacaccactcctgatcaattgcaaaggatagtaaccatctaaatctttcaacagagaaaccctctgtactgtattgtcgctgctcagaggtagcctgcatgtgactcctttgaagaagccatccgatttcttgtaaaaaatgtaaggcccgactgcgagaagccatcagatcacctattctttctgaggtttcatcaaatgaacttaaatccaattcatgctccaacattcgaatctcagaacataaatctttgtcagtgacaacaaagggaacagaaaggctgctttgatcataatcttcaacctgagaaagggagtccngatattttgtaatataaagcacaaaatgagaaaggctgctttgatcataatcttcaacctctatgaatcctcttccacttgtgctaggaaaggaacacgagaaggtcaggcattgacggccttgctgcctggttgtatcttcaagtagcgtttgtgtttcttcttgtattaaatatttctcaccaaacacacaaagtaattttgtcgttggttgaactatattgaaaccttgtacacagaattttgcagttgaagaacaagcaactgcaatattctgtgtacaaggttgaactatattgaaacctattactggttgcca

SEQ ID NO: 7461 - DNA, 949 bp, Setaria italica
  Peptide Sequence Number=SeqID_73435
aggcaagttgagcatttcgtggattgtacaataaaacagaactgcattcagtctaaaaaagtatgcacaatacagcaatttagcttcgtggtcagcaccagtgctttgttatacacggatacaattgaactggctctgttgcaagtctatcaatttgggccccaggtgattttctcccagaggaaaggcttcatggaactaacttgtggtgggctcttcataatcaatcccacacagacacacaccgcagcaatggcaaccaaggacagcatcgctggcctagtcgagaaaaatctatttgtccggggtcgatacgcgagctgatggacacattgtccgcagctcaatggttgattgatgatgcttcgcgcgctcttctccacatcaaatgcggtttgatcagtagacttcaggtgactagcatgcttcgtgatggtatcagtagcggatggtctactggggatggcaacagagacatgagctttcggtagccttcgatcaatcttgtcctgaaccatttgaatgtaggatatgtggcctctcttttgagcgtaatcctctggagtaaggccggtatcatcgcgagcagtcttccacactttgattccaagctgctgaggatcatcagttaaagcatccaagacaccagtagtatcgctgattgtggctgcaatatgaagaggtgtaatatttgacgggccagtcatgtcaggagtgaacaaaaactgaactggatcaatatctggagcataatttgttattgtgtatctcagtaggaactgaaccaaaggctttgatcgtttgttgacagcggtaagcagtaaattttctcctagggcaaactcgactggtgaggggacatcaagaccaatatcaccccggaacatggtgttcagaaagacttagtttaacaaacaagacaacaaccaactcctagaatcaaattaga

SEQ ID NO: 7462 - DNA, 791 bp, Setaria italica
  Peptide Sequence Number=SeqID_73436
atgcagcggacgatgacgacgcccgggacgctggtggaactcgacgaggagcgcgcgggcagcgtcgcctccgacgtgcagtcctcgctcgccggtgaccgcctcatcgtcgtcgccaacacgctccccgtgcgcggggagcgccgccccgacggccgcgggtggaccttcagctgggacgaggactcgctcctcttccacctccgcgacggcctccccgacgacatggaggtcctctacgtcggctccctccgcgccgacgtgccgcccgccgagcaggacgacgtcgcgcaggcgctcctcgagcgattccgctgcgtcccggccttcctccccaaggacatctgcgaccggttctaccacgggttctgtaagcagatgctctggccgctcttccactacatgctccccttctccccggaccacggcggccgcttcgaccgctcccagtgggaggcctacgtcctcaccaacaagctcttctcccagcgcgtcatcgaggtcctcaaccccgaggacgactacgtctggatccacgactaccacctcctggccctcccgtcattcctgcgccgcagattcaaccgcctccgcatcggattcttcctccacagcccgttcccttcgtcggagctctaccgttccctccccgtccgcgatgagatcctgaaatcgctcctcaactgcgatctgattggcttccacaccttcgattacgcccggcatttcctctcctgctgcagccgcatgctcgggatcgagtaccaatccaagaggggatacattgggct

SEQ ID NO: 7463 - DNA, 369 bp, Setaria italica
  Peptide Sequence Number=SeqID_73437
ggcgtccgtggtggcaggcggcgtggccgggcgggagggcttcttcggcgagtcgttggcggcggcgccggcgctgtactcggagtcctggcgctgcgacgcggcgtgcttgaagctgtgcaggtacctggatctaagggagccgccgcatgcgttgcccatcaaacgacggggtggagccgccgcccctggcgcatcaagctcccggcggtcgcccgctcacggaaacgctagcacaagcgccaacgccgcaggcggaatctctgatctggtgttgtggttgggtcggggaggcgggaggagagagactggggctgtggggtgctcgtggatttaacggcgaggacctggactagtaggaggcagctg

SEQ ID NO: 7464 - DNA, 283 bp, Setaria italica
  Peptide Sequence Number=SeqID_73438
gacacacacacaacacacaatccaaaagcgcttccttcaccgatcgatggactgggcgtactccggcagcggctacggctactactcctcgtcggggacgccgtctcccccggcgggcggcgacgggggcgagaacgcgtacatgacggtgtcgtcggcgccgcccaagcggcgcgcggggcggaccaagttcaaggagacgaggcacccggtgtacaagggcgtgcgcagccggaaccccgggcggtgggtctgcgaggtgcgggagccccacggcaggcag

SEQ ID NO: 7465 - DNA, 448 bp, Setaria italica
  Peptide Sequence Number=SeqID_73439
caccaacaactgcagcgtcccgcccgcgacctacctcaaccacagctcgtcccactgcttccacggcgctaaagcggagaacttcagctgcgtccatccgcccagcggcaaccgtttcttgaacaaaaccgagatacgggcgctcggctccgaatgcaccggcctggtgtcggcggcgagctactgggcctctccggcgcctacaccggcgatactgctgggcgtgatggaactggagtggtggatgctcgggccgtgcagctgcgcgcccaatgccaactgcatcgcggtgagcactccagactcccggcaggcgttccggtgcgactgcatcgaggggttcgagggcgacggcttccccgacggcaccggctgccggagagtttcagtgcccaacgccaggtgcaatccttcaaaatacctagcagaagactgtggaaagacggcc

SEQ ID NO: 7466 - DNA, 792 bp, Setaria italica
  Peptide Sequence Number=SeqID_73440
ctcgagcgccgccgctacgccgacccgcccgcgttcgccgccgacgtccgcctgacgaacagcaacgccaagtcctacaacaacccgggcgaccccgtgtacgagagcgccgacgagctctccgggatcttcgaggacggctgggcctccatccaagcagagctcccgcccccaccgccgacggacgccgagcgcaagctgaagttcagagacgacctgaaggggctgccggtggccgcgcagcggaccgtggccgggttcctgaaggagcggggtgcgtgccagctggagaagagggggaaactcgaggttgatctgggcaaggcggatgccgcgacgctggatgagcttgaccgagtggttgccaagcatcgcgccgctgattcggacgtggttgccccgagccccgaatgcaggaaccatgagcgtggtcaaactgaaggaccaagccccaaaagctaaaggcgatgcctggttttacatcaatagcctattgtgttgatcaagctgctttctgttcctagcattggtcatgccttagtcccaaatgctggtggcttggactggacttcaaggcaccttgtcgatagttactacagatcttctatatatattgggggttttcattggataaccctttgtggtagagttgccttttgtattgatggtggtgtcttgctagctgttgtatgttcggaattgagtgtttgatcctaaatactttgggggatcaggaactcaggaggaatggtaacaaaaacgaaggttggcttaattctgtgatgtcgaagt

SEQ ID NO: 7467 - DNA, 477 bp, Setaria italica
  Peptide Sequence Number=SeqID_73441
cttccaactccaacggcgtccgtcgtgtgctcggcttgcaccggaacaacggcgacggcgacgggcgggggaggagatgaagctgaagcagctggagggcctcctcggtggcctgacccagttccccgcccccaaggtggagctggagcagtacccgacaggccctcacatcgcgtcgcggatgctctacacggcggagaatagtttcaatgacataactggcaaagtggtagctgactttggctgtggctgtggcaccctggcagtggcgagtgctcttctggatgctgaacatgttatcggtattgatgttgatccacaatcacttgaacttgctcaagaaaatgctgctgatctggaggcttccatattgacaccgttgtcatgaatcctccttttgacacgaaagaaaggagcagacatggagttcctttctatggggttgaaggttgcttcgcaggctgtctactctctgca

SEQ ID NO: 7468 - DNA, 565 bp, Setaria italica
  Peptide Sequence Number=SeqID_73442
ctcgccgcctcgcctcgcctcgccggcagcaagagctccaccacttccactccacggcgtccgtcgtgtgctcggcttgcaccggaacaacggcgacggcgacgggcgggggaggagatgaagctgaagcagctggagggcctcctcggtggcctgacccagttccccgcccccaaggtggagctggagcagtacccgacaggccctcacatcgcgtcgcggatgctctacacggcggagaatagtttcaatgacataactggcaaagtggtagctgactttggctgtggctgtggcaccctggcagtggcgagtgctcttctggatgctgaacatgttatcggtattgatgttgatccacaatcacttgaacttgctcaagaaaatgctgctgatctggagctggatatcgacttaatttggtctgacataaagaatttaatttgaaggcttccatattgacaccgttgtcatgaatcctccttttgggacacgaagaaggagcagacatggagttccttctaatggggttgaaaggttgcttcgcaggctgtctactctctgc

SEQ ID NO: 7469 - DNA, 645 bp, Setaria italica
  Peptide Sequence Number=SeqID_73443
tttttcatttgaggagtaggtgagctagaattcaatgatcaatacatgattttcaagctaaactgtcctcattttctgtctccagtttgacttttgattacactgctctgcaatttaactttgttcaacatcagttcagttgtagatgagttaaattctattggcaattaccaacttatgtgcatggtcccttttttcccctcaaacacgcaggagaactgtgtatttttatattaaagagagaagatagaaagaaacctggtcccttacaagcgatcactctagctcacctaggagaatagcgagattgcagagcaagcaaagaaaataatcacctaaataaaaaaagaaacaacccaacctaggccaattaagttagcccaacactacgaccacgccctaacccctgaagcttcatagccccagccagttcccagagccccaactccttattaaagaagagtgcatgatctcttaagtcatgcaatgttagagctttacaattgtaataaaatgttctaaaacttgtttgaccatttttctaaaacttgttctcatcaaacgtactggtgggtgcatccctagttattggtgcttgtacttgatacagtgaggagacacgagtaaagatatcagcgggagtgg

SEQ ID NO: 7470 - DNA, 579 bp, Setaria italica
  Peptide Sequence Number=SeqID_73444
cttccaaggtattctttggtttacataatgctcagtctatactatgtccacaccacttttagtttgtttgcttctatcatcatctgcattggggtatagtggaatagctaatggaacctcctcatcagagtcatcatcatcatcagtactagtgtcagaataagattttgtctcgcagaatttgtaaccaagagcagagatgttgctgtttttgatgtgtgccgtaactcaaactccttctcaaagaccaaaccaatcatacactgagggtatttgtcaactgacagtgtgccaaccagaatttcattgccaccaactttcacaaaaactctcacatcctcattccccttgtcatcctgcaacgcaatctgtgaaacatgacaatacacctctcctgggttacacttcactgtctcaccaggtctgactagaactccccagtgcttacaacttgcaaaatccatggcttggggaggaggaacgacacgccccggaacccccagcggcttctctccgccgcgctgcttcgggagggggagagggttttggggagcggccgcttggagcctttgagtttgg

SEQ ID NO: 7471 - DNA, 499 bp, Setaria italica
  Peptide Sequence Number=SeqID_73445
cgatgagtatccagagcaacagaggagtagaaagtcttgctgcacgacttgcaggaatagccagcggattgcttagagctgtcaatgattgaaggtgtcttcttcacctgctttggataaggggtcgcaacatggacatagccacttctcttagtactgccactgccagttttgtttcccatagaaggcgttgcgatctttgccttctttagaggtgtcttcaagggtgtttctgctggcctattcttgcccataatgttctttggagtatcttcaccatcatcttcatctgaactgtcactatcatcctcatcactggaatcctgagcatcaacaatgtaacacaaaagaataatatgttcagagtacaagtgatatatatactggtataaatgtatcacatcacatgccaacaagaacaaagctaagttttggcctgaacaaggtacaagcatcaggtaatcgaaagtactaattactaaggttaaaattaacgtaa

SEQ ID NO: 7472 - DNA, 1917 bp, Setaria italica
  misc_feature (1)..(59): n is a, c, g, or t
  Peptide Sequence Number=SeqID_73446
nnnnnnnnnnnnnnnnnnnnnnnnnnnnnnnnnnnnnnnnnnnnnnnnnnnnnnnnnnngtttgggagaaagtaatcttgcatcgccaatatgtagataacatctcagtaccttctattacaaacatattattctcattgggcaaacctttcatacgccaatctacagaaaatttaagccttgctgccttggcacctggcagacagaacaaacaccgtaacaatgggcaaagttccaaattaccaatagggtctctttcttcaagaaaagctttcattcgccaatctacaaaagaatctgagcctttggcagaaaacagcactgtaattgcactaacaagttctgaaagattggcgtatgttgtgatgccgcctttgcagtcaacgcaagaaacacaactttacagcactatccagtcacacaattcagtcatcgaacaccaacccagagcattatgctcagctcacttatgagcattatgcttcaccttgcgatgagtatccagagcaacagaggagtagaaagtcttgctgcacgacttgcaggaatagccagcggattgcttagagctgtcaatgattgaaggtgtcttcttcacctgctttggataaggggtcgcaacatggacatagccacttctcttagtactgccactgccagttttgtttcccatagaaggcgttgcgatctttgccttctttagaggtgtcttcaagggtgtttctgctggcctattcttgcccataatgttctttggagtatcttcaccatcatcttcatctgaactgtcactatcatcctcatcactggaatcctcatcatcaccagattcaccctcttcagaatgaacagagttttcatcactgtgatcatcatcagtgccaccaacatcacctttctgtttctcaggatcctttgtttcttccaaggtattctttggtttacataattgagttgaagcagggttgtccacaccacttttagtttgtttgcttctatcatcatctgcattggggtatagtggaatagctaatggaacctcctcatcagagtcatcatctgaaacatcaaccgccatgcaacttatgcaaagtgataaggaaaaacatcagtatgtccaatactaaatgaacaagagcattaccatcatcagtactagtgtcagaataagatgtggacaaagatagagcaagtagttaaggaacaaaacattgttctagagcttcttgccaaacattgaagaatgtaaaatgaaaggatattttgtctcgcagaatttgtaaccaagagcagagatgttgctgttttttgatgtgtgccgtaactcaaactccttctcaaagaccaaaccaatcatacactgagggtatttgtcaactgacagtgtgccaaccagaatttcattgccaccaactttcacaaaaactctcacatcctcattccccttgtcatcctgcaacgcaatctgtgaaacatgacaatacacctctcctgggttacacttcactgtctcaccaggtctgactagaactcctgcgccttgtgaggactacgcttctgcttcttcaccttgcaatgagttttcagagcgatgtaggagtagaaagtcctgctgcacgactcgcaggcataattaccagcaggttgcttaggcctgtcaccggttgaaggtgtcttctttttgagcaatgaaggtctgttcttcacgtgcttggatggataaggggtggccacatggacatagccactcctcataccggtaccactgccggtgttgttgctcttagatggtgtagtcatcttggccttcttccctggaggtgacttcaagggtgtttctgctggtctattattgtccttagcatgctttgggaagtttttgtcatcatcttcatctgaaatctcatcatctatcct

SEQ ID NO: 7473 - DNA, 255 bp, Setaria italica
  Peptide Sequence Number=SeqID_73447
gctgccggagcacggctcccccggtgttggacgccccgccgacgagccacgtgtcgtccaggcggtggctgtacacgccgaacctcgcgtcgtccacgcgggcctcgctcaccagcttgatcgccatcgtcgagcccagcgacgtcaccgccctccccggctcggtggtgccagctgcaaggaacgccgcgatgctgtccgtcgtccccgtgcagacaacgcattccttggagagcccgtactgtgagcacacgt

SEQ ID NO: 7474 - DNA, 591 bp, Setaria italica
  Peptide Sequence Number=SeqID_73448
taggttaaaacttttattgtattgtctaagtcttctaaaaaaggtcttgcatcatagctatcgcaatgggccatcaaaagcaccaggatttttagatgattatgccttcctgatcaatggcttgctggatctctacgagtttggtggaaagatagagtggcttctgtgggctgtccaactgcaagtcactcaggcaatttaattgtactcgttaaacacttcagtgttgtatcttcgctttttgaatccatacattacatcatgtagagtcataacttttggcatctgtaggatgagttgtttttggactaaacaaggaggtggctattttaatactcctggagaggacccttccgttctcttgcgtgttaaagaggattatgatggtgcagagccctctggtaactcagttgcagcgatcaacttgatcagattatccagtatatttgatgcagcgaaatctactggttacaagctcaatgttgagcatctcttggcggtcttcgagacaagactacggcaacttagtatagcactgcctttgatgtgttgcgcagcagacatgctcttcttgttcctattctaaggtaa

SEQ ID NO: 7475 - DNA, 929 bp, Setaria italica
  misc_feature (1)..(68): n is a, c, g, or t
  Peptide Sequence Number=SeqID_73449
nnnnnnnnnnnnnnnnnnnnnnnnnnnnnnnnnnnnnnnnnnnnnnnnnnnnnnnnnnnnnnnnnnnnagttattgtaatgtgttgaaaggttgaaagaacttgattatatattattttgcaccaccacagtgatacattctcaactaccagcaagattggcaaattggtgtaactatatacagctacaaaaccatatctcctccaggatgctgagtcctagttgacgagcagttacgatccaaaatttggtggatttggctctgcacccaaatttccaagacctgttgaagattatataatgctctataaatttcgtaaacacatggaggctggaaaggagagtgaagcccataacataaagaagatggtaactcacacattggactgtatggcaagaggtggagttcatgaccatgtcggaggtggctttcacagatatagtgtggatgaatgctggcatgttccacattttgagaagatgttgtacgaccagggacagatagtaaatgtatacttggatacatttctgattacgggagatgagtattattctacagttgcacgcgacatacttgattacttgaggagagacatgataggaaaagaaggtgaaatcttctcagcagaagatgctgacagtgcagaatatgagggtgctcaagaaaaaggagggcttttatgtgtggaccagtaatgagatccatctatgtgaatttgtcatccacttttgaacataatgtgtacttctgatcactccctagaaaatgggccaatggtttaaactgtcataccgttatcaagatcacatgaagcctgcatgccaagcttgagttcatctgtggaattttacactttttactggcattgctttggacttgatttgcacatgttcaagctcttcacacctagttgcattcagttagatga

SEQ ID NO: 7476 - DNA, 2455 bp, Setaria italica
  Peptide Sequence Number=SeqID_73450
cgcctcttcctccgccatgtcgtcatccgcgtcctcgtcctcgccccacggcgggcggaagccgaaccgcctcgccgccgagcacagcccctacctgctgcagcacgcgcacaacccggttgattggtatccctggggggacgaggctttcgagaaggctcgcgccaaggacgtccccatcttcctctcaattggctatagcacatgccattggtgtcatgtaatggagggggagtcctttgagaatgaggaggtggcaaagttgctgaatgattggtttgttagcatcaaggttgaccgtgaagaatgcccagatgttgataaggtatatatgacatatgtatcggcactacatggtggtggtggttggcctttgagtgtttttttgtcacccaatttgaaaccattgatgggtggtacgtactttccaccagatgataagtatggaagaccaggcttcaagactgtactgaggaaggtcaaggaagcctgggaaactaaacgtgacgcgcttgagcggacaggaaatctggtcatcgaacaacttagggatgcattatctgcaaaggctaactctcaagatctgccaaatgatctggctgttgtttctgtagatgaatgtgttgaaaagttgacgagcagttacgatccaaaatttggtggatttggctctgcacccaaatttccaagacctgttgaagattatataatgctctataaatttcgtaaacacatggaggctggaaaggagagtgaagcccataacataaagaagatggtaactcacacattggactgtatggcaagaggtggagttcatgaccatgtcggaggtggctttcacagatatagtgtggatgaatgctggcatgttccacattttgagaagatgttgtacgaccagggacagatagtaaatgtatacttggatacatttctgattacgggagatgagtattattctacagttgcacgcgacatacttgattacttgaggagagacatgataggaaaagaaggtgaaatcttctcagcagaagatgctgacagtgcagaatatgagggtgctccaagaaaaaaggaaggggctttttatgtgtggaccagtaatgagatcgaggacacacttggggagaatgcagagctgttcaagaatcattactatgttaaatcatctggaaattgtgatctttcaccaatgagtgatccccacaatgagttcaaaggtaaaaatgtgctgattgaaagaaaaccaacttctttgatggcatcaaagtctgggaagtctcttgatgaatattctcaaatcctgggggtttgtcggcagaagttgtttgatatcaggtctaaaaggccaagacctcatttggatgacaaggttattgtttcatggaatggactagcaatatctgcttttgcaagggcttcaaaaattctgaaatcaggaccaactggaaccagattcaatttcccagtaactggatgcaatccagttgaatatcttgaagttgcagaaaaggcagcgaactttataaaggtaaaactttatgatgcaagctcaaaaaggctgcatcatagctatcgcaatgggccatcaaaagcaccaggatttttagatgattatgccttcctgatcaatggcttgctggatctctacgagtttggtggaaagatagagtggcttctgtgggctgtccaactgcaagtcactcaggatgagttgtttttggacaaacaaggaggtggctattttaatactcctggagaggacccttccgttctcttgcgtgttaaagaggattatgatggtgcagagccctctggtaactcagttgcagcgatcaacttgatcagattatccagtatatttgatgcagcgaaatctactggttacaagctcaatgttgagcatctcttggcggtcttcgagacaagactacggcaacttagtatagcactgcctttgatgtgttgcgcagcagacatgctctctgttccatcaaggaagcaggttgtgttggtgggggagaaaggatctgcagaattccatgacatggtagcagctgcattttcgtcatatgatccgaatagaacagtaatccaaatcgatcccaggaacgcagaagaaatggaattctgggactgcaacaacgcaaacatcgcgcaaatggcacggagcggtcctccggagaagccagccgtggcgcacgtgtgccaggacttcaaatgcagcccgcccgtgacctctccggaggcgctccgcgagctgctgaacaagacactggccgctgcaagttcagctgcctgaggcgccttccttcctgctgcaaagcgcaaacccgtgtgcatatttacttgcatgaaaagtcgtttggaccctctggaagtcttcgcagctgtataacgatgttcccaataaagcacgtaatgaaatgctttacgttttaaaaaaaaa

SEQ ID NO: 7477 - DNA, 620 bp, Setaria italica
  Peptide Sequence Number=SeqID_73451
gaggtcgtagaccgaggccacgggttctatggcgcgggaccgggagacgtggccggcgtccgttaagccgaagggctcgacggcaacgaggacgaaacgttcaggatcagctccccgttgttgtccatctccatcggcggtggtcatgatggccgacttgatcgcggcggggctccattctgggtggagcgtgcggaggaggccaacgatgccggagacgtgcgggcacgacatggacgtgccggactccgagttgaaggccacacgacgcaggtcgaaggcgaggtccgtcggcgagttggaccgggtccatgccgcgatcacgctcacaccgggcgccgtgatgtccggcttgaggatctcgggggtaatggtgttgggcccctgcgacgagaaggcggccatgaacggagccggcttcgttccgaggaccgtcgccggcttagtgatgaaaccagttggattcttggtggagttgaggtaggagtagaggagcaggccgtcgctgtacttgatctgcgtggccgggagcacgtgcgcgtcagcgatgatctcattgccggtgctggcgtcgttggcaagcaccattccgacgccgccggcctgcttcaccgcctccg

SEQ ID NO: 7478 - DNA, 683 bp, Setaria italica
  Peptide Sequence Number=SeqID_73452
ctggcaattctatatattctaattgccatcgaaaatattaaccattgaatctatattgtttccttaaaatttcttacctccatcattatgaaaatcctctaaagtaacccctaaatatgtattgcaattactcatcctaccattgtgaaaaataacttaaagtaaccccaaattttatctaaattatccacctgtactattatgaaaaataatctaagataaccatctgaatctgcatctaaatcagtcatctctaccattgaattattataaagtaaccctagattatacattacatgctagaaatacagataaatactaaaaattgtcacaaaaataaaaaaatattcagccattgatacggtaaactctaatcattattaacaataacagaaaatattttttctgttttctaaaaacttacccacctctgctctaaatctattacaattataagaatgtacttcagtacttatatgtgtggtgtgttagaatatgaccaagttagtgagaggaaatgtaagcaattttgattagcttcgggtcctcaatttattatgaactactaccgctagctcgtgtagaagcatgggttgatagactagcatatataaagaaaagcatgcaatgtttaaaaacattattgagcttcatgcaccgattagttacactaaaaaacctag

SEQ ID NO: 7479 - DNA, 523 bp, Setaria italica
  Peptide Sequence Number=SeqID_73453
tctagagaccgccggaacccaagccgccccacctggccacctccgcaaccttgaccggttgactccgccgcgctcttcacatacggagcacccacccagccccgccgcccccgtcaccgcgattcccatccccaaccaaatgatggctcccccgcgtccaccggggctccccgcggcggcgctcccgctcctcctcctcctcctcctcctcgccgccgccgcgccggccccggcgcgcgcgcagcaggagtacgaggccaacaagcagaacgcctgctacgccaccaacgccagctccgtcctcggctacgtctgcaacgccaccacctcctccgccccgtcctgcgactcctacctcgtcttccgctccaatccgccttacaacacgccggtcttgatctcgtacctcctcaactcctccccgacgccgtcgcctccgcgaacgccgtccccacggtgtccacgctcgccgcctccagcctcgtgctggtccccgtccctgcggctgcaccggcccggcggc

SEQ ID NO: 7480 - DNA, 327 bp, Setaria italica
  Peptide Sequence Number=SeqID_73454
ccagaaggacaagcttgcgtggttcagagacgaggagttcgcgcgggaaacccttgcaggaatgaacccgctgagcatccggctagtcacggagttacctattgtgagcaagctcgacgagcaaacctacggcccaggggactccctcatcaccaaggagctgatcgagaagcagatcaacggtgtcatgactgccgacgaggccgttcagaagaagaagctgttcatactggactactacgacatgttgctgccatacgtgcacgcggtgcgggagctcgaggacacgacgctctacgcctcgcgcacgctcttcttcctggaggg

SEQ ID NO: 7481 - DNA, 402 bp, Setaria italica
  Peptide Sequence Number=SeqID_73455
gcactgtgccgacatgatacggttcttatctgaagaatagtcttggaggcttgaacatcacctttctgtttgtggaaggatttggtctacatgagacgaacttggcgaggccatcaggagatgtgctcctgctgatgctttggacatggaggtgacatgctggattggtagcatctcagaagcacaaggatacaaagaatcgacgttcttttccctccttttcgctgatgttacaccactgttacattgtgcctgatgagtgcatctggtgagctcttgagggttctttccaacttttactccagctactggtgcttcaattgggtgcctcaaggaacatgataatgtttgcaagggtaagaattatcctttgctgttagggcacatggcatggctgcaggg

SEQ ID NO: 7482 - DNA, 554 bp, Setaria italica
  misc_feature (544)..(554): n is a, c, g, or t
  Peptide Sequence Number=SeqID_73456
aataccaatcgcatcggatcgctagggtttaagcctcgccgcctccagagctcgccgcccgtcgccgcgcaccggattcggagaagagaagcgaatcaagatgttcctaggccagattccgcggcgcccgagcaaggaggcggcgtacaagcagctgcggtcgcacctcatcgtcatggcctcctgcgtcgccgtcatccgtgccgccccctacatcctccacttcctcacccgcgacggcgacgtccaggagctcaagctcgagctgtagggtcgcccgtccccataccgcccccgccccccaaaggtgctactggaatgaggcggtcgtctctgcaaagttatgcccagcattgagtttctatgtaccacagaaaacatggatccagtgaccacagtgcttgcttaaactcttttgtgtgttcgtgaaagtcagggacggtacacgtagctgttagctttggtgttttccgagacctgtattctgttttgcgtggctgtatgatctagtcatatttcacagagagccgggtaaaaaaaaaannnnnnnnnnn

SEQ ID NO: 7483 - DNA, 269 bp, Setaria italica
  Peptide Sequence Number=SeqID_73457
tataacacaagtgagattctcttgcaaaagctcatggaaacactcgtctcatcaagtcactcaagcctatactagattattttcaacctattctactcatatatgaaagtggatggcttatgtggagctttgtgggtaaaaacaatcctagcaaaatattatatctgaaatagtgtcaaactaagagacagatctattgggattactgagacttgtcaaaaaggccatggaaaataaatgttgaagagggagagggatgaaacacacac

SEQ ID NO: 7484 - DNA, 341 bp, Setaria italica
  Peptide Sequence Number=SeqID_73458
tgagattctcttgcaaaagctcatggaaacactcatctcatcaagtcactcaagcctatactagattattttcaacctattctactcatataacttattctactcatatatgaaggtggaaggcttatgtggagcttggtaggtaaaaagaatactagcaaaatattatatctgaaatattatcaaactaagagagagatctattgggattactgagacttgtcaaaaacactatggaaaataaatgttggagagggagagggatggaacacacacatttagataagtggacatgtgcaagggcaaagcgtgatcgcgaggcacaaatgaagttctcatta

SEQ ID NO: 7485 - DNA, 599 bp, Setaria italica
  Peptide Sequence Number=SeqID_73459
atccaggtcgaggtgtcggagtggaacaaatggagctcgaactggtgaacggtgcccgtgaaattcaacgcggcgacggtgtaatggccatccggacgaggaaggaggccggcggaggagcaggagaggtaggggtgcgggcgccgcagcagctcgagcgacggacgggtggagtcggcccggtagacgaagtagtcgtagtccttgccacgcgagatacagggcccggaccccatgttgacgcggaggaggaggaggtcgtccaccgagtagaggatctccgggggcaaggaccggttcagatcggagctgtacacgtagagtgtggacggttgcggtgggcgcttgaggcagaaagagacctggatggccttcccattccgggtgcgatcttcggcggtggtgcggctgttgtggatgccgacgacggcgtcgatgttgaagaggacattggtggggcgtcgggatcctcgacgcggaggccgggaggacgacgccttggtagtggacatggtttcagttggaagaggcggtctgctccggtggctgggtgcggtgcggcgggatagcagatggcggcgccggaagctaggggtcgt

SEQ ID NO: 7486 - DNA, 1327 bp, Setaria italica
  Peptide Sequence Number=SeqID_73460
tttaactagcaggcttttttttgatctaaaaatccgagaatccataacagtgatttcgtgaccatataagttggtttgatggacacaaaaggaaatccacaagcataagcattccagtcttataactcaaatacatatcgaagctgacatcacgattcacgagatcaccatgaacactaatgtagattagcgtaaatcatctttggtatcataatcaactccaccgcaccatcttcatgctcattcttcagcatccttccgaactgttactggggtagtggctggattcatgtacttggatattctactagggcaatagatgaaatcaagaccacggtatcttcgagtgcagaagtaagctgcagaccgtagcctgcctaccttcttcatgtcaacagaaagaatccatgccttcgggtgcataaacttctccctggccaccaagtaaacgatatcttcaccactgatgcaaggagagggcagagacatcgagaggttctgcaggtttcttgcagcctcattttcccgtggtctacgcagcaatccggtgtcctccagaacctgtgaaatcgctgggtcaatcgctatgcttgaagctttgaccacggattccttgtgccaatcctccagggagctgctcatcttcttgttgctccatgtggtgagcgcccagtcatccactctgatagaattcaaccctgcttcttcatcatcaaattcctcagtcatttccaaatgaacaagtctgagacatcccttgcctctgatgaaggcgatgccgcggcgttgcactgggctgcccaactcgatcccctgcccgttgttgtagctcatctccaccaatggcaaaggaatcggcatgctgcggagggagggctggccgacgagcacatcgcagagcaggatgtcacgccaaagatcgacccatcccatggtcccaccttcacctccgatggtgatcacggtggttgtatggtggtcaaaaagccggccacagttcctgggaattttcaccgggaagtccagcggcgcgtccaccgacagcatcctgctgatccaggtcgaggtgtcggagtggaacaaatggagctcgaactggtgaacggtgcccgtgaaattcaacgcggcgacggtgtaatggccatccggacgaggaaggaggccggcggaggagcaggagaggtaggggtgcgggcgccgcagcagctcgagcgacggacgggtggagtcctcttgtattagtaatttctaacccttgtctttctttcttattcttatttctttaaattttccttttcttttagttttcttttatttttttctttta

SEQ ID NO: 7487 - DNA, 475 bp, Setaria italica
  Peptide Sequence Number=SeqID_73461
ggcggcggcggtggcgcggtacgacgccgcggcggcgggcgggaagctgtacgtgacggaggggtgggcttggccgttcgagcgcgcgccgcggggcgcggtgtacgacgcggcggccgactcgtggcgcgagatggcgcgcgggatgcgggaggggtggacgggctcctgcgccgtcgccggcggccggatgtacatcgtggcggagtacggggagtggcgcctgaagcggtacgacgaggcacgggacgagtggcggatggtggccggcggcggggtgccccccggggtgcggcgcccgcacgttgtcgcgggggaggtcggtgaggtcgccggcgggaggcggaggatatacgtcgtcggcgccggcctcgacgtcgccgtgggcacggtgtccgccgccgctgccgccggtgcccccggcgtcgaggaggaggtggtggagtgggaggtcgtcaagggccccgcgagttcg

SEQ ID NO: 7488 - DNA, 697 bp, Setaria italica
  misc_feature (683)..(683): n is a, c, g, or t
  Peptide Sequence Number=SeqID_73462
cattgcagttgcagaggaagagcaagaaagcaatggcgacctccctcccggcagcgcccctcctagcccagctcccgtcccacgccaccaggcccctgcggcggcacggtggtggcgccgcacgagctgctccgcctcgctccgtggcggccaccaggaggacgtcgctccgcgtcgccggcgtcaggttaattagtcgccgctacctgcagctgctattcctcggcttcctgcccagctgatgatgcccgccgttgccaccatcttaacttgctcgatctcctcccgcaccgatacgatccaggtgcggcgtcgacggcgccgaggcgctgcgctccggatccgacgtcgaggtgccgccgcggtccgtgccggtgcgcgtcgcgtacgagctgcagcaggccggacaccgatacctcgacgtcaggtacgcacgcagcttacaaccacacattatattatccggccctgtttccatggccgggccagccagactaggggacgcatggcagctacggctgcaggtccgcttccgccaacggcaaagtccatgtcgccgccggacgccggacggggccacggcgcggcagagagaggtcgaggggaacagcttttcagatctagactaattctgcgactctgtgttattcacttgttgttataatttccctaataaaaaaacntatcgttattcagg

SEQ ID NO: 7489 - DNA, 1083 bp, Setaria italica
  misc_feature (1028)..(1083): n is a, c, g, or t
  Peptide Sequence Number=SeqID_73463
gcgaaaccttccgaacttccaacccaaaaataaacccaactgattcaaaagacgtgcatctcccactgccgatcacaccgccagcacaacagcttacagattactagtgtggggtgtactctgctgccctgcatccaacaacactacaacagctacccattgcagttgcagaggaagagcaagaaagcaatggcgacctccctcccggcagcgcccctcctagcccagctcccgtcccacgccaccaggcccctgcggcggcacggtggtggcgccgcacgagctgctccgcctcgctccgtggcggccaccaggaggacgtcgctccgcgtcgccggcgtcaggtgcggcgtcgacggcgccgaggcgctgcgctccggatccgacgtcgaggtgccgccgcggtccgtgccggtgcgcgtcgcgtacgagctgcagcaggccggacaccgatacctcgacgtcagaaccgagggtgagttcagcgctgggcatcccgaaggagctgtaaatatcccctacatgaacaagaccggctcaggaatgacgaaaaatacgcactttcttgagcaagtgtcaaggatattcggcaaggatgatgagatcatcgttggatgccaaagtggcaagagatctctcatggcagcgactgagctctgctctgctggcttcaccgctgtgaccgacatcgctggtggattttcttcttggagggagaatgagctgcctatcacccagtgatctctgaagtccaacatctgtcaaggcagcctagctcaaggattgtacataacatttcccggctttcgaagtaacacttattgctgaataaatggagcctgcaaagcagaatggtagcaggactacttagggtttatgtaatcccttggatgttgcagttccactctttcagccattttttagcagactgtgatgcgcgcgcagcacataaatgtaaaaggcaaacctgagcagtattgtgttacagaagtataataacaaataagttcagcaaataaaaaaaaaannnnnnnnnnnnnnnnnnnnnnnnnnnnnnnnnnnnnnnnnnnnnnnnnnnnnnnn

SEQ ID NO: 7490 - DNA, 682 bp, Setaria italica
  Peptide Sequence Number=SeqID_73464
aatcacaacagttccaacagccccaactcacacaacatatagagttttgctactgcaaaatgggctacagcacccaaaacacatggttttcaaaagtatacatactaattaaaatcctagtacgtgtaaatacctatacttcctctcttcatggagtaacaacaaagtatttgtatgtgctactagatagtcctagtaacaggtcattttgatacaacaaaaatccaggagcatagtgctctgctccccaatgctatgtccttacttcaatctgtccacctccttgtccttgtttcttcttattccgacttcagttttccacctccttgtcccagttcagaccaaacatctgccgcccaaaggtactatcaggttgtaccggaaaaccttatcatttatctggcgaatttgttcctggagaatcctgcagtcatcattccagctaaaaccatcatcttcagactggtttgcccaagccttctttaatgctgacctccagctcgcaatcatgccacggatttccttattcagttcaacccattcaggtgcacaaccatttctcgaaagtatccggtaaagggtgtcttcagcaggatcggcatgaggattggaatcgatgttcaggggttttcccttccctggtagattttcaaagtgcccttcttccattgaatgccatata

SEQ ID NO: 7491 - DNA, 1000 bp, Setaria italica
  Peptide Sequence Number=SeqID_73465
tttttagtttaataatttaccaccatgcttggctcaggctcggcatttccatggaagcttctactcttcagctcgagctccgccaccaccactgccggcgatcagctcaagcgcggagtccacgatcccggagaagctctcgcggtgcttgctgatgcccacgctgcccgagaagacgtggtagcactccagctccgatgtggtgtcggcgatagactcgagcagccgctccatccccacctccctgaggagccccacgtacacgtcgccgcgcgaacagttcataagccagatgatctgttgcaccacgaaccgccgcatccggggcaccttgatctccgggcgcttgttctccccaaggatccatgccagccgctgcacgtacgctcgctcatccaccccggcgccgcgcagctcggcggcgaactgctcgccgtcgatgaacccgcatatctccgtcgtcaggccgacggacacctccaggatcttgtccctcgccgccatggtggcgctcagcaccgccggcagcgccttggtcaccgcgcgcagccgctccccgtgcctctcccccgagtacgcgcacaggctccgcagcaccctcgtcgcgttcaggcggcgcgcgtcgccgtcgtcctgcagcgccgacacgagctggtccagcacgtcggcacgcttgaggatcgccgcgcagccggcctcgctctccagcgctagcatcgccagcgcctcgccggcctcgccgccgagctccctctcctcggcgctgacgaatatggagaggagctccttgaccacccctccggtggccgcgactgccttcttgccgtgctcgtccatggccagcgccgtcagcacgtcggtggcgagcttctgcaactccctgtgctgatgcccgtactgcaggatgtcgcgcaggttgctgacggtgaacacgtcctccgcgacgtccttccggagcgccagccccgtgctgcctgtcgtggacacgagcatcttcacc

SEQ ID NO: 7492 - DNA, 263 bp, Setaria italica
  Peptide Sequence Number=SeqID_73466
agaagctgcggagagatcttgtacaggtcctcgtccactgctcccttcggcttccacttctgctgctcgttcacatactgcctcctgcctcccttcttcctcgccggcacagcgttggctttctctcccttcactcgcacgacacacttcttgtagctgtagggcttggcagggaactggggcaccttgaagaggtcctcgtcgtctttgtccaccggtgctgtgaagaagaagggccctgcctggaagtattgggtgactgg

SEQ ID NO: 7493 - DNA, 606 bp, Setaria italica
  Peptide Sequence Number=SeqID_73467
ctaggagcggagcagcaaatggcgccgccgccggagtggcagaagcggcggctcacccgcctctgcgacctcgtcgccgcctcccttctcccccacctcgaagccgaaacattgccgccacgtcagctcacgcgggaggacgagcggcgcctcctcctcgtgctctccaaggtaaacaaggcaattctaggatggagccaggaggaagaggaggaggagcagcgacgatgtgaatccgatcaggaaattttttcatgttccggagaagttcatagttgttctttaccacctggacagcatccaaatgatggatttggctgcctggcaaatgtggtctccatattggttggtgtccttggtttctgcagtggctatgtcaaacactcagctggcaatgttctggtttccatatccagtaccctaattaagtttgattctatttggattcagtttattgagcttgtctgggcagctatacatgcagaatcaaaatgtgttcataacgctttacattctacaactgactccaacaatgaggatattactagttcaagcaccagtatcacaagcttcatgacagtacttaatgagcgttgttcttcgatt

SEQ ID NO: 7494 - DNA, 357 bp, Setaria italica
  Peptide Sequence Number=SeqID_73468
gcgcggccgccagcgggcggagcgccagcggcgagtaggcgcccaggtaggagctgagcacgcgcgcgcacagcgcgtccccgaagtaggccgccacgcgctccggggacgacccgaacggcgacgccagctcgccgatttccgggagcagctcccgcgcctccgtcagctggtccatggccaccgcctccgcgcaccgcagcaggaggctgagcagccgcagcccccgcgtctccggcccttcctccgccgccgcggcggggcccagcccaagcagctgctgccgcttcccccgcgcggggcacccatccccgtcccccttttcgtcgggggacaccggagcccgcttggccttca

SEQ ID NO: 7495 - DNA, 403 bp, Setaria italica
  Peptide Sequence Number=SeqID_73469
tctcggagtacgcacccatccacacgcatcttgcaatggcggacgagaagcttgccaagctgcgggaagccgtcgccggcctcggtcagatcagcgagaatgaaaagtccggcttcctcagcctcgtcgcccgctaccttagcggcgatgaggagctcatcgagtgggccaagatccacacgcccaccgacgaggtggtggtgccgtacgacgccctggagtcctcgcctgaagacatcgaggccaccaagaagctgcttgacaagctcgccgtgctgaagctcaacggcggcctgggaacgaccatgggatgcacagggcccaaatcggttatcgaagtgcgcaacggatttactttcctcgacctgattgttatccagatcgagtcactcaacaagaagta

SEQ ID NO: 7496 - DNA, 712 bp, Setaria italica
  Peptide Sequence Number=SeqID_73470
aatctgtaagatcgtagtttaatttattttttgaaagaaaattacaagattttctgatactattgctggttttggcagatgggtgaacttgaaggctatcaaacgccttgttgaagctgatgcactcaaaatggagatcatcccgaatcctaaggaagttgaaggcgtgaaagttcttcagctggaaacagcagctggtgcagcaatcaggttctttgaccatgcaatcggtatcaatgttccaaggtcccggttcctaccggtcaaggcaacatcagatttgcagctagtgcaggtttgtaaatatgctgaataaaagtacgcagataatgctcttcctcacaatctaactgaaaagattttttgccttgtagtctgatctatacaccttggttgatggcttcgtcacacgcaattcagtgagaacaaatccatcaaatccctcaattgagttgggtcctgagttcaagaaggtcaagctctagcattaattcctcatagaaataaattctaacattaagttgtaaggtccaaatgcagataagatggttttctttcttcacataatgacaggttgggagtttccttagtcgcttcaagtcaatccctagcattgttgagcttgacagcttaaaggtttctggtgatgtttggtttggttttggcatcgtgctgaaggtacatcttcctaataagtttaaatttaagttta

SEQ ID NO: 7497 - DNA, 2029 bp, Setaria italica
  Peptide Sequence Number=SeqID_73471
cctatcccctgtgtgccttgcctttcccctgttgcgtgtctcaggagtcctcgcctgaagacatcgaggccaccaagaagctgcttgacaagctcgccgtgctgaagctcaacggcggcctgggaacgaccatgggatgcacagggcccaaatcggttatcgaagtgcgcaacggatttactttcctcgacctgattgttatccagatcgagtcactcaacaagaagtacggcagcaatgtgccactgcttctgatgaactccttcaacacccatgaagacaccttgaagattgttgagaaatacgcaaattcgagcattgagatccacacattcaaccagagccagtaccctcgtgtggtagctgacgagttcttgccatggccttccaagggcaagaccgataaggatggctggtaccctcctggacatggtgatatcttcccatcactgatgaacagtggaaagctcgatttactactctcacagggaaaagagtatgtgttcattgcaaactcggataacttgggtgctattgttgacatgaagatactgaaccatttgatccacaagcagaatgaatattgtatggaggtcaccccgaaaactttggctgatgtaaaaggtggcacactgatctcatacgaaggaagggttcagcttctggagattgcacaagttcctgatgcacatgtgaatgaattcaaatcaattgagaaattcaagatattcaacacgaataatctatgggtgaacttgaaggctatcaaacgccttgttgaagctgatgcactcaaaatggagatcatcccgaatcctaaggaagttgaaggcgtgaaagttcttcagctggaaacagcagctggtgcagcaatcaggttctttgaccatgcaatcggtatcaatgttccaaggtcccggttcctaccggtcaaggcaacatcagatttgcagctagtgcagtctgatctatacaccttggttgatggcttcgtcacacgcaattcagtgagaacaaatccatcaaatccctcaattgagttgggtcctgagttcaagaaggttgggagtttccttagtcgcttcaagtcaatccctagcattgttgagcttgacagcttaaaggtttctggtgatgtttggtttggttttggcatcgtgctgaaggggcaagtgaccattacagcaaaacctggtgtcaagctagaaatcccagatggaacggtgattgagaacaaggatatcaatggccctgatgacctttaaatgagcaaccgttgaacaagctgcattcaccaagtggcagatcgttgttcactgttttcctgtagatctgaagaggctccatgacactgtggagaatattcattgcccaattttgcttcaatataatcattaaacaatcacatgtattttacatactttttgagagaaatattttacatactttagttctgattcttgtccttttttttgtggggctggtacaaaagatcttatcccagcaactaccatctcagcatgaatctaatcatagcatttcttatcaacatggacttgaaatgtcagtaaattatttaatccattcctctgaaattcggcactgtccataagtacattaattttccccatcaattgcaaacaaaaacagtcatttttctgcaggagtgatcacttccaatagctctatatccagttcaaaaggagaatcaggcggtatctcactcatcccccttttcccgtatccgagctccggagggacaattactctcctctttccccctactttcatcccttcagttatcgtgtacatggcggctggaggctttggtgctgcttgcgctgagtatagcccattggcattgtctgtgaagtcccgctttcgttctttcccaggcggtgacccaacaatgaactcataaggctactagaagaagacgttcaaacatcgaagttcggattcgcggcttgacactgcggtgataccacggtatatgcagtcgaaatgaacctgcacggctgaacccttt

SEQ ID NO: 7498 - DNA, 826 bp, Setaria italica
  Peptide Sequence Number=SeqID_73472
aagtactagggacgtacaagttaccaaccccaaagggtaaatagcgctggctgcagctggtggtggcagtggatcagtgaagctctgggacacagagaagtggcaaccaattaccagccttgctgtcccacgtccagagggagctcgccctgacaagacaggcagtggcaagtttgtcctttcagttgcctggagccctgatggaaagctcttagcctgtgggtccatggacggcaccattgctgtgtacgatgcaatccgcatgaagttcctccaccacctggagggccaccacatgcctgtgcggtccatggtcttctcccctgtggacccccacgtgctcttcacggcctgcgacgactgccacatccacatctacgacgccaaggagaagaccctcatcggggccatgtcaggccatgcgagctgggtgctgagcatcgacgtgagccctgatggtttggcagtggcgacgggatccagcgaccgcactgtccggctctgggacatcaacatgaggagctctatgcagacgatgagcaaccactctgaccaggtctgggccgtggctttccgaccgccgggtggggctggagtccgtgcaggccggcttgccagcgcctcggatgacaagagcatctccctgtatgattactcgtagttttccatgcccctgcaaggcctctattgtagtttgttggagtctgagactgtcatttggccaggacctgttgtacaatcctaattgagctcctaacttgcaaggaagcaagtttgcttcctgttattgacttaactgtctcaaggttgttgagttaatgagttg

SEQ ID NO: 7499 - DNA, 593 bp, Setaria italica
  Peptide Sequence Number=SeqID_73473
ttatttataattggttgtctagttgttctattcttgggtctattaaactttctttctagttcttcttgtctattcagcatgcatggtgacattatgaagctggcagattaactgcggaggtagatttgggtagttcgggatctgagcatcaacttctttattagttgatgcagcaacctgctcactatggccctgaggaaagtagacgaccggactcccaaccataggcaaggaacaacaaggggcccagcgcatgcatgccatagctcggagttcagacacctttgttccccatcactttccggcgagggctccggcatcttggacggggagagattcatctccaccaccaatacgacccggaacaagaacacctagctccaccgcaccggaggacgaccgactgtcctcctcagcacctcaccatgctcccaacaacaacgccaacctgcttcccttgcgcccagaacatcacttcctctgctgcaggctgctgctgtctcctcccactttccctcggagcagcagccacctccgtttgaagaaaaccactacccgaaccccggactgtcacggcaagtctacgtagtcct

SEQ ID NO: 7500 - DNA, 1133 bp, Setaria italica
  Peptide Sequence Number=SeqID_73474
ggttgcttatcaccagctgtagactcatcccaaccaacctcacagaacgccagtgtgagtttggccatcgctctgagtccagatcacttatgcctgtgatcgtacccatgtatcgtctgacacttgattcctctgtctcaaaaagcatacggaatcgcattccaacagacacacgtgtgtggtaaacagctttcacatacttagccagtggaatgacaaactcagaagggctagcccgaggattatagaaaatagtgaaacgactgtttgtggctgcagcatgagctgctgctgcaagaagaccaatatgcatgctatcgcttgatagcacagacgagggcataacagtctgtggacgatttgcacgacgaattcccaaaagaagttggttattgtcgttccagataaatatgatagaatcccctgctactagtcttttcgcacttacaaatacactccagcccgtcgtcaggagatgcctttttggctgaccacgaaaaatgtggcgaaatttccactcgttgtcatgcagatctcttgcaatcagctcctgcactggaggttgttgtgaaaaatccagtggggggaagactttctcagctgctcggcgcggaacagagaatccaccatgagtacttgtatcacttgcagtcaatgtcttgcagaagtaattagttggctgcttgctaccagcacccaattcaatcggaagaaaaggttccttttgctcttccggactcaatggttgcagtgtcatctgggcataaacttcttcagtctctgcatcagcatgcatggtgacattatgaagctggcagattaactgcggaggtagatttgggtagttcgggatctgagcatcaacttctttattagttgatgcagcaacctgctcactatggccctgaggaaagtagacgacccggctcccaaccataggcaaggacacaaggggcccagcgcatgcatgccatagctcggagttcagacacctttgttccccatcactttccggcgagggctccggcatcttggacggggagagattcatctccaccaccaataataacgaacccggaaacaaagaaacaacctaagactaccaaccgacaaccggaaggatcggaaccgta

SEQ ID NO: 7501 - DNA, 274 bp, Setaria italica
  Peptide Sequence Number=SeqID_73475
gccttgttctgttcaatgaggtaggtcacatggttaaggccatatttcacaacaaattggtttcttggcctcaacggttttacccttacaagacctacaagacctagaagaccctacttcaaaaagacctctccttcttggcagccttgtcctcagggcggtacttgagaagcatcttaaacaggttggtagcgaggttcttgtcgagagtccgggtgaactggttgagcgccggcggcaccttgaggcgctgcttgaggatgcggcgctggcg

SEQ ID NO: 7502 - DNA, 263 bp, Setaria italica
  Peptide Sequence Number=SeqID_73476
ctgccctgaccccgggacgagccccaacccttatcaaaccctaaaccagaaaactaatcccccaaaaaaataccgcaaaaaaaccagaaaaaaaatacaccacctgatcggagatggcggcgcaggggcaggcggcggcggcggcggtgtcggcggctgctgcggctggatctgcgtccgagtccggcggcggcgtcgtctccgtccgcgtctgcagggacatcaactcccgcaagtcgctaggctacgcctacgtcaactac

SEQ ID NO: 7503 - DNA, 367 bp, Setaria italica
  Peptide Sequence Number=SeqID_73477
aactgtatgttggaagagcacagaagaagtcagaaagagagatggagttgaaggagaaatttgaaagaatattcaagaagttgctgagaagttccaaaacactaacctgtacctgaaaacttagaagacaatgttgatgatgagaagttgcgtgaactgtttgctgagtatggcactattacttcctgcaaggttatgcgggatgcgaatggtgtcagcagagggtcagggtttgttgctttcaaatctgctgaagatgctaaccgagctctcacggaaatgaatggcaacagcactagttatggttccatactttccaaacatttccttcaactcatcatcagttacagtctcggacagattcttc

SEQ ID NO: 7504 - DNA, 473 bp, Setaria italica
  Peptide Sequence Number=SeqID_73478
tatgattgcacacgatcgggagaagtacaagataaatataacaggacgggatttaggtcatccgctgagcagcctccttggcgagcagcttttccctggccttggttttcgcctgcgatttggagcccatgataccacaccccacttcttcctgacctcatcaaacttgtcgttgaagtttgccttaatagcctccaggatcttgctgaactcaagtttgtcctcattcttaacagtggtcaggcagagaacagatgcggtcttcttgtgaacgatcgatccaaggcgtgcttttcccttgacaatgcagtatggaacctccattttcctgcagagggctgggagccacacaaccagctcaatcggatcaacatcatgagctatgacaaccagctgggccttgctctgctcaattgttgtgaagtatggccttaaccatgtgacttacctcattgagctgggccttgctctgc

SEQ ID NO: 7505 - DNA, 380 bp, Setaria italica
  Peptide Sequence Number=SeqID_73479
taaattgttttggtaaagttattggaaccataactagtgctgttgttatgagggacagtgatgggaaatccaggtgttttggatttgtcaattttgaaaatgcagatgatgctgctcaggctgttcaagagttgaacggcaaggtattcaatgacaaggaactgtatgttggaagagcacagaagaagtcagaaagagagatggagttgaaggagaaatttgaaaagaatattcaagaagttgctgagaagttccaaaaacactaaacctgtacctgaaaaacttgaagacaatgttgatgatgagaagttgcgtgaactgtttgctgagtatggcactattactcctgcaaggttatgcggatgcgaatggtgtcagca

SEQ ID NO: 7506 - DNA, 808 bp, Setaria italica
  Peptide Sequence Number=SeqID_73480
tttttttttttgtcgcataaatataagcgagagattcgttactgatatagaagttggagtcatattaactaaccagcgctgaacaaaaactttgaattcttacaaggttttctttctagcacgtctcaggagcaaaactctcaaaaccagatcagacaaccacaatatgattgcacacgatcgggagaagtacaagataaatataacaggacgggatttaggtcatccgctgagcagcctccttggcgagcagcttttccctggccttggttttcgcctgcgatttggagcccatgataccaccaccccacttcttcctgacctcatcaaacttgtcgttgaagtttgccttaatagcctccaggatcttgctgaactcaagtttgtcctcattcttaaacaagtaggtacaaggcagagaacagatgcggtcttcttgtgaacgatcgatccaaggcgtgctttttcccttgacaatgcagtatggaacctccattttcctgcagagggctgggagccacacaaccagctcaatcggatcaacatcatgagctatgacaaccagctgggccttgctctgctcaatgaggtaagtcacatggttaaggccatacttcacaacaattggtttcttcgcctcaacagttttcccttcagtttcagcctgggccctcttcaaaagcctctccttcttggcagctttgtcctcggggcggtacttaagaagcatcttgaacaagttttgttgcaaggttcttgtcgagggtacggtgaactggttgagcgccggggcaccgttgaggcgctg

SEQ ID NO: 7507 - DNA, 858 bp, Setaria italica
  misc_feature (849)..(849): n is a, c, g, or t
  Peptide Sequence Number=SeqID_73481
tggctaccgctatcccacaggacgtggaatgcctgatcctggcatgcatggtgttgggggctgtgatgccatctccatatgagatggggtgggatgccaattagagatgctggtgtgtcacaacctgttccaattggggcccttgccactgctcttgctaacgcaccaccggatcagcagaggctgatgcttggtgagaacctgtatcctctagttgaccagctggagcatgagcaggctgccaaggtgactggcatgcttttggagatggatcagacagaggtcctgcacctgctggacgtccccagatgctctcaaggccaaggttgctgaagccatggaaggtacctaccgctctgcccagcatcttcagcagaccaacgcctcccctgagcagcagctggccaatctgtcgctgaatgacggcgtcgtctccagttgaatgtctccgatgactgagtgatcgaagactgctggcaatttttgcttgataccatcctatctagagtgcaatgacttggtttgcttggttattggagttttagcttgctctataattagctgaactaggggttggtctagttttgtcgtggattggttattttggtcttatggatatgttgtttcgttgaagctatcgtcgtgtttattaccgttgttgctttgttgagcgtcgttcgttgtgggtttggttggatgagcaggttgtagacttgtagtggccctcctggactgagagccagcgtccctatgggggctgtgtctgagctcagccacccagctatggggctgcagggtacttcaatagttaggtctcgcgatcacaaaaacaaaaaaaaaaaaaaaaanaaaaaaaaa

SEQ ID NO: 7508 - DNA, 1079 bp, Setaria italica
  Peptide Sequence Number=SeqID_73482
ttctctagttttttttttttttttttttttgtacccattgagaagttgagtcgtatgcagtggcaggcattgagcaaaatactgaattcttacagtgttcacttttcttctgtctactacaaacaaaaatgacttcaaactagatctgacgagaccatcatagtatgctgacactactcaggtgaaatacaggataaatgtaacacaaatatatttaggtcatccgttgcgcagcctcctttgcaagcagcttttccctggccttggttttcgcctgtgatttggagcccattacaccaccgccccacttcttcctgacctcatcaaacttgtcgttaaagttcgccttaatagcctcaaggaccttgctgaactcaagtttgtcctcgttcttgacagtggttaggcatagaaccgatgcggtcttcttgtgaacaatcgatccaaggcgtgcttttcccttgacaatgcagtatggaacctccattttcctgcaaagggctggaagccacacaactagctcaataggatcaacatcatgagcaatgacaacaagctgggccttgttctgctcaatgaggtaagtcacatggttaaggccatacttcacaactattggtttctttgcctcaacagttttcccttcagcttcagcctgggccctcttcaaaagtctctccttcttggcagctttgtcttcagggcggtacttaagaagcatcttgaacaagttggttgcaaggttcttgtcgagggtacgggtgaactggttgagtgccgggggcaccttaagccgctgcttgaggatgcggcgctggcgctggatgcgcacgaccttgggccacttcacgaagcggtggagatccttcttcggcggcagtgcgcccccgattccaaactgcttcggcctcttctcgaacagcgggttcgtcaccttctccggcttcttcttccgccggaaccggcgccttgccgcctcgcttcggggccattttgccggcggctgcttggatcgagcgaagagacggccggcgaggacggagggagggagaggggggcggcggtgacctgtgtgttta

SEQ ID NO: 7509 - DNA, 402 bp, Setaria italica
  Peptide Sequence Number=SeqID_73483
atcactcctcactctgcagctctccacagcatctctgcgagcgagagctagctaccacggtccacagacaggggacacaatgccacgcttacccaagagacccgggcctctccttgtcctcctcattgtcgcattcgctgccgccaccgccgccgcttcctccgacgccgccgacaccgtccccttctacccgtccgcggaggccgccgcggccgcgcactgcgacggcacgctctaccccgagctctgcctgtccacgctcgccgacatcccagacctgcacaacaagcccctcccggacgtcatctgcgccgccgtgaaccgcaccgaggacgtcgtgaccgccaccgcctccaactgctcctcctacctccaggaaaggaccctcagcgcgcgtgaccg

SEQ ID NO: 7510 - DNA, 400 bp, Setaria italica
  Peptide Sequence Number=SeqID_73484
ccgttgacaggagtgcacggcgtcttctcggcgcgccatccatcatcatgccatcatttgttgcgtacgttgtcagcctcggcggctttgccaaaagtgctcgccggggttgcctttcccagcgcctttcctgagcacagctgcggccgcaatcggagagagcatatttgcctttgccgctgcgctcattccattcggagctcgaaagcttcgcttcgcctgcctttctctcatttttttttctttcgctctctaacctggttgacacctgcaacggcgctctgtcgttaactcacgctgcctcccccgctggttgtttttctgtttgggtagcatcggcagcgccgcctccccgccggagttcatgacctctgcgtccgcggtgcagttcgcggcggtg

SEQ ID NO: 7511 - DNA, 395 bp, Setaria italica
  Peptide Sequence Number=SeqID_73485
tgctgtgtgctaactgcaatgcctttattgatgccctttattttacattagtgctgtaaaaaagaatagtatttaccttaattactaataataacgccactgtcaacacagatctccatgataatcgtcctggttgaccttgattgccacaagtgctacaataagatccgcaagattctatgccagctccaaggtaaaagaaatactgaagcctcgtcagtgagattattcttcgtcactatggtttggaacagtgtcgaaattcatgcgaaatttcagggattcaaagtttcaaacatctccaggatgcatgatcgcacaaattcactcttatcctctgagttgttattgcagactgcgagaggatccggacgatctccttcgacgacaagagc

SEQ ID NO: 7512 - DNA, 1068 bp, Setaria italica
  Peptide Sequence Number=SeqID_73486
ctctctctctctctctctacatgtgaaaaaacggaggatcagctcacaggctcgcaccaagcatggcagcacagatctccatgataatcgtcctggttgaccttgattgccacaagtgctacaataagatccgcaagattctatgccagctccaagactgcgagaggatccggacgatctccttcgacgacaagagcaagacgatcaccatcgtcgggccgtttgacccgcagaggctcgcctgcaagctccggtgcaagggcggcaaggtgatcagggacatccacatcgtggacaacggcagcggcaggccgccgcagaagatggcggaaccgccgccgtcgtccccgccgccgatgaaaaacggcaagcagaaacacaaggggaagccgccgccgccgcccgctgccgacgagccaccgccaccgcaacctgcaccggcgccggagccggtgccggtgcacgagatgccaccgcccccgtccccgacgcaccatggtccacctgaccgggagatgtcggcgatggtgccggcctttgtcgaggagaagcaccccaaagcgaagccggcggagctcgagccgccgcccatgtcgccgccgcggaaggagaagccgccgatggacatgcacatgccgatgccagcatcaccacttccgccaccgccagtgaaggaaagatcgccgccgctgctaatgccggcgaggccgtgtgatcagccgccggtggagtacgtgatcccgacggtggagatcccgtcgtggccggcgccgccggtgggcccgtgtgggtgcccctgctgcgcaccgtgctaccagggctactacgaggggtgccggtgctgcagctgcggccgggcgtacgcgccggcgccggcggcgtgcggcgggtgcaggggctgccggaccttcagcgacgaggaccccacggcggcgtgcaccgtcatgtgatcttcagtggagtctgtcttagtagtaacacaagttctgcacagtggctatacgtctattattggagttctcaccttgtggctttgcgtggattaaattggattttcaatgaattttg

SEQ ID NO: 7513 - DNA, 765 bp, Setaria italica
  Peptide Sequence Number=SeqID_73487
ctttggggctctgaagtttgtatcgggattcaccttcagagtatctccctttgaaaaggattcattcttgcatctggtggaccatagtcaccagatgagtgatacttccctgaaagtatacccattgccattgggctgtaagccagcaagctgattctttcgtgatggcagcattctgccaatccagaatcaaaattgcggcacagcaagttatatgagttctgcaaggtcagtagcttggagcgcaactgaaaatccttgctcagctgtagaaacttcatcaggccatatggtgtctcgttactaaggccaatgtaccttgccagcatctatggctctttcaagagcctcaagctgttcttccattggaacagacgtgtactggcagcttgggtcatactctgtttccccaaacataggaacatacctatcgggccagtgtatctggtagaggtcgatgtaatccatacccagcctgcgcaaactatcatcaattgccaccgtgatgttctgcgaatcgagagacgtcggcccgccgcggatccacgtcatctggccggacggcccggcgaccttggtggcgacgacgacttggtcgcgcggggcccggcgggcccgcagccagcgcccgagtatctcctcgctgcgcccgttggtctcactgcgctgtgggaccgggtacatctcggcggagtcgaagaagttgactccggcgtcgaaggcggcgtcgaggaggcgcagcgagctcggcgccccgctctgctc

SEQ ID NO: 7514 - DNA, 1080 bp, Setaria italica
  Peptide Sequence Number=SeqID_73488
taactaacaaacctaacaacacctcgacgcaccactagaatgcagccatgatcacctcctacctccccctccgctccttctctgtctcccccaccaccatcgccggcgccgcctaccgctcccctaccgccgccaccgtccctttcccaagagccactctcagccaccaccaccggcgccgcctggcctcctcagcgaacgggtctctcccgggccttcccctcgtggaggaggacgatgacgaggtctgccctgtggactgcgtgacggagttcaagacggacgaggagttcgtgcggcacctggagcggtccaaggccacgggcgcgctggtggtggtggacttctaccggccgtcctgcggcagctgcaagtacatcgagaagcgcttcatgcgcctctgcaagggctccgccgacgacggcgcccccgtcgtcttcctcaagcacaacgtgatcgacgagtacgacgagaagtcggaggtggcggagcggctgcgcatcaaggtcgtgccgctgttccacttctacaaggacggggtgctggtggagtcgttcgcgacgagggacaaggagaggatcatcgccgccatccagaagtactcctcgcctgagcctgagacgaccgaggaagaggttcaggagtgaacattccactggcggacatcaattccctcgagggtgcagtcgtgcagaactgcagatgcctatggagagagatacaccaggattcttttgacgttcctatgactgtccatgcatttgggagatgtcagctattggtatttgatggatctggatcagtgtaccattatctgtaaaacacgagacatgtataatatctgaatcaagcattactgctgctacactaccgtagtgtagacattcaatgggttctgacacattctgcatgacgcgagtttggctattgccgtccctctgtcaaatacagtagctaaaccatcaaccaagtgtaaaaccgtgccgtacacccccgacctccgctgtattgtatctgtcatcgcaggcggctcgatctgcgaggattgttcacgattgattcccactgacgtgatggatt

SEQ ID NO: 7515 - DNA, 472 bp, Setaria italica
  Peptide Sequence Number=SeqID_73489
cttgtttcttattgttgatcacttgatccatgctgccatgatccagtggccactgctcttcagggtgatcgcaatgctcaactggttggccactactttcttcaccacattggctgcttccagctgccatctcattagcacactcatctaatgttagaaaaagtgtagcatttcttgaaggttgttgatcattttcatattctgcagtcctatccccttgaacttgtgtgtcgaaaattcatcctcatcaacactaaagatataattattcaaagaaggcgtgttgctcttttctcttcaatgaagtttgaaactttctttgaaatttcctttggaacattcgggcagctgtcgtcaatgagatgagccttaaaagtagtcacaccaccacttcgacacagagaacagaacttgcactgccaccgccttttatttccatcaagatccacagcatggcttcccagccaatatc

SEQ ID NO: 7516 - DNA, 358 bp, Setaria italica
  Peptide Sequence Number=SeqID_73490
cgacagcgacgcgggtgccgttccacaggctgttcgcgttcgcggactccacggacgtggagctgatgctgctgggcgcgctcggggccgtggccaacggcgccgcgatgcccttcatgaccgtgctcttcggcaacctcatcgacgccttcggcggcgcgatgagcatccacgacgtcgtcaaccgggtctccaacgtctctctccagttcatctacctcgccatcgcctccgccgtcgcttccttcgtccaggtaacgtgctggatgatcaccggcgagcggcaggcggcgcggatacggaacctgtacctcaagaccatcctgcgccaggagatcgccttcttcgacaagtacac

SEQ ID NO: 7517 - DNA, 666 bp, Setaria italica
  Peptide Sequence Number=SeqID_73491
gtacggcgcgtgcgccgcccgcgcggccgcctccgcggcctccctcaggcgcgcctccaggtcgccggcggcgaagccattggcgacgaggaactgctctgcgtggacggagtggcacagcgggaggccgcggaactcgaggttgccgtgcttctcgaggacgaggggcacatcttctgggaggaggtcgtggggcccgaaggggcggaggaggagggacgcgaccgtgcgccactcaggcgcgcagccttcctcggcgtccgaggtcacgaggatctggatgccggaggcgccgcggatctcctggaggaactggcggcagtggccgcagggcatgtgggagacggcgacggcgctcagcgcggactcccccgcggcggcggcgttggcgacgaggaactgctctgcgtggacggagtggcacagcgggaggccgcggaactcgaggttgaccccgacgtagacgcggccgctggcgcccagccccacggcgccgacggggaaccgcgagatcggggcgatcgcccgcttcatcgcggacggcaccagcagcggcagcaggtcctgcacggtggccacgccggccgccgccgcggcgcgcttggcctcctccgcgctcatgacgaaccccgtcagctccaccgctgcggcagcggcctccggcct

SEQ ID NO: 7518 - DNA, 339 bp, Setaria italica
  Peptide Sequence Number=SeqID_73492
tgtttggaatctgagattcagactcctccgtccgtgagattattgttccgtgatccatgcacaagagttgctagagaagtcgtcaaggttctccaagagctcgcggtgagcataaaacgtcacaggcgctgcgcccctgacgtgctctctgaccatctccatgaagcgttgcaggatctgaactcggctatcagatcacagccgcggctcttccttggctccaaacgcgcgtgtgctgccaataagcatatgctcatggaactgaactctggaaatcacacggcatcaagagctacccttcattcgttcaagactgatgcaatggcattgtcagaaagg

SEQ ID NO: 7519 - DNA, 1065 bp, Setaria italica
  Peptide Sequence Number=SeqID_73493
tttttaaagttaaacgaacagcaagatgtttgtcgaaattttacagcacaagtaaagtttgatttacaacagttggtgctactgctagagcagcatacaatttagacactggcgggtactaactactactagcacattgttttgcttgtaacaacaacaacgacaagtatggatcatggtccttcctcctaattagacacactagtactactatccaaggtgcggtgctgctgctgttttgggtggcggagggagcggcgtcttttgtcggcctttggtggtgggtggtgcgggcggaaggtgcgctccagctcgtcgaggctcacgctgatgagggggacctccggcgtctgctgcaagtggaagaggcgcttcttgcacaggggcgccggaggcttcctgggcgccggcgggcacgtggtgggctccttgaggtaggtgatgccgctgcccgtcggcgtccggcagctgtagtagtcgtcggctccgaatccaacaaatccggctggggctgggagcggcgaggcgcagggcgacgtgaaggccgcgggggcggcgggcttgtagaactcgggcgacgccgacatgcctttgcctgctggggatcctaaaagaatcctaagtaagcaagcaaagcaaagcaaagctaggtgcaggtggagcagagcaggtagctggtgagctgacaaggaagcagctgccgctgagcggaggaggtaaacaaggaaggcagggcgaatcgattgctggtgcgtgcgagcgacgcggagaccgacctgttctgtttataaggaggacaggaggtggaggcggctaggagcagagcagaggagagcaggtgtgaaatggagaagacacgagcgccgtgcggtggaaggaacggaaccgaaccgatgggagcaaggaaggagaggggaaggcaggtgttccgttcctcccacccactggtcactgcgctgcggggccagagcaagacgagggaggggcgcggcggggcactgttggagcagcacggccgaggctggagcggagctccgctcgttgctggagccatttgccgctcgc

SEQ ID NO: 7520 - DNA, 268 bp, Setaria italica
  Peptide Sequence Number=SeqID_73494
cgctggtctcggctacgcccaaaccctcgccgtcgactcttgcaaacccttctccatggcggccacggcagccgcgggggccgccgccgcaccgccgccgcggcagtccaagctggaaccgcgggaggagctgcgcgtggaggtgccccccgacgcgtccctccgcgtgcgcctcgtcgccggcacggcggagatcttcggcaccgagctgccccccgagggctgggtctctattcctccccgctccaagatcgccatcttcagttgg

SEQ ID NO: 7521 - DNA, 712 bp, Setaria italica
  Peptide Sequence Number=SeqID_73495
aatcgagccgggactgaccgcggagatggctccggggaagcgaggcaaggccagaggggaggcgccgccgcccgccgccgccaacgccggcggaggtgggttcccgagctgcctccgattgatgccgccgtcgacagtcgccatctcgatccacgccaagcctggttctaaggtcgccaccatcacagagatcggggacgaggcggtcggcgtccagatcgacgcgccggcgagggatggcgaggccaacgccgcgcttgtcgacttcatcagctcggtacttggggtgaagaaaagagagatatctattggctctggttctaaatcaagggaaaaggttgtgctggtacaagatgctactcttcaaggtgtctacgatgctctgaagaagtcctgtaattgttgatgatgtatgtatgctaaacctgatagtaactggatgaccatgaggtaaactagtggtctttgtaataacatatctgcgctgttagtgaatctcctaggagtgctcttgcaacatgcagtaagtttcaaaatggagtgacttgactgaagatgaaactgaatgggatgtcgtctttactgtcatgagatgcagatctttcaacgagaccaggtgatatagtaatgctgtttgccggaaagatttacagagatggcttgccatctaacgttaaaccccgtgtatatatgcctacaatgtgtgtgtgta

SEQ ID NO: 7522 - DNA, 631 bp, Setaria italica
  Peptide Sequence Number=SeqID_73496
gtccgacaagtatcggatgagtatcaatatatattgatactcggaccctcacttgtgaaacggaggcagtaaaacacatgcaaacgcacaaaccccacattcgtgtcctggcattcgttttgttgccttgacgctgccctgctcctatgctgtatattacacacttgaaaaccttttcttttcatgtgtaaaatcgacagagtaaaacaagctagaatactttataagagtctacaaacagtgatttaacagtatccttgatgttgcaactatttgtgtaggcatcctcttgcttgtagaaaaactccatacttcttgtgaggttgaatatcctctccaataactcctttggttgggctttattaggttttagccactcctcgtttaaacttttccatgattcctctgtcagctcctttatcttctttagtgccagttccattgacatattgtgctccttcatgcaactgtcaattgttgaagcgacatgcaatgccatttgttcacgctcatatgacttcggatcatctaatagcctcagaattatgcaaagtgaatgtactatttcaggcatacttgaaacccactcaaaagattctctcgttgctatatcacccattccaacgaatga

SEQ ID NO: 7523 - DNA, 389 bp, Setaria italica
  Peptide Sequence Number=SeqID_73497
ctggttcaaatgtggaagagttaagctgcaatcctgctgcaaaaataaatgtttaaacaaggccataaggtttgcattctaaaaaagaactactgttgctcgtaccttgcttgaaatacaccggtataccgactacaaagtggaatcacaagagacactcagagctcacatgacagcctgacaggtggtattaacatttatgactggttaccgcttatttggctggttgatgatatcagcattccggacatggtgcaagggatggatgcaattcatatgtaaacatcttaattgccacagcaaatatagcctctccttggaggtaacattgtgaggcaggtcttagtgaaatagaagcatgcactgtaatttcacaactgtgaaaacaa

SEQ ID NO: 7524 - DNA, 414 bp, Setaria italica
  Peptide Sequence Number=SeqID_73498
tcctcctgcaaggaagcttgagtgctggaatacacccttctgcttctgcaaagatgtcaaaatttcagccttgagtcagttgctgaaatgctgtcaatgttcaagaaagttatacacctgaccgatgtaaagggtcttgcatgtactcagcacgaagatccactttgttcccctggcgcttccggttgtatcaacaatctgacggctcaacttgtacatcagcctcttattctcgactatcacttcgtaagattccctttctttagggccaaggtacttgatacattgcttgtgcatcttccatcttgggcaatggtcctctaagttgacatctttcccttcacctacatccaaccagtagaagaatggttgcttgctctcgcagtggagccaacggtggtagtaaaagtgcag

SEQ ID NO: 7525 - DNA, 1802 bp, Setaria italica
  Peptide Sequence Number=SeqID_73499
tctcaatatgcacagttggcatcatcctcccgaggaacaaaacaagaaagcagagcaatccacacttccacagcatcggcctctcagaatgcagtccaggtagcactcctctgcctgggcttgagcgacatgctcacgccgtcgccgtcggcggtgaggcttccgcacttgccggccggaatgctgttgggcgtcagcgcgcccagcctcggcgacgggaacctcgccggccttcccccgcggggcgacaggctgacctcctccagcgccctgaactggagctccgacgggtagtcccggacgcacccgatgcgcggcccggcgccggtgctccactggaaggacagctgcttgccgagctggtacgaccgcatggcgcgcttggagttgatgcggctcaggatcagctcctccggcacctccgccaggtcgtccaggccgtggtcatcgagccagtcctccgcgaacaggttgcgcttgcagaagtcgaggcactcgcctagcatggccgagtccgggtcgatctccttgccgcccggcgacggcgacggccgggagctgctgctgcagtgcggagccggtggcagcgggatcctgttgttggagctgatcagcagcctcggcggccgcttcccttgtagcctgttgtctgaggaggccttcctgatcgtcgccgccggggtgctcgtctcggtaggtggctgggtgggctcggcgttgcaggtctcggcttcgtcttcggcttcgccatggcgctgcacggattgtgcctcttgttcttggttctgttcttgctggcagagcttggtcaagtccagctgcgagtggttgcccctgaggctgaagtcgccatcttcttcaccttctgacgggctcaacttcacgtcgctgagatccacactcctgtcctttaggaagttcatgaactcctggaagttctgctctgtcggtcgataatgcccgctgtgaggccacacagccttcagatgtccatcctctacaaccagtctccctgcagcagatgtcgctcctcctgcaaggaagcttgagtgctggaatacacccttctgcttctgaccgatgtaaagggtcttgcatgtactcagcacgaagatccactttgttcccctggcgcttccggttgtatcaacaatctgacggctcaacttgtacatcagcctcttattctcgactatcacttcgtaagattccctttctttagggccaaggtacttgatacattgcttgtgcatcttccatcttgggcaatggtcctctaagttgacatctttctcttcacctacatccaaccagtagaagaatggttgcttgctctcgcagtggagccaacggtggtagtaaaagtgcaggttgtggccataccgatgtcgagggtcaatcgcctcaagccaatgctgcagggcaagtttctgggccttttcatccttggagagacctttgccaaccttggcagccctcattcttgcccgggaccattttgacacagcagtctcaggcttctctatatcgaagaatgacaccgaattccgcttgagcagcgcaaagtcgagcaatttccaccatcgttgttccacaagaacggcacaatccgcaagctgccgccttgtcctgaagctcttgtacaccttctgcagcctgagtgccgcggcctggtgcctcgggctttcacttccgtctacaggatgatctggtggacggtctcgggctggcccgaatcttgatgaactagaagtgccagcactaggacttacattgcaactgtctctgtcaggtttgggact

SEQ ID NO: 7526 - DNA, 727 bp, Setaria italica
  Peptide Sequence Number=SeqID_73500
tttagccgcctctggcggccgccggagctcgatccagtacccgttccggcgcccgtcctccgccgtcggcgcccagtacgtgtcgtcgtcagccgtcgagcacgttgcgggcggcgaacccgccgcccggaccgccgcgctcgctgctggccctggccgcgctgcccgccgcgaaggtccgtgccgaagatggtggccacggcggcaccgaactcgcgcagccgcgcgacgtcggcgtcctcgaccaggcccgtggagttgggcggtgcgttcagcaggagcacgcagttccggccgacggagttgtagtagatctccagcagctggctcaacggtttggccgtctcgttcctgtgccagaaccagcccggacggatcgacacgtcgcactccggcggcacccagtcaggcccccgcgggtcgccctcgttcaggtacttctcgatgccggcctcgccgatggtgatcatggagcggttgacggtggaccagcaggtggttccggcgaagcccttctcgtcgccgacccaccgcacgtcgggcccgtcgtcggagaagatgttgatggagcgctgcagctgcttcaccgtctggaaccactcctggaagtggtacgtcatgttggtcgcgttcttgcccttggcgccgtcgaaccaaatctccgacacgctcccgtacccggtgaggtgcccgtggagctgggcctcgtagtactcgttgtacgcga

SEQ ID NO: 7527 - DNA, 419 bp, Setaria italica
  misc_feature (9)..(9): n is a, c, g, or t
  Peptide Sequence Number=SeqID_73501
ttttttttntttttttttttgtttcagaaactgagagccatgagcccatgagcatcttcagagtataatcctttctgaggtggcaaaggtgcaagggcatatccggacccagccatgtacattctttctgagataaccggataaaatccttcaaaagcaatagaaaaatgaagctgccaacaaccagcacttgaatcatcaactgtcggtgccctcgttgaacagccgaacaatcatgcttatacaaaatcgaacgcagtgctactcccaaaagagtttcccagcgcccaggaaagcgccaatcacatggtccatttcatatggcatatgatctccagcctggaggatccgtcgccgaagatatttcgttatcccgccacaacaggcaagcaaaagtagataacgcaatattacagttt

SEQ ID NO: 7528 - DNA, 1050 bp, Setaria italica
  Peptide Sequence Number=SeqID_73502
ttgttagttctttgtttgtttcttaaatttgttagttagtttaacggttaggtaaagggtatgcttgcgaaaggttgctccagaatgtttatgcagcctccacatttggttcagcatccccattatcttcatcaggccccccatccttcttcacaaagtcaaatccatattcttcctccgaatagtgctcctcggcgcttctgccaaagatgaatggtcttctacccatcgttgtaaaaggcattagcccaaaggcacgcgcggttttgatctctcttgcaatcttacgctgagctttcgcacttatgcgagtctggcttctcttgatgataattccagcttctgtaagaaagttggagaggaatctaacattcctaaaatcagccttcctcaaaacctccgctgtagttgtttcaaactgtggtctaggagggttctttgcggctgcaggtcttttaaggtcaaggtcccgaacattataagtcgaacctcgcctaaagtcgacatcaggcctgaaatcaaagtcttcatcatcccagtcctcatcatcatcgtcgtcatcgtccatttggaagttacgtgccacatgagccagcgtctcacccattccatcattcaaagagtcaaaaccacccaatggcccagagctgctcctgtcgccgaacacaccaaaaccacccatggacccagaactgctcctgttgcccaaaccaccgaaaccagccatggatccagagcccatgccgtatctcttactggtattctcaaccttatcgagcttccgatagagtgacccctcgtccacccccttgttgctcccaaacagacgcgcctcgaattcatccatggtctcaccaatctcgccatccccggactggaaggagcggcagaactcgctggcggcgggtggccggtgggaagggagggctcgtcggagcgaggcgcgccgcgggagagatcgcctcagagccgagctcgccatcgcgctcggtggtgattcgtcggcgccgccgcaaccccgacaccagggaggagcgggggaggagtggg

SEQ ID NO: 7529 - DNA, 999 bp, Setaria italica
  Peptide Sequence Number=SeqID_73503
tattgtctttgtcgtaaaggtttgtcttcctagtaattgttttattgtctagtccttcctactattttggtttctagtctattcccctatttattctttgtttaattcatcaaccgttgaacagccgaacaatcatgcttatccgaacgcagtgctactccacccttttagcgcccaggaaagcgccaatcacatggtccatttcatatggcatatgatctccagcctggaggatccgtcgccgaagatatttcgttatcccgccacaacaggcaagcaaaagtagataacgcaatattacagtttattcaggctaagctgagctaccctgtgaagaagcaaaacggggcatcaggcaggcatgcagagctgtgtcaaatgagagtaacggaggaaaggggatgcttgcgaaaggttgctccagaatgtttatgcagcctccacatttggttcagcatccccattatcttcatcaggccccccatccttcttcacaaagtcaaatccatattcttcctccgaatagtgctcctcggcgcttctgccaaagatgaatggtcttctacccatcgttgtaaaaggcattagcccaaaggcacgcgcggttttgatctctcttgcaatcttacgctgagctttcgcacttatgcgagtctggcttctcttgatgataattccagcttctgtaagaaagttggagaggaatctaacattctgcaatcagctcctcctggaacagttccgaatatgttaaaaaaaatgaaactggaagatacttgtagccacgccataggaattcatcaatcagatcaaatatataatctttggagaaaagttatattaaatctaatcaaacttttgaaactttgaccaacaatagctttcaaaatatttactttggaaacacaaaaatgtatatgcagatttatcttggaaagcactttcataatcttaatactttttatgttagacattataactatattctaataggaaaaa

SEQ ID NO: 7530 - DNA, 548 bp, Setaria italica
  Peptide Sequence Number=SeqID_73504
tcttggcgtcgtcggctgatccatggacgccttcatggcgcacacgagcggcgccgccaccacgcgatactcgccggcgggcacgtccatccttctccgaagcaggaggcggggccacttcccctcccgcgtgtcgtgctcggccgcggcggcggcgggcaagacggtggtgatcgggctggcggccgactcggggtgcgggaagagcacgttcgtgcggcggctgacgagcgtgctcggcggcggcgcggagccgccgagcggcgggaacccggactccaacacgctcgtcggcagcaccgccacggtgatctgcctggacgactaccactcgctggaccgcgctgcgcggaaggcgcggggcctgacggcgctggacccgagagccaacgacttcgacctcatgtacgagcaggtgagggccatcaaggaaggccgcgccgtcgacaagcccgtctacaaccacgtcaccggcctcctcgacccgcccgagcgcatcgcgccgcccaagatcctcgtcatcgagggcctgcacccaattgttacgt

SEQ ID NO: 7531 - DNA, 368 bp, Setaria italica
  Peptide Sequence Number=SeqID_73505
taacaagacgaagacggactacaaacggcgcgctcgcggcgctggggctcgccgcggtgctgctcgtggagctgggctccgggcaggccctggtgaagtaccaccagccggccacgctgttcctgcaggcgtacaccgtcgccgcggccgccgcgctgttcgtcaagtacgagaaggagcggatcagcacgtggccggggccgccggcgaaatgaatgagctcttatcggggattttttggtctggtagggtgcatcctttcttgtaattttacctctcgatgtgtcatgccggaaaatatatattgtgagttgcgataattgtgaaatttttaacaatctgagtaaagaaaaggcttaattaaaaaa

SEQ ID NO: 7532 - DNA, 325 bp, Setaria italica
  Peptide Sequence Number=SeqID_73506
ctgggccacgctccccaaccagggcgctcctgtgcaggcctctgccgcaggacgtcgggcggtgcacctgcgtcatcgccagggaggcggccaccggcgccagaggagtcgcgctctactccctctacaccaacgaggggcaggggccgtcaggaccggaagctggcggtggcgcggcaccggaggaggagggggaggtcggagttcatcgtggcgcagaaccaggacggcatcttctgcacctccgacaagaacttcctcggcacggtcgccgccaacctcgtcggatccaagtaccaaatcaggggccagggggaaccgggtg

SEQ ID NO: 7533 - DNA, 390 bp, Setaria italica
  Peptide Sequence Number=SeqID_73507
gcacgctggcgcgggaggagccggcggccaaggcgaaggtgtacagcgcctgcagcaacgtcgggggcggcggccggcgcgcgttcgccgagttctccagctacgtggtgcgcaaggcgccgccgctggagcgcagggtggagtgcaccctcgaggagctctgcaccgggtgcaggaaggaggtcaggtacacccgcgacgtcgtcaccaagaacggactgatcaccaagaaggaggtaacgcagaccatccgtgtgaggcccgggatgaggaaaggctccgcggtgacgatggagggcgccggcgacgagcggccgggctgcctgacgggcgacgccgtgttcgtcgtgtcggagaggaagcacaagcggttcaagcggctcggtcggt

SEQ ID NO: 7534 - DNA, 800 bp, Setaria italica
  Peptide Sequence Number=SeqID_73508
cgtctgcggctgcggcggcgagaacgtcgccactgcggtggtgagagcggcgcggggcgagaagcccggcgcgcgttcgccgagttctccagctacgtggtgcgcaaggcgccgccgctggagcgcagggtggagtgcaccctcgaggagctctgcaccgggtgcaggaaggaggtcaggtacacccgcgacgtcgtcaccaagaacggactgatcaccaagaaggaggtaacgcagaccatccgtgtgaggcccgggatgaggaaaggctccgcggtgacgatggagggcgccggcgacgagcggccgggctgcctgacgggcgacgccgtgttcgtcgtgtcggagaggaagcacaagcggttcaagcggctcggcgacgacctggtgctccgggcgcgggtgccgctggtgagcgcgctcacggggtggcagctctccttcaggctgctctgcggcgacaggttccggtacgcgttccgggacgaggtcatctgccccgggtacgtcaaggtcgtcaagggcggcggaatgcccgtcgccggcggggagaagggcgcgcgcggggacctcatggtgaagttcgaggtcgtgttccccgaggacctcaccgacgagcagcggaaggggctcgccgagatcctgagaggctgcgcctgaagtttgctgggcatcggagaacggtgtgttgttatgtggcgacttcttgcaattgtaaaattttgttacgcttgtgttgatattactacttagagaaaaaggactctagagcacatgaagatcgatgtccttgtacatat

SEQ ID NO: 7535 - DNA, 426 bp, Setaria italica
  Peptide Sequence Number=SeqID_73509
ctcgactgaagatggcaacgaacgagggcagaaaaaccctaggacaatcggcctaggcacctccaagccgatcagcttggaggttttcccctcttctggtgctctgcttcacgtggcatcctgtagatccaatctgctctccgtttttccttcttgtggcggcggtggatggtgtttgcgtggtgatttcctcttctctccaactacgcttccttgaagtccatcagggggtatttatagtctccaataggcggcggctctgggtcaatgtcggtgaagaaaccctagaaaatattgcaaacttcttgctgaaggggtttgcaaaccttttagagaaaaaaggctgacaactcagcaattatgaagggggaatcactgcagtcaagcatagtcaagctgctcagttagcatttttatcccgatttg

SEQ ID NO: 7536 - DNA, 309 bp, Setaria italica
  misc_feature (265)..(309): n is a, c, g, or t
  Peptide Sequence Number=SeqID_73510
tggtctgtatgttccccttctagtgcttagttgggctcatgggagtaccagtgagtagtgtttaaaagttgttaacagatgggccgtggtcgttgtatagagaaatgctcagaggctggaaatgtcgctgctgtacatctgctgtgtgcacggattctgtagactcttaatgttgctatatgcttcgttgcaagcatctgtcagttgccacatgtacagtatcattcttgcagagcaattactttttcacaaagaaaaaaaactnnnnnnnnnnnnnnnnnnnnnnnnnnnnnnnnnnnnnnnnnnnnn

SEQ ID NO: 7537 - DNA, 715 bp, Setaria italica
  Peptide Sequence Number=SeqID_73511
agcagcctggaccgtcgtcaacctcgcgcacttcgccatcacttatcacttctttcattggaagaaaggaacaccgtttgctgctgatgaccagggcatctacagccgattgacatggtgggagcaaattgacaatggccagcagcttactcggaacagaaagtttttgactgtggttcctgtggttctgtacctgattgcatcacacttgaccgactacaagcagccaatgtttttcctcaacacagtggcagttttcgtgctggttgtggcaaagctgccaaatatgcacaaggtccgcatatttggaatcaatgcagacatctgagggccccttcaggaagtatgcggatgtttgcttgcgccaagctctgaaagagggacgtggaacaagtgaatgctttgcaaaggtgactcagtcgccgcctgtaatatctgtgtaggtgtagaaagaactgtaaatgttactctagcatacaaagtttgcctgcagactgatgtgtgtttgttgttgcagcttcttcctttagagttggttcactggaagtgtagtctgtcagtgcaatgaacacagcagtatgtggataagaaaagagtgtagcaaatgctgtttgctgtcttgtatagaatggaaccctgaaatcagtgaaatcatctttctgtgggtagccccatggaactgctaaaaaaaatgttttttaaaaactaaaaaaag

SEQ ID NO: 7538 - DNA, 1181 bp, Setaria italica
  Peptide Sequence Number=SeqID_73512
ccgcacccaacccaaaccaccaagccgaacgcagccgccatccatttccgcaccaccgcatcgtccgcgcacgccgccgccgtcagtcacacgcacgccgcacgcatccggcacagcacgcgcacgccccgcggaagccccgagatccgacgatccgccggccgccgtcgaccgaggtcggggagcgaagatgggccggagaggggagccctactacgtggaggcggcgccgccggtggacgtcaacaagaacaccgagtggttcatgtacccgggcgtctggaccacctacatcctgcttctcttcttcgcttggctcctcgtcctctccgtctccggctgctccccggggcggcctggaccgtcgtcaacctcgcgcacttcgccatcacttatcacttctttcattggaagaaaggaacaccgtttgctgctgatgaccagggcatctacagccgattgacatggtgggagcaaattgacaatggccagcagcttactcggaacagaaagtttttgactgtggttcctgtggttctgtaagttccatcatcataatgaattgtacgctgcaaaagttacttgacagtgtggagacaaagttttcgctaaatggtatcacattgatgaacattgtcgaataataatattgcattttgtgcttatctaatccatttttgggtggatttatttgcaaacctatatgtttacatgtccgtcagactaccttttgaaactaggtttgtgcataagtctctgcttgttatccaacggaaagtttcatacatcagagaatgggcagaacactttatagaacattttgcaaaatgtttctagtggatgcattatatgttagtatttagtaaactcatccaatgtgccaaacctgaatgttagggaaatttctcttctagtatttatccagttgctcatatttcttcaaggactaatttgatcattgtgatccaaatggtgaaataagatagaactatgtttttttccaaagaatgtagagtttggcttatgtctcgtcagagttagtatccgcctttgcagcaaaggttgttgaatctggacattttgttgcacttttttttgtattgttactctgttagttatatattttgttaaactaggttgccataattgagcatctcatctcatgagaaggaaatcggctt

SEQ ID NO: 7539 - DNA, 939 bp, Setaria italica
  Peptide Sequence Number=SeqID_73513
cgcctcgttaatttttcgcccccatctttgaaccccgcggcggcctccatctccatccctccctctcctcgtccccctccgatcccgcgcctataaatcccgccaccgcggccgcagccgccgcagcggaccgccaagcacgctcccacacagctcgctgctgctccccccttcctgccgttctccccgtcggcccgggcggaaggggttctcgcgaggcgagcgaccgggcaggcaggccggcggctggggattgctcgggagcacccccgcgatggcgaagctgtacgtgcagacgttcccgcccgcggatctgaacaagaacaccgagtggttcatgtacccgggcgtctggacgacctacatcctcatcctcttcttctcctggctcctcgtcctctccgtcttcggctgcacccccggcacggcctggaccgtcgtcaacctcttccacttcgcgatcacataccactttttccattggaagaaaggaacaccttttgctgatgaccagggaatgtacaatgcattgacttggtgggaacaaatggacaatggcaagcagcttactcgtaacaggaagttcctcattgtcgttcctgtagtcctgtatttgatagctttgcacaccacggactaccaacaacctatgctcttcctcaatacccttgcggttagcgtgcttgtggtcgccaaactaccgaatatgcacaaggtccggattttcggaataaatgctgagaactaagcagcggcatccttcagccgacatctacctatatgcttttccagagtggtctgtatgttccccttctagtgcttagttgggctcatgggagtaccagtgagtaagtagtttaaaagttagttaaacaagaatagggaccgtaaggtaacgttaagtaaataaagaaaagtaaaaaattaaagtaaactaaa

SEQ ID NO: 7540 - DNA, 245 bp, Setaria italica
  Peptide Sequence Number=SeqID_73514
cgaaaggtgagcttgccaatgatctccatgttacatttccacactgggttgatttcaacctgcatttccagcgtgtcaacagacctggttgactgcaggcgggatggtggcgaaggagagcagggtctcgagcttcttgcaggagaagttgcagacgccgatggacttggcgaggcccaggcggtggcactcctccatggccgcccacacgccccgcatgtcgaacggctcgaagtcctccggcg

SEQ ID NO: 7541 - DNA, 550 bp, Setaria italica
  Peptide Sequence Number=SeqID_73515
ggttggcatgcaggtctaggccgccatttccggagagactggccggcgacggggagggcgaagcgagccaatttgtccatgcgcgcgcgcgtactcgcggcggtttccatgcgattaacttgctagttcggtctgtttcgcggcgctctgcctctgcgctcggtacttctgccgcgccgcaagcaatgtagtagtactccgtacatgataaccatctactgtttattgtgtttggtgatcggtagttcagtacccatgatcctccttatttaatttgacacactggaaactaaagcagcattctgttgcagccacgacggtcgcttgcaggaacgggccggacaggtgacagaaaacgcgacgcgttggaagctcgtcgatcagccacgcatggcagggcgaacgtcatatctcgccgtcccagagctcctcgagggacttgtactgcccgttctcggagacgtagcggcggccctggttgatcttccgctgggggaatacttagactagaataccgaactaagaacctaactaacctaacctaaccgaa

SEQ ID NO: 7542 - DNA, 225 bp, Setaria italica
  Peptide Sequence Number=SeqID_73516
ttaagaggtgtcgacactcaaaagagtcaagacacgactccacgcgcgccgcgagggttgagacttgagagggttggggacaccatgagcgccgccgggcgatccccgtgcgggctgccgcgcatcggcctgggcacggcggtgcaggggccccgaccggacgccgtccgcgccgcggcgctccgcgccatgatgctgggctaccgccacttcgacacggccgcg

SEQ ID NO: 7543 - DNA, 1339 bp, Setaria italica
  misc_feature (1317)..(1317): n is a, c, g, or t
  Peptide Sequence Number=SeqID_73517
cgtgcccttggcgcccagcggcgagtaggcacacagctggatgcccttgtccctgcagaactccctcagcttcctctgttgccacacggggttgatctcaacctgcatttcccccgtttcggtcaggtttcgcggcgctctgcctctgcgctcggtacttctgccgcgccgcaagcaatgtagtagtactccgtacatgataaccatctactgtttattgtgtttggtgatcggtagttcagtacccatgatcctccttatttaatttgacacactggaaactaaagcagcattctgttgcagccacgacggtcgcttgcaggaacgggccggacaggtgacagaaaacgcgacgcgttggaagctcgtcgatcagccacgcatggcagggcgaacgtcatatctcgccgtcccagagctcctcgagggacttgtactgcccgttctcggagacgtagcggcggccctggttgatcttccgctgggggatcttgctgatccgctgcctctcctcctccgtcagctcccagtccacaatgtccaggttctccttcatccgcgactcgtcgaagctcttcacgatcaggcagtccccttgctcgtacacccacctcaggcacacctgggcgacggttttgcccttagacttggcgatctcgtgcaggacgccggagtccatcaccgagtcgctgccccagtgcgtgcccttggcgcccagcggcgagtaggcacacagctggatgcccttgtccctgcagaactccctcagcttcctctgttgccacacggggttgatctcaacctggttgactgcaggcgggatggtggcgaaggagagcagggtctcgagcttcttgcaggagaagttgcagacgccgatggacttggcgaggcccaggcggtggcactcctccatggccgcccacacgccccgcatgtcgaacggctcgaagtcctccggcgtgaagggggccgtgaacctcccggccttcatggtcacgggccagtggaccatgtacaggtccacgtactccatctggagattgctgagcgtcttgcggagggccgggagcaccctgtcggggtgggcgtcggcgcaccagaccttggaggtgacgaagatctcgtcgcgggaggcgacgaccccctcgcgcacggcctcggcggcggcctccccgatgggcgcctcggtggcgtagtgcgcggccgtgtcgaagtggcggtagcccagcatcatggcgcggactgccgcgcatcggcctgggcacggcggtgcaggggccccgaccggacgccgtccgatgcgcggcagcccgnacggggatccggccccgggcgg

SEQ ID NO: 7544 - DNA, 444 bp, Setaria italica
  Peptide Sequence Number=SeqID_73518
ctgatggaagcttcagtgctattgtgtttggaggcatacagcctgcatatgcatatgccatgggaagcatgatctcaatctacttcttgacagaccataatgagatcaaggacaaaacaaggacctatgcactcatctttgttggtcttgcagtgctctcattcttgatcaatattgggcaacattacaactttggtgccatgggggaatacctcactaagagagtgagagaacagatgcttgcaaaaatccttacttttgagattgggtggtttgaccgtgacgagaactccagtggtgccatatgctcacaacttgccaaggatgccaatgtcgtgaggtcacttgtgggtgatcgaatggctctagtgatccagacagtttctgcagttctcatagcctgcaccatgggtctggtgatagcgtggcgtttggcccttgtca

SEQ ID NO: 7545 - DNA, 480 bp, Setaria italica
  Peptide Sequence Number=SeqID_73519
acgaaacttcagtgcaaatgtagttgatgatgtaaggcaaactcctaaaagagtcgtgatccatctcatgctagttggatgtacagcttcatcaaggaaatatgtgaccagtctggacgagacaactttatgccattgttccagcaattcttcagcatttatggttacttgtagatcaataagcatttccaataacatgttcctcacaataacatgctttcccatagcctcccggacaatctggtggtttggtgtaagctctggaggatcaaatgtcattattatgaatcttacaacaagttccagctcagaagctagaaaaccatcctccaggatgacacctagtagcacaactagcttctccagcacgggaatttcaacatcaccacgttgtaaagtaacaagaagatgctgaacaagattgatccggcgcagtattgtaaggttgtgatttcggaaccaatgcatggataccatcct

SEQ ID NO: 7546 - DNA, 584 bp, Setaria italica
  Peptide Sequence Number=SeqID_73520
caagaaggacaaccaaattagccagcatttactcttactacgacatgagtgtgatgggttatccacgtaactatgaaggatgccccttgctcaccatggagatgattcaccatttcctgaggtctagtgaaagctggctctcgttaagccaggacaattttctgcttatccattcagaacatggggggtggccagtccttgcctttgcattggcagctctactggtttacctcaaaaggtgtagtgatgagaggaaggctttagggatggattgcagacatgcaccagatgggctagctgagctattctcaccaattgacccagtgccttctcagctgagatacttgaagtatgtgtcaaaaatgcacacatcaccagaattgtggcctcctgttgacaaaatgctgaatttgaattgtataataatcaggaaggtaccgaattttgatgggcaaggggatgtagaccaatattccggatttatggcctagatccccttgcacctaatgacagggctactaaagttctttttcgatcagaaagacaagtgtttttctccagctttatacacagttataattttt

SEQ ID NO: 7547 - DNA, 271 bp, Setaria italica
  Peptide Sequence Number=SeqID_73521
gcagcgccaaatgccaacgcaaccggttgtgacggtgcctgaccactcaaacccggcgaccttgacgtgcacgtacccgtcgggctgccgcggcttgacgagcacgttggacgggttcagctcgccgtggtagatcttcttggcgtgcaggtgctccatcccgcgcgcaatctgcagcatgatgtcgacggcgacgacgagcgggaacgggacccgccgccgcgggcagctcacctccttgacgtagctcccgaggtccttggccatgagc

SEQ ID NO: 7548 - DNA, 620 bp, Setaria italica
  Peptide Sequence Number=SeqID_73522
aaagcgtcgatcgccattgcttcaacacgcacacgtagcagcctttgcaagcagctctcacggtaattctgaagactagttcatgcgttgctcctgaaggagccgagggccttgatggcacccaggcactgcgccacgatgtagagcagcgcgcgcaccagggacaccttgcgcgccaggaagaggccgaaggtgacggctgggttgatgtgcccccccgagatgccggcggtgcagtagacgaggacgaagatcatgccgccgaaggcccacgcgatgccgaggatgcccacgccgccgcacgcgtcggtgccggccacgttcgggtccgtctggtgcttgtaaccgatgacggtgagcacggtgatgtagaggaagagcagcgtggcgatgaactcggcgatgacggcgcggtacagcgaccaggaacccagctctgccgcgtcgatcagcggcgccgggggagggtccgtgtagtccttggcggcgaactcgccgccgccggcgccgctctcgatcacgtcgtccttgcccatggcttggtcttggcttagcttggcagctcactagccaactaagaccggaccgggaagacaagaaggtttaggactttagtacta

SEQ ID NO: 7549 - DNA, 523 bp, Setaria italica
  Peptide Sequence Number=SeqID_73523
cggtgccggccacgttcgggtccgtctggtgcttgtaaccgatgacggtgagcacggtgatgtagaggaagagcagcgtggcgatgaactcggcgatgacggcgcggtacagcgaccaggaacccagctctgccgcgtcgatcagcggcgccggcctcgtcaaggcgctctggaacgccttgacgaggccgacgccgcagatggcacccaggcactgcgccacgatgtagagcagcgcgcgcaccagggacaccttgcgcgcctaggaagaggccgaaggtgacggctgggttgatgtgcccccccgagatgccggcggtgcagtagacgaggacgaagatcatgccgccgaaggcccacgcgattgccgaggatgcccacgccgccgcacgcgtcggtgccggccacgttcgggtccgtctggtgcttgtaaccgatgacggtgagcacggtgatgtagaggaagagcagcgtggcgtattgtaacttcggtcgttaatttgttaacggttacgttacgtta

SEQ ID NO: 7550 - DNA, 502 bp, Setaria italica
  Peptide Sequence Number=SeqID_73524
acagaaagtagcacgttcctaggaagctcaccagttggaacatcctcaggattctcttgcatcttgagggtctggagatccacatacttgctcttatcagggactgcaatccaggggtccagagggcaaggctcttctccaggctgaggaacatgatcacacgatcgtggcacaatagctccgccaaggcctggcctgcaagccactgtcctcacgctccggcagtttttgcagagaagagttacatgagtggccttggctttcactctcgatgctgcaattgcaattcccgcaatcttaaccaactttgacatgtaatccgccccaatagatctcatggacaggcagttctccttggaggagaggaagatctggacatctccggtgacgggctcctccatctccccggtctcaccggcgaccttcgaacggaggctggcgagaacctcggacgcggccgtctcaaacaacggaatataatcggcgggcgacttgcggatct

SEQ ID NO: 7551 - DNA, 607 bp, Setaria italica
  misc_feature (581)..(607): n is a, c, g, or t
  Peptide Sequence Number=SeqID_73525
ccagcgccgccgctgtttccgaagactcttcttttcctccaccaccggcccggcgacgctaatggagaagagcagtggcgccgccgctggaggcaccgccccgccgtcgccgttccaaatggaggatttccagctggaggggaagaagcccgtcaagaaccccttcgtccccatcggtgcattggtgactgctggagttctgactgctggtctgatcagtttccgatatgggaactctcaactaggccaaaaactgatgagggcgcgtgttgttgcccaaggtgcaacagtcgctctgatgattggcagcgcttactactacggtgatcaaatcaagctgttcaagaaaggatctagcccatgaacttcactggagtggatgttgctccttttagcatatggaatgtcatatgtacgctgaaagtttacctggatcctgctgtttgtccctcctaacattgggcttaaccatgtcattttgtcctgacatgcgatagctagccagaattgggtattggttcgatcaacaggcctgataataaatagtttgttttttttgtaattaaaaaaaaaaaaaaaannnnnnnnnnnnnnnnnnnnnnnnnnn

SEQ ID NO: 7552 - DNA, 259 bp, Setaria italica
  Peptide Sequence Number=SeqID_73526
gtagccttcacctgaagtcctgaaccgtgcgtgcttcataatccgttctagctcgaagtgacacagcatagtcacactccacacttgagagagattgtcaagctgcagctgtgaatttgtggcgagagtgaggaggagaagggagggagctggaggaggagccgtgtgcggtggctgctgaccggcccagcaccgacatgcgtggagcgtcacagtggcactcccaccgcagcaagcgcgccccgctcgacgacgcccg

SEQ ID NO: 7553 - DNA, 528 bp, Setaria italica
  Peptide Sequence Number=SeqID_73527
tgtcagaattcccagaggcgcttcccaccttttgcaattcgaccactcgctttaggtccaccacctctccttccatctaattgattattttgcttactaaatgagtcctgtagcttcccaaagttatcctctctgaactgcccgctttcatctactacaaggtagagaccagaaccaccaattggaaacacatagtgctgcaacggtgtcggcctgaagtccgtatacacaacgtgacagggctgcttgtgcagactgcatatccactccgcaaactcggtcgcgttcgacatggtagcggacagaaagaccatcttgatggcagggggcaggaaaattatactctcctcccacacgactcctctctcgcgatccttcatgtaatgaatctcatcgaatataacccaagcaacctccttgatcacctcggagcccctgtagagcatggccctgaggatctcggtagtcatgaccaggcacgtggcattcggctggagcgtgacatcgcctgtcatcagcccgacatct

SEQ ID NO: 7554 - DNA, 1583 bp, Setaria italica
  misc_feature (1538)..(1583): n is a, c, g, or t
  Peptide Sequence Number=SeqID_73528
ttcagatcagatgcctgaaaaattgcaaagctaggctgcatttggtactgtctccaagcattttaggaaaaagaatctgccagggctacagcaacagcgaatgtatcatcaaaaagagacaaacctctaaaggttgaactgccagagtacatgcgtgatgattttaaggtgaaatctgatgaatctgattctgtgccaaggagagagactttgaataacagggatgttgaggagtttctgttttgcatgcttggtgaaggatttaagcttagtatggatgtaatccgtgaagttctaggtagctgtggatatgacattaagaagagcatggaggaattgttatctttttctgaaaaaggtctagacaaaatggcagaaagcaaacataatgctgtacaagatgtggcagcagaatgttctgtttccaagggaaaatgcttaggctcacagtccacccctagtacccattcttcacaagaggggatgcagagaccaaaacagcagatttctccaggagagttgatagaagcaatcttcaccgtacctggaagattggaggaggagccaaaactaagaagatacgaattaggggcaaatcgaagcagagtcccagatcagaaaccagtcttgaaacctcttgaggacctttcaacatattctactgattttcctgtcaaagttatcgtagctagcaaagaaccagctatcaatgaggaggattatcagaactaccgcagggctgcaaagcagcactgggatatgatgaagcagtactatgaaaaggctgctgatgcttttagggagggtaacaagaaagaagtcgattatcttatacaggaaggcaagcgctgttatcagatggctcgactggctgatgagaaatctgctggggagattatcaagtccaagaaagtagagtccagaaatgaattgtgtcttgatctgcgcaaacaagatgcagcaaacatacctaatctcttgagatttcatcttaaacagttggcaaacattccatctattgattacctactagttattgttggcattgatgacggaagtttcaagatgggacaaaaaagaagaaaggtgatgaagtatctagagaagaattcaatcaagtggaccgaagaagaaccccactctgggaacattctcatctccattaatcaggtgggaaaccagcatggataggtccatccgtttgtgtacaaagatggcgtgacacaaaactgatggaagatgatcatagctcgtagtacatcttcaactgccgttttgaatcttggtgctctctgttcttttggcaaacgatccatgtaagctgccgtgattggcattcttttttgtgagcacattgcagatgtttggaattaacaggtgatctggcagagggtagcgtaacagttagatactgaaacatcgatctacattacctgtagcttcactgttgcgagtgcgcatggatatgtggacaacattttctaatctactgcaaaggatccgttgctagttttcttaaaaaaaaaaaaaaaaaaaannnnnnnnnnnnnnnnnnnnnnnnnnnnnnnnnnnnnnnnnnnnnn

SEQ ID NO: 7555 - DNA, 338 bp, Setaria italica
  Peptide Sequence Number=SeqID_73529
gagcgcgaccttgcccgcgacgtcgacgccgcgggaggcgaggtaggcgtagtcctcgctgtggccgtagttggcgtagacgacctcggcggcgaccgagccggacgccgagtaggcgaagtatgtcgagatgacctccgccgcggcctcggcgtacgggtcgcccttgtaggtctcctgcaccagggagaacggcttggcggcgagaccccgcgacggggtgagggtgagggagcggtggacggggtacgagaggagcaccgagtaaggggtgatgtgcgcggggaaggagagggaggagaacgcgtggagcacgtagcgggccgcggccgcgttgg

SEQ ID NO: 7556 - DNA, 228 bp, Setaria italica
  Peptide Sequence Number=SeqID_73530
catgcatatggcttccggaaacactgcacttccatgatgatgaaaaagtagaagctattgatgcgctggaggcacaagttgctgactcaaacttagaaggtggaaaagctaaagaggctagtgacacatctacaaagaacctgctaaagaactggcaactgatgtcagcaataatcatctactgtatcttttgtctccatgacacagcttaccttgagactattttcg

SEQ ID NO: 7557 - DNA, 628 bp, Setaria italica
  misc_feature (523)..(523): n is a, c, g, or t
  Peptide Sequence Number=SeqID_73531
ccttcacttctgttccatggggcatatttgcagacaagtatggaaggaagccctgcattgtgatcagcattctctcagtgattgttttcaacacactctttggccttagcacaagttactggatggcaattgtgactagggggttgcttgggttgctctgtggtatactggggccaatcaaggcctacgctacggaagtctgcagaaaagagcaccaagctctaggaatatctcttgttacttcatcgcgagcaatagctcttgttatgggaccagctattggagggtttcttgcacagcctgcagagaagtacccaaaccttttctcaaaggagtccatatttgggaggtttccatacttccttccaagctttttcatatcgatgctagcagctggatcctgtattgcatgcatatggcttccggaaacactgcacttccatgatgatgtaaaagtagaagctaattcttatttgtatcgtcgtcttgctgactcaaacttagaaggtggaaaagctaaagnggctagtgacacatctacaaagaacctgctaaagaactggcaactgatgtcagcaataatcatctactgtatcttttgctccatgacacagcttaccttgagaca

SEQ ID NO: 7558 - DNA, 270 bp, Setaria italica
  Peptide Sequence Number=SeqID_73532
agcgctcgtactcccgcaccgccgccgcgaagtccttggccacgatgcactccagagcgcggttgcgggcgaggaggttggcgtgccgcgcggggtcctcggccgcggcgaccacggactccacgtggcggaaggcggcggaggccgcggcgaggttgccgatctggaggtgcgcgtaggcgaggcgggagaggagcaccgggtcgcccgggtcgcgcgcggcgatgtcggcaaggagggctagggcgacgtcgaactcgcggtgggcga

SEQ ID NO: 7559 - DNA, 326 bp, Setaria italica
  Peptide Sequence Number=SeqID_73533
ggaagccgaggacatcccgcggaacggcctcctgcacatgcaccaccagccgcaccagcaccaccacagcggcctgctcatgcagccgcagccgtcgccgccggtgaagcagcagcagtcgttcacgctggcccagctgctgaagcgcgtcaacgaggcgcgcagcgacgcgtcgtcgcccacgtcctcgcccacgcactcgcactacaccatcgagctgggcggctccgtcccgggctccaccggcagcgacctgagcgagcacatgcacggcggcggccggcgggggggacgggccgctgctgccgttcgtgctcaagttcacg

SEQ ID NO: 7560 - DNA, 2968 bp, Setaria italica
  Peptide Sequence Number=SeqID_73534
gaagaaaagtagatgcgtgcaacaacaaccaggttgatcaacaggatctggagtgattactatgcacatcatttccctgaagattccaaggagggagatggaaatgaaacaaaagaaattgatgacgaacaagaagaaaatgaagacgaggatgctgaagatgagggacaggttgaagaggaaaatatctcaaagactccaccatccacacggtcgcggaagttgctgtcacaaacttgtaaagaaattagatgggaaggtgaaacatctgggaaaacatcgtctggagaaactctatacaaatgtgcttatgttcgagaactcaaaatagctgttggaggcacagtggcactagaagatgattcaggagaaacagtcatgtgttttgttgagtatatgtttcaaaaaattggtggtgcaaaaatggttcatggaaggatgctgcaaaaaggttcacagacgattcttggcaatgccgcaaatgagagggaggttttcttaactaatgattgtttagaattcaaattagatgacatcaaggaattggttaatgttgatatccaatcaagaccttggggtcacaagtatagaaaagagaattctgaagctgaaaaagttgagcaggccaaagcagaagagaggaagagaaagggcctgccaatgcagtatttctgcaaaagcttatactggcccgagaagggtgcattctttgcccttccctgtgataaaatgggtcttggtagtggtgtatgtagctcctgtgatcacatagaggcagattctgatgaattgaaagtactctcaaagaccagcttcatctacagaaagattacatataatgtcaatgactttttatacgtaagacctgattttttctctcaagatgaggatcgtgcaaccttcaaggctggcagaaatgtgggcctaaagccttatgcagtttgccatctattggccatacctgaaggagctggttctaaaaaattcaatccagcatcaacaaaaatcagcgctagaagattttacagaccagatgacatttcgtcagccaaagcttatgcatctgacatcagagaggtctactacagtgaagatatatttgatgtgcctttggatatgatagagggaaaatgtgaggttagaaagaagaatgatctcccaagttcagaccttccagtactgtttgaacatgtatttttctgtgaacttatatatgaccgtgccactggagctctcaagcagttgcctccaaatgttaggttcatgtccatggtgcaaaagacaactggtgctttgaaaaagaacaaaggaaaacagatctgtgagactgatcatgtagattcaggtaaatgggttgatgtgccgaaagagaaccgtctagcaactcttgacatttttgctggctgtggaggtttatcagaagggctgcagcaagctggtgtatcttttacaaaatggtcaattgaatatgaggagcctgctggtgaagcgtttagtaagaatcacccagaggctgtagtgtttgtagataactgcaatgtgattctaaaggcaattatggataaatgtggggatactgatgattgtatttcaacttctgaagctgctgaacaagcagcgaaacttcctgaagagaacattagtaacctccccgtacctggtgaagtagaattcataaatggtggtcctccgtgtcagggattttctgggatgaatagattcaaccagagcccatggagtaaagttcagtgcgagatgattctagcattcctctcatttgcagagtatttccgacccagattctttcttttagaaaatgttcggaactttgtttcgttcaacaaagggcagaccttccgactagcagtagcatctcttctggagatgggataccaggtccggtttggaattctagaagcaggggcttttggtgttgctcaatctaggaaaagagcattcatttgggctgctgcacctggagagactcttcctgattggccagagccaatgcatgtgtttgctagccctgagctgaagataacgctgcctgatggccaatactatgcagctgccagaagcactgctggtggagcacctttccgagcaataactgttagagatacaatcggggatctgcctaaagtggaaaatggtgccagcaaactcacacttgagtatggaggtgagcctgtgtcttggttccagaagaagattagaggcaacatgatggcactgaatgatcacatagccaaggagatgaatgagctgaacctcataaggtgccagcacattccgaaacgaccaggttgtgactggcatgacctgcctgacgagaaggtgaaactgtccaacggccagatggcggacctgataccttggtgcctgcccaacactgccaagaggcacaatcagtggaagggtctgtacgggaggctggactgggagggcaacttccccacatctgtcacagatccccagccaatgggcaaggtcggcatgtgtttccaccctgaacaggacaggatcatcacggtccgcgaatgcgctcggtctcagggcttccctgacagctatgagttcgcgggcaacatccagagcaagcacaggcagattggcaacgcggtgcccccgccactcgcctatgcgctcgggaggaagctcaaggaagccgtcgacgccaagcgtcaggaggctggcgtggctgcgcctgcaccatgagattagtattcttccggtgacctgtgaagctaagcgctgaggtcgtcctattctaccttaggaacagcaaagaacaaagtagtgtgtagtgtgtaccgtagtaactatgcgagttggttgcgcttttattctagtcgtgtgaaccccctaagtgtatatgctagagaagtattgattgccaccctgattcagggtagaggtatttatatagaactttaaaatttagtgtcttatcttggtttccgcgctt

SEQ ID NO: 7561 - DNA, 881 bp, Setaria italica
  Peptide Sequence Number=SeqID_73535
tagcaacaatattgattgccctgttcatcatattcatcccccttttgctctcgccccttccatcgtgcgcccagcgcatcatcatagttggataaggctagagatcatcatggccaaggccttgcctctcgtcgcgctgctcatcgctgggtgcgcggcgctggcttcggccgccacgatcaccgtcggcgactcgcaaggatggacgaccggcgtcgactacaccagctgggccagcggcaagagcttctccgtcggggacaaactcgtgttcaactacgtgagcaaggcgcacacggtgacggaggtgagcaagagcggctacgacgcctgctccggcaacaacaatctgctcgacgacgacagcggctccaccaccgtcccgctcaacacccccggaacgcactacttcatctgcaacgtccccggccactgctccgacggcatgaagttcgccgtcaccgtctccgccacgccctccggcaacaccccgtccgcgggcgccccgcaggtttctgcggcggcgatggcctccgtcgtcgccgcggccgccggcgctgcgatcaagctcgcgctcttctgacggagcacggccatcgtctcagggtagagacagtgcatgcagactacgttcttggccgttgatggttcgtgtgatcagtaatcgttgtccacatctctgctacgttttctggcgattgctcgtcgagcagctcgtgtaagcacgttactctgcagtggcgtgcctcttgatgtctgtgattgtgtgtattcatcaccaggtgtatatcatgtctcaatgtctgatcgttttttgttgtgtatatcttcctgcaaataaaataaaatttgatcatattgtgttcaaaaaaaaaaaaaaa

SEQ ID NO: 7562 - DNA, 1058 bp, Setaria italica
  Peptide Sequence Number=SeqID_73536
ccatgtgagcttctataatcaggaatataagcaaagctaaatacttgatgcaagagcccttatgggttgaagagagtccatagcaaccctatgtgattgaagccagaatgtggcattagggtgctgatgctgctggccagagccatgtttttcactaactgtggttatgagtgcactcatgggtgtcacggcgaaacaaagttgcatgcaaaaaggcctgctcatggaacatgttgccagcaagctgtctactgtatatcactaaagctttgcctggaattgaagattgtttaatacctgtgtccatgtgttcattggaagttcgggaagggttcgtatgtaaagcacaatggatagtgcacacaaagctgtctggcaaaaggaaaccgaggatttctcagccttgatactctacataaccatttatcgtcttatgctgatttgctccatgcagtgttccccgacgtgtcacagtttgctgtgtctgcagattcactgccctgaattgatcattttctgcagccaactgcacagtcatgtggttctttgaccatttgttggaagaagtatcggagacccggaatgtcaaaatggtaatgaccttttggggcatcctctgctggcattggccatgcgcaatggttcattatggaccaactgaaaccaaaatgcgccctggatttgctaagataagttagggaatagttactgccatgcgttgatgcgtatacatgaacatgctgctgagggcccttttggagtttggactgcccagtctgataaaaggaaaagctttcaaccaccatccgtgctgaggcctggtttatttgcaagaaaattgaaagagttatttgctatttttggatatgtgtgcaatcagcgaaaatggtggttcctaaggacagtttctcttgacttggtgccgccgccacagcctcgtcttgctgcgtaagggcacttctgttcatttccccgccttccctttctgatgacaaatcgatgctttggcagaatccgtttcttctgcatgtctagaagcatgttatgtcgttcagctt

SEQ ID NO: 7563 - DNA, 263 bp, Setaria italica
  Peptide Sequence Number=SeqID_73537
ctcgccggagctccgcatcctcctctttcggctgccacctgccctgatcgcgccgagacccacctccggctcccgatggccatggcgcagcgggcgatgggcctgctccggcggtccctcgggttcgcgccgccgacggcacagagagccctgagtaccagcgccgcgccggcggcggagggtgcggccgcggcggcggccgaggcggtggcgaaggaggcgaagaagaggaagaagaagaacctgttcgacgtggtgcagtt

SEQ ID NO: 7564 - DNA, 397 bp, Setaria italica
  Peptide Sequence Number=SeqID_73538
ctcaccaagagggaggactgtcaatggcttccatgttttcatatgccacacagtcaagtttgcaaatcctgttctctcaaaaacagttgatccatgccttcttgatgcagctgcagagacaaacacaggttcgacagggctacatttcaaatctaagatgcttggaaaatctcttgatgtatttaggtcgcaaacaactctctttgcatcagcattccaagctttaattcctccattagctgtgcctatgagcagcaatctatcagatctgcattcccaagaaagtgcacatacttcagccccgcagtatatagtggcatttttagatgatggtgttgacgaatcgtgcgtccagatcctaactgtaccatcgattgatgaactagcaatatttgag

SEQ ID NO: 7565 - DNA, 1166 bp, Setaria italica
  Peptide Sequence Number=SeqID_73539
tttccggtacagttggtggggaagacgaatagatagggcagtatggcggcgaccttctgctccggccccgccgcctccgccgcagcgaaccctagctccgccggccgccgcctccagaacccagctccggcctccgtgctgcaagctcgctggagacctagactgccggctcccgcttttctaacccggcgccccaatgccgagctgcggccgctccgcatcgccgccggcgctggcgttgacccgaaggttgtcaatggggaagatttccctcctatgaaagacctaattcaactgtataagacagcctttctagatggaaatgatgaggttcttggcgaagttgagaaggcaattacttctgtggaaaaagagaagagtagggtagcttctcaatttgaaagtgttacagccgaaataacttctgggaaggagaagtttattcgtttaaatgccgatctggagaatttccggaagcagactgaaaaggagcgagcaaagtttacatcaaatatacaggtggaagttgttcagagtctgttgcctctggttgatagttttgagaagacaaatttagagaacacccctgagactgagaaggagcaaaagatcagcacaagctatcaaggtatatacaagcagttagttgaaacactaagatatttgggtgtaggagttgtggaaacagttggcaagccatttgatccttcggtacatgaggccatcgcacgagaagaatcctcgcagttcaaggcagggattgtctcgcatgaaatccgccgagggttcctcttgaaggagaggctactaaggcctgctactgtgaaggtttctactggctctggcaaacaaagcgcgagctcagtggaggcggccaaagatgccgctgtgtgaatcgggttgaaactgtcagctgcagctgatagccaaagcaccatatagtttgagaaacttttttctgttcataacatgacggaggcatttgatctcaaatgagtttcacctatgtgtacacttctggtgttgcgagctagcaccagcttgaagttttgctgttgtgtaatctgctggaattttgcccaccgaaacagtgaagcattggacatgcataaccagaataccagatgtattgacttctcgatttctccacttatgagcgataaacc

SEQ ID NO: 7566 - DNA, 298 bp, Setaria italica
  Peptide Sequence Number=SeqID_73540
tcggtttaagtcgcagctgccacctgacttgacgactgcttcttgtctccgatcatcgatcccatcatcctttccttgtgcttccagtttcagttgtgacttttctgagcaatctaatctccatggacatcaacaaggcagcaggggcctcgccggcggccgtcgacgcgcgcacggtggtggcgcacgtcctggccgtggccgccaccgtgctggtgctggtctggtgcgtccacttccgcggcggtctggccctccggtcccaggacaagcagctcatcttcaacgtccaccccgt

SEQ ID NO: 7567 - DNA, 467 bp, Setaria italica
  misc_feature (39)..(39): n is a, c, g, or t
  Peptide Sequence Number=SeqID_73541
attcacgcatgttccgccgttgcccggctgccaccctcnccgccaccggtcggtcgtgacgcacgcgtgggcggcggtagccatcctctccgactcactcacccactggccgacaggttcgactcgtctgcttggacaaaggccacacatgccgacacacgctaaacgatccaaggtcgggtagggaacgaagcctcgcgtctgcagatcacacggcacaatcacggcgagcttaccaaatcgggcacctgatttttggtcaccggcagtagtgtcgtgtccatgccgtcggtggcgtccgcgcccggattcttgcaccgccacggggtgcttgggctcggataatcctccccagtttcccccacgggctggcgcgggaggctagagccatgcatggcgaggccttcctctaactgcggacgcacttacctagtactagacctacggacgtacactcctgttccccg

SEQ ID NO: 7568 - DNA, 413 bp, Setaria italica
  Peptide Sequence Number=SeqID_73542
cggcgggcggaggtgctggtgctggacgcccgggtagggagcgacgtggccgacgaagtggccgccgccgtagtgctgctgcccgcgcaggcgctgcgcctgcacggccgtgacgtagaccacgaagccgacgacgacggtgatgagccccaggatccccgcggccgcgaacatccccggccgcacccggtggcacactggccgcggcttccgccagtcgctgatgtggccggactcgatgccgatcccgatcatgagcagcacctcggcgagcccgaagcagatccatgtgaggaagaagaggcagcaggtctgccaggtgagcgtggcggcggacgacgcgacgcgcgggtggtcctgcgcgacggcgaggccggcggaggcggagtccggcactgcgacggcgacgagca

SEQ ID NO: 7569 - DNA, 309 bp, Setaria italica
  Peptide Sequence Number=SeqID_73543
caaaaacttgtcacattaccacagattcctccaagtatgtatataagaaaaaaagccatttgcccatatgctctgcatactcgaggtccaaacgtaagcaacacccaacaaccaagggctacatgtaggaaacctgagtgcaggcacataggtgttagtagtctccaccactcccctgaaagtattaagttgtttatgtcaaacagaaaccggacgtttgatcatctgtatgcatgtccaggaaactcttttcatcaaatatcaagtactccttgtaatcttcaatggaagtattgcgataactcttgg

SEQ ID NO: 7570 - DNA, 625 bp, Setaria italica
  Peptide Sequence Number=SeqID_73544
gatgcaaaccacaataacaacgtaaggaagagaattttggtgatacttcatctagcatagaggtagaagaaataccaggcacataggtgttagtagtctccaccactcccctgaaagtattaagttgtttatcttggcaccatacaacaaagggagagacaaatattcattttcagaatttttcactggacttgctatttcgaataacagaactgcaatattaataccagccaataagtttctgcattattacagagttcaaaagttagctaacaaaatgtggcaacatgaaaattgtttataacttctgctaaactatgcagagggacaagtagtgcatgcatgttatactggaaggaaacaagctggtacaatggacacggaatggttttttgaactctagcttgagcgttttctcccagttttgtttgttttagttttatgggcatacacatattgttaattttttgttaatatcacaatttgaaaaactcaaccaaatttgtagaacaaagttaatcccagattaaatttattggtagcggagaaactggcataacaaaagcaagaaccgttttaaggcagaagcaagtattaatgtgtagtagagattaagaaaagccaa

SEQ ID NO: 7571 - DNA, 1067 bp, Setaria italica
  Peptide Sequence Number=SeqID_73545
cgagaacatactttctgaaacatccttgtcaatgacttgcttgttttgactctgatacaccagccatgctccaattagagaaaatactgggcctgtgccacaaacagttatctctgtagtgtgaacaaaacttgtcacattaccacagattcctccaagtatgtatataagaaaaaaagccatttgcccatatgctctgcatactcgaggtccaaacgtaagcaacacccaacaaccaagggctacatgtaggaaacctgagtgctgcagaaatcaaattacagaaacagctgagataagctgagtgggttacagggctgcctaaatgacaaagaatagctaatgtcgaaaactaagatgaaaaagagcagttgtaagtcatttgatcgtgatgcacaacctttcgattattaaccctccataactttgattcttttgtattaacatgcagctgaatagctctgcagggagtaaaaatctaaatgcatttcctactccctaattagtatatgaccgaacgttttgagtgttactgacactgacagtatgtctacttctggtttgattcttattgctaaagttgtaaaaggaatagctctagttgttgcattctacacggtatatctatgattatcttatgaaacctagaaaaactattggaaaggaaaactacaaaaccattttacagaaccttgggagtggaaacagatctgcagtttggcacagaagttaaactcctgtctcgtgccattttatagtaacatagttggctcacttaaataaataaatggataaatgacatttagccccattcaaagaagtgagataactgaacctcttttccagtcaagggctaatccactagttgacatggcagatatgacattctggatagcagtgcacgcactgaataacaacataaaataaaacatgtgtgttactttttagtttttccgacaaattcaagtacaactgaagtcctatgcgtactaacgtagagtaagttcaatatgacctactttttgcacagcagcttgaaggaaagtactattgtagctacaaggaaa

SEQ ID NO: 7572 - DNA, 266 bp, Setaria italica
  Peptide Sequence Number=SeqID_73546
tttgctgggcctcttgcagcttcatatttgacctcgagtatgcagagcatatgggcaaatggcatttttccttatatacatacttggaggaatctgtggtaatgtgacaagttttgttcacactacagagataactgtttgtggcacaggcccagtattttctctaattggagcatggctggtgtatcagagtcaaaacaagcaagtcattgacagggatgtttcagaaagtatgttctcgcaggccgtgatagctgcagctttga

SEQ ID NO: 7573 - DNA, 1105 bp, Setaria italica
  Peptide Sequence Number=SeqID_73547
agaaagtatgttctcgcaggccgtgatagctgcagctttgagcttcttactgagcatttttggggaattgataactgggcgcatcttgtggcaactatttctggacttctctttggttatcttacttgcccaagtattgaattgcacaatgctgccaagaatggtcaaaaggaggctgtggctcttgttaggcgacaagcccatccataccacaaaaccaactatatatatatttacatctcgtgctcatctcacattatagaatacatagctggcaaagctacctaaatatagcaaggaactatgagaaacacctagctattccagatccatattattgaattgtgtcccataagcgaaggcgagcgcggcaaatgctagtatgcttatgccaaagactgcagcggatttgcatggatgggcttgtcgcctaacaagagccacagcctccttttgaccattcttggcagcattgtgcaattcaatacttgggcaagtaagataaccaaagagaagtccagaaatagttgccacaagatgcgccctgcaattaattaaaaaaggaaatgttaataacgttttaagccaattggtttctgaagcaacaaatggttaggaaaagacaaagcataaggactacaatatttggctgcccccaatatagttctgtatacttcagcccctgtactaggctactatctaagattgtatgactgttaaataaaatacaaaggttttctaactgcatataaggttattctcagattaattgggacagataaaagttgaagaggttctttaatcataaaaatgacctggaaagaacttacaatgctgttttaataagaaaaacgacagcacaattgcattaccagttatcaattcccccaaaaatgctcagtaagaagctcaaagctgcagctatcacggcctgcgagaacatactttctgaaacatccttgtcaatgacttgcttgttttgactctgatacaccagccatgctccaattagagaaaatactgggccctggtttgagtttaagaaaggaacattagtgtctccaagatatattcctttcagttaacatgctatactgctactaac

SEQ ID NO: 7574 - DNA, 1165 bp, Setaria italica
  Peptide Sequence Number=SeqID_73548
catgatggcttgtcgcctaacaagagccacagcctccttttgaccattcttggcagcattgtgcaattcaatacttgggcaagtaagataaccaaagagaagtccagaaatagttgccacaagatgcgccaaatgctggttttaatagaaaacgacagcacaattgcattaccagttatcaattcccccaaaaatgctcagtaagaagctcaaagctgcagctatcacggcctgcgagaacatactttctgaaaacatccttgtcaatgacttgcttgttttgactctgatacaccagccatgctccaattagagaaaatactgggcctgtgccacaaacagttatctctgtagtgtgaacaaaacttgtcacattaccacagattcctccaagtatgtatataagaaaaaaagaccatttgcccatatgctctgcatactcgaggtccaaacgtaagcaacacccaacaaccaagggctacatgtaggaaacctgagtgcaggcacataggtgttagtagtctccaccactcccctgaaagtattaagttgtttatcttggcaccatacaacaaagggagagacaaatattcattttcagaatttttcactggacttgctatttcgaataacagaactgcaatattaataccagccaataagtttgtcaaacagaaaccggacgtttgatcatctgtatgcatgtccaggaaactcttttcatcaaatatcaagtactccttgtaatcttcaatggaagtattgcgataactcttggtacctgtatttcctctgtcaaactgtacctgcaacgagtctatcatgttcttcacattggcaatgattgcatcaacttcatttgaggatgatgggccatttttttgcttgttcttctgaggaaaagagcatagctgctgagtggaattgagtttagaaaaatagactccaatgccctcagttgatttccttctttcctttgtgatggactagagataatctcactgtcctcctgagcaaattcggagccgcaactttcatcaatatctttattgcgcaccttgacgataacacctatgtgcctgggcccagtattttctctaattggagcatggctggtgtatcagagtcaaaacaagcaagtcattgacaaggatgtttcagaaag

SEQ ID NO: 7575 - DNA, 2425 bp, Setaria italica
  misc_feature (33)..(33): n is a, c, g, or t
  Peptide Sequence Number=SeqID_73549
gtcgtgttctctttagttttttttttttttttnttttttttttttttttttttttgtttgtaaccactttgcaagcctcaattacatccaaagatattgtagtatgatatacaaaatacaagctccaaaaatctggctaaatatgtaattgatccataccacaaaaccaactatatatatatttacatctcgtgctcatctcacattatagaatacatagctggcaaagctacctaaatatagcaaggaactatgagaaacacctagctattccagatccatattattgaattgtgtcccataagcgaaggcgagcgcggcaaatgctagtatgcttatgccaaagactgcagcggatttgcatggatgggcttgtcgcctaacaagagccacagcctccttttgaccattcttggcagcattgtgcaattcaatacttgggcaagtaagataaccaaagagaagtccagaaatagttgccacaagatgcgcccagttatcaattcccccaaaaatgctcagtaagaagctcaaagctgcagctatcacggcctgcgagaacatactttctgaaacatccttgtcaatgacttgcttgttttgactctgatacaccagccatgctccaattagagaaaatactgggcctgtgccacaaacagttatctctgtagtgtgaacaaaacttgtcacattaccacagattcctccaagtatgtatataagaaaaaaagccatttgcccatatgctctgcatactcgaggtccaaacgtaagcaacacccaacaaccaagggctacatgtaggaaacctgagtgcaggcacataggtgttagtagtctccaccactcccctgaaagtattaagttgtttatcttggcaccatacaacaaagggagagacaaatattcattttcagaatttttcactggacttgctatttcgaataacagaagtcaaacagaaaccggacgtttgatcatctgtatgcatgtccaggaaactcttttcatcaaatatcaagtactccttgtaatcttcaatggaagtattgcgataactcttggtacctgtatttcctctgtcaaactgtacctgcaacgagtctatcatgttcttcacattggcaatgattgcatcaacttcatttgaggatgatgggccatttttttgcttgttcttctgaggaaaagagcatagctgctgagtggaattgagtttagaaaaataagactccaatgccctcagttgatttccttctttcctttgtgatggactagagataatctcactgtcctcctgagcaaattcggagccgcaactttcatcaatatctttattgcgcaccttgacgataacatactgccctgccttaggttgtgatactggcttcaaagaatgacaaatgaaattgccgcccttcgcaaaatggccaatatgtcgggaattgtgattcttggggctattagatcttaatgacaacctctcaggtgtaactcttgtatgctccatctgttcacaagataacggtttccatttaaccaccccagccatttgatgccaccaagttgctcgcgtcgcgttggtgaatagcaaaggtggcaacttgttggtgaggatgggcgacctcgacacctcttcagcccggtgctaggggccgccgcagcttgcagtccggccgcgagcggcactcggcagagtggcaagcggcggcgggcatgcgcgcgcggccgagcccgaggccgcgccacagagggagagcggcggcgtcctgggcgagcagaggcgcccgggatctgcgggcacgttgagtttaagaaaggaacattagtgtctccaagatatattcttttcagttaacatgctatactgctacaaccattctaacatttacctaatataaatgaagttaattatacaagtatgaagtaataaccatctggaaatgactccaggaagaaaactttgattccaaagatgctacagtacgatcaaatattggatagaaagtttaatccgatttctgttttccttttcttctgtaaattgcatccattaaaaattttgtaatctgttatagattatttttctttcctgcttttagttcaaaagaataaatgtcaagatagggattagagtgatgaatgaaaataataaagaaagtgtatgggcatttttttccatctaaaatatattccaggtaggtgtgcaacttactgtgccacaaacagttatctctgtagtgtgaacaaaacttgtcacatttaccgcagattcctccaagtatgtatataagaaaaaatgccatttgaccacatgctcctagatcaaatatgaagctgcaagaggccccagcaaagccccaaagctgtccttctctaccaagcatagactggctggacactaggagatgcgccactgaag

SEQ ID NO: 7576 - DNA, 466 bp, Setaria italica
  Peptide Sequence Number=SeqID_73550
agccactcctccggcggacatctctcgtctatgcccggtagcaaagaagagttgagaaaatggcgataaaaatggataagacgacgatcatcgtgtgcgcagtggtcgggtctctaggagtgttgagtgccatcttggggttctcggctgaggggacaaagctcactccatatacgatatttgtttatggcgacgactgcatctacccgcagaacccggcgatcgggctgggtatctgcgccgtcatcttccttctggcggcgcaggtcaccatctcggcggttggcggctgctgcggctgctgcaagtcccgctccataccttcggggaccaagcggatcgtcggcatcgtttgtgccgtcgtctcatggagagtgaccgactgcgcttggtctcaccgcgttcgcactacatgtgcactcttcctgcgagccaaccatcgagctagtacactttcttctgcgag

SEQ ID NO: 7577 - DNA, 786 bp, Setaria italica
  Peptide Sequence Number=SeqID_73551
tacgggtaaggtacgtaaattaggtaggtaaggtcgtcttgtcggttgcgttggatttgcgggaggagttgaccgttcggtggaggacaaggtgactgcagaacatgcttctcctggtactggaactcaaactgaactaagtgaaaacaactgcctgattaattacagcaacaatgaaagtgctgctgctgaagatactggaactcaaactatcaccagtggattaagtcaaaatggccttctcaatcgcagcagcaaatctattgaaaatgtaaatgaaggcaatggaactgaatcacagattgcttgcactaatggaagccaaactaaagtggaacgtccagctgagcgagaagacagttttgatgactaccaggatgcatctccgtttcttcatcaaccagattctgaagatggtgcagcaccaggttctgtattttctacagaaatcaataatttgaatactgtttcatcagaatcaagtgtagctgcaaatgaaatttctgttgaaacaaatggattatgcaaagctcaatttcctggagaaccaaatatgagagatttatcttctgactccaatgttgcatataatttggaggatggagctcttagattggctgaacctcacgtgaagcttgggagtccatatgaacactctgtgaatgttgacaacacttatactgatatggttaacagtaaacctgataaaactggtcatagtgagatgattggtcatttgaatgcttcatcccttcaggaagcccatccacttattttggaacctgg

SEQ ID NO: 7578 - DNA, 1538 bp, Setaria italica
  Peptide Sequence Number=SeqID_73552
gaggaccttcagagggacgtggactcttccagagttcagccgggcgcctggggcggcaatctcttcgttctgcttggtgctgttcccctcttgaccaactatgccatttggctgctgctgcagctgctgcttctcttcaacagtatctgtgctttgttcagcagtcacctcctttgcagttgtgccttgggcaagcatctttacttcagaatcatctgtgcctcctgcattcatcttctctgcactggtgccatcggtcttctgcattttgtcttcaacatcatccccattgaaccgtgcattcatctcctttgcatctgtgtcatcagtctgcttattttcttcaagatttcccatgctctgcactgaactcaactctgtaccgccagcctgcttctcttcatcagcatgatccgagtgttgtacctcattcatctctgcagcactgccttcagtcggcttcttttcttcaacattagcagcatatccattctttgcagtggtgctagtagcctgttccataccatctatgcttcgtactgcaatcatctcctttgcactagcatctttggcttgcatattttcttcaacttctgcactgactgcactgataacctgcatagatactgtactgaactccatggaggttgtctgagatggcacaaagatgacaccatttttatgtccatcttcctgcaggctatggtcagttgagcaagtcttgctcacaagttcagaacttgtgctgataggcatgtcttccggaccgattacttcaccattttctacagcacttgacgtggataatatgcattcatttgagttatggcattgttgtgcttcagccatcctagttaggttagagactgttggttgatccaccatcagggatgtagagtcaacttgtggtctcaattcaacagaatttggtacctccaagtagcagctgtcagtgggaagttcaaacaaatcatcattcctgtcatcatctagattaaatggattcttgacagaagatgcttgatcctttagtaaagtggcatgtttctgagtcagagaaagttgatcttcagcacaaatctcagggtcaatctgtttgttgtggacatcctctttagtgaatccattagtcttctctatggaaggattttcttcaatgatatttggtagtggcctctcctcaaaggtgaattccagatcattcacattagtggtaggaatatcatccacattagtaacaggaagatcgtactgaaaactagctgtggggcattctaaacttttcttgcaagaattctcaacaggctcatgatcatctgatatgtcctcaacagtcgagttctgtgtggggagctctgtggagcaatctatgggagcattatcagtgcatacgaccttcaggtcgcttccaattggcatggtgttagtgctaggattggttattgtttccaactgaacagtatctggtattggtgatgcttcagacatggtatgcgaaacatgcaatccatcttccataaaatcttccacctttcgtg

SEQ ID NO: 7579 - DNA, 262 bp, Setaria italica
  Peptide Sequence Number=SeqID_73553
ccttcttcaccgtcgtcaccacggtctcgccccagttgtaggatccgaagaactcggcagagagttgtgctcgggcgccgaggccgagcttggggaatcctaaccttcatggtggccgtgtaccctagggtgagctcgagggtggcgtcccactgggcggtctccgtctcctcgaaggatatggtgagcctcttggtgatttgtgtggaggtgtcgttgacggcgtcggtcatggccatcgtcaccggcatcctgtcgtaca

SEQ ID NO: 7580 - DNA, 771 bp, Setaria italica
  Peptide Sequence Number=SeqID_73554
tgagtcttgggagacccgagtcttggctccttcctcctccgcttccatgggagcttgggagctgctggatctctgcaactgaccatgagccagagttttgacatcaacgttcttcgcgaggaagcaaggagtaggtggttaaagccttctgaagtatactatatcttgcagaatcacgagaggttcccgatcacccatgaggcaccaaaaagccactcagtggttcactattcctttacaatcgtcgtgtgaatcggtatttccgaagagatggccacacatggcgaaggaagaaggatggaagaactgttggggaggctcatgaacgattgaaggttggaaatgtcgatgctctgagttgctattatgctcatggtgagcaaaatccatgtttccagaggcggtgtttttggatgttggaacctgcatatgagcacattgtgctggtgcagtatagagaggtggctgagggcagatattattcatcacaactgtcgaatggaccaccagaatctttttcatctttgggatatccaagtgccatctatggaaaccaatatctcagctctacttctggcactagtgagggaagtgaatcccaccagagctattctaatttgagctctgtaactgaagtaagttcctattctggtaacaaagagtgcaacaaagatggtggcagtttactaagcataccagagcttggacagacttgtctggaacaaactacagaagtttattcggatgataatgataattcaaaaaataaat

SEQ ID NO: 7581 - DNA, 357 bp, Setaria italica
  Peptide Sequence Number=SeqID_73555
gcacaacccaggccgcctcatcgccgcgccgcccatcccgaagcccggcgggattcggcgcccccggcctctccctcgggctgcaaccgaacatggacggggggcagctgggcgacatgggtcgtatgggcatgatgggcggcggcgggagcgggagcgccggcgaaggcgactcgatgggccgcggccgggaggacgagaacgacagccggtcaggcagcgacaacgtggacggcgcctccggcgacgagctcgacccggacaacagcaacccgcggaagaagaagaagagataccaccgtcacaccccgcagcaaatccaagaacttgaagctgtgttcaaggagtgcccccacc

SEQ ID NO: 7582 - DNA, 317 bp, Setaria italica
  Peptide Sequence Number=SeqID_73556
gcggagggtgggctcggcggggcgtggaggagggcgtcggggagagctcgtccccgccgcgcgacgcggcccctgtgcccgccggctccggcgggagcggaggtgggggaggcgcccgcgacatctgcggccaggtgctcgaccggctcgtcgccgacggccacgcggaggcgtccgaccccgagttccgcgacaagcttgtcgcccatttcgggcggcttccgcacagctatcagctggatatcaatgttgacaaagcagctgatgtattggtccaccagaacgtcttagcagaagcaaaggatcctgacaggccg

SEQ ID NO: 7583 - DNA, 482 bp, Setaria italica
  Peptide Sequence Number=SeqID_73557
cctcaactctgtaatacatttttacaagtaatagcatttttcaataaatctacaaagctttaccactgattatttcatgctcaagttgtttgataattgatatctagaatctagttggagtacttctggttatattatatccatgaatccatgcttacagccttacacccaagatatcttattgaaggactttttttggcattcaaccatgtattactgtacaaaatatgatattaataattggtcattttgctcacagtatagcatctaacgaaacatgttttgcagctgtctgcgttgctatctgacattggactgaacatcagagaagcacatgttttctcaacccatgatggctattctcttgatgtttttgtggttgatggttggcctattgaggtgatatgttatgtccttatcatggcattggttgaattgctgagggttgattgattggatgcattgggatttgggatttcggg

SEQ ID NO: 7584 - DNA, 1868 bp, Setaria italica
  Peptide Sequence Number=SeqID_73558
cggtaaaaacgggtaaaaagtaaaacggtaaaaggttaaagggggtaaaggtaacgtaacccgtacgaacaatactagcggccaggtgctcgaccggctcgtcgccgacggccacgcggaggcgtccgaccccgagttccgcgacaagcttgtcgcccatttcgggcggcttccgcacagctatcagctggatatcaatgttgacaaagcagctgatgtattggtccaccagaacgtcttagcagaagcaaaggatcctgacaggcgccccgcgttctatgtccgtttcttgaggattgaagatgcggatcaagcatatgactccgatgcatctgaagaaggggatgatgatggtgatgatctctctgtaaggcaggacacagaatatactcacattcatgagattgttttctccacaattgacaagcctaagctacttagtcagctgtctgcgttgctatctgacattggactgaacatcagagaagcacatgttttctcaacccatgatggctattctcttgatgtttttgtggttgatggttggcctattgaggatactgatggcttgcacaaagcactggaagcatccattttaagaaatgagggttcatggtctggtggttcatctcattcctcggcagctgaaagaacactgcccttccaagttaaaggtggtgaatgggaaatcgacaaacgacttcttaagatgggagggatgattgcttctggttcttgtggagacttgtatcatgggacttaccttggtgaggatgtagctattaaagttctaagggctgagcatttgaataagaatgtttggaatgagtttacgcaggaagtatatattctaagagaagttcaacatacaaatgtcgtgcgattcattggtgcgtgcacaaaaccaccgcagttttgcataattacagaatacatgtctggaggaagcctgtatgactttgtgcacaagcatcataatgtcctaaacctcacaactctcttgaagttcgcagttgatgtatgccgagggatgtgctacttgcatgaaaggggcatcatccatagagatttaaagactgccaaccttttaatggacaaagatcatgttgtgaaagtggctgattttggtgtagctcggttccaggatcaaggaggtatcatgacagctgaaactggaacgtacagatggatggcacctgaggttataaatcatcaaccctatgataataaagcagatgtgttcagctttgctattgttctttgggagctgataacgtctaagatcccatatgataccatgaccccactccaggcggctgtaggtgttagacagggactgcgcccaggactcccaaagaaagcacatccaaagctgttggacttaatgaagagatgctgggaagctgatccatcgaaccggcctgttttcccagacatcctagccgagctagaggatcttctggcacatgttcagggagcttcaggaaagacggtccaagatccagcaaataacttgagcacgaaagattgactccccatgcacatacctgacatttttctcaattcggtgatttggcatatttaggattcgggtcactaattatgaggaatgtagcatatcttttttttgttggttttgctttgttgtacatttgaacaagcatcttggggcctaatttttttggtcccctttctcattgttcttacatagaggaaattggatcggcctatcagtttaccttgcctacctatgactgataatttacctcatataatgagggtcaatgtttgaccttgagccatttgccatttccaagaatgcataatgtgctattcacgttagtttgcagctttggaatgaaaaaagg

SEQ ID NO: 7585 - DNA, 331 bp, Setaria italica
  Peptide Sequence Number=SeqID_73559
ttcataggattggtcgtaaattagtgatgctgggagacgagacatggatcaaattgttcccaacattattcgctagacaagatggagtgagcagtttttatgtgagagatacagttgaggttgatttcaacgtttcacgtcatctagaatttgagcttgctgcaaaagactggactgtcttggttcttcattatttaggcttggatcatgttggccatataggtggccgcaggagtgttttgatgacccaaaagatgaaggagatggatgatgtcattagacgagtgcatgctgcgagtcttcaggataatctggagagaacacttttggt

SEQ ID NO: 7586 - DNA, 1039 bp, Setaria italica
  Peptide Sequence Number=SeqID_73560
gaagaatagcgtgaagagtgcagagaaggtgtttgatctgatgaaggatgacagagttgttcctgattggatgaccttcagcttgctggcaagcgtttacatcaatgccgggcttcatgtcaaaggacgagatgcactggttgaaatggagaagagggcctccaggaaggagcgagctgcctactcgtcgctcctcacccagtatgcgaatttgtcagatagaggtaacttggacagggtatggaacaaaatgaaacaaaccttcaggaagttcagcgacaccgaatacaagtgcatgctcacatcgcttacgaggtttgatgacatcacagaagcaatgaacatttacagggaatgggaattggcttcaggaacccgcgattccaggatcccgaacacgatcctttctcattacatcaagaatggcatgatcgaaaaggccgagagctttctcagtcacattgtggagaaacgagttaagcccagctacagcacctgggagttattcgtgtggggatatcttggcaacaacaggaccgacaaggtccttgaatgcctgaagaaggccctgtcaagcttggagaaatgggaaccaaaccataagctcgccacggcgatcttttctcaggttgaaaagatgggcgacattgaaactgcagagaagctcctggtcatgttccgggatgcagggtacgtcaccactgagatgtacaactcagtcctgcgcacttatgcaaaggccgagctgatgcctctgatagttgaggagcgcatggagcaggataaggtggcgatggatgaggagaccaggagattgttgaggttgacgagcaaatacccaatcggcgaggtctcaacattgatgtcttaggtgtgctgctagttgaagggatgtctcgggatgcaatgtgtatttgcccttatgtttttgcacacttaaaagttcgaagtacaatacatagagcaagcatttagttttgaagcagaatacaaatgggtgtgttgattccgtgttagctgtggatcattcatgccttta

SEQ ID NO: 7587 - DNA, 468 bp, Setaria italica
  Peptide Sequence Number=SeqID_73561
tggacccagtcccgacgactcctccggccccgtccttctccccgccttgtcatcgctatcatcggtgtgctggccatcgccttcctcctcgtcagctattacaccttcatctccaggtactgcagcaccttcggttccttccggggcagagtccttggctccagctcaggtggcgctgcccgcggcagcggtggcggtggtggcggaggtagcagccatggacagtacaggagtcaagaatcctggaacgtctcgccgtcgaccgggctggatgaggccctgatcagcaagatcaccttgtgcaagtacaagcgtggcgacgcctcggtccacaccacggactgctcggtctgcctcggcgagttcagggacggggagagcctccggttgctgcccaagtgcagccatgccttccaccagcaatgcatcgacaagtggctcaagtcgcactccaactgtcccttacta

SEQ ID NO: 7588 - DNA, 461 bp, Setaria italica
  Peptide Sequence Number=SeqID_73562
attctgacgtgacctgcggcttgctgctgttgttcatcgcagcagcacaatctggtggcacgtcaggttcgttgaatcgcccattgcattggccgttgttgtgcaggcactatttggaaagcaacaatgccgctgcaatctctaatgaactggtaccaagggatacggatacccatgggtcccctcaaccaggatactggccggatctaacaagtgagcctactcgatcagggcgtgcgggtcaaggatgtgaagatacttggagtacaaggtaaggaaggtcagatgattcaagatcagctcggatattgcaggacacgggttgtagccgaactctgctaggtttccatgtaatagccgactagtccagatccaaaccgacttgtaatccctcactcagcagccaatataagcggccaggggcgcctcctgagagcaaaccaaaaaaaaaaaaaaaaaac

SEQ ID NO: 7589 - DNA, 2102 bp, Setaria italica
  Peptide Sequence Number=SeqID_73563
cggtttgctccttcccatctgtgtaatttctcccacttgtatgaattcattgttgatctagtgtatagaaatggttccttcaattatctccacttatgtgttcaaagtgtctgatttacttggtttatgtaccttctgctgacgcattatgctcccaatatttttataagtgagcacagtagttacgcttgaaccttgcattatccagtcacatgaggctttgctgtcctcaagcaggccttgttttgcttccttggtgacattgatttttatttcaaggtcatgtcatgtagatttaactgtattacctttaggtaagtagagagtactcgtagagatttatgtttgagtaaataatttactgcctctctgtgctgtgccgattggttcctgcggcgcgacgtggagatgctgaccgaggaggagaaggccagcttgtgtctgcttggtttgagcagagaaagttgttccacgactcagtcagaccttatgcacggcattgaacctgctgcagaacagatcgaagatgcagcaggtggcgaccatgtgatgcctgatgctaaagagataagaaatggagctggtgagcaacggcctaggtacagtagtttgtcaacaataactcctgttaaagtgcgagtgacagaaacaaagtatcagctagacagttaccttaaagatgttagagattgttgtccatgggcttcttgaaggtttcaaggtgacctacaagaaggatgaggtggagaagattggacgcataagtggacagggttattcttgtggctgctcggagtgtaattacagtagtaacgttatgaatgcatgcgagtttgagcagcattctggtcagtcatccaacaaccaaaatgatcacatcttcttggaaaccgggatttctctattcaaggtggtgaaagctctaaaacattataggcttaacatgcttggggaattctttgaagacactattggtttccctcctaatatggatgagtataacaagtggaaagcttcgtttcaaaagaggaaagattattcagatgctgtggcttcagatggtagttcaactcagagttcacgggagttgactgtgggggagatgatttctagtttgaaagaatccgctggcaatagcatctcaaaccttaattggagtgcatccaaaaggcggtctgataggcagttcaaacgaggaggcactgagacttcaactccagtgttgagtggaagcgaagacaaaggagtttctggcctctctactggcacctcaaagaagaatggcactgaagaaactcttagtgagaacacagcaggtcctctcagcaccaatggtgtaaaacctgactctccagaacctactacaataataccggactactctaaacatgatcccataagtttagggctttctttaccaagttcagcgacaatctctcaagagccacttccaaactgcaacatagactcaaagtcaaaagaaacaaaatcgagggataccactttgcatccactgattttcaaggagggtggccttccagataataatttattgacttacaagttgaagaatggagaggctctaaagcaagggtataagcgggggacaggaatagtctgtaattgttgcaaccaagagtttactccttcgcactttgaagaacatgctggcatggggagaagacgacaaccgtatcgcaacatctatacatcagaaggagtaacacttcataagctagcgctgcaattgcaagatcgtttgaattcaaatgaatttggcaatgctaatgtttctagctttagtgactaccctaaccttacttcttcaggttgtggaaaagaaccttctaccaccagtggacctatcattcccctgaaacggactttacaagaaatagtggtcgagacagagatgtgctatttctgtggggatggccgcacgacgcttggaaatattgatcctgatacaatagtcttctgtaaccagtgtgagagaccatgccatatcagatgttacaacgatcgaattgggaaaaaagaaggtgccccctggaaatattgaaagaatatacgcgattactactcacactgagtcggagaca

SEQ ID NO: 7590 - DNA, 440 bp, Setaria italica
  Peptide Sequence Number=SeqID_73564
aagatgatatatatagttgccaagcatttctttgtcgttggtatacattagtaaaattcgttcttcttgcctttttttcctttcgttttcaaggcaaatgggaaagatcaggacttgtacagcattctctacaaagggcagagcggcagcgcacaacctggcatgacagatggtaaaccccaatggactccttccaagagtcgttccacatacaccaaggatagtaaacattcactgccacatgattcggttgatacatcttgttttgggtcatctgtgcattatggtggtcgagattatttctacggcagctctacaaccaagcaagggacagaatcctccactaattacaaggcggacaagaaggatccagccgcagattctcatggcgactggtggcaaggctcattttactactaggtgatctgggggcctctccc

SEQ ID NO: 7591 - DNA, 1119 bp, Setaria italica
  misc_feature (1072)..(1119): n is a, c, g, or t
  Peptide Sequence Number=SeqID_73565
aagatgatatatatagttgccaagcatttctttgtcgttggtatacattagtaaaattcgttcttcttgcctttttttcctttcgtttcgaggcgagcagttgagtgttccctagagtacccgtctctccgccgccgcctgcaaccgcttcacgtgccctaatccctcgcagctcccctttccgaccccaaatggagcccaagaagtcctccgctcagcaccagcctcacgccatggagccgaagaagtcctctccccgcggcgccggagccgccgccgccgccgccaacgacgccgagtccccgttgagcagcttgttctacccgccggcaccaggggcaaatgggaaagatcaggacttgtacagcattctctacaaagggcagagcggcagcgcacaacctggcatgacagatggtaaaccccaatggactccttccaagagtcgttccacatacaccaaggatagtaaacattcactgccacatgattcggttgatacatcttgttttgggtcatctgtgcattatggtggtcgagattatttctacggcagctctacaaccaagcaagggacagaatcctccactaattacaaggcggacaagaaggatccagccgcagattctcatggcgactggtggcaaggctcattttactactaggtgatctgggggcctctcccttggagaacaaggaactaaaagggggagacagtgaagttcgatttccttgactattggtagtgtcatcagttacctgcatcatagtggacccgctttcgtccaatggtggtgccaatatttagaagcgtcaccacacctgggcagatgtagtgtgtgtctttcatagtcgctgctttagatgtgcaatgtaatgaagtagcacagtatgagttaggttgcataaaaaggtccctgtccaatctgccaataatatcaagcagtttggtatctgactccctagagtcaaatgtatgtacaattgggtcgtcgctccaaagcaaaatataaaataaaatgctggagaagcggtgatcacttcattgcacacctttaccatactaaaaggnnnnnnnnnnnnnnnnnnnnnnnnnnnnnnnnnnnnnnnnnnnnnnnn

SEQ ID NO: 7592 - DNA, 753 bp, Setaria italica
  misc_feature (1)..(7): n is a, c, g, or t
  Peptide Sequence Number=SeqID_73566
nnnnnnngtgataggaagatgaggaagccatcaaagccaaaaaagttagcaccatgcctttcaaataacaccagcaagataaaacaatttgagaacacataacaagcaatgactctgaacaaaatttggacaagacctatgattgacatcatttaacacatcatcgacatgtcatcttctccaagatccataatagtaagcacaaagtcttcatggcaacaccaaaacagagatagcataaagggtgtccgatacaagaaattgacaactaaagcaggactatgctggacgcccggcatctagaagcggagcttggtaaagaaccacctgttcttgcctgtcttgaacctctcctcgaggcgcgctttggcggccttgcaggcggcgaccttcttgtcccgggtggagagcgcgtcgggcccgcccgaggcgacgtccttgaagtcgacgtcgaggatgtagcgggtgggcatgatgtgggtgaagttgacgagcttgatgaagcacttgacacgggacttcttggccgtcttcttggcggaatccttgcggatcaccttcttggggtacttggcgaggccggcgacgaggcagtggccgtaggggcggtcgcgggtgccctcctcgaacacgcgcacgatcaccgccttccggccggcgaaccggccctggaggaggatcacggccttaacctaggacttagaaggaaacttacaaccaatacttagaagactagactagactagacgacca

SEQ ID NO: 7593 - DNA, 2330 bp, Setaria italica
  Peptide Sequence Number=SeqID_73567
tttttattcctagaggctccaccctcttgtttatataatccatacatgcaagtaggagtcctacacctagtaggattcaacgttcaaatcctagtagaaatagaagttccaatattgcaccctattgagtcctaatccaatccaattagaatttgagtcaccgtataacagccaccatgggggggagggcagtggccgtaggggcggtcgcgggtgccctcctcgaacacgcgcacgatcaccgccttccggccggcgaaccggccctggaggaggatcacggccttacctggcttgaggaacttcaccatcttgagctgctgctgcgccgccgccgccggggtggtagggtggggagggagaaaagctaatctacaccaaatggcatattatcgacagcagaaaaggtgaaaaaacagaggtgtcatgacttcagtatttgttgctattctatcttccatgcagctgtgtcattgacacagtgccaatggagtggctctgttcgttttcgcttgacttggtcgactcaatctcacggccacggagcatcagggtgggcggccttgggttcgggaggctcgagtcactgctcaacatgataattacagtagggatgtcgggacgctcatcggcgtgatcttgcacgcatagcagcgcaatgtggacgcatctcaagacttgccgaagtgagcacgatgctcttatcagtggatcgatcagctccgcagccttgtcttcgttccattgtcgccatgcgtatcctgcgatattcaaggagtcctgatgatagtggaagctcacagccctctttcctgtgatgatctccaagatcaggactccgaagctgtagacgtcggacttcactgagaaaatgccttccatcgcgtattcaggagacatgtagccaaatgtgccgacgacacggttcgtattgaattggttttggtccccgccaaatatccttgccatcccaaaatctgatatcttggggttcatatctgcatccaggaggatgttgctggctttgagatcacggtgaacaacacgtagccttgagtcccggtggagatatagaagccctctagcaatgccttcaattatatcaaaccgtttactccaatctagaagctcttgcttttcaggattgaacaggaatgcatctagacttttgttaggcatgtactcgtacaccaggatcttctcttctctctgtatgcagcatcctagtagtcttacaagattacggtgctgcaactttgcaataagtatgacctcattcttgaattcttcaaggccttgacctgaattcctacagagcctcttcacagctacttcttctcccccaggtaatgttcccatatagacaggaccaaatcctccttctccaagcttgttggagtcactaaaattacatgtagcagctttcatgcggtccagggaatatactttgagttcatggctttttccatcctccacatcatcatcaaaacgaatggactgtgagatatccagcattgaactattctgctgggaccaggtagatgaatgccttgacctccaacttctgtgcactgcatctttaatatttctgccacgccaccaccacagaacaaggcaagctaccaaaacaacaagaaccacggcagatattatcatggctatgtgccaaactgcgtgatgtacccgtaactcagaagcaggaagcttcaggtttagggtatatgacccagtctgcaactcatggatgtcaattagtttgtcaccccagactagacaccctgttgtagttgtgtaaacataggcaccacatgagcagttgttcaggcaggaacttttgcaccctttctcatccgccaccgtagacatccaatatgagaaatcaggccattttatgtttcccataggaagaaatccatctccagattggttgacctggcaaccgagaagtgggttcctcgtgcaaccttcagtccaatttcctgcattccactggtcccacaacttcggttgaaaacctttcaggcaggtgcattgagccttgccatcttgccccacggtacatttagcatttggaccacaagcagcatagtattcgcacgcgtttgatggttgtaaccagacagtctcccactcttgtgacgactttttaaccatatagcagatgtctgtgccatttggcagaacaacaaacctctgtaaagatgtgtttgttgcagtgtatgtgtagtgtaggcctaagtctcgatcatttgacagtgtccacccactcagatagagtggcctccatggaatgccaataaagttcaccccagtccattgtcctgatctcc

SEQ ID NO: 7594 - DNA, 846 bp, Setaria italica
  misc_feature (1)..(9): n is a, c, g, or t
  Peptide Sequence Number=SeqID_73568
nnnnnnnnntttttttagaagactgtagaccgtatcagcagcttaactgcaagctatgatgcatcacaaatatctgtcactaccaagaccaaacatttagagcacaatgcaggagaaaaacagcagtacatcccaagcagcgattctgagcaaaatctcagccagatctatgcgacaacatttaacacatcatcgatgtcttaataaaattctttccgagatccgtaatactaagcgaagtctccatggcaataccaaagcagagatagcttaaaagagtatccgatacaagaaactgacaactaaagcagggcactatgcaggacgcccggcatctagaagcggagcttggtaaagaaccacctgttcttgccggtcttgaacctctcctcgaggcgcgccttggcggccttgcaggcggcgaccttcttgtcccgggtggagagcgcgtcgggcccgcccgaggcgacgtccttgaagtcgacgtcgaggatgtagcgggtgggcatgatgtgggtgaagttgacgagcttgatgaagcacttgacacgggacttcttggccgtcttcttggcggaatccttgcggatcaccttcttggggtacttggcgaggccggcgacgaggcagtggccgtaggggcggtcgcgggtgccctcctcgaacacgcgcacgatcaccgccttccggccggcgaaccggccctggaggaggatcacggccttacctggcttgaggaacttcaccatcttgagctgctgctgcgccgccgccgccggggtggaagggtggggagggtttgggctgagacacgcaacaggggatacaaggcacacaggggatagg

SEQ ID NO: 7595 - DNA, 456 bp, Setaria italica
  Peptide Sequence Number=SeqID_73569
tcctggttcctggccctccactcgtcgatgacgttgcgcagggctatgctgggggtcatgtcggtggtgcgaagttccgcctgggtgagggggcaggtgggcgtcctcccgctgtccctgcactcccggaaccacttgtggatggcctcccgctcgaaggtctgccccgtctcgatggtcacggggtcctgcatcacctgtttggtgagagggcacatgaaagcctcgaaggcaggctcctgctggtaggattggtcctcaagctcgctgtcgccgccggaatcatgcaccgccggagcatcagccatcatctctgtctatcttgttgtcctgtggtgccaatcagttagcagcggcgacgacggggaggagggcggccagcggcgaagacggccggagaggaggcgcacgacacgggaaggggaggcagctgaggtgaggcggcgttgcgttgag

SEQ ID NO: 7596 - DNA, 309 bp, Setaria italica
  Peptide Sequence Number=SeqID_73570
gtaagagatgactggattgaaaatgatttgtctggctggataggtgctaacaggtttatcctggaacagctgatgcattaaagctttcaagctctgaaacttacatagtcacaacaaaacagaatgctgatcttctgctgatcacttattggtcatctttcagagtagatttgctgaagcactactgaaagaattggctggcatagattttccctctgaaaggatatatggccttggcactggtccgaaggtaaaagttctccagcagctgcagcagatgccacagcaccaaggtctaacacttcattt

SEQ ID NO: 7597 - DNA, 929 bp, Setaria italica
  Peptide Sequence Number=SeqID_73571
cctcttcttcctcagcctcacggcacgccatggccgccgttcgttttctcggcacggcgcctggctgcctggagagggtggtggggcccacaccggccgccagtagcttgggcggccgctccaccttgcctatagggagggtccgcccctacttcattcggtccgggccgtcgcccggaggagcggagaggaggggagcaagggcggcgagacccccgcgcgccgcgatgggcggcgacctgttcgccctcgacttcgacggcgtcttatgcgacagctgcggcgagagctccctctccgccgtcaaggccgcgaaggtgaggtggccgtgggtgtttgcgaaggttgactccgccatggaggagtggatagtggagcagatgtacaccctccgtccagtggtggaaacgggatatgagaacctgttgcttgttaggttgcttgttgagatccagataccctctgttcggaaatcatcagttgcagatgggcttagcatccaagaaatattggagaactggtttaaactgaagcccattctcatggacgagtggcaagaagatagggagtctttggtagatctctttggtcgtgtaagagatgactggattgaaaatgatttgtctggctggataggtgctaacaggttttatcctggaacagctgatgcattaaagctttcaagctctgaaacttacatagtcacaacaaaacagagtagatttgctgaagcactactgaaagaattggctggcatagattttccctctgaaaggatatatggccttggcactggtccgaaggtaaaagttctccagcagctgcagcagatgccacagcaccaaggtctaacacttcatttcatcgaggaccggcttgcgactttgaagaatgtgatcaaagaaccagcgctgtaaatgtaaacctta

SEQ ID NO: 7598 - DNA, 462 bp, Setaria italica
  Peptide Sequence Number=SeqID_73572
tggttcgtccgttcgtagggtcttaccgtctatttgtccggtcggtccctacttcggtcgtaggttcgttcgtacccgtcttcttaccccggtcggcagcttcgacccctcggcctggccgacgaccctgaggccttcgccgagctcaaggtcaaggagctcaagaatggccgcctcgccatgttctccatgttcggattcttcgtccaggccatcgtcaccggcaagggcccgctcgagaacctggccgaccacctcgccgacccagtcaacaacaacgcctgggcctacgccaccaacttcgtccccggcaactaagctcgccattcgcctctgcaactccattgtcttccggccggagggtcgtacgtggattggttgatgctgcaagcgagctgccgcatgctgtctgtttcacgttgcatttcaggggcaagtcgagatgatgagtcggcgttgtac

SEQ ID NO: 7599 - DNA, 2414 bp, Setaria italica
  Peptide Sequence Number=SeqID_73573
gctgcttctaattgtttccacaaaggccacacgtcaaaattacacaggtacactacagatgataatcatcacacctcactaaacctagaagcaagaaactaattatacagcttcagaagctaattatacagtttttggagatcatgcgcaccactgagagagcacgtcagagatggagatggtacaacaatgccagagcatggcacagggagctcattactattggttaaccacatcaactgacccgggttagcggcatggttccaggctgttgctaatcaataacgtagttcgggttaactgccaatattctgctctccgatgttcttcgcgcaccagcaccgtcttcggccgcggctgctgcgccgtcatctatgactataaggtggccttcccgctgtataagcctctctataatggccttgatgcacttcacttcttcctttacctctgcagtagaactgtacgcgcctttggcattctgctgctcaacgtaccaaatgataagatccccttgcttcatgccagccagaccatctccatctttcatgatggactcttcgtgctgccgtagtctcataaccaaggcttgagtaactctctggaagtgttcttcagttattaccaatttcttcttaccgttatctgctgcttggtcattttctgcaccctgttgttgaggagcagcatctgcttcagctggctgtccagcatcattatcagaaggtacatttgttccgtcttcagcatcttggaagtcagagagatcaacttcacttgattcaacactgatgatagatgtcttgagcaatttaactgccagtcggacatgagctgggagaacagttctttctaagtggcttcgagcaatagcttctgacagcctaatcaatgcttccaattgcctaactgtcattctgtaagcaaccctggttccaggagtactgtcacctctgcgaagggtaacatacgactccaccaaaaccttctttgcttctgaactcagctgaggtttcaaagacttcgcgaacgcaatataacgcttcagttctgcagtgctaaatgcaggggccagtgcttcttcacgtttctgatggactcttacaatgtgatgagcaatgtggtagtcagtgttttcatcaggttcatcaatcatgatgtacaccagatcaaatcttgaaagaatagctgggggcaatgccacattgtacttaagtggtttagacttgtcataacgccctcctgtcggatttgctgcagctaaaattgaagttcgtgcattcaaagtggcctgtattcctgcttttgttatgctaatggtttgctgttccattgcttcatgtatagcgacctgatccttaatgtccatcttatcaaattcatctatgcagcaaattccattatcagctaacatcagagcacctgcctcaatacaaaattcaccagtttctggttctttagcaacagttgctgtcagaccagcagcagatgatgacttccctgacgtgtaaacagatcttggaacaataccagcggtatattttaggaactgagactttgcacagcttgggtcgccaacaatgcagacattgatgtcacctctaaggttgatcccttcatgcgttaccttgtgaacaccacccaaaagcataagaaggacagccctcttaatttcttgatgaccaaagacggtaggacatatgctatcaactatcttattgaagaagtcaggagtattcctcatcctaacaacctcatcttcctcttcttctgtgaatttctgtctttcactgtcatcaccatctgtgtcccgatccctgatgtccacttctctcctgccatctgccacctgcactgaatttgccacaaaagcaaggcgataagagagatccctaactccaagggacttcaagccctttacaccttcttgaacacctccactttttcgttgaggagcttcccggcgacactctgctctctcaccaggtgaagttagtgccattacatctggaactgcgacaacagttccggtaaatacaaccgtgtccccggccctagccttctcaacaatctcatgccgcaaaatgacatccagggagcgaggaagcgaaccagcaggtatctcttttgatgtctcctgcattctcaccctctgccaatctgtgaatttgctctcctggcggagaagggcccattttgatcggttctggcatgtcgcattgacacatattatcggctcagtgtacttgaactgctgctccacattcttcacaacattcccacagtcaaggcatttgaaggtgccttgcaatagttcaggccgcacctcactcgtccgtgtcacaacacccattactgatgtaagtttaccaatttccgatgtcccaagctctctcagcttttttagcattggg

SEQ ID NO: 7600 - DNA, 607 bp, Setaria italica
  Peptide Sequence Number=SeqID_73574
ttaagattggtaccatcgcttctcattgctgtttcatagttttcttgcgtaaaatttcggactgaagttgtctcctgagatcctccttgggtgtcctgctacttgatcgcaaattgtctttcagcgagagcatcatatctgattttagcatttggcttcactttcagcggggccatttgctctgttttttactactggtttggaaggcgatcctatcttttcctcatcgaatgaatagaaggcatcatcctcagccttggagatacaagctgtcaatacttctggcttttccttgcaaatcaaaactgtgtccgccaaccacagagagatttcctcgatcttctcatcactactcttagccaggaggttctggaaaccaagggaaacattaaaaaccataccttccttcactatcagatcatttttctcattcaaggagagccaagtttcacggaactcaatgccaattccagttccaccggacttggtaagaaagggaagaagatcaggagcttcctccctgaccacatcaactgcagcttggtaactcttacttgccttgctaccaggtgtcaaagcagcaatagcagcatcgcattgcattttt

SEQ ID NO: 7601 - DNA, 250 bp, Setaria italica
  Peptide Sequence Number=SeqID_73575
ccgtcctcctggaacgcacgcggcgctcatcagctcgtcgcgatggagaacctacaaggaggagacgacgagtcgcacgggttctccggcttcccctacttctccgtgccgtcgacgccagtgcttgacgcgccgccgccgagcttgtcgtcggaggatgacaaccagcacggtaccctcgcctcactccagcaggcggcgtgcaacggtcttcctcctctgggccctgatcagctggcggcgccgccga

SEQ ID NO: 7602 - DNA, 315 bp, Setaria italica
  Peptide Sequence Number=SeqID_73576
gtccgtccgttgcgccgggagggtaggggtgttcgctgcagtacaccgcgccgtcctgatccgccgcagccgccactgccgccgccgccgccgccgccgccgtcgcgtcagccgctttctcctccattcttgaacccgctcgccctcctcaaccgtgctcgaatcccgccaagctccgcgctgcagccgaacggatcttggctacgcagcgaggacactccacatcactgccgctgcttgctcttggctcggcgagctagctcctcctgggcagcttagctcctgccgaagcagtcttcaccctgatctgcttcc

SEQ ID NO: 7603 - DNA, 233 bp, Setaria italica
  Peptide Sequence Number=SeqID_73577
tgattctttatatggaagcagtcttcctttgccatccttgtcagaattttggctgtccacactctctttcagaacatcctctacaagtatccatcaaaagagagcattcctcttgaaacctctgttcctgaacctactccaagcattatggtcccttcagaacttccggtctatccagctagtaacttttactcagccccagatcttgctataccttctggacatccaagcct

SEQ ID NO: 7604 - DNA, 2567 bp, Setaria italica
  Peptide Sequence Number=SeqID_73578
gtgataaatgctatcaggcaacaagcaaatgccaaagtcaaggttgttgacccctaccctggtgcagacaaaagggttatcttggtatattgctatgtcaagcatagagaccttgatgctgatgacggtaatgacaatgaacctgtttgcgcagctcaagatgcattacttagggtacataatgcaattgttgatgcactagatacgctacataagaatcgtaaagactctgataagaagaatatagaagaagctaacatccttgtaccagctagtcaggctgcaagtattataggaaaatctggtgtagtcatcaagtatcttcggtcaacatctaaagcattcattaaagtgagcccaaaagatccaagcgatgttacacattcatgtgctatgggttttgataattttgttcagataactggtggtgctgaagctgttaaaaaggcactgtttggagtatcaaccatcctctacaagtatccatcaaaagagagcattcctcttgaaacctctgttcctgaacctactccaagcattatggtcccttcagaacttccggtctatccagctagtaacttttactcagccccagatcttgctataccttctggacatccaagcctgtctatcttagggtcaacaccccatgttcctgaacttactctatctgctgatggtcatggtcgactgcctgtttatcaatctgttcttccaattattcctacttatagtaccccaaaatgctcaggagaacttgagttccgtgttttatgccctggtaacaagatcgggctggttattggtagagctgggtctaccataaagagtataaggcaagagagtggtgcaaggatagatgttgatgatgcaaagaatgacaaggaggaaagtataatcaacattacatccactgaggccaccgatgatgttaagtctgcagctgtggaagctgttttacttcttcaagcaaagatcaatgattatgaggaagatagaatgagtctacgtcttcttgtcccgaataaggttataggctgtcttattggcaggggtggttcaataatcaatgacatgaggaagaagactaaggcagacatccgcatttcgaagggcgataaaccccggagagcatcttccagtgatgagcttgttgaggtatctggagaggctgacaagctgcgtgatgctcttgttcagatagttttaagattgagggaagatgttctgaaagagagtgtggacagccaaaattctgacaaggatggcaaactaaccgtttccaccactgattctttatatggaagcagtcttcctttgcctgcattatttcctcacactcacagccaacaaatctctcccttgggctatgaccgaaggggtgaaactgagcgaggtctggaaatattcccccgtactagttcgtatgggtataactccttgcaggtcgcagatgatgatcgttatggactttcatcatatacatcaaaggcatatgaaggacgtctaccgcgtgtggaaatgactatccctgctagtggcctgtcaaaagtaatgggaaaacgtggtacaaacttggacaacattagaaagatttctggagctgacattgaaattattgaatcaaaatcatctcgtcatgaccatgttgcttacatatctggcacctctgagcagaggcaatcggctgagaatttgatcaaagctttcataatgtctacctaagattccttttgcggttgagaaggctagctcatctcttcaatcaatctttttgacttctcctgccatccatagtttccctgggttcgtgaaggatatcgaatgcagtgttttcctccacctgtccaagttcccaataaatatcatgcgtatctgagggaggtgtactccccgtagtggacaaagcactccgtgttccttagatccttaactgttagctctttgtgttgtcatgatcatcgtgattcggtcatcttactcttcgttatcttaatgcttggttcagttactgcttaacatatctcttgcaattttgtcctgccaatactgagttgattctttccaccattaatagtagaggggctgtttcactcgcttagtgtagctctcataaattcattccatgaaacttctagctggtatgttccgtagtagcaagggccttctttgaaatgcgagaatgaaccttttgttgaatgcttgtccaaaattccttcaaagtcctgtgtttcagacatccgttaaaaggttgacaagttcctagtgaatgtcattggctgattcacttggtccttgctttagtttttctagctctgccctgtctgtgctgctgtgaccttaggatggggcttgttccttgtcagtcagactggttcacccattgcttgcttcggttcttgtaacttagtcgtgtcaatatatacctgattcctgattctttcatcatctgttacgaagagttgcatgtttaccatttcttgtgttaactctgctgagaaaccaaagtttaccaacatttaaatgggattaacgatgaaacagtaggcagaaattgagcagtataa

SEQ ID NO: 7605 - DNA, 226 bp, Setaria italica
  Peptide Sequence Number=SeqID_73579
gccacgagccctctggcctctacctcctgcccggctgctctggggaggaaaaaaaaactcgcgcactcgcgctcgcttttctgcttcgccgcgctcgcggtggcggtggtggccgccgaaagtgagcgggcgcgggaggtgtcgtcgcgacacgaatcggcgaggtttggtgtttgtagaattgcctagctgagctcctgctgcttgggcacggccatgggccacc

SEQ ID NO: 7606 - DNA, 858 bp, Setaria italica
  Peptide Sequence Number=SeqID_73580
tggtcccttggtacatgagcgtggagttcattgtcaggctcaccaagctgtcgtcggcgtcgctcctcgggaagttgccgccgtcgcttcccccggcctcgccgccggcgccgggtgcgccgccctcgtcgcgcgtggtcaccatgaccgcggactgcacgagctcgaggcagagcctgagcttgttgggctcgatgtgagtgagccccggcacggcgcccttgaagaggaactcggaggtgaggccgcggagcacgtcgagcggggtgacgccgtcgagcgtcctggcgttggggtcggcatggtggtcgaggaggacggagaccatgtcaggggagaccatctccgccgccaggtgcaacgccgtcttccccgtcggcccggcgcgggagttgacgtccgccgcgccgagctcgagcagcgccttgacgacatcgcggttgcagtgctggacggcatagtggacggcgagggcgtcgtcgaggtcgaggccctgcccatgaccatcagcttgacgagctcgatgtcggcggcgtcgagggcgcgccgcatgcggcggatcttgtggtcgcggtcggcggcggaggacggcgcgttgatggggaggtagtggtgggtgaggaacggggagcgcggcgtgttggcggcggcgacgggggacttggcgcggatctcctcaatcttggcgaccacatcgatggggaggtgcttggcgaggaggtcggcggagaggccggagcgcgccacgaggtgggagcaggtggcccagagctcctgcatctcgaacttgcgcgacgccatgagcaccttcatgacgtcgtccacggacgcctccttcaccatgctctccagctgctt

SEQ ID NO: 7607 - DNA, 453 bp, Setaria italica
  Peptide Sequence Number=SeqID_73581
tgagccgcgcgcagacggagcgggagatcctgcagctgctcggaccacccgttcctgcccaccctgtacgcgcacttcgagaccgacaggttcgcctgcctcgtcatggagttctgccccggcggcgacctccacgcgctccggcagcgccagcccggcaagcacttccccgagcacgcggcgaggttctacgccgcagaagtgctccttgccctggagtacctgcacatgctcggggtggtctacagggacctgaagccggagaacgtcctcgtcagagaagacggccacatcatgctctccgacttcgacctctccctccgctgcgcggtctcgccgacgctggtgcgatcctcgctgcaccccgatcccaggaacgcgcagacctgcgcccagcccgcctgcatacagcccacatgcttcatcgcccaagctcttcagccgaaaagggag

SEQ ID NO: 7608 - DNA, 293 bp, Setaria italica
  Peptide Sequence Number=SeqID_73582
atggctccagcggcgagcacgccggtcaagtccgtcctcgtcctcgtttccctcgccacgctgctcctcgtcctcgtctccgccgtggagggatacaacggccgccatgccgccgcgcactcggccgtggcgcggcgctcccgcctggggataacccggcacgtgcaccaccgccggaccgcgacgccccacaggtacgtcctcgcggagaagagcaacaggaccgatggcggcgccaagaaccgcagcgcgccggcgacgtccaacgccacgtcgcagacgccggcgccgcc

SEQ ID NO: 7609 - DNA, 222 bp, Setaria italica
  Peptide Sequence Number=SeqID_73583
atggggcgacctctagtcgaggtccatctgttggtctcaactatatgtgtgtcgtgcatctgtgcgcgcgtgtgtgtggtgacaagcatgtttaattcctctcgctgcttgtaataaggacacagacactgtccaccgtgatatgtgtcatgagcagtctaatatttttatgtattgtctctggccttagcaattttatagaaacacgattattattaaaaa

SEQ ID NO: 7610 - DNA, 370 bp, Setaria italica
  Peptide Sequence Number=SeqID_73584
tcgactacaatttaactgccaggctgttatgactggaatggactgcttctttgtctcttcactgtatatctgactccacctgtgagcttgttcactctcattgtggacaatgattggaacctaaatggtgagtgctatatgtcataaccccttaagttgattaactgcaaatgtgaacatacttaacatggagacagtactggaaatctgaatagggaatgtatagaaccttcttacggcggtgctgcatcatggcaagcatagcagtcatctgagcacgaattagtgacgaagtgtatattacatcaactgggatattgcatattccttttaccgcctcaattgcctcctccactacccttagggtcag

SEQ ID NO: 7611 - DNA, 232 bp, Setaria italica
  Peptide Sequence Number=SeqID_73585
tttatctccaataaattgttcaccatatggggcgacctctagttgatccatctgttagtctcaactatatgtatgtcgtgcatctgtgcacacgtgtgtgtggtgacaagcatagttaattcctctcgctgcttgtaataaggacacagacagtccaccgtgatacgtgtcatgaacagtctaatatgtttatgtattgtctctagtcttagcaattttattgaaacatgat

SEQ ID NO: 7612 - DNA, 433 bp, Setaria italica
  Peptide Sequence Number=SeqID_73586
gggcactacaacttcagctacttgtagagatctcaacgattccatatgctgaacagtatgaacttatcttctttagggatcaaaagcatgttcgacggatgagtgtcttagcgactagtagagaatgaagcctgctatgcttcaagctatggccaagttatgttaatgtttatctccaataaattgttcaccatatggggtgacctctagttgatccatctgttggtctcaactatatgtatgtcgtgcatctgtgcgtgtgtgtggtgacaagcatctctcattgcttgtaataaggacacagacactatccaccgtgatatgtgtcatgaacagtttaatatgtttatgtattgtctctggccttattagcaattttattatctgtgtgtctgagatttgagatatgaagtactcgttatatggttaatac

SEQ ID NO: 7613 - DNA, 306 bp, Setaria italica
  Peptide Sequence Number=SeqID_73587
aaacgatatgattgcattgctaccaacatgaatgccattcataggcatatgttgctatgcttcaagctatggccaagttatgttcatgtttatctccaataaattgttcaccatatggggcgacctctagtcgaggtccatctgttggtctcaaccatatgtgtgtcgtgcatctgtgcgcgcgcatgtgtggtgacaagcatgtttaattcctctcgctgcttgtaataaggacacagacactgtccaccgtgatatgtgtcatgagcagtctaatatttttatgtattgtctctggccttagca

SEQ ID NO: 7614 - DNA, 723 bp, Setaria italica
  misc_feature (714)..(714): n is a, c, g, or t
  Peptide Sequence Number=SeqID_73588
tgcacagagcagcgcgcctacacctggctggcgaccttgccgtcggcgacggtgtcggcgaccttgttggtcgtggcgtcggccagctccaccgcggcggccaccttcttggcgtcctccacctccgcggcggcggcggcggcctcccccttgccgggccgcgcggcggggcccttgttcttccggtacatggcgtacaggaccagctgcgtcaggcccaggaagctcccgcacccgttgggaatctgcacgagcacgaacgcgaacgcgttcaggacgttagtctccaatcagagtcgtaactgtactgaacgctggtgcatccgctgggcggttcgctgtcgcgacaagaaagagcgcggcgctgttgctctggtcgcactggtccaatcctgcatgcacagtgcaggaggccggggcacggcccgtccccatccccagcggcgaggaggacgtcgtgttgctgcgacttgcgcgcgctgtgcctgtgggtgtggtggccagtggccacactagtggaggctggagcccgcgccggtgcccgtgcatcatggctcggcaacggcaggcatgtgcgcgtgcccgggcggggacaccgaaagggcagccgacgcatggacgctgtaccagcccagccaacagaaagcggtgcagcgattgggttccgagtacccatcggcggacaggccggcagcggataggatcatccccgtnatcagagtg

SEQ ID NO: 7615 - DNA, 826 bp, Setaria italica
  Peptide Sequence Number=SeqID_73589
aatcacggagaggaagaccgtcggaagacaacttacagtcacacatgaaaagagaagcagggggaataaaattgaaacggcagcgaacacgcacgcggtgcaagcaagcagatttcatggcggccggccgaggtggctagcttagctagctacaccagggcggtccgcattgccggcaccgccgacgtcgtgggcgaccttgttgctgcccttcgcgtcggaggctgccgccatctccacgtcgtcgtccacgccgccgtgctgcttgccgccccgcccgccggcgcccgccttgccgccgccgctgttccggtagatggcgtacaggatgagctgcacggcgcccaggaagctcccgcacccgttggggatcgcgacgaaggggtcgcggccgagcaggccgtagacaaaccacgacgtgccgcacaggaacaccgccagcgacagcaggaacggcatgtactccacgctcttcgtcttcaccaccagcctcatgatggagagcggcgagccgtacatgcagatggagcagacggtggcggcgatgccgcagaggagcttgcgcctctctccatgtagcgccagcatggacaccagcgccacggcggcgaataccatcgccaccgccgacgccaggcccagcatccgcagccgcgtctgccggctcgacgcgaacaccaggaagatgaccacgtacacggtctcgatcgccgcgcccgcgccgttgatcgtcgacaccaggatgttgttcggggacacgaacggcagcccgtacctgcacacagacagaaccagcacgtcgttggccgtcaaaaacttggttact

SEQ ID NO: 7616 - DNA, 376 bp, Setaria italica
  Peptide Sequence Number=SeqID_73590
aagctggacaagcctaaaacgatatgattgcattgctaccagcatgaatgccattcataggcatatgttgctatgcttcaagctatggccaagttatgttcatgtttatctccaataaattgttcaccatatggggcgacctctagtcgaggtccatttgttggtctcaaccatatgtgtgtcgtgcatctgtgcgcgcgcgtgtgtgtggtgacaagcatgtttaattcctctcgctgcttgtaataaggacgtagacactgtccaccgtgatatgtgtcatgagcagtctaatatttttatgtattgtctctggccttcgcaattttatagaaacattattattattattattattaattaaaaaaaaaaaaaa

SEQ ID NO: 7617 - DNA, 407 bp, Setaria italica
  Peptide Sequence Number=SeqID_73591
gttgctgctaagatggaagaaatggcagtgcttgctaagatggaagaagctggacaagcctaaaacgatatgattgcattgctaccagcatgaatgccattcataggcatatgttgctatgcttcaagctatggccaagttatgttcatgtttatctccaataaattgttcaccatatggggcgacctctagtcgaggtccatctgttggtctcaactatatgtgtgtcgtgcatctgtgggcgcgtgtgtgtggtgacaagcatatttaattcctctcgctgcttgtaataaggacacagacactgtccaccgtgatatgtgtcatgaacagtctaatatgtttatgtattgtctctggccttagcaagtttattgaaacatgattattattattatcaaaaaaaa

SEQ ID NO: 7618 - DNA, 268 bp, Setaria italica
  Peptide Sequence Number=SeqID_73592
ctatggccaagttatgttaatgtttatctccaataaattgttcaccatatggggcaaccatttgttggtctcaactatatgtatgtcgtgcatctgtgcacgcgtgtgtgtggtgacaagcatctctcgctgcttgtaataaggatacagacactgtccaccgtgatatgtgtcatgaatagtctaatatgtttatgtattgtctctggccttagcaattttattgaaacatgattattattaattaaattaaaaaaaaaaaaaaaaa

SEQ ID NO: 7619 - DNA, 357 bp, Setaria italica
  Peptide Sequence Number=SeqID_73593
ggcctaaaacgatatgattgcattgctaccagcatgaatgccattcataggcatatgttgctatgcttcaagctatggccaagttatgttcatgtttatctccaataaattgttcaccatatggggcgacctctagtcgaggtccatctgttggtctcaactatatgtgtgtcgtgcatctgtgcgctcgtgtgtgtggtgacaagcatgtttaattcctctcgctgcttgtaataaggacacagacattgtccaccgtgatatgtgtcatgagcagtctaattatttttatgtattatctctggccttagcaattttatagaaacatgattattattattattaaaaaaaaaaaaa

SEQ ID NO: 7620 - DNA, 351 bp, Setaria italica
  Peptide Sequence Number=SeqID_73594
gcctaaaacgatatgattgcattgctaccagcatgaatgccattcataggcatatgttgctatgcttcaagctatggccaagttatgttcatgtttatctccaataaattgttcaccatatgaggcgacctctagtcgaggtccatctgttggtctcaactatatgtgtgtcgtgcatctgtgcgctcgtgtgtgtggtgtcaagcatatttaattcctctcgctgcttgtaataaggacatagacactgtccaccgtgatatgtgtcatgaacagtctaatatgtttatgtattgtctctggccttagcaattttattgaaacatgattattattaattaaaaaaaaaaa

SEQ ID NO: 7621 - DNA, 425 bp, Setaria italica
  Peptide Sequence Number=SeqID_73595
ggaagaaatgggagtgcttgctaagatggaagaagctggacaagcctaaaacgatatgattgcattgctaccagcatgaatgccattcataggcatatgttgctatgcttcaagctatggccaagttatgttaatgtttatctccaataaattgttcaccatatggggcaaccatttgttggtctcaactatatgtatgtcgtgcatctgtgcacgcgtgtgtgtggtgacaagcatctctcgctgcttgtaataaggatactgacactgtccactgtgatatgtgtcatgaatagtctaatatgtttatgtattgtctctagccttagaaattttattgaaacatgattattattattattatctgtgtgtgcatgttttacataatttattctcagtggattttgaataaaaaaaaaaaaaaa

SEQ ID NO: 7622 - DNA, 1243 bp, Setaria italica
  Peptide Sequence Number=SeqID_73596
ccgcagaggaacacggacagggacagcaggaacggcatgaactccacgctcttcgtcttgatcaccagcctcatgatggagagcggcgaggccgcagaagatcttgcggccgttgccgtggagggccagcagcgagatgagcaccaccgcggcgaagatggaggtgacgacgcccaggaggcccagcatccggagccggatccgacgctctgcgaagatgaggaagatcaccacgtagatggcctcgatcagcgaccccgtcccgttgatcgtcgtcaccaggatgttgttcggggacacgaacggcaaaccgtacctacacatttcatttttgtttttttttttctagacaaaaatcagcagaaagattcagaagatgaacgcatcatgagttcatgaccacatgcgtacgctctgcttggcaagggcgcgtgaaaatcaaacgaatcaccttttcttgcctaccaaagaaaacaagtaccatacgaaaattatcatcatgaccaaaaagcatggaaactttttggagctggctacaaacacttgaacgtgaagctgcatgtgcgagcacaagggccgtgtggcccacatgtcatccccactccatcctggcagtgccgacagggtccacggactgtgtggtacacaaaaacctttttgttcaatagcagtcgttgtcacggtgctggcgagtgggtcccgggtgccatcctgtctacaggacgagttggacagaggctactacgctacgagccaattccttgcttcatccagcaaatcatgcagtatttctgaaatgtaaagctaggtgccgcctacacgtgcggcagttttactggttttatttacagccactttcatgttgcaagaatacagaaaagtatatactaacaggaacctgcttaagaatatcaagaccagctaatctgcatgggtctgaagtctgaactcgattaaacatgagaggtgaaaagttattgtcctgaagaaacacaaatgatgtgatgaagtgtgctcatgcacaggttgtgtttgggaagagttggttaccaagccgataggaggcagttgagcagcgtcatgttgtagggcacgccggagaagtcctccgtcgaccgcttccggatgatcctccagaaggtgacgacaggcgacaggaagaggaagagcgcaatgacatttccggaaactccgaagaagaacctcgcgatatgctccatctcggcgcactccccttcaattc

SEQ ID NO: 7623 - DNA, 842 bp, Setaria italica
  Peptide Sequence Number=SeqID_73597
caagccatccccctcctgcaattcttcctctgaactgtgggtctgcggcaatggcggcgctcgctccatcgaagatcctcggcacccagatcaacttcgccggctcctcacggtacgccaccgctggcgccgaccgccggagcgcagaagatcgtctctctcttcagcaagaagcctgcccagaagccgaagcccgccgcggtaacgtcctcatccccggacatcagcgacgagctcgccaagtggtacggccctgacaggaggatctacctgccggatggtctcttggaccgctcggaggtgccggagtacctcaccggagaggtccctggagactatggctacgacccttttggcctcggcaagaagccagaggacttcgccaagtaccaggcctacgagctgatccacgccaggtgggccatgctcggcgccgccggtgccgtcatccccgaagcctgcaacaagttcggcgccaactgtggccctgaggccgtctggttcaagaccggcgccctgctcctggacggcaacaccctcagctacttcggcaacagcatccccatcaacctggtggttgccgtcatcgccgagaggacgcccagcctgtgagaggctgctgctgcgtttgatcttacccggaaacaatgtgtgtgtgagggtccgatgaatgtgccatgcgtgtaaattatcaagaggggcaagaaaccatttcgttccgatctctgatctgaatatctgatatgactgttagaatttgtgcctgagacatgctacttaattgatcgctcgtttaagattccaacttccaagctgaacttttgaaatctgacaaaaaaaaa

SEQ ID NO: 7624 - DNA, 683 bp, Setaria italica
  Peptide Sequence Number=SeqID_73598
acaacaaaaccaaattaaacttaactaagtaaaccaaaggaaacgtaagacaagacgaacaaggaggcaatggagggaaagaggactaccactttgatggtgatcatgtgcctggtcatcttgtgcctcaatgttaactcggccaccgcggcacagtgcggctgctgcgtatcccacgaggcacaagcatgttgtcagctttgtattcgtgtgggtggctccgacacagtctgcaagcacacttgctgtttcccatgttttctggacgattctgttgctgctaagatggtagaaatggaagtgcttgctaagatgaaagaagctggacaagcctaaaacgatagcatgaacgccattcataggcatatgttgctatgcttcaagctatggccaagttatgttaatgtttatctccaataaattgttcaccatatggggtgacctctagttgatccatctgttggtctcaactatatgtatgtcgtgcatctgtgcgcacgtgtgtggtgacaagcatctctcattgcttgtaataaggacacagacactatccaccgtgatatgtgtcatgaacagtccaatatgtttatgtattgtctctggccttattagcaattttattatctgtgtgtgcatggtttacttaatttattctcagcggatttttgaaaaaaaaaaaaaaa

SEQ ID NO: 7625 - DNA, 1540 bp, Setaria italica
  Peptide Sequence Number=SeqID_73599
gtgctctccctctctcaaaaaaagaagaagacgttgtgtgctctttctttttcttaccctccaaaaaccaggctatgcttttcctttgaacggataaaaccaggctagacttttgtttgcaggttaggtttcacaatgcagtgatgcactttaggcaaatgatcacacacataacttgcaggtcagtttcttacaaaggatcagtacaaatttttttcagagaaacagtgggagagacaaaaacagaaaaacattgggaaacaaaagaaaacttcacacttgcagaggcacgacttgagaacaccgtgtcagctctcccagaaggtacattttatcagtgtgtgacagcgcaaaaggcaaagaaaagcagcaacaatccgcttcaattcatcatcagcaaactaacaatccatccatcaggcagccccgtttaaccgtttttcaggctgcttgacacggccaccacgcaccccctcctcccaaccagcaagcctcgcggtgcacagagcagcgcgcctacacctggctggcgaccttgccgtcggcgacggtgtcggcgaccttgttggtcgtggcgtcggccagctccaccgcggcggccaccttcttggcgtcctccacctccgcggcggcggcggcggcctcccccttgccgggccgcgcggcggggcccgttgttcttccggtacatggcgtacaggaccagctgcgtcaggcccaggaagctcccgcacccgttgggaataatgatgaaggggtcgcggccgaggaggccgtagatgaaccaggaggtgccgcagaggaacacggacagggacagcaggaacggcatgaactccacgctcttcgtcttgatcaccagcctcatgatggagagcggcgaggcgtacatgcagatggagaagatggtggcggcgaggccgcagaagatcttgcggccgttgccgtggagggccagcagcgagatgagcaccaccgcggcgaagatggaggtgacgacgcccaggaggcccagcatccggagccggatccgacgctctgcgaagatgaggaagatcaccacgtagatggcctcgatcagcgaccccgtcccgttgatcgtcgtcaccaggatgttgttcggggacacgaacggcaaaccgtaccaagccgataggaggcagttgagcagcgtcatgttgtagggcacgccggagaagtcctccgtcgaccgcttccggatgatcctccagaaggtgacgacaggcgacaggaagaggaagagcgcaatgacatttccggaaactccgaagaagaacctcgcgatatgctccatctcggcgcactccccttcaattcagcttccctttcactgagccgaatctctcttggcctgaaaactcaaatggaggcgagcagaggtggaagagagggagtggtgtccttcccgttcccagtccagtccaggggagcacaaccaaaggtagcttctaacactgaaccgctcgtttcagcaggaaatgagccaacgcaaatccggtgtgctgtgtgtgtgtgtgtg

SEQ ID NO: 7626 - DNA, 625 bp, Setaria italica
  misc_feature (363)..(363): n is a, c, g, or t
  Peptide Sequence Number=SeqID_73600
ctcttggattgcattcgacttacagcaggaccattacttgcccttggaggtgcaattcgtcctgcaaggatgcctgtaactgtttcatctggatatagctctatgccaaaacaggccaacaacatccctacacaagggccattagcaaatggatcatcttcatcaagcatacatcatgcacctgtcccctcaaatgctgcagctgcccatttgagcagtcataatctccatgctgctgccatgctttcagctgctggacggggtggacctggacttgttcccagttcattactgccttttgatgtttctgttgtacttcgtgggccatactggatacgcattatatatcgtaagaaattttcngttgacatgcgctgctttgctggggatcaagtttggctccagccagctacccctcctaaaggtggaccatcagttggtggatcattgccatgcccacagttccgacctttcataatggaacatgttgctcagggtctaaatgctcttgaacccaacttcatgaatgctgcgcaggctagcggacacttaaataacaatgctggagctccacaaactgtcttccttagttgtctaagttcgtctttaagttgtcttacttcct

SEQ ID NO: 7627 - DNA, 471 bp, Setaria italica
  misc_feature (15)..(15): n is a, c, g, or t
  Peptide Sequence Number=SeqID_73601
taaattgtctttttntaattcctaatttattattgtagttgtcttaggtctatccagcggaccttcagttggtggatccttaccttgcccacaatttcgacctttcataatggagcatgttgctcagggtctaaatgcttttgaatccaattatatgagtgctaggcatagtggtgcacaattgaaagccaatgtcaatacagcttctggaagtcagcaatcagctcctgctctgaaccgctttcatggtgctcacggtgtagctatttctaggccaactgcaaatgttgggaaccaggtggcacctactttcactcggacaggcagtgccatggtggcttcttcaaagtttgcttcaggaattgctggagccccacatcttcctcctggatcaaaccttcctgtttcattatgaagggtgagttgagctcagcttttactggtcttggggacgatggtggctatggtggt

SEQ ID NO: 7628 - DNA, 2246 bp, Setaria italica
  Peptide Sequence Number=SeqID_73602
aaaataagaacttaactaagtaagaactaaactaaacaatagtagaataaagaacaactgttcgttaatgcatcaaacatgctcaactaacagctcagatggattctcttgcaattccatatgtggaagaagttggtctgcggacaccatcatctaatctttggttaacattacctttgcacaagatgattcgtggaagcatatatgcttgcgccttggtaaggctggaagcatgtcttgggatgttaggataaatgatccacatttcagggaactttgggaactcaatggaggaaacaccacgacacaatggggtgttggtattcgcattgcgaatacctcagaaatggattcacatatctcctttgattctgatggtgtagttttaacttacaacactgttgaggcagatagcgtccagaagcttgtgtcggatttacgacgactttcaaatgctcgttctttcgcttgtggaatgaggagactgattggcgtgaaaattgatgataagctagatgacaatcagttatccacggagatgaaatcacaatctgttaataaaggcaacagtgatgcttcagacaagctatctgatcagatgagaaagacattcaggattgaagctgtcggtctaatgagcttgtggttcagttatggcaccatgccgatggtacacattgttgttgaatgggagattgctaagggtggttgcacaatgcatgtttctccggatcagctttggccacacacaaagtttctggaggatttcgtgaatggtggggaggtagcatccttcttggattgcattcgacttacagcaggaccattacttgcccttggaggtgcaattcgtcctgcaaggatgcctgtgacaactacaagttacagttctgtaccaaagcaaaacatcttccgggcacagggggcaccggctaatgactcatcatcaactactatgcaaaatgtgtctgcctcactgggcccttcagcagcccatattactcaaaatgtgtctgccccactgagcccttcagcagcccattctaacaatcataatcttcagagttccgtgctttcggctacagggcggggtgggcctggattagttcctagttcattactgccttttgatgtttctgttgtgctacgtggtccatattggatacgcattatatatcgcaagattttctctgttgacatacgctgctttactggggatcaagtgtggctccagccagctacccctcctaaaggtggaccatcagttggtggatcattgccatgcccacagttccgacctttcataatggaacatgttgctcagggtctaaatgctcttgaacccaacttcatgaatgctgcgcaggctagcggacacttaaataacaatgctggagctccacaaactgctcctagtgcaagtcgcttaagtgctactcctggtgtttctttatctaggccaacttctggtgttgctaaccatgtagcagccagtttgagtcgagcaggaaatgccatgttggcttcttcagctcttgcttcagggattggtggagcttctgtacgacttgctcctggagctggtctccctgtgcacatgaaaggggaaattaacacagctttcataggtcttggggatgatggtggatatggtggtggctgggttcctttggcagctctgaaaaaggttctgagagggatacttaagtaccttggagttctatggttatttgcacaattacctgaacttttgaaagaaatactgggatcaatcctaaaggacaatgaaggggcactcttgaatttggatcaagagcagcctgcactccggttctatgtgggaggctatgtctttgcagtcagtgttcaacgagctcaactgcttcttcaagttcttaatgtaaaacgatttcaccaccagcaacagaaacagcagcagcaagctcagagcccagctcaggaagagctagcaacatctgagataaatgaaatatgtgactatttcagcaggcgtgtcgcctgtgaaccatatgatgcttctagggttgcttcttttatcactttgcttacattacccatttcagttctgcgagaattcataagtctaattgcatggaagaaaattcagtctcaggctcatggggaaattgccagcgcacagagggttcgggttgaactctgtttggagaagcaccatggatcagagtcaaatgaccacactgagagttcatcttcatcaaagaaga

SEQ ID NO: 7629 - DNA, 1547 bp, Setaria italica
  Peptide Sequence Number=SeqID_73603
cagccaccaccatatccaccatcatccccaagacctatgaaagctgtgttcctttggcagctctgaaaaaggttctgagagggatacttaagtaccttggagttctatggttatttgcacaattacctgaacttttgaaagaaatactgggatcaatcctaaaggacaatgaaggggcactcttgaatttggatcaagagcagcctgcactccggttctatgtgggaggctatgtatttgcagtcagtgttcatcgggttcaactgctactacaagttttgagtgttaaaagatttcaccaccagcaacagcaacagcaggctcagagcaatgctcaggaagagctagcagcagctgaaatcaatgaaatatgtgactattttagcaggcgtgttgcctccgaaccatatgatgcttctagagttgcttcttttatcactttgctcacgttgccgatttcggtactgcgtgagtttttaaagttgattgcatggaagaaaggtttttcccaggctcatggggacattgctactgctcagagggctcggatcgagctttgtttggagaatcactcaggatcagcttcggctgataatacagagagcactttggccaagagtaacattcatcatgatagagcccacagttcagtagagtttgccctgacatttgtacttgaccatgctctcattcctcacatgaatgtagctggtggagctgcctggcttccatattgtgtatcagtgagactccggtattcttttggggacaacaatcatatagcattccttgcaatggatgggagccatggtgggagagcctgctggttgcaacttgaggagtgggaaagatgtaagcagaaggtttcaagagctgtggagactgtgaatgtgtctgctgtggctggagaggtaggccaaggaaggctgcgaatggttgccgagatgatccaaaagcaactccaacactgtctacaacagctaagagacggcccactttctgcaggctctactgcatcatgagcttacttggaatgagctgtgtcgtactaggccattcccgatgatccgacttgtatactcagcatggcctttggctttgtggctccgtgcagaggtaaaggagttatctcatttggtagcagcgacagcttctcagcctgaggcttgttcagattgacaattttgtacagtataaatggtgttggttgactcatatggacccttagcccatttgagtgtgtaggctgtaacatagctagcgtgggtagtaatgtattaagatggagttgctcacaggggtgaaaaaagatcttcggaaattggtcttctgtatcatgtaaactgctgtagtcatcttacccttcttttcccctgctggatagcacatttaggagtttttatttttcttctgtctgtaggatgttaatctagacaaaagcagatctggcatgtgtggtggtgtacatgataaactggcactgaacttggactgacacattccgtttgtataagcaggacatccaaagttgtgtttcgaatgactca

SEQ ID NO: 7630 - DNA, 1174 bp, Setaria italica
  Peptide Sequence Number=SeqID_73604
tctttaacttttttgtttactttcgttaccttaggttctttctttaaactattctattacgtaactatttctcatggggaaattgccagcgcacagagggttcgggttgaactctgtttggagaagcaccatggatcagagtcaaatgaccacactgagagttcatcttcatcaaagagcaacattaagcatgacagagccaaccgttcagtggattttggcctaacttttgtactcgaccaggctcttaaacatcatacgaacattggtggagctgcttggttgccgtattgtgtgtctgtgagactgaggtacaactttggggacaatggacatgtcacattccttgcaatggaggggagccacggtggcagagcttgctggttgcaatatgaagactgggaaagatgcaagcaagctgttgacctggcagtggagtctgcaaatgggtcccccgccactggagagataggccaggggagattgcgactggtggctgagatgatccataagcaactacaactttccctgcagcagctaagaaatggccaactttctgccagttgaaatataccttcacagtagtacatggatgactgctgtcagatgagggaatatgtttggtggaactatgatgaaaagatgcaaaggtgctcaacagagtgccagagtgggggtaacaataggagttttctgccaaaggctattatgatgcccgcctcttgcactctaggcacatcacaattttgtacataaagattgttaacttaatagtaatatgatgatcacaactattcaacccccaaaagcttgtggagggtggtcgtagtgtcggacaacatgccaccatgataggcatctaacctatcaataatttgatcatttgcttttcgaaaggacgcagttcaggatggggatgcaccaagtgttgaggcagttgaaattttgagcgtttcttgaggtatttgcaggaggataatgaactagctttatttgaaagtgattttaaggaaactcaagcagatgtggctcttggtatgtagtattgtggggttcagatcatgaaccagaatgtatgtacttcagaagattgctggtggtgttcctggtacatacattttatacatgtttaggcaggatatataattggttgttgtattatttgttcggggtt

SEQ ID NO: 7631 - DNA, 1394 bp, Setaria italica
  Peptide Sequence Number=SeqID_73605
catatggtcaggcgtatattagccttggaataaatatcaggagtggccgctttctccttccaatcaccggaaaacatattaccacctgctgcacttatggactgtgaggaagctctaaacaaagggagtacttcagctactgaggttttttcaagcttaaggaccaggagcatcctccacctatttgcagcagctggaaggttttttggccttaaggtctaccagcagtctcagggcactctgaagattccaaaggccatattagatggttcagattttatgataatgggatttccacattgtgcaaatgcctattatctgttgatgcaacttgataaggacttcaggcctgtttttcatttgcttgagacacagtgtgatgcaagtgataagactaatgcaaatgctgatgctaaagaagctattaggtttaacaaaatcaatgttgggcagatgcaaatacttaaaagtgagtcaactaccaatccttttgatgtgaagctgcaggccctacaaagtataatgagctctgctgacataatggatagtgatcttcctgtccaaaatggaattgagcctcttccactacttcctgcttgttcaccatcgttttcgtctattgttgatgaggttttcgaatatgaacgtggttctactgctgcacagaaccattctatactaccatctagtttgccagcgacacctcatctgagttctctttcagttggtattcaaggagtaaatgctagggctgtctcaccaatgcacgatggaggcttatctcatactcaagctaataatattttaaaagttcatccaagtgtcagtttgaacagctatttcccaagtaattttagacatttacactatgtaaataaatcacttcagcttgtcccttcaagcaatagtaacagcaatcaaatccctgttcaaagctcccattcaggcagtcttgggaactctccctctgatcatttggttagaccttcaactacaacaggaggactagagaagcttattactgctggctctgatggtgcatctaggaaacgctctctttcagatttcttaccaattatcccttcattacaaggactgcaacctagtgatccaattaaacggagaaaaatatcagaatcagcgcggagtcccctgccattgcaggcatacacatctaatttgcaatcaagagccagcctcacctatggagatgttcttgcggaaagaaataattgtgtcccagcaactatatatgcttctgtgctactacatgtgataagacactgttcgttatgcatcaaacatgctcaactaacagctcagatggattctcttgcaattccatatgtggaagaagttggtctgcggacaccatcatctaatctttggttaac

SEQ ID NO: 7632 - DNA, 1192 bp, Setaria italica
  Peptide Sequence Number=SeqID_73606
gacataacagataaattttaataggcacttacaaaatgacaatgagacatgataaacctctaaggaagaaggtaaaaaaaacaaaccacaaaaaaaggaatcccctagctaaatgcatgtttcaactttcaagaaatgtaatcccttgattgctaatcttccaaggataaactctctacagcagcagcaggatccctgcattgtcagcgttcagagccttcgtcgctctcgttgcaagggacggtgtactggatcacaacgcgagctccggacgacagcccagcactgacaaagagttcacagtagtttcaggtaagagaggccacgagcgacacttaactttcctcgatcttgacaagcttctcctccttcctgaacgagtctgccttcgctgctgacgtgattgagccgtcggcgaacctcttgctcccattcccggacgccaggtcgcagtcctgcctcgctgaggagctcctccggcagtctgagactggggatttcagcgagtcgctcttcgggtgtaggaaggatgacaggatcggcgtccgggggaggcacctcgagcgtgatgatgtgtcggttgtgtcctcatcagatcttgtgcaatctagagtcccgccacccctttctgcattataggaggaagaccgtttaagcgctgaatacctttcagctggaacatctctttgcatctttgtctcaataaggctcccactgaagtattccttatcttccaacctcattcccatcaacctgggattttctgataggtaatcaagctcacccatcatcatggtgcgagaaattagcggcgatgggaacttcaggcttgggaacctgggcttgtatgcctgaacaattccgacattttcatgatctttcaccgaaagggagccacaagtgatgagctgcatcaatacattagtcggcttcagcttcgggcaggtgggcacaacgatatcctcctcttcaagaatcctgaagctgttcgtcatgttatccgctcgtatcaaggactctaaactctccgacttgacacgggttgaaggtatgctcaatggagtagcacattgggacaggagttccctggagatcccttggagatctgctgaccggcgaggatggctttgccggtactcggtaatttcacgaactacagcatcatgatctgtgctcagactcttcttgcgca

SEQ ID NO: 7633 - DNA, 690 bp, Setaria italica
  Peptide Sequence Number=SeqID_73607
tattaagaaaagtagtacacgttatatagtggttcaaacacaaaaatagaagtactgaagttttatgacttacagtatctgaataaagcaaattaacaatgacttgtagaaagaatactgcgaaagaaatgcagttcgattgtaagagtatcgtccatggacaagaatcagccttttcagaaacctgaacttgccaatgctatagtcagcagcccttgcagcttgaagaccttccctaccactaattcctacgccaatgtcagcctgttgtatcatccttacatcatttccaccatcaccgatagccaaagttcgatagtcacatgattttagaagcttcactagctgtgctttctgcgatggtgtaacacggcagcataacgcagtttttgaaagaaccgctaagttcagtaaaagcttcagtatattgtgtcagaataatctctagtgcccagccatccactacaaaagctaactccttaggctctgatgatgttatccgcatggtaagaagaactctttccaagcttctagcaacttcatctcgagttctcccattgatatgcaagagctgccctttaggttctggtttatgaaaacacagatacctgaagaaatcaagttgcaacaaaagagcaatttgaatggctagtgtcttttgtttatcgccagttaacatccagaagttga

SEQ ID NO: 7634 - DNA, 2984 bp, Setaria italica
  misc_feature (1)..(89): n is a, c, g, or t
  Peptide Sequence Number=SeqID_73608
nnnnnnnnnnnnnnnnnnnnnnnnnnnnnnnnnnnnnnnnnnnnnnnnnnnnnnnnnnnnnnnnnnnnnnnnnnnnnnnnnnnnnnnnntttttttttttttttttttgtcaggcggacggaaaagatctcgtcgatggagtgtcggttagcggacggattacaatttacaatgctatatatgaattacgatccttgttttcgaaggcttcaatgctgtattgttctcaacctctattgcgaactgcggtcggggggaaaaactaattggcttttatatttctcgggtgagatgttctggaatgtgccggctggaagatgtcaaatgacgacggcgcaagggatctcctggatgccatcggtgaatcagaaagcaaaggctcataaacagagctcttattcttgactggcgttgtggaactggataccatcatattgtctttgtctgatctcagttgagactccagactcaccagggtgtacattggcccccttgaacgctcggccttctgaagaatgttgatagcgctaggtctgtatgtgtatctgaaatacttcagagctaatacaggacccattccaactccactgatcagcaccagagttatccagtatgacggttgtccgcagaggcgaaacatgattgtgtacattccagaagctggtatactgctgataaagaagttgatgacatagaagccaatgaggttcccccatatggccagaagttgcacaaatgtgaaggaattcatctctaatgtcacaacaaatgcctgcagccaaatgcttcctgagagtgcaaccattgacagctcctccatctcacttttctcatttgcgtacgcatggatggttatcacgaaaataatgattgcatgatacaatgatcgaccaaaccaaccagcaaaagtacttggattgagaagccttccagcttggcagtaaagtaatatctctgggttttgcatcactgtcttttcagataaatccttgtccaggaccgtagttaaaacaggaatgcttgtgtagaaaacattataagccatcaaactaaccgagttgaataaactagttccagcaatgcctgaaagaaaagaaaaaagtatctgaataaagcaaattaacaatgacttgtagaaagaatactgcgaaagaaatgcagttcgattgtaagagtatcgtccatggacaagaatcagccttttcagaaacctgaacttgccaatgctatagtcagcagcccttgcagcttgaagaccttccctaccactaattcctacgccaatgtcagcctgttgtatcatccttacatcatttccaccatcaccgatagccaaagttcgatagtcacatgattttagaagcttcactagctgtgctttctgcgatggtgtaacacggcagcataacgcagtttttgaaagaaccgctagttcagtaaaagcttcagtatattgtgtcagaataatctctagtgcccagccatccactacaaaagctaactccttaggctctgatgatgttatccgcatggtaagaagaactctttccaagcttctagcaacttcatctcgagttctcccattgatatgcaagagctgcaagtataacctgaagaaatcaagttgcacaaaagagcaatttgaatggcagtgctttgttatcgccagttaacatccagaagttgattcctgactgcctcagtatttcaatagtttctggtaccccatcctggaggcgatcttctattgcgctgacacctagaatctccaggctatgttctaatctttgacaaacctcagcaactttccactccctgtcaattaatgcactattggcctccttaaatgatcgagaccattcagtgtattcctctgattccagttcacgccatcccaagcagagtgtgcgcaaccccagctgagcatatttgtcaacagcatcaacaaacgtctttgtctgttgcccagaataagcacaaggaagcattgcctcatcagcgcctttggacaagagaaaaatcttgccactctgacaatccaaaacgacgacagacattcttttccgatcagatgtgaactcaagaatgtcgagtatctcatatcgcatcactcgccgattgaagtgaatttctgcattatttccatttttgctgacaagaaccatatgcaaatttgcagctgcatttacaagagcatcctcatcctgggactgggctttatgcaaatttgatccgctaggactttttataggaattactgtattgcagagtgtcatgactgtcagaaatttgatggcatgaggagaattattggcgatagcattcagtagttcaacatctttgagcgcatctccacattcgttcccgtaaaaggtacccccaatacagcaccttctgaagatcatcttgttctcagtcaatgtcccagttttatctgtcaaaatatattcgacctgccccaagtcttcactaattgctgtgttggctgcatgggcaggtgtgtcattttccaggtcatacatatcctcgtcccaatctataaactttgcgtatagacttttaacaaagtccaaagaaacctttattgaaatcggaatcataatagaacacaatagttcaaaccgcagaggtataaccagaatctgataccatggttcgttgtcatcatacttaacataccatagcttgcgagcttctgcatccttccaaacattgcctgcggccccaagaacaacaacgactgtaagttgaaataagaatatggcaccagtaagcttatcgatcattgcatccatagcagttagcttgggttctgggacacccctactcattcccaacttagtttcattgccagtataaactgctactccacaagcccattctgtatttctcaagtagcatgactgtagcaatgtgttattaatagtcaatggacaaatgtcattatcaataaatggaggaaactattccgtccttgtttcctt

SEQ ID NO: 7635 - DNA, 340 bp, Setaria italica
  Peptide Sequence Number=SeqID_73609
cgggattgctggcccatctgcagcgaaactttggcaaaatggatcactcatgccttgggcttggagcgccagttttagtattccgtataaaatttacaagatttaggatgttgtaacatgtgtactggaatttaatttaacattttatccttggaaaaaaaagaaaataatcatgtgttccaaagtgaaaaaaaaaaaaaaaaaaaaggtaagaaaatagtattagggcatgcaattttaagctgtgttactatgtctgcaactgagaagtatgctttgccagcagctacatgagcggaatattttgaatattacacagctaagtctacattgaacaccg

SEQ ID NO: 7636 - DNA, 391 bp, Setaria italica
  Peptide Sequence Number=SeqID_73610
ctctagtaccaccacaacccaccagcagccatggcggcgagcggtaagaagctcccgccgttcctcttcacgctgctgctgctgctctccaccgccgtgacgcccatcctctcgctgccagccgccgcagcagaccacgaggtggactgcgactgcgacaagcccaaggcgcccaagccgtcgcacccgcccaagaccaagcccaagaaccccaagccgcccaagggcccctcctacccgtcgccggtgacgcgcccgcccaagaagggcccctcctacccgccggtcactcgcccgccggtcgtcggcccgcccaagggccccgtcacgcgcccgccggtcgtcgccccgccggtcacgcgcccgcccgtcgtcggcccaccggtcacgc

SEQ ID NO: 7637 - DNA, 244 bp, Setaria italica
  Peptide Sequence Number=SeqID_73611
cagaggaacggctcgccggagtcctcaaggccgtggccgacctcgaacagctgcttgggaagcttgcgcgcgatgctgccgaagctgacgtacacgacggagccgggggcctgctcgtccagccacgccgtgatagccttctgggcggcggcggcggccatcgtgccgcgcgacgccgtggcctgcgcgtcccggttgctgaggcagagcgggccgagcgcccacaccggcttgcccagctccg

SEQ ID NO: 7638 - DNA, 1042 bp, Setaria italica
  Peptide Sequence Number=SeqID_73612
caagatgatcaaggtaccagacaccgttgattactcattatacatctgaaaccctttgcgacaaccttagggcagactccaggacccagccagttgtgcaccaccgttagaggattgaggttttctttgaatgaattgaaggtttcttcccaattcacaggaatccagtttagcttaattgccaactcttgggccttcagaacaaaatatttgtaagcatcctttgtggtcatgttgcgctcattaagcctggaattggggggttttcaacaattaaataaaaggagcatctagcaacagattttttttcctcgaacaaaccagcaacagagattgataaatcatagatgaaaaatctaatttgtggttaagaatccataccactgccttacatgaggtgttgcattccagcaccctgtcatggatactagtattgagtccgggaaaaattttaggagaaacaaaacagcactccagtaacactaaagtattttatatatcaccactatttgggcatgatagtgttactgtaccagtgaacattctgctcaacaacacgtggagaaaaattacacaagatccacttgaacattagaagtaatatgccactggacacactgaccatcattttgtctatcaatagaaaaaagaaatctatgaaagtggtatgaatcaatctgttcagcagttgtgcaacgttgtttctggaatatagaataaagttgtagttgaaattgatacagcagagcaaatagaagtgacagtgtggcatcttactttggacaaaaaaaaacattactagaaccacataaaactacctgctttaaaacagagtcttacactcttaatttgaagttaaaatgcaaatatcagctaacctgtatatacttcatcaccacccaagtgaaacagcccgaatggaaagattttcctcatatcagaaagaattccagaaattacttcaaatgtgaaattgctagagacatctaatggctctgtacaattggcagaaggccagagctttgggtatccatttccccat

SEQ ID NO: 7639 - DNA, 1566 bp, Setaria italica
  Peptide Sequence Number=SeqID_73613
ttgagtttggaagtggaatacacaaaggtggattattagattattatcgtggatgatgaacagatgtgatacagcgcacgtgacaatatagttctctgtttaaagtatggcaggtgtatgaaggcagagcaccttgtggacatcttccctctgaaggtcctgtttactgaacaaagcatgaacctggaccgattggaggccttcgggcatagtagttcgtgactggagccgcagcaattccacggtgattcagcaggcatctgaaatagtgcagccgtgacaagacggttgtttctacgtcttgggcggatatggcctctaattgactccacaggcgctctgctgcagcagctgctcggggccatattgtttgtagaacatcagatgtgtctgctgtctcaccccacatgcaaacctccccaccaagtactagcttttgctggtctttatcactaatccctgcgagtggctcgccactgtagacattttcccagggaacatcaagatgatcaaggtaccagacaccttgattactcattatacatctgaaaccctttgcgacaaccttagggcagactccaggacccagccagttgtgcaccaccgttagaggattgaggttttctttgaatgaattgaaggtttcttcccaattcacaggaatccagtttagcttaattgccaactcttgggccttcagaacaaaatatttgtaagcatcctttgtggtcatgttgcgctcattaagccactgccttacatgaggtgttgcattccagcaccctgtatatacttcatcaccacccaagtgaaacagcccgaatggaaagattttcctcatatcagaaagaattccagaaattacttcaaatgtgaaattgctagagacatctaatggctctgtacaattggcagaaggccagagctttgggtatccatttccccatgattctgcatgaccaggcacgtcaatttctgccattacattgatgcctcttttcttagcataattgacaatatcatgtgcatcttccacggtgtagcgctcccatttggtgtatgaacctttccaaaggtttggatatgatggcacctccaacggaaaagattgttcatcgatgatatgccaatgaagaacgttcagcttagcaaatgacatagagtcgatcacttgcttaatcacatcaactggaaggtaatgccgtgaggtgtctaggagcagcccacggaaggcaaagcggggctcatcctgaatatgccatggggcatggcgcacttcaacattttttgtatcatagttgaaaacacaaagttgactgaatgtctccagtccacggatagctccatatattgtgtttgcctctatggttgctcctcccacgatggaattgacgctgcccgccgccgccacgtagatcgtgtagctctcgtccacccccagcgccaacgtctcgttggcggaggcgacgacgacggtgagcttggcgacgtcgtacccgccgtcgcccgagcgggccgcgtgcgcccacggcgcgaagacgaggccccggtaccgctggaacgcct

SEQ ID NO: 7640 - DNA, 297 bp, Setaria italica
  Peptide Sequence Number=SeqID_73614
caccgagtggtgcccggtcccgccggagcagcggcccgtgaacgagtacgaggcgctcgcgtcctccctgcccttctcctgggcggcgggggacctccgcgtctactgctcccgcctcgcgctcacgggcgccgccttcgcgctcttcgtcgggctccccgtcgccgccttcgggggccgcggtggggccggcggcgacgccgtgcacctcgcgctcggggccacggggtccgggatcctcgctgtcacgctggccgtggtgcggatgtacctcgggtgggcctacgtcggcaaccg

SEQ ID NO: 7641 - DNA, 262 bp, Setaria italica
  Peptide Sequence Number=SeqID_73615
tagaagagagcgagatggctcggggaagaggcagtgctagcgcaagccgcgccatggcgttcgccgtcgcctgctgcatcctcgccgccgacgcaggcaccacctactacgtcggggacaacaacggctggtccttcagcagccccaactggccgaacggcaagcacttccacgccggcgacaccctcgtgttcaggtacgtgccctggatccacaacgtggtggcggtggacgagggcgggtacgacggctgcacgacgcc

SEQ ID NO: 7642 - DNA, 175 bp, Setaria italica
  Peptide Sequence Number=SeqID_73616
cttcttgattgcttcataaagaagagttaggatgccatcctttgttgttgaaaggcctccccaaggatgaactgaagggtcctgaacttccttctcgcttcaacttccctggaatccttggttcacagggacctttatgaagcaatcaagaagagttaggatgccatcctttgtt

SEQ ID NO: 7643 - DNA, 3595 bp, Setaria italica
  Peptide Sequence Number=SeqID_73617
gtaaaacatcagagattaactgactcttgtgtcaaaactgcagaatctataccactcgctatctttccagttttccatacacacaattgggaagaaaaaagcaaatccaaagaggggaaaaagggaaataaatattcgagggaaacacagtaaaaacctcgagctactttattctgttttctcggggaatacaaatccactcgccatgtatcgctgtattgaatacctgctcacttctttctctggtctagttgagctgaaacatcgctcccttattacacccggagaagaggttatactccttgatgttcgtctcctcccttgagcatggctgggcctgagcaattggcagctgcggtctcgacggcgccaatgctcccccaccatgctcttctttggacgctgccggtgcgggaggggcgatcggcaggttgaactggaacaaggagaacggcgtgctgtcatcatctttctgtttttgcttggtggcgttgtcttctgcacagccgttctcagccaccggcactgcctggtttaatttaggaaggagaggatggctctgctgcctctctggattcatcatcatcggcactccgcttctacatagcgggggcggtggtggcactggcacagcatggaggctcacaggagtcttgtgaactggcgccgtaggcagaaaaccaaactcagggcccgggtaaggatgaacgttattgctgtactgcattgggaagtccacacgctggttcccagcaactccatatccaacaggggccacagggccagggtagaagtgaccaggctgaggatacgacaggtacccatttgttggaactggtaggggttgattgtggaaccccataaatggtgctgagtaaggtgcatggaccttctggtggtgcaacatctggtcctgaaaagggccgaccctgaacccaaactggttgctgtcaggaggatgcaggcctttaggttggtactccctgaaaccatttcctgcacacatctcaagtaatgaacgggaagcgctctttgctggtggatcacctgggctgctattgttcctgtctgaagactcttctgaatcagatgtagataaagattctgcattctgagcactgagtgaggtcatgctactcatgctactatctctgtctccttcacttagacatgaggaactgtccgaactggttaggtttgccgtcctaccagtgtcctttgtcaagcagctatctggcttatccacggcatgaggttcatcattacatgcagactggcgcttctcactgcatggctgatctgtgtctgacttgcaagcttcctcagatctctcagaacaaaccgcgagtggttcacacactttctccagcttttcacactcactaatatcctttgagcattccacttgatctgaccgatcagcatcatcagcaactccagcagcattatttccattccccaagctggccttctttcttgcatccattggctcccatacttgctttgggcctgcaatcttggttggtgtaccaccaacacggcctcctttaggcactacgaagctatccaatggatagcacctacggtactgcaacctgggcttctcaactgttttcctggccatcttcatatccctgcttggtctagctgtattgggaaagtatctgtactcttcctgatgaccgcaactgcagggattgtatctatcccttgttctattatttgcactaaatgcagtgttgtagcctctagtgttattcctcatcctttccctagaatgctgcagaatatctccagagtcatcttggcaatcttcataccaataactggcatcttgttcttgagggaagtctcttctatatctcaggtttcttcttgatgatatagactcctcacatgagaatgagccatcacaatctgctgttgtatggcattcatgctcattgctcctttcatcactgtccctggttgaagactgctcaacagaggaatcaggagaggagtgctccctgaccacaacattatcttcttcttcactatctgaatatcttgagtcaagaatatcttctgactcgttagttggtgctgcttggttgcacagagatgatggtgaagtttcatctgaatcttttgattgaatcggtattttttccttatctctgtccttccctttcagcctttccttccttctgttcttttttccctctcttttgtcctcctcctctccctgcgttcttcttcctcacgcttttctttctcctcttcctcaagaagtttggtctgtttttccaaagtaattatttccttgcaagcaacatgaactcgtgcttccaacagtttcagtgcaagggacacaaaaacactatgtgcattttgccgtgccgtgccttctctgaaagccttctcgacctgttctttgaagattactgcagcagcatccaggagaaattctcttgcaagttcagggctcttagcatgcttctgtggatgagcgacatcaccatcagggtcattgctgtctctatccattgcatcatcttcatcctcttcctctgcttcttcagcatgctcaaagaaacttctaatactttcacctttggtaattgtcacaaatccatcccccacaatcagcctgcggtgaacacatgattggcccttcaaggcatgagccttcacacagaactctgtacagcgcccatccagtctacatgctctcagtgtaacaaaatagtcttcaaactgatcaagatcgaggccttttctgtggacttgcccattcatccccacattttcaaagtttagaatatcagattttccttcatctgttccaatagcccactcaaaatggtggtaatttccatcttgctccaataaggattggtgccaatcaacaagaacagcatcctcgaacacctcacacttaaatgctgtatctgcaacacaaaaccaactagtgcagcgaggttcctttcgcatgcgctttagctccttgagctctttgaattcgcgaataacattccttctgcagtctctgcaaaatctcttgctgtcaaacctatgcataagtctttcaatgaagtcctcttccttcatccttaaaagagacgatctagtttcttcacccagtgctgaccaaaaatccaccagagtatcacaagaaaggcgtgcagtgtgcaaagcacatgtgtctcgtgttccatgccccctgccatagttaggtatcactgggctaatccatcctctgccaccaccaccacatgcatcagggtaaagcatttcacgttcacgttcccttgcacgtgcgttgtcaaatacattctggatcacatgaagagattttgcatttatgaagcaatcaagaagagttaggatgccatcctttgttgttgaaaggcctccccaaggatgaactgaagggtcctgaacttcttctgcttcaacttcctgaatccttggttcacagggaccttcttgatgcagtgacttaccatacatgactatttgtgtgaaactttccaaaagagaattattctagtatttttcctttctatctgttccaattagtccctacttctaaaaattggttggttaattt

SEQ ID NO: 7644 - DNA, 258 bp, Setaria italica
  Peptide Sequence Number=SeqID_73618
gtcaagtgaagagtacaactgctaaagctgatagtgaatgctcaaaggcctctggtagcaatgctgaggatgctgtgtcttctgggaaagttggtgctgaagaaggtgaaagatccaaatcagaatcttcttcatctcccatcttctcatcatcgttatcgtcgtcatcatcgtcatccttctcgatttcaccatttccatccccgtgatctttgccatttgagctttcaccttcttcagcaccaactttcccagaag

SEQ ID NO: 7645 - DNA, 1536 bp, Setaria italica
  misc_feature (1452)..(1536): n is a, c, g, or t
  Peptide Sequence Number=SeqID_73619
aggccatcgaggacgaggacttcgtcgacgccgtcgactgcctcagccgcgcgctcgagatcaggactgcacattttggggagctcgctccagagtgtgccagcacatatttcaaatatggatgtgccctgctatacaaagctcaggaggagactgatcctttgggcaatgttcccaagagtgaaccaaatgaagaatcagtgaagagtacaactgctaaagctgatagtgaatgctcaaaggcctctggtagcaatgctgaggatgctgtgtcttctgggaaagttggtgctgaagaaggtgaaagctcaaatggcaaagatcacggggatggaaatggtgaaatcgagaaggatgacgatgatgacgacgataacgatgatgagaagatgggagatgaagaagattctgatttggatctttcgtggaaaatgttggacattgctagggcaatagttgagaagagcccagacaacactattgagaaagtaaaaatttattctgctcttggtgaagttgcattggaaagagaggacatagacaactcactcagtgactacatgaaagctttagccatgttggagcaattggttgagcctgatcatcgtcgaactgtggaactaaacttccgcatatgtttggtttatgagctggcatccaagattggagatgcaatcccatattgtgcaaaagcgatttcactatgcaagtcacgcatacagtctctgaaaaattccaaggatgcttctttggctggtaaagatggtgaatctgctgctgaagggggctcagaaaaatcagctcctgaagctgagatagagcagcttactggcatattgactgaacttgagaagaagcttgaagacctggagcaagccatgtcgaacccaaaccctatggaagaggtcatgaaggtgattgcatccagggcagctgctgcgcagaaagctgctgatgggatgccaagagctgcatctttcacctcttcccagatggccacttcgaacaatggctttgactcctccgtcatgtctacggcagcaacaaccggaagcaccggaagtactgtgactgacctcggcgttgtaggcagaggcgtcaagcgagctaacatcatgccgatctcagccgaacctgctccgaagaagcctgcggtggattcagcatcctcaaaaggcgatagcagcaacagctcggagcctcttcctacggcacagaacggtgatgaatctgtatcgaagtagattacaatttcggtacccctacctatcatgttaacttgctggaatctgctagtggcctatgtctatgtggttctgcttcaattaatgtgccctgctgttagctgttttagctaagctatttaaatgtttgagaagagtactgtttgagccatgaactcatcctgagctctgtaacttgtaaggttaaattgctgagaagtttataacnnnnnnnnnnnnnnnnnnnnnnnnnnnnnnnnnnnnnnnnnnnnnnnnnnnnnnnnnnnnnnnnnnnnnnnnnnnnnnnnnnnnn

SEQ ID NO: 7646 - DNA, 1135 bp, Setaria italica
  Peptide Sequence Number=SeqID_73620
gctttgtggttgctaggtagctgcagcagctgaagcaatggaagaatcggccacacacacctagggattagggaaggaatgaaggtcaagtattatcatgcatacatagatggtgtggattttgttttcatcgacaatcctatcttccaacatgttgagagtgaaatttatggtggaaaccgaacagacatcttgaaacgaatggttttgttgtgcaaaacagctgtagaggttcaatggtacgtcccatgtggtggcttttgctatggtgatggaaatcttgtgttcattgcaaatgattggcatactgcactactgcctgtttatttgaaggcgtactaccgcgacaatggtttcatgacatatgcccgttctgttcttgtgatacacaacatagcacatcagggtcgtggtccaatagatgacttcagttacctggatttgccaggtcattatatggatcaattcaaactctatgacccattcggaggtgatcatctaaacatttttgcagctgggattaaagctgctgaccgttttcttactgttagccatggttatgcatgggagctcaaaacacctgatggcggttggggccttcatagcatcattagtgaaaatgattggaaattccagggtattgtcaatggtattgatacaaccgattggaatcccaggcatgatgtccacctacaatctgatgggtacaccaactattctctagaaacagttcagacaggtaaagcacaatgtaaggaagcattgcagaaagagcttggcctcccagttcgaggtgatgttcctgtcattgctttcataggacggttagaccatcaaaaaggtgtagacctgatagcagaagcaatgccatggattgctggccaagatgtacagttaatcatgttgggtactggaagacaagaccttgaagacacattgaggagacttgagagtcagcactatgacagggttaggggttgggtcggtttttctgtccagttggcacatcgtatgactgcaggggctgatgtactattgatgccatcaaggtttgagccgtgtgggctgaaccagctatatgccatgatgtatggtactgtcccagtggttcatgcggttggaggtcttcgagaca

SEQ ID NO: 7647 - DNA, 1250 bp, Setaria italica
  Peptide Sequence Number=SeqID_73621
ttttttttgtaattaatttttggtaattacaaacaatagatgatacattactatataataatctcttacaccttctcaatccaatgctgaagatggctgcaggcgctcagtttatagtttacagaacagtggataaggctccaaatttacactaatgatttcagcacgtcgaatttttaaccaatcaatacagtttcagcactagagaagaagagttccaatagtcatccgacctgacattcatcttttctctccaatttgatttcctaggcagataagccttatactgattcacatcgtcttcacagagtggcagatagaggtatgctctccattgatgcttgcgtgcctgttctgcatgcatgtatcgcagagcagacatcgttcgtctcgaggaacttctggcccttgaccagaatcagcggggtatacttgaggaccagccgcttgcactgctgttcatagttctgcgccttgctgcatgttttgaggagtaggtcgataacctcaagctgcgtgttggggtctttaagcatgacaagaacttcaacaataacgtgatggcataaaccacaagtaccctcccgagtgggtaagctaatcttcattccctgcttgcagaggtgaactgattcacagaacttttcagggttaaccattgaaacctccaagaagaaaaggggtacgtagtagtcgaccagcgtgatgcactgctgtttcagaggggcaaggcttgcacattcatggtgtagaatgctaagaatctcagtctgggtttcgttttgtttgaggtagagcaatgcttcagttgagtactgctcacataattgacacaacttcccactggctgcagttagccctggtcccttggctgcatcaggcaagccattctgagccaagatattaaaatctctgctctcagcaacctcgtttgttaaggctatagctagtgcaagcacaaacgctagcctcgtcgttggacacatcgtacctgacctggttgacttgggcttctcccctcctccgctggcctgttcttggaattggaatgggaaggggaaggagaggagagagcttggggtcttcctgcaattattactattaattttcttctggttttaaaggttcaagagattggattaggaggatgcatcagcatgtgagattagagtagtgggtgggaactggagagactttgcttctcttacagctagggggagctaggttaggtgagttctttagaaaggaag

SEQ ID NO: 7648 - DNA, 243 bp, Setaria italica
  Peptide Sequence Number=SeqID_73622
tgcataaaagaagtgataatataatcgttgctaatgatactttattccaagagcaaaaatcttagatgtttttttgttgttctccaaaccatagatgtgtcacatacaagtgaaatgatttgcataatatccaatgagataatctaatccaattcattgctctgatgaggagttgacactcaaagcaaatgttctctcttgcaccatcaaggcctttcccctgtacctacctcagccctcccg

SEQ ID NO: 7649 - DNA, 586 bp, Setaria italica
  Peptide Sequence Number=SeqID_73623
cattagggaagggattcttcttagaaagttaaaatatcacctgaatacagaggaaacaagaagtaaccctaaacttcaacgttttaagcctattattgacacatcaatgcttcctagagtacacaaccactaagctcggtctattaatagcacctgaatgttgtcagaatgatgggatcactcttttagattatgcttttgggatgtacaaatttcagaattgcacttgaatacaaatcattaccaatcaaaaagtgctaaagcatgcatatggagcaattagatggttttaaacatttacagtttattttgcacaataaaagatcattttattggggcactgtatttgagtagtgaatttcagctgacatgtgttcggaacatatgtgatcattttatttaggtaaagtattttcttgggttgtgaaagaggtaaaattgtattctattccttgcagcaatatctgcattctgaaacaaatctttatatcagtctgcaatcaatcccttctatcaccagtaaagaaataagaaaatatggtcccagaacaatatctaaataagcacatatgccaatgtaatatgg

SEQ ID NO: 7650 - DNA, 528 bp, Setaria italica
  Peptide Sequence Number=SeqID_73624
tcagcaggctacagaaagctatacttgtcatgcagactgagaaagaatttatcaaaagctcctacgagagcggcattgcaaagtactgggatcttgagaaggaaatcaacgacatgcaggaacaggtttgccacttccaagataagtttgatgaaagtgtggtgattgaggatgatgaagccagagccttgatgacagcaaccgcactcaagtcctgtgaagacactattatgaaactgcaagaacagcgtaaggcctctgcagggcaagcaatgggagagtcggaaagagtcaaggttttcagagagaagctcaaggctataatgaacaaacatggcaaatctctaccggatcctctggatttttctgacaaaaacgcacgaaagaaccacggtgcagagatggaggatgcataccatgccaaacaaggtggtatagaaatgcaggctgtgattgacaagatcaaggaacactttgagagggactgcaacatctccatggcaggaagttacggagagaattgatgag

SEQ ID NO: 7651 - DNA, 485 bp, Setaria italica
  Peptide Sequence Number=SeqID_73625
cgcctgcgacaccgcccttggaagccgccggcaacgccgcccctagaagccgcctgcgacaccacccctggaaccgccggcgcaaaattcagcataaatcatggtaagaccacttcgaaggttaaggaacttgaaccttgaagaagaaggggatgcagaacatattgagaatgggcaggacaacttagcaaagaatgagaataggcatgacaacctagcagaaaatgagaacgatgatgacttacagggtcgtcctgatgttgatggagtattagcccgcctgccacgccaccatccacaaacccccattaagattataaggccaaatggagaggtgagacaagttatagggaattttagaattttaaatttagaggatttagatggaggaaaggtaattgtacgtacggatgaaaatggtgtcccaaatgaaaggtcagcctccattcttggtcaagactttggacagacagcaagaaaaaacc

SEQ ID NO: 7652 - DNA, 731 bp, Setaria italica
  Peptide Sequence Number=SeqID_73626
aatagggtgaagcagacacacgaaaagtggaacaagttgcttgaggagataataagggaccacgagagacgacgaaaaagctctgaccatgggcgtggcgcaggtggtgggggctttgagcaagaagagagtgatgacttcaccgacgtgatgctctctgttcagcatgagtacggtatcaccagagatcatatcaaggccatcttgatggatatgtttgaggcgggcacagccacatcatctttggttctggaattcgccatggtcgagctcttgcgcaaccctcatctcatggccaagctgcaagctgaggtgaggaagaagacgccagagggacaagaaatggtgaaggaagagaacctcgctggcatggtctatctaagagccgtcgtgaaggagacactaaggctgcacccacctgttccactcctcatacctcatctatccatggccgactgtgacatcgatggctacacaatccgctctggaaccaaggtcgtcatcaactcatgggctatttgtagagatccaaagtcatgggagaaggcggaggagtttataccggagaggttcatggatggtggcagcgcggcaggcatcgacttcaaggggaataactttcagtttacaccattcggggctggccggaggatgtgcccgggcatcaactttggtttggccactatcaatatcatgctggcgaacctcatgtattgctttgactggacgtt

SEQ ID NO: 7653 - DNA, 331 bp, Setaria italica
  Peptide Sequence Number=SeqID_73627
ctccgccgccgcggcgctcggcgcgtgcgagcccgccgaggcggccgtggcggccgcgcttgaggccgccttccccgagccgccctccgagcaggacgccgttatcgtgctcaacacggccgccgccgccaggccggagaccgccgtgctcgctctccgctggttcctgaggaacgccgagatccggaagaaggtcatcctctacaacgtggtgctcaagctgctgcgcaagaagcggcgctggagcgagaccgaggagctctggggcgagatgctgcgggacggcgtgcagcccgacaacgccaccttctcgaccgtcatcagctgcgcg

SEQ ID NO: 7654 - DNA, 328 bp, Setaria italica
  Peptide Sequence Number=SeqID_73628
ccagcgcctgctctcccgacccacctcgccgcgccgcgccattccttcccaccactccgccgaggagacgtatacccacctcgtctgccagacgattaacgatatgattccccaggccgctagcctcgacctcggcctcagcctcggcctcgggctcacctcccagggcagcctctcctcctccatcaccaccgccggctcgtccccctgggccgccgcgctcagctccgtcgtcgccgctcagcagcaccagccgcaccacgccgccgcggcggcggctgtggatcccgacagcggggcgatgcgggcgtccacgtcgcccgacacg

SEQ ID NO: 7655 - DNA, 382 bp, Setaria italica
  Peptide Sequence Number=SeqID_73629
cccgctcgtgttcccggaggccgcggccgcggccgccgggggaggaggcgccggcgctcggcccggcaaggcgtgccggcggtcgaggaggggcagcagccgcgggcgggacttcgtgccggacctcggcgccattgccgagtaaccgccggctggccagctaggactagtagaagctaacagcaagccttcggcgagaagaaaaatgaaaaggaagaagaaaaatccaactgtagttacgtgttaactgatcaaccgaaggctttgactaatgctagtgtaggaacggaacggacggaattgcagctcagcttgcatctagtgtactggtgtacgtatacgcggcggagtgtacatgtagaatacgcgtaggtctcggagg

SEQ ID NO: 7656 - DNA, 229 bp, Setaria italica
  Peptide Sequence Number=SeqID_73630
ttcattgctcttgcattcatccgagcatcaagtgctggcagaaagatccttgaagtacactaatggtgtggtacaatagtgattgtgatctaatgttggaatatggtctacgaaacacaaaaggaaaggtgtatacatgacagacaacaggtaaagaatacatcattatcttatcagggagagatttgcaagcaagcttggcaacatacatggctgtctcagggcagcg

SEQ ID NO: 7657 - DNA, 309 bp, Setaria italica
  misc_feature (12)..(12): n is a, c, g, or t
  Peptide Sequence Number=SeqID_73631
ctgccgcgacgngccccgggtcggggcgagcaggacgcggaggaagacgccgtggaggaggacgagttggaaggtgacctcgtcatccccgcgttagcgttgttgttgttgttcggggtcgccgacgcagggagccccggcgacggcgcggcggtgatggagttgagctgctgtatcgtctcctcccactcggagttggtcaccgcggagcccgtgccgctcatcgccgccaccgactcgtcgtcgtcgtcgtcaaacagctgcttctcgagctcctgcaacatgaacagctggctcggcgatgcccgg

SEQ ID NO: 7658 - DNA, 489 bp, Setaria italica
  Peptide Sequence Number=SeqID_73632
caacccaccaccaccaccaccaccgtcatccgcctcctgattccggcgccacctagtcgaccgaccgccgaccccctcgccgtcccatgcccgcggcagccgcttggctgcactgagacgggagcgagcgaccagaggcgaggcctgatgcggcagcggcagcaaggggaggagcaccaggagctgttcgtgcagtggaggccctgcgacaagaagaggtcgtaggccccggccgaatccgcactcggatccactcagccactccggcgtaggtgaaaggcgcgcggtggcgaggaccggccggccgtagccgagaaagagaaaggaatatgagcgggtccgttgggagaacccgggtggggaggtacgagctgggccggacgctcggggagggaaccttcgccaaggtcaagttcgccaggaacgtcgagaccggcgagaatgttgccatcaagatcctcgacaaggagaaggtgctcaggcacaaga

SEQ ID NO: 7659 - DNA, 313 bp, Setaria italica
  misc_feature (211)..(313): n is a, c, g, or t
  Peptide Sequence Number=SeqID_73633
cgggctgttgcttgccttggaatttggtgggtgggtgcgaggtgaggatgctgctgaagccgttttgtcttgcggtttatgcggagtgatttggatgtacctttactatctgtaatgttcttttgaacaagtagctttgctacgtcttgatcgcgatcatttacgtcagatgataagtgagcttacatcagatgaataaaaaaaaaaaaannnnnnnnnnnnnnnnnnnnnnnnnnnnnnnnnnnnnnnnnnnnnnnnnnnnnnnnnnnnnnnnnnnnnnnnnnnnnnnnnnnnnnnnnnnnnnnnnnnnnnn

SEQ ID NO: 7660 - DNA, 272 bp, Setaria italica
  Peptide Sequence Number=SeqID_73634
gaaaagaaagaagcttgaggatattgtgccctcctcccataactgtgatgtgccccacgttaaccgtactgactaccagctgattgacatatctgaggatggatttgtatgcttcttccaactcttctagtttcctgaaaatctgttcgtaatgattgcttaagtatctgtacatgttcgatccataatgcaggtcagcctgctgactgataatggaggcactaaggatgatctgaggctccctactgatgaagctctgctttcccagatcg

SEQ ID NO: 7661 - DNA, 1039 bp, Setaria italica
  Peptide Sequence Number=SeqID_73635
tcgtctaaaattgtcctacttttgttggtcctatttgtactatttttctaattggtaaagtaagtctttgtaggtattaaagggttgccggatcgctgcgtcgccccgcctcctcctccccacccacgcgcggcgccttcctcggttcttcggtcgggcttgggagatgtcggacgaggagcaccatttcgagtcgaaggccgacgccggcgcctccaagacctacccgcagcaggccggcaccattcgcaagaacggctacatcgtcatcaagggccgcccctgcaaggttgttgaggtctccacttccaagacagggaagcacggtcacgcaaaatgccactttgtggccattgacattttcaatggaaagaagcttgaggatattgtgccctcctcccataactgtgatgtgccccacgttaaccgtactgactaccagctgattgacatatctgaggatggatttgtcagcctgctgactgataatggaggcactaaggatgatctgaggctccctactgatgaagctctgctttcccagatcagggctggattcgatgaggggaaggacctgattgttagtgttcagtctgccatgggtgaggagcagatctgcggtctgaaggatatcggcggcaagaactagaggtgcattgccactgttggttatttatctggtcgtctatttgggaggtggtgtgttgttgatgatataggcgtgtttggttatgagtaacatgcttctggactgccgttttgtcttgcggtttatgcggagtgatttggatgtacctttactatctgtaatgttcttttgaacaagtagctttgctacgtcttgatcgcgatcatttacgtcagatgataagtgagcttacatcagatgataagtgggctgttcggaagtttgtgtagtcattttcccagtgtcgccgattcgcagctggtgagttgtgacgcagagttccggggctcggtgctacgagtgcagcgtctaaacaacagatattcttactttctgcttttcaagttttaa

SEQ ID NO: 7662 - DNA, 579 bp, Setaria italica
  Peptide Sequence Number=SeqID_73636
caaggttgaagcctatagtatccttgcattcctttactctgcagtaaagaatatccttcagttctgtcaacaaggatcttgcagctggcgtagtagttagttgattatgatgtgtctgaaggagcactaagcaaaccctacaaacaagctcaacctttgaaggaaccagagaccactccttcaagtaagacatgagctttagtgcatctgagaaaggcaatgccaggagggcctgttccaaatcatttgggcggatgcttgaaactacattcagaacataatctgagggtgaatgcccttgcattatgacattaggttgaaatctagctgccctcccattattttgctcttccagtttatgctgattaaggcgttttacttcttcctcagcagtgtcaagggcatccataattgcatcagcagaagtaactgtctcttttgtttcctaccaggaacacccacagaaccttcatcaggagcatcatctttctgcccgtatctatactcattatcattgtctaaatcagcctcaaaggttttctttcctaaattactttttacttacctttacttacttta

SEQ ID NO: 7663 - DNA, 2004 bp, Setaria italica
  Peptide Sequence Number=SeqID_73637
catccgcccaaatgatttggaacaggccctcctggcattatgacattaggttgaaatctagctgccctcccattattttgctcttccagtttatgctgattaaggcgttttacttcttcctcagcagtgtcaagggcatccataattgcatcagcagaagtaactgtctcttttgttttcctaccaggaacacccacagaaccttcatcaggagcatcatctttctgcccgtatctatactcattatcattgtctaaatcagcctcaaaggtttcttccaatcttttctccttctcttcctcaatgaacagttgttcttcagtacgatcccagcgccgaatggagcgatcatgggaacctgttacaataaaatcaccacgactgctgattgtgaggcaccatacttcagcatgatgtccttcaagtgttaacaacaactcaaatttatcagcatcccagtacttcacagtgcgatcttttcccacgctgaacatataatgtgttctatatacaaacttaacatccatcacgctgtccgaatgagcaaatatagacctgtggcagtccccaaaatccataccccaaatctttaaatttttgtctgcagagccagtaactatcaaagccccatcagatgatatgtccatacagagaactggaagtttgtgcccataaaggtttagaaaatgtttcagtgtgtccatgtgaaagaccttgacattgcaatccaagagagcaacagcaatatgctttccttgtggactgatggagacagcaaggacgtcttcagtcattttcaaggttctcacattagtcacagtcagctgcttggagtcattatcagacttctgcaacagttggtattcccagaacttgacatcatgatcagcactcccagtgacaaatccccgtgcaccgacagttccatcttcatctggaataggtacaattgatcgtattgaacccgcatgcgcttctatcacctcagttaagctgccactagcaatattaataatctccaaagtaccactttttgtaccaacaagagcaaaccgatttccaacgaaagcactgcacaacccatatccagagtcaatggtccgaaggcagtcccctgtactaggattccaaattttgacagcattgtggctagtcgacatcaggaggttgtcctcagaattaagggagacactcctaatgtcggaacggtgtccgtgcatctcaattgagtacattttcgagaccttctcactatccactgaatatgtctcaagcgtgttattgttgagagatagagacaaggtggcaaggcagccttttggtggattacttggagaaaatgaaatcgaacatattttcttgcttgcccgcaaaacttgaaggagcttaaatacatcggtgacgataacagctggatttttgcaagtcttgagctggtaaaggatcaatgacagtaccgttcccttcggctatcatggatttcgccgatgctttctccttcttcctatgcatccgccttttggccttccttgtagcttctgtttcatcaagaaccctataaatatctgctgtcttcccagccacctggcatgccacaagactaccgttcctattaaacctaacagttgccactcgttccttgctctgcctcagaatctcaccgaacagcttcagcacatcccacttgctccaatcctcaccctcctctactgattgccggattctaaacactcgcaattctggatcagcagagccagacactaaaaatctctcactaggatccacatccatagaccaaatctcactgcggtgaccaccaacgatttggagacagtgctgtgtttcaaggtcccaaaccctgataaacttgtccttggagcagctcaccagcttcttaccagaatccaggaacaccaaatcggtgacctgatcccggtggccacgcaagcggaagagcccggcctgagcaacgacgtcccagaggatgacatcgcagtctttgct

SEQ ID NO: 7664 - DNA, 283 bp, Setaria italica
  misc_feature (224)..(224): n is a, c, g, or t
  Peptide Sequence Number=SeqID_73638
tcaccgactccatacaactttgcagtagtagaaaacacagatgttcctgtgcaacttggactcaacacgctgccacaacagaacagcatcgagccatcgaatgttcctaagctaggattgcaattaaatccatgaagcagagtcaaatcaccattcctattgtgctgaagggatactattcattgtaaagagatgatactcagcaagacaaacaaagtatttanggcagagagatttgagatatgaatttgtaaatgcactacaaaataaattccagactgga

SEQ ID NO: 7665 - DNA, 942 bp, Setaria italica
  Peptide Sequence Number=SeqID_73639
tagtcgaagtttaattcgggaatcaccgactccatacaactttgcagtagtagaaacacagatgttcctgtgcaacttggactcaacacgctgccacaacagaacagcatcgagccatcgaatgttcctaagctagggtaagtggatagcattaactatctatgtatttttcaattggttagttagtgttgactccagacatatgatgagtcatcaaacacacgcagattgaattaaatccatgaagcagagtcaaatcaccattcctattgtgctgaagggatactattcattgtaaagagatgatactcagcaagacaaacaaagtatttatggcagagagatttgagatatgaatttgtaaatgcactacaaataaattccagactggaattgagctgtggaattcagtggatgattgtttgctatctgcatttgatgtttgatgagacttttctcatattaaacaagttgcaaattttctagtacacttaccaggaaaaaatccagcatgcaagtttctacttaaatcttgccatgctgaaggaaaccagaaaagaagacttgactgctgtgtgggacattttctagaaaaaaaaagagcaatggtggacagggaacttatattggtggcctttgtatttttatatagaatgatatgctaccgacaagtgagtctagtctccactcactcgagttttatattggtaaatagtgtcatcatgcatttagtaggatatgaatataatataacaatgatgttaggcaattagctttctacggggaaactattggttgcacagcaatggtaacacaaaggcagagatgcttggcgcaccatagagatttttcatatcttttttaagtccataagcccattatcacaattctcaaggtacctttcttcatcaagttctttactcgagtcccactgtcccaaag

SEQ ID NO: 7666 - DNA, 324 bp, Setaria italica
  Peptide Sequence Number=SeqID_73640
ccttcccaatctctctctcccctccctcgtcgtcgcttcctccaaaccctagcccgccttcctccccacgccccccctaacctctgcctccgccgctccgattccccgcggcggcgcgcgatcccgacgctcccatcgcgccccgcgcctgcgcttcaacccctccatccgggcgagatccggcggatggaacccccggcggcgaaggaggcgccgccgccgccccagcccgcagcggaggaagacgcgatgctctccgcgacggcagccatggcgaaggaagccgcagtgtcgttccaaggccgccgctactccgagtgcgtt

SEQ ID NO: 7667 - DNA, 252 bp, Setaria italica
  Peptide Sequence Number=SeqID_73641
atctgcgcccaaagcaaaacagagcacgcatcgccgtcagcgagaagccgaggatggaacaggccgcatttgctgcctgcccgttgaaggaagtcagttatcctaatctttggatttttcccaacgcgtctaaggaaagattggccgttgtaatcttggatgcaacgaacagtctagtctgttagcaagcggaggagagaccgagagagaggcggctatggatagaggaagcacgcagcggcggcggaaaaa

SEQ ID NO: 7668 - DNA, 1122 bp, Setaria italica
  Peptide Sequence Number=SeqID_73642
gtctccggttactggatgaaatgcagcattcctctctaggtgctcccaaacaagccttcttcgttcctcagatacagctcgcttcttttcctcctcttggaaattggtctgacaagctaacagcaatctctcatccatttcgaagaacattttcctcacattcattgttacatttagaaccgactgattccagtgccaacgagcattcctttccagagcaggatatattattggcaggataacttggcggttttgggaaatcaggtcaaacaaatgttcattattccacaggaataaggccctttcagcaacctgaaaatgagagctattcaggcattgcgcaatcctgcgaaacaagggaaccacacacttctggaagtcagccatttctgtcaactccagcacctcctccaactcacccaagaacatcatctccttctgactgttcgtcaccggccagtacttcaggaggcctctgataacagtccctgtgagcttcggttccttctcaataaactgtgtaatgcagtatgtcaactgtggcaaatacactccaactgtcttcggcttgtgaagtggaatcaacgccttccacagaaacaacttatgctcctccttcagaggctttgcaaaaccactaatcacgctcccaaacacctccaacagctcagcaatcccattgtgatgatccgtctcaaacacaaacctataaaagatgttgctcaccgccttgcggataaatggtcgattgcccatgaactttccatatatcctatgcaaaaccgtcttcaagcattccctctccctagggtcatcagaatcgaacaggtccagaagcctagagatgaatgaattgtccatgtacttcctagcaaccttcacatcgacaacaggcgacatcacaaaccggagcaacagctcatacacgacctgcaggtggtaccaggaggggtcaaagaatggctcgtcctcatcagtggcgccgcaggagcggagcttgggcgggaagaccctgaagaggttgatggcgaacattcggacgcaggccgagatcatcgcctccgtgaggggctcctcggccgcggagacgcagtcgacgagggacaagagcaccagccgctt

SEQ ID NO: 7669 - DNA, 806 bp, Setaria italica
  Peptide Sequence Number=SeqID_73643
tcgggcctgtctcttgacgcatcctgctcctcggacgcgtccaccgactcgttctgcagcagggcgtccactgggcggattgggaggccggcgtttggggcgaagaagaagaaggccctctctcagaccgattacaaggctgtttccatgctggaaagggatggtggattggcttcccagactgatgctgctggtgtgaagaggaggtgcgcctgggtgacagcaaatactgatccctgttatgctgcatttcatgatgaagagtggggagttcctgtacatgatgacaagaagttgtttgagttgctagtgctgtcaggtgcattagctgaactaacatggccagcgattctgaacaagagagccatattcagggaagttttcatggattttgacccagtattggtctcaaaattaagtgagaagaaaattattgcacctggaagtcccagcagttcactgttatctgaacagaaactgcgtggtgttattgaaaatgcacgccaaatactcaagattgtagaggaatttggatcatttgataaatactgttggagcttcgtgaaccacaaacctatattgagccgattcaggtaccctcgtcaagtgcctgtcaaaacatcaaaagcagatgccataagcaaagatctggttcggaggggtttccgcagcgtcggcccaacagtcgtgtataccttcatgcaagtctctggcatgaccaacgaccacctcatctcctgctaccggtttgctgaatgcgcagcgtcccctgctagtcctgctaaacttactgatggaagcgaagc

SEQ ID NO: 7670 - DNA, 818 bp, Setaria italica
  Peptide Sequence Number=SeqID_73644
gcattatttgcagtaccgcaataatttgtcgcggagaaaagagtgatcaggtggccttgagcaaagcgctcaaagccatccatcacacactcatgtgctcgcacaattaactgaaggtcattgttgttgcagaactccataacacgatcaggcccaaatgtaacaagaccagggccccgggcattgggtctcagcccttcaacactgtcgttctctgttggatcagaccatagaagatccataaggacaaccgagccagcttccatcgtaattggcctttgaagattctcaatctgctcaacatggttgattgaccgaccaatgccaccatgcatacagattattttcttttctataagcgcagccaaaggaagccaattgaatagcctattcattcgatgccatgtccagataccatctctctcgcccattctttctatacactctattcggaaaccaaacaaagcattgatatctgcagcttcatggttcccacgaatcaaatgtacattttgaggatattcaaccttcaatgcaagaagaagggtgatagtttctaaactatgctggccacgatctacataatctcccaagaagagataatcaatgtaagcgatgtctcctgcagtcgaaggagcaccgtattcatcgaataacctcattaggtctccaaattgtccatgcaaatcaccaaatatcttaacaggagctttaagctgcaaaacgcttggttcgcttgaaaatattcctctacgacgacctacgttcgtaccaactaaggttacgttcgtcgaactttaacttacttagttcgacgt

SEQ ID NO: 7671 - DNA, 1104 bp, Setaria italica
  Peptide Sequence Number=SeqID_73645
caaataacagctcaactacctctaataaatcaaaccgtaaactcctttcgccacccaaaactttaaacacaaaattgtacacatcagcatgaaattacattgaggttgggagggctattatacacgacaactggacagcgaccccgccaggcaaatccctgtggcaactcaaaaacactttgcaacatgaggaaaattctaggcccggagaatgagagagaggaaagaatacctagtacaataacactatttccttttgccattccaattggatgcaaaaaaacacaccatacaccgccgcgccctatccacccagctgagtatatacaagtgaagcctctgaggatcttcagatgaatttctatatgcactgctacttgtgttcggtcaaatgaaatggagagcgctgtccaagatcaagctcccttctaccagcttatagtccgctcagctccctgtacataatctttcggtatggctttggaccagcctctctcccgaacacaagtgaaaacagcaagatcctgctgagggcttcatatggatcataccaaccaatgtgtggcgaatctactatatccaggcaagagagcctcggtcattagctactgcttggggacggcccctggtcggagttggtggtctgttagcattcagctcctgcatccatgtgtcctcaatatgatccggtgatgcctcaggtgatgtaattgcagggggcaaagggtgaattagttttgggacaaccacaagatctctacccaaaaccaagatcgcaccggcattatttgcagtaccgcaataatttgtcgcggagaaaagagtgatcaggtggccttgagcaaagcgctcaaagccatccatcacacactcatgtgctcgcacaattaactgaaggtcattgttgttgcagaactccataacacgatcaggcccaaatgtaacaagaccagggccccgggcattgggtctcagcccttcaacactgtcgttctctgttggatcagacctgtgaagtcagaacaagatcatggactggaataaatagccattatgaaagggtgagctggaggagacgctgaaaatgctaaccatagaagatcc

SEQ ID NO: 7672 - DNA, 2256 bp, Setaria italica
  Peptide Sequence Number=SeqID_73646
tgttcctagtattacctattcttcttcttcgtccctatttcttttcttattactacttcttaattcggaaaccaaacaaagcattgatatctgcagcttcatggttcccacgaatcaaatgtacattttgaggatattcaaccttcaatgcaagaagaagggtgatagtttctaaactatgctggccacgatctacataatctcccaagaagagataatcaatgtaagcgatgtctcctgcagtcgaaggagcaccgtattcatcgaataacctcattaggtctccaaattgtccatgcaaatcaccaaatatcttaacaggagctttaagctgcaaaacgcttggttcgcttgaaaatattctctcagcactgtcacataggtctgcaatttcattgcagtccaagaagaattgccttcggacagggggcttccagccacgaggtttcaacagagatgcaattacctttttaggaacactattaatagacatctgtctatctagtagcttccttgcggcagttgcattctccggggtgccatagctcacccttcttccttcattttcaaattggtcaatcgatagctgtctgaccatgccacctaaggcacctccagtttcagcagccaccacaacagctctatgatgcaaccgaactccaggtggagctgccatgttgttagaaagaacaatgtctggtttgatgaggcttgaatgtttgctgcttgatgttgagtctggagactgctccttgtcaggcaactgttccacctcaccattaacctgcctggccttcacagcagctaatgtcgcactgattgcctcagcctctgctgctgatgcttcaactaaataatccacacctttgtttaatctcctctgtccctgcaacacagcattctcagggctgatatcagtatacatgtctccatttacaggaggtgcaactggagtcccaagaactacagctccatcaggacctgattccgtagctgtttgtcttgttcgttcatcattgtacgcataccttccaggtgctcgtcctgcttgcaagtttgtggctgctgcactcgctgcggcatgattagcagcatttgttgtttcagcagcagcaagatcctcagccacaagaagatcatcgagaagtacacctccccgtaaacccccataaatgaatattagatcattaacagcagctgctgcgtgcctgcaccgtcgtgtaagctcaacagcagcatcaccgcctgccgcatctgcactatatcttcctgttctgggagttgtaacaactgactttgtgtcgcaccagactccagcagcagtgtccagtactgcaacactcgaagagtcttccaccatccgcccacctccaagagcacctcccgacacatgaagacgcgcattgacaaaaacagctgcatgttggtatctgggtgatggggaaacaccaggggcaattgcccactcccagcgcccatctctatgttttgcaagaccatatgcacttgataggggcacactatttgcatctctcccaccgcaaagtaagagaagaccatcagagcgtgcacttgcagtggcgtacatgcatggaggtggtccttcaccttctggttcaagtttcctccattcatatggcttagccgcagtatcaagggcccatacatccgccagaggtcgcttcccgtcatttccaccaatagtcaacaaaaatctctgcccaaccaaggccatcacatgaccatatcgtggacctggaccaggtccttgaaccaccactctgtgccatcgtggtcgttgttgtgtaaggtctaggacatgaagatcctctgcagacaaaccggcagggccaattccaccctgaatgaccaccatggttccaaccgcagttgccacatgtgcagctcttggtgaaggaggctctccaagtggggtaagcctgctccacttgttcgatgacacgtcgtaacaatggacgtctgctgtcgcgccagcaagacggatccccgcgctcccggcagaagagggcggcgtggcagagttcccctcgagtgctgtggccccgccgaacaggatcagcctcggtccgatgtaccctggtgtgccctcctccccgacggccggtaccgccgtgagcgtgtgcccgcagcggcaccctggtccgtcctccttcttctcgatcaccgcgttcaccaccgtgtacccgggcgccggcctcggccccgccgccgtgacagccgccggattcggggccg

SEQ ID NO: 7673 - DNA, 3503 bp, Setaria italica
  Peptide Sequence Number=SeqID_73647
aaatctcaaaatcgaacccttataatcctgctccaataaatcaaatcaccaacccgtccacaacccaaaaccaagacaagaatgagaaatatattgtacacatcagcaccggtgacggaaattacaacaggagggaggtgtgaggtgtgctgactgactgctaggatcaacaggcgacgaatactattatacaagacctgacagacgacggaccaccgccacataatcttaccgcttttcccactccaaactctgcaacatgagaataatctacagcgaaaaaagaatatacctagtacaatggacacactatccctttcgatgctcgaccaaaaaacaaacacatacaggaaccccgcttatctgctggcatctgagtatgtacaggcgcgatcgcaggcaagaccctccggttaatgaacacccggttctgttcttctacttctcatgtttgggaaaggatttggagagcgctgtcggtggtgactggtgaatcttctctggccttcgtcttctgagcgcttggtttcgctccctgaacggttttcctttcgccgatgttttgggttagcatgtgctttcaacacaggccacctgcctgtgtgcaagactggatggatatatagcctcgagccactagggagactagaaatgggttgttcagaatatggccaggctgctatatccaggcaagggagcctcggtcattattgggcgcttgagggcggcccctggttggcgttggcggtctgttggcattcaactcctgcatccatgtgtcctcaatatgatgctctggagaggtctcaggtgatgtaatggctggcggcaaaggatggatgagctttggaacaaccaccagatcccttccgagaactaagattgcacctgcgttgtttgccgttccgcagtaatttgtagctgagaaaagagtgatcaggtgaccttgagcgaaacgctcaaagccatccatcacacactcatgtgctcgcacgatcaactgcaggtcattgttgttgcagaactccataactctatcaggcccaaaggtaacaagaccagggccccgtgcatttggtctgagtccttctacactatcattctcagttggatcggaccatagaagatccatcagaacaaccgagcctgcttccattgtaattggcctttgaagattctcaatttgctctacatggttgatggaccgaccaataccaccatgcatacaaattattttcttttctattagtgcagccagaggaagccaattaaataacctgttcacacggtgccaggtccagattccatcccgctcacccattcgctctatgcactctattcggaacccaaacagagcattgatatctgctgcttcatgattccctcgaattaaatgtacattgtgaggatattcaaccttcagtgcaagaagaagagtgatcgtctccagactatgctgaccacggtccacataatctcctaaaaagagataatcaatgtacgcaatgtctccagctgttgaaggagcaccgtactcatcaaataagcgcatgagatcaccaaattgaccgtgcagatcaccaaatatcttaatgggagctttaagctgtaggacacttggttcacttgaaaatattctttcagcgctatcgcatagatctgcaatctcattgcagtcaagaaagaactgccttcgcacagggggcttccaaccacgaggtttcagcagagatgcaattacctttttgggcacactattaatagacatttgacgatctagtaatttccttgctgcagttgcattctcaggggtgccataaatgacccttcttccttcattctcaaactggtcaattgagagttgcctaaccatgccacctaaggcacctccagtttctgctgctaccacaactgctctatggtgcaaccgaaccccaggaggtggtgttgaattgttcaaaagggcgggatctggttttatgaggcttgaagtttgcttgccacttgatgcagcatctggagactgctccctgtcaggtgaatgttccatctcaccattgccttgcctagcctttacagcagctaaagtagcactgattgcctcagcttctgcagctgaagcttcaaccaaataatcaacacctttgctcaatctcctctgcccctggataatagcattctcgggactaatatcagtatacatgtccccattgaccgggggagcaactggagttccaagaacaacagctccatcaggacttgaaactgtaactgtttgtcctgactgttcatcgttgtaggcatatctaccaggttctctttgtacgtttgctgatgcagcaacagcagctgcatgattagcagcgctggttgtttcagcagcagcaagatcttcagcaactaggaggtcatccagcagcacacctccccgtaatcctccataaacaaatatcaaatcaccaactgctgcagctgcatgcctgcacctccgtgtaagctctacagaagcatcaccgcccgctgcatctgcactatatcttcctgtccttggagttgtaactactgatttggtatcgcaccaaactccagcagcagtgtccaatactgcaacacttgaggaatcttctaccatgcgaccacctccaagagcccctcctgagacatgtaggcgtgcattgacaaaaacagcagcgtgttgatatctcggtgatggagacacgccaggggcaattgcccactcccagcgcccatctctatgttttgcaagcccatatgcacttgatagaggcacactattggcatcccttccaccgcaaagcaaaaggaggccatcagaacgggcacttgcagttgcatacatgcacggtggtggcccttcaccttccggctcaagttttctccattcatatggcttagctgcagtatcaagggcccatacatctgccagggggcgctttccgtcattgccaccaattgtcaataagaatcgctgcccaaccaaggccatcacatgtccataccgtggaccaggaccagggccttgaaccaccactctatgccatcgcggtcgttgttgtgttagatccagaacatgaaggtcctcagcagataagccagctgggcctattccaccctgaatgaccaccatggttccaacagcagtggctacatgcgcagcccttggtgaaggaggttcaccaagtggtgtaagcctggtccacttatttgataacacgtcataacagtggacgtctgcagtggcaccagcaagacggatcccggcgctcccagccgacgagggcggcgtggcggagttgccctcgagcgcggtggcgccgccgaagagtatgagccgcgggcccacgtaccccggcgagccctcctccccgacggccggcaccgccgtgagcgtgtgcccgcaccggcacccgggcccgtcttccttcttgtccatcgccgcgtccaccaccgtgtaccccggcgccggcctgggcccagccacc

SEQ ID NO: 7674 - DNA, 317 bp, Setaria italica
  Peptide Sequence Number=SeqID_73648
tgcagatctcaccaaactgcagataaagtaagaggcattgttggtaacctgagtcatattgggtgcgaaaaccatcgcaatgtttcgggcgttcatcttgttgtggctttcatgctctacaacatcggccatcagattaattgcccaatcaagtagtgctgcttccactggtggtaacatagaagcaaggagggcacactccttttccgtgttgcagtgcattacttgttcaggtgtcagtgcgtccaagactcctttatcaacccagcaaggcagtgcaagtcaacttcatctggaaccactccacttgttttaat

SEQ ID NO: 7675 - DNA, 1267 bp, Setaria italica
  misc_feature (1222)..(1267): n is a, c, g, or t
  Peptide Sequence Number=SeqID_73649
ttgaacaggagtggccctatcaatcatgggaaaatcaaagtcttctgacttgaaagaactgaaggtttctccaaatgctctggcatctgaggctcatcttggtcatgtggggaaccggagcatgattgcaatgcccaaacctgctccagctgctctttcgtcttttaaagtcatcaagattaaagtcttgaggaaattcatcacctgaactgcatgtatcagggcggttaacggatcggccatctggaagataaattcccaatgattagcacatgcagtttggtgagatctgcagataaagtaagaaggacaattagttaaggtaaaacctgtgtaaagttgaattgagggaatactaggttgttaggtctactaatgagctaattttattttcatatttctttggtcagtctgctgctttatgtctagtggtaatgtatatggaaattccttttcctgtagataatagattagtgggcagtagctacaattgatcaaactgttgtttgattatcctactgtggtatatttttaatcaatcccttctctctcgatcatggatggaatatatcgtgctattctgaaagtatgtctgatgctgcaggttgctttcaagacaaaggttttccatccaaatatcaacagcaatggaagcatctgcctcgatatcctcaaagagcagtggagcccagcattaactgtttccaaggtgctactttcaatctgttcactgttgacggatccaaacccagatgatccgctggttccagagatagctcacatgtacaaggtggaccgaagcaagtacgagaccactgcgaggagctggacccagaagtatgcaatgggttagccagttatattagacctacaggagcaggcagggaatccgttataacatactaatggacctatccctactatgctatgattctgggtattgtaatagcaactaatgtcgtaggtcgatggttactgttgcacatcctatgaacatatatgcatatgcattagcatggtttcaacagatgaatagagattaataaacatgcttgcatgtttgacatggatggcatattgtttcatcatatctgctcataaggtgtgatttgcacaccaagttttatcggtgtgcggctgctgaatgccctgcaagctgttggggatggtgcctgcgtttgctgcaagcctgcaaagactgcctccttgtaccaaaaagttnnnnnnnnnnnnnnnnnnnnnnnnnnnnnnnnnnnnnnnnnnnnnn

SEQ ID NO: 7676 - DNA, 1247 bp, Setaria italica
  Peptide Sequence Number=SeqID_73650
gtccggcgaacccgtcatattctgttcttgcttcttcatcttcatctatttatatggattattgaattctgcgtgtatattttgccttgtttgggtttaaatcggcggctggggcgcagttcttgagtcgtcggcgatggcgtcgaagcggatcctgaaggagctcaaggacctgcagaaggatccccccacatcctgcagcgcaggtcctgtaggagaggatatgttccattggcaggcaaccatcatgggcccttcagatagtccctatgcaggtggtgtgtttctggtttctatccacttccctccggattatccgttcaagccaccaaaggcaagtctaaattagtttaaacaaacacaaattttattcaagatgaacaaggtgcctatctttaattcttcatctctatcattgcccctttttttgtcatcagctcatagtttcataaaaaagttttccaatattgtgtcttaatatttatgcatgacaaacatgtaaagttcatgcagtaaccagataaccaatgttctacctgtcttcttcattattatagtgctactaaattgctatcttgaaattcaactttgtaccaagcagttacttgattggttggtaggatttcctctgcatgtgctaggtttatagatcagtatccaacagaaatagtgatatggcatagtagcttagaagatttgaaggttttcgtggttatcttacatataaaattgaaatgctaaatcgaggggcagctttactgctatgcgctatttctactagaaatgtaggaaacatacaaagatatcatcaaccttttcaggacttgtaaagagggcctatttattgtacgattccatcagaaagtggcattgagcattgcaagttccattgtacttggatattaatatattatgaatttacaatgttggatctttgaagttatcatgttctgatgttgatttgccagcacatttttatggacccctaatagggcttgtattagcttaacatatgaggaaaattttgtgggattcttctactctagtgagaaaatatcagccatactgtatcctttatatgccatcaccttgttttgttgcgcatgacttataccctatattcttctctttgcctgatttaccctgctatagtgaaagtttagaataggtaaaggaattaagaaaggaattaagtactaaataagaatagtacttttttaagtaataacaatagaataattagaaga

SEQ ID NO: 7677 - DNA, 700 bp, Setaria italica
  Peptide Sequence Number=SeqID_73651
tatttagtaaggtatttagttcttaattagtattgttcgttctttttgagacgacaatgcccttattatttctttcttcttttgcctgatttaccctgctatagtgaagtttgatggtaaggattagaaggattagtctaatagatgtctttttttagtatacatgatattgagagaatccaaacactaaagattaataaggttaattcacattgtccttgtacattgtatttcgctctaccttttttggttgatctgttttcatctgcttcttgacctggtcaccttttgttacattctactccacctatggatgggaactgctcccttcgttcatctttacaaattacaaggtgttttttttgttaggataagctttggccgattgttaccctatcaatatgtcattcatgtgatacataagtaattttgaatacggatctagtagcatcaattttgtatcgcaaaaaatatgtattgataggataattgtggtcaaagggttctcccaacaaaacaaaatacgcctgtgtaaagatgaattgagggaatactaggttgttaggtctactaatgagctaattttattttcatatttctttggtcagtctgctgctttatgtctagtggtaatgtatatggaaatatgctttcctgttagctcattagtagacctaacaacctacaattgatcaaactg

SEQ ID NO: 7678 - DNA, 1765 bp, Setaria italica
  Peptide Sequence Number=SeqID_73652
gcttcagcaaaagaagaggacaagcatcgagatgggtcagaggacagaggcaactgggtgggcaccttgcagtccaggaaggcagccagacactgttaccatttttatttggtcaatctgatgaatgcatccaactccagaaaaggatatgcatttacacaacaatttagtgacagttactgtactgtacaggctaataatgttacagcatatcagcaagtttataagaggccatcaagagtttgcaatcatttcaggtatacatacagcacggagccacggagccacggagcctgagttcactcggtggaagctacatgctacttctccagacactttcgtcggaagtaaacggcgatattatacacccagataacctcaattttgtaacctaacaagctaaccactaatcggttctactcacacaaactaggggaatggctaattgctacacacaaaggtgaaaagagtagcatcaccaactagatattacatgcaatatcgtcatcgtatcatacccaggcttgtcttgcttctctgggggcatcaaagaccacaacgtctgcagacttcttcatggacctactcaattggaacacgggatgcctgcaaagcctctcaacccctttcctaaaactaaatctgtcgaacaagccttccgtatttctgttaccgaattctcttccagaaccactgactcggtttctcagatctctgccaagagaggaaacatcactgtggcttttcttgcggtccatgtcaattccaaacttctttggctcatcagaacggctttgtgagtcatgatggatagctttctcagctccaaggacttgaacaggagtggccctatcaatcatgggaaaatcaaagtctttctgacttgaaagaactgaaggtttctccaaatgctctggcatctgaggctcatcttggtcatgtggggaaccggagcatgattgcaatgcccaaactgctccagctgcctcctttcgttcttttaaagtcttcaagattaaagtcttgaggaaattcatcacctgaactgcatgtatcagggcggttaacggatcggccatctgagtcatattgggtgcgaaaaccatcgcaatgtttcgggcgttcatcttgttgtggctttcatgctctacaacatcggccatcagattaattgcccaatcaagtagtgctgcttccactggtggtaacatagaagcaaggagggcacactccttttccgtgttgcagtgcattacttgttcaggtgtcagtgcgtccaagactcctgcaggaagttcccgaaaccatgcctttatcaacccagcaaggcagtgcaagtcaacttcatctggaaccactccactgtttaattgggccctgacgttgacttcctcactgttttctgcattaatcctgaagatcccttcaatcttaagtccttcacgtacatataacttcctctgcatcattaacagtattgtgggcacactgttccctctttgatcatatgaacattgcagagaggtaggtgaaaccccaaatacactcacactggcgctgggcgtgcggcgcggcacttcgggctcgaggtcggcggggaggccgaggaagccgccgaagcggtcgaaggtgacgtgggagacgtgccgcacgtccgtgggccgcccaatctcgatcccttccccctcgctgccgtcctcctcctcgtcgtcgtcctcgtcccccacggcgccggcgctgcacatcaccagcgacctccgcagcg

SEQ ID NO: 7679 - DNA, 364 bp, Setaria italica
  Peptide Sequence Number=SeqID_73653
atgcttctgtgaatcagaatttgttgcatacactgaagccaagcacagtggagaatctttcaagctccaatgctgtttcggctccagtgtatgcaacaaattctgattcacagaagcatgccataccctcatttcctgagcagaagtgcaccgatcaggttggtcatcttgagaacagaagcccagctatcaatgtgccatccagcaagctgggaacttcaaatgaaatttcagacgctccagttgttggttcaggtcatcaagcaccagatggccgttcaactagctttgcagaattgtttggctcggagtcagggtctccgtcaacgatatctggcaccgagtcatctgactctgaatcaac

SEQ ID NO: 7680 - DNA, 1085 bp, Setaria italica
  Peptide Sequence Number=SeqID_73654
ggatcactggagatcagaagtggacttgctcctaattaacgttgctagaagtgcttgtgacacgggaaggagttacaagcaaaagtcatccacatttggggagccaagcatatcggacctccaacttgcttcattgaaggccctgctagcatcttttctttcttctccttatgctcgtcctccttatttagccaaaggaatcgaactcttcgcaaaagggaaggtagagatagggactaagcttgcagagttttgttctcgtgctttgctggccttggatgttcttacacacccgcgagccctttctctagaaaaagcagttcctgtaggctctgggctcaactacagtgcacaaggaaagacagtttttggtggcggaacataccagatgtcagtacacagagatcagcctcaggctatggaggttgaagacatgtacgatgactggttggcatccaccaaggatgatgaaccagcagaggctgcagtgactgatagtggtgcaggagcaagtacagctggcacgatgttggaggatggtaggcaactcaatcccatggcagaagatccaaaaattgagccacccagaatcggagctgcagcacaagatgttccaccctccagcaagagtgatgtcaatatggttgatgcggctgcagatgaaattgccaagccaagcacagtggagaatctttcaagctccaatgctgtttcggctccagtgtatgcaacaaattctgattcacagaagcatgccataccctcatttcctgagcagaagtgcaccgatcaggttggtcatcttgagaacagaagcccagctatcaatgtgccatccagcaagctgggaacttcaaatgaaatttcagacgctccagttgttggttcaggtcatcaagcaccagatggccgttcaactagctttgcagaattgtttggctcggagtctggtgttgattcagagtcagatgactcggtgccagatatcgttgacggagaccctgactccgactagagttcttactgcttgtgaccttttaagactccttggttaaccttttgagttacagaccaatgaacacaat

SEQ ID NO: 7681 - DNA, 624 bp, Setaria italica
  Peptide Sequence Number=SeqID_73655
ctggaacaaaaattagagacatatataatctctttcaattttttgttttgaatctgagctaagatagaaaaggactaatttagactatcatcctgcagccaacttttaccacatggtgctagtatcatacggcttataacagagtacttcaaaatagcaaagttgcctactttgaggacaaaagcttatatcattttgcagctgttactaacctccagtgggcgttggtaggtcatttttgcttctagttgtaattggtctattgtcttctgtgaatcagaattgcaccgatcaggttggtcatcttgagaacagaagcccagctatcaatgtgccatccagcaagctgggaacttcaaatgaaatttcagacgctccagttgttggttcaggtcatcaatcaccagatggccgttcaactagctttgcagaattgttggctcggagtctggtgttgattcagagtcagatgactcggtgccagatatcgttgacggagaccctgactccgactagagttctttactgcttgtgaccttttaagactccttgggttaaccttttgagttacagaccaatgaacacaatggtgtttgttatctctgacccagtgaaatctttttg

SEQ ID NO: 7682 - DNA, 460 bp, Setaria italica
  Peptide Sequence Number=SeqID_73656
tagtaccgtaaggtacgttggtcgcgccgccgtggattcctgggtcgagcgcgtcgtggcgctggtggtgagcgactcggcgtacagttgctggttgggtacttgttttctcggtgtgactttccaagaatgcagcaatgagcgctttgcagaatcgtactccaattggtatgagaaaattctgcctaacttgcaggaaccatctaccttgcaacttgtaactgttatttcctgtacctccatgtctgatttatttgttagattggcgaagttttcgaacttaaagaaagaggcatcatcctttgctggaaggattattgaatcggtgctgcggcttttaaatgaaaatggtctagtagctgatgaagcaattgatttgctgtgcacagttattaaactgtacccatcatctgtaaatcggcactacaataaagttgaatctaccattgcagcaaaagtt

SEQ ID NO: 7683 - DNA, 1819 bp, Setaria italica
  Peptide Sequence Number=SeqID_73657
agtagctacaactgtttttgaatgagtatattctagagaggaagttataacaaacgaaagaggtatcaaaacttctcttttcatagtgatgggaagaaaaaacacgatcatgctatatgaattggttatgcaaccagcatatattgtgttattttaatcaccatatctagttagtgtgtaaattcagagtatatgttttttgtgacatgtaacaaactaacaatggcattataatttatcacctggagcacggcttttaaatgaaaatggtctagtagctgatgaagcaattgatttgctgtgcacagttattaaactgtacccatcatctgtaaatcggcactacaataaagttgaatctaccattgcagcaaaagttatgagtacggaagtcaatgtaaaaccatctaagaaatttgcaagaaccttagcactgttaccttctgtccgagtatctgaggatggttgctcactgatgattcggagaatattgattgtggtaaacaatcttttgaatgatgctttcatagggcttgaaggagaaaagaatggccatgatattatgttgctactagttccgcctggagctgattctccaccaacattgggagatcaagtaaggtctggaggcgatgtgcatgtcacgaagaaatttcgtgtctatactgttcctaccatttcagctcttatgcattgctgcagtgtgatgctgactagttattatccagttcaggtcaacgttccaatgcgtgctttggtggctttgatgcgaagagtgctgttagttgatggatcacttcataaaaagctgttcccttcaacaacttcattgcatcaagagcttatttgttttgagcttccatcattgcattcgactttcttggatttgctcaatgcaactattaaaggaatgcgaagccaacttttaccacatggtgctagtatcatacggcttataacagagtacttcaaaatagcaaagttgcctactttgaggacaaaagcttatatcattttgcagctgttactaacctccatgggcgttgggacgtctctgcacctgcttgaggcagcagtcagcaatgcaattgctgatctgagtgatgatggtgggagtgacatgactataatcagcacaaatccatcaaaagtagcaaatgaatcatcatcaaaaatttattcaaagaagaggaagcaagaaccacaagtacaaaactcagttatctctgcttcagagaaggcagcaatcagcccaaggaaaagaaaaggttcttccatacaaattgcatcgaagggaatggcccctgaaactacaggagatgttagaatttcaactccactttcagtcaaaatagctgcactagaaacattggaaattcttctgaatgtgggaggttcattgcagacggatcactggagatcagaagtggacttgctcctaattaacgttgctagaagtgcttgtgacacgggaaggagttacaagcaaaagtcatccacatttggggagccaagcatatcggacctccaacttgcttcattgaaggccctgctagcatcttttctttcttctccttatgctcgtcctccttatttagccaaaggaatcgaactcgtaacaaaaggtaatacttactctaatcacaaatacgagtccattaggatacagtctccaatgtgccactttgactgcaaatatccatatagatatattatatatcaatgtcaaccttatattgtcaatctacgttaattttctacatgttgctggtccaagtctttttttggggcttaggataatctaggtggatttatattt

SEQ ID NO: 7684 - DNA, 790 bp, Setaria italica
  Peptide Sequence Number=SeqID_73658
agaaggggttacttagacgaagaagacaatgatgaatcatgtgcactccatccttgagcaggaggaagggacttttggaatggcgcatggtctgttttctgaactaatattacaaaggataggtataatgggaatgcaagcccatccatgtcctgttcgtggaggtaaaacaggtggcacacatgctgatataatctcgtgcacaaagtcagcacccattgtgtcagctacctttgcagccgcatcagtacttccacgctcaaaaactaagcgagttaatagatcttttggccattcgtagactaatgagaagtagttgaaatcatgagtcgtgtcagttccatcgactatgtcaccaatggttgcaatatatattatgaagtttgataaatatgttgatggcttggtagatagaggacccatgtatctatttgtagaacctttgtgttctgaactgctttccggaacatttgacgatgcaaggtcactcctagatgcttgtttcaggatcctaagcccatgaccaaggactacacctttctcagaactcaaaacatctttcttttctaagttgacaccttcttttgcataaacactatcaaagtcttcatcaacaatagctctagcaacattgtgaagtttaccactcaagaattgccgctttcctttgaaggcgtcatcaatcatttggtgaagaagcccaagaggacgttgcttttgtccaactctgctagattcagttgacgaagagatgctcatctcggtaaaaaacacttgaagatatggaaga

SEQ ID NO: 7685 - DNA, 722 bp, Setaria italica
  Peptide Sequence Number=SeqID_73659
tcccataaatccattccaccggttgaatcgggttgctctgtgctaaggggttctggctgctcacttgcttctccatgtggcacatcaatttcatccattgattgttccatttccatgacatcttgcaccaaactggcttccttatcgattgaatgtggtgaacaaggcttgccttcatcatctactgtaccagatatgtcctcaggttgaggttgcttgcttccaagagaagcagatgtaatcaggatgtggtcatccaccattgagttcaagccactattgtggtcattttcatttgcagcaggagcaaaacagctttcccacgaatttgcgtagctgacagagcgaattggctggcacatggagaaaaataggttgatgctgctcagtattctcatccccattttcagcactgacccccggaggggagtcgagcgggctctgtcccgcggcgccgtcctgctccgccatgggaaggagagggaggcggccgccgattagggtttcgcgccggcggggtaggtggccggccggtgggtgcgggcgggagacctgagattcgggggaagaggaaggttggttcggttgaggggggaattggcgagactaatcaggcggaggggaagcaaaatggaaggcgatttgttgggttgcgcggaggcagaagcgagggaaaaaaatttggggggggacggcgaaaaatttcgggtttgaaacggagg

SEQ ID NO: 7686 - DNA, 552 bp, Setaria italica
  Peptide Sequence Number=SeqID_73660
ctgactattgcttagtatcccagtctacatgtcagaatcaccatcttagttatttcccaagaaaaagtatacagtacaacccagctcagtttgccattcagcaaaaagcagtgtggttctaagatgttcctattttacaatctaatgttgagcaatccaagggtgacttcgggcaagtgaccaaaacattgaagtaatcaaagaaccttcctagttcacaacaatttctagttactcgtgtattgtaacagaccaaaagaacaaggggtggggacaaacctgttcaagaacccccacccactcaaatcctttgttgtgactcaatcaccaatgcattgagcatgatatgcaatacggcgtcatacacctcgccatcataatgcattccatcagccgtgcactgctgcccgcatccctgggtgagtttccccacatcaagcagcaagcatgggccgccatcaccacgaacgagacccctccgatcgacctcgtagtcataggcgcgcagcatggtgccgttcatgtgtgccctcttggcgtctgtgttgagca

SEQ ID NO: 7687 - DNA, 534 bp, Setaria italica
  Peptide Sequence Number=SeqID_73661
gtccgtccgccgccggcgcgccttggccggtcgccggagcgggcgcggcacctgccacgccgggcagcgccgctgccaactgctgctgctgcggtgatatcagcggcttaatctggtcttgctggtccccgtccctaatcccgaagaacgccgccgccgccgcagccgatgaattcgatgccatcgcctcccgatttatcctcgcaccaactcgaacacgccaaaagagcttctcctccccggtcgctttggcccgttgctaggattggcagtgttcctcgtccttccccttcgctcactctccctactactgcagctgctcctcttgcttgctcttgctacagaggaggagatagcagtggaggagagaggatggaggaggctaagaaggttgttgtctcatttctttcttcatttccttgtcatactttccttctctctcttctctccccctctcctgctgctttcctctcccacactcttatatgtcccactagaaatcaattctggaattcccctgtgtccttccaaggc

SEQ ID NO: 7688 - DNA, 342 bp, Setaria italica
  Peptide Sequence Number=SeqID_73662
ctgggatgccgctcgccccgtgccgctacagccacgtcaccgcctgctcagctcgcgccccgcggcctccacgcgccgtgctgcccccggccgcaccaccacggcgccgccgtcagtccacacaggcatccgcacctctagccgcctccttgcccgcgctctgccactgcctcgtgacacacagccaccgctcggcccggccgctgcacgccgtgtcaacctgcgcgacgcacgtacggccgttgatggcctccgccgccaccggtgacgccgtcgagctgtggcagcaggcgacagcctcgccgccacctaccttcgctcctccgcacgcacgcccacccg

SEQ ID NO: 7689 - DNA, 1401 bp, Setaria italica
  misc_feature (1)..(68): n is a, c, g, or t
  Peptide Sequence Number=SeqID_73663
nnnnnnnnnnnnnnnnnnnnnnnnnnnnnnnnnnnnnnnnnnnnnnnnnnnnnnnnnnnnnnnnnnnncgttaactacgtagcataatctttcatggaaccaagcaaacatcagggtagtaacatgacctacatagtaatcaagattcattagtatatgctgcaagtttgtatctaacttgcgtgatgtacacttcttattattaactaccacagacgaaaaattacaacagcatacagagttctcatcccaaagtttcatacacaggcaacactgcaacagcagattactgaagaagtgcgaaaacctgcccagaaatgatgctcatttccttcctctaggtgtaaggtacacatacaacgggtaaagcctgttggttgtaagctggatggtgtcagccttctcctcgtcgccttccttgagcctccaggtgaactcttgcacaaacctcgcgatggctgtgcacgagatgttcatcgcctgcatgctgccagcacaggccctccttcctgcgccaaaggccatggtcttgtacatgtctgcagactcaaacctcccatccagaaatctctctggcttccattcctcaggttcatcccagtctctcttattcatgttgcatccgaacaggttgatgatcatctctgtgccggctggaatgtcatagctggctaagtttgtgttctcatggacaaatcttggaggcactagtggaactggagaatgtctcctcagggtttcatggaatactgcattcaagtaaggcaaccgtgggaggtgatcctcagtaactatctcattactgcagacctcttggatttcctggtaaaggcgatcctgtttttctgggtgctttgcaatctcaaacatagcccactcggtggtgaccagagtagtatcagcagcttctatgactgcctcccacaccagcattagcaattgttcatcagtcagtgtattctctgctagcaggaagtccagataggatatcctagcctctccacgagcaattcttttcctttgctgatcaatcaaggctcgcatcactgctgttcgcctaccttctgtagttagtactcttgtttcaaagctcctatttggaacccagctgaggtatgggaagaaaatccctccagtcgacctcaattgcgcacatcatcatgtcaaccaccgtggcctggtagatttcctcctttgatatgacctttccaaactcttccacatagactgaactcacatcctcacctaaagcctgaatcagggataaacggaataactcattcttgaaaacttcccggaaattcagaggagcatttggatcatcattcaacaatgtgtggaaagtgctcagcatgttatcaaccatcatgtttcttgtgtcccgaaattgtttctggccag

SEQ ID NO: 7690 - DNA, 689 bp, Setaria italica
  Peptide Sequence Number=SeqID_73664
gaacaatccttgtgaatccacaagggtcagctgtgcctggttggtttattgttaggggaaaggagctgatttggacagtgagctcgcaacactgcagctctgttggatttaagtaaattcatgtagcagagatttgcatgcaagttagtttgttcacgatttgtttcaagaaaacaattcgtcttacatataactattgtatagaattttatgcaaactggaggtgggaagaactattgaccataatatgcagcgctagttcactagtgggcctataggtaaaactaaagtaatcacgattaacttgtctcaggctctcaacatatagtttgattgctcaaaaatttattgcggttgtgaagagatgcagatgtggttgcatgaaggatcagaatttcggagggagctaccgagttgatgcatggcactgatgcaaaatatttctagctaccttactatcttagatgtgcatggctaggttacacatctcagataatcagtttgtgtggatttaaggggctaatagctgcacaatggctaacttagtttccttttcttgaatatggtggaaggtcgattactcgattctattatgttttcatgtaaggtcgttccatattagggagactgcattggtttgaaatctcatattactttttcttgggactgacccgtgtttatatttggac

SEQ ID NO: 7691 - DNA, 270 bp, Setaria italica
  misc_feature (238)..(238): n is a, c, g, or t
  Peptide Sequence Number=SeqID_73665
cgggattataaatgaaaaaaaacttaacacacttagccctttgggaaacccgggcgccgcgccggagaaacagagcaagaagatggcgtccatgataagcggagacttcgccgaggcctacgtgcggaagaacgcctgtaagaaggagactgggatggcagaagcgaacgccgccgccgtcgatggcagctcggcggcacaaggagagaaaaaggccggcgatggagcatcagggaanaagactactactggagaagctggcgtcaaagg

SEQ ID NO: 7692 - DNA, 761 bp, Setaria italica
  Peptide Sequence Number=SeqID_73666
ataataagttagtcaccttacatagtaataaggtacatgtccagtgccaatgactacttaagaaaataaactgaacatctatctaacatatactagcttcgctactgagcgcaccaagtacgacctagaacaacatgagcgcttcattatctctggaatattattcctgaaaccccgcggaaaacaaagaatcaaaggaatgaaaaattgcaagtatcagaaagagacgatctttatgactgcagatgcttaccgaagccctatgtacaagcaccagtcgctaggcctcaaactcagaagaagccaccaccaggcatgggcatgtcatcaaagctccaaaggtccatgttgccacccacatcctgggatccatcacagtccaaaattgggttgactggctcatctggactgtccatcaggaaattcatatatggctcaaactcagggagatcaacactagcatcccctgtcacaggaggcaccacagctttggaggtgccctggaggaatgcggactcatcaacctctgtcaaagtgggaacaggtgcaagagcttggtcagaggacaggttcgccaaaggttcctgaatggaggcagcagtattcaccataggagcaaatgacatgttctgagtctgcatgattggctcaggtatggtgtggtttgcattcgcattggtcatgttgttgataaccagattctcctcagtgcccatattggcctactttcacagatgtaggctcagcaaggcgcttctgag

SEQ ID NO: 7693 - DNA, 979 bp, Setaria italica
  Peptide Sequence Number=SeqID_73667
tttttttttttagtacttggtagtaaaaaatattagttgtttcgtactactattaattagtttgttctaccatacatagtaaggtacatgttcagtgccaatgactacttaagaaaaaaactgaacatctaacacatttgctactgagcgcctacagtcgccagtcgcctgacatgggctcttcattatctccggaatattattccagagctctaggaacaagcaccagtagctataggcatcaacctcagaagatatcactaggcatgggcatgtcatcaaagttccaaaggttcatgttgctaccaatatcttgggattcatcacagcccaacaaggtgttgtttgactcatctgaactgcccatcacgaaattcatatatggctcccactcaaagagatcaacactagcatcacctgtcagaggaggcaccatagcatcagcggtgccctggaggaatgcagactcatcaacctcattcctggtgtcattctccaggctgaagtttgagctactgaaggaattcaccaaaggttcctgaacgaaggcagcagaattcaccaaaggttcctgaactgaggcagcagaattctccagactgatgttttgagtctgcatgaatggctcaggtatggagtggtcgacaacagggaggtgatatacagttgagttggtcatgttgttgacaatcagcttcttttgagtgcccgccttggctactttcacagacgtaggctcagcaaggcgcttctcagaagccactggaacctcatatgggaagttgagcttcgccttcttgccatgaaccctgcgtgcctcagcatcataagctctggcagcttcttcaggagagttgtaagtaccgagccacacacgagcacctttataaggatctctgaattcagcagcccatttaccccaagggcgacggcggatacccctgaattggttctttctcttcatcacatcagggacatc

SEQ ID NO: 7694 - DNA, 1420 bp, Setaria italica
  Peptide Sequence Number=SeqID_73668
tgtactaaacttttgtctaactttattgtcttggcaaaacatcacagtacaccatacatttgataatagatgatagatgatagattatatagatagatggtgctcatcccctacaacaacggaagactactacaaaagacttccgcatcgtggagaagtatatatgaaccacactaatagcaaaccaagcaccatattggcttcaaacttacaatgtttagagccatttgaagtaaagacatgaaaaaaaggataggttgctccagacacataatagttgtcaccttacatagtaataaggtacatgtccagtgccaatgactacttaagaaaataaactgaacatctatctaacatatactagcttcgctactgagcgcctgcagtagccagtcgcctgacatgagcgcttcattatctctggaatattattccgaagccctatgtacaagcaccagtcgctaggcctcaaactcagaagaagccaccaccaggcatgggcatgtcatcaaagctccaaaggtccatgttgccacccacatcctgggatccatcacagtccaaaattgggttgactggctcatctggactgtccatcaggaaattcatatatggctcaaactcagggagatcaacactagcatcccctgtcacaggaggcaccacagctttggaggtgccctggaggaatgcggactcatcaacctctgtcaaagtgggaacaggtgcaagagctgatgttatgtcagtggtcctggtgtcattctccaggctgaagtctgagaaactgaaggagttgctaccttggtcagaggacaggttcgccaaaggttcctgaatggaggcagcagtattcaccataggagcaaatgacatgttctgagtctgcatgattggctcaggtatggtgtggtttgcattcgcattggtcatgttgttgataaccagattctcctcagtgcccatattggccactttcacagatgtaggctcagcaaggcgcttctgagaagccactggagcctcatctgggaagttgaccttggccttcttaccacgaatcctgcgtgcctcaacatcataagctctggcagcttcttcaggagagttgtaagtaccgagccacacacgagcacctttataaggatctctgaattcagcagcccatttaccccaagggcgacggcggatacccctgaattggttctttctcttcatcacatcagggacatcagtacgagctgcagttgtgtttaatccatctctggcgaccatgccacttggggcagtgaagtgcttggcctcatccttggacacgaccaccgatttctcggactccatgaaggcagtgatgtcctcctcctcgcgggccctcttccgatttcctactcctgtgcccctcgacttcttgctatcccgc

SEQ ID NO: 7695 - DNA, 264 bp, Setaria italica
  Peptide Sequence Number=SeqID_73669
gccgactctgcccttgccgatccggtcgagcgcgagggaggctaggttgacctcggcggcggggcggtcgaagtcgacgaccttcatggcggtgatgagctcgagcagcacgacgccgaagctgtacacgtcgctcttgtcggagaggtggaagcactggtggtactccgggtcgacgtaccccggcgtgccctgcggcgcggtggagacgtgcgagcgcgtcgcctcgccgaggcggccggcggcgcgggacaggccgaagtc

SEQ ID NO: 7696 - DNA, 558 bp, Setaria italica
  Peptide Sequence Number=SeqID_73670
actaccgtaccgctctccgtccggctcctgccggcgccccacgacctgtccgtgccgcgcgtcgacgccgcggacgacgagcagatcgacgacgacgtcgacatgaacgcggcgtcgtccgccgacggcgcccacccgctgcgctgcacctggtccagctcgtcggcgacctcggccatggacggcctcatctcgctgtggaacgcgaggcaccggaacgccagctcggccaccttgtggatggaggagagcgtccacgcgtcccggtgcgggtccaggtacgggtcgacgatgtcgtcgacgcggcccctgccgatcctgtccacggcgagctgcgccaggttcacctcgctgggcggccggttcaggtcgacggctttcatggcggtgatgatctccacgagcacgacgccgaagctgtacacgtcgctgcggtcggagaggtggaagttctggtggtactgcgggtcgacgtaccccggcgtgccctgcggcgccgttggagatgttgtcgtaggtagttccccccttagggttacgttccttttgttcccttta

SEQ ID NO: 7697 - DNA, 1003 bp, Setaria italica
  Peptide Sequence Number=SeqID_73671
actccatcacccactcctcgccgccgccgaggatcgccgggtccacgatctcgccgactctgcccttgccgatccggtcgagcgcgagggaggctaggttgacctcggcggcggggcggtcgaagtcgacgaccttcatggcggtgatgagctcgagcagcacgacgccgaagctgtacacgtcgctcttgtcggagaggtggaagttctggtggtactgcgggtcgacgtaccccggcgtgccctgcggcgccgtggagatgtgcgaggagtcccccagggacgccttgcccagccgcgacagcccgaagtcggcgaccttggagttgtactcgtggtccagcaggatgttgctggacttgacgtcgcggtggtagatgggcgggtccacctccgagtgcaggtacgcgatggccttggccgtctcggcggcgatgcggaggcggaccgtccagggcatcgcggcggggccgcgctcccgctgcaggtgctgcgccagcgtgccgttgggcatgaactcgtacaccaggatctggtgcccctgctcgatgcagcagccgaggaggcggacaaggttggggtggcacacgcacgacaccagcttcacctcgtgcatcacgcagccgagcccggcgtcgttgtcgcgctgccggatccgcttcacggccacgagggggccgtcgccgaggcgcccggagtacacggtgccgtaggcgcccgtgcccaggcgcttggcgtcggagaagccgtcggtggcgcggtcgatctcgcggtacgagtagaaaggcaccgcgcaggaggcctcggacaggagccgcttcgtgctgcgcttcgtccggatggacgcggaccggcgcttcagcagctggtacaccacgcaggtcacgcaggtcaccatggctccaaacacgattcctgccacaagaagggcgatttgggccgtctttccacagtcttctgctaggtattttgaaggattgcacctggcgtctgagacacgcaa

SEQ ID NO: 7698 - DNA, 771 bp, Setaria italica
  Peptide Sequence Number=SeqID_73672
ttttttgtttaccagacagtgcagcgcaatcgattccacaacggcagatccgggcgaaaggtttattgtgaccaagggttgcaactttgcttctacaatagatatcatgcatgatttttttcccatatcatttttggaacagtcttgtaacaaactgaactacagctgacactactatttcatatacagcagatctcctataagcttcattagtgatgaatatgttagacaggacttccaccctgcaatatcactacagcagccagcaggtgaacagcaataacaaacagatgcagtcgtgtgcccccacatcccctgcccggtcgctacatagggaaaaaccttgccatatgtgggcctagaccactttggtagatatttcggatattaggctggaggctgctgctgctgcagaaccgtctcatttgaaagtaatggctcaattttgacaaggatcagcaggagataaactcaaagttttgtcagtatttctgcaccattcctagtgaccaatatggtatgctcaaactgagcagcccagctaccatcagcagtgacagtcgtccatccatcttcccatgtaacacattctgttttctccattgtaagtataggttcgatcgtaaatatttgaccctcaaccatccgccctgagttttcgttggcatgatgtaggataagtggctcagaatgatacatagttccaattccatgcccaacaaagcgttccaccacataatagccataaaaataagcaagcttgcttatttt

SEQ ID NO: 7699 - DNA, 314 bp, Setaria italica
  Peptide Sequence Number=SeqID_73673
ggaccagccgaggtggacaaacaagtagcatgcttatggcttcagagtttcgcgccaggggcgacctcaaaggtttgatggaaaattttctcatatccaccttctgcaatgactttggtgacctgggagatcctgcccatcgctgcatcagtaatgcttggtccagttttcaagtgctgccagaagttgccggtgatgttctctgtcttccgggcagcctcgccgaacctcttccccatcttccccagcacgtccttcaccgagtccatcgtattcttcggggcggtcgcggcgccgcccgggcggggggagga

SEQ ID NO: 7700 - DNA, 2466 bp, Setaria italica
  Peptide Sequence Number=SeqID_73674
ttaacactacagcatgctgacatcacccatcattacacaaattctaccttgcagtcatgttgagatcttaggcaacaacatgcttcattccacgcaaacttcactaaatgtttaaaacccagtacaaaggacaggaatgttttctacaagatgagagcgagagcaaactcaagctcaatctctacaaaattcagtcacatttttatctatcagatagtaacttgtaaacatcaagatgccaacgagtacatgatgaactgatgaataaagggtccagcgatggcatagcagaattgttcaccacatagaaagctaacagcagtcagcaatgtctcagtagagcctgccacagcaatcagaggcaccacagtagcaatgcttcaccttctccttgccattctcgtcaaggacttgacctaccgtataattatagtggtaggttagctcctgtagtggtgggatattctcaacagcaaaaagcacaacatgcggcatcctcatgtcatcatggtcccagagaacatgttgggcatagagatttggtgaacaactatggttgatgaatcttccaacattggcatactccgctgcatctattgtgaagccttccattgtcttggaggacgaggtagaagattgtacaccaaccaccgactttagccccacccaaagttcttcatcatggtagttactaccaatatcgaatagatactcgtcgttctgtgttttgtcagcttctttgtcttccaatagctcaccaacatactcacatatgaaactgcctgaagatatagaactgagggatcttacgccccaacctgtactaccagtcttgaatatttctagtggaattttgacaccatgctgactcaccctattgtggcatgttggcgggcacctgcacgatgggccacactcgtatatgagaggcctggcctcgatgattgcaccatcggaattgaacgggatttcccctccattcttcactgcacaagcacatttaatagagtccgtgcagccgtttgtgcagtcacaacccttgggaggttctttttcataccagcttggatatatgactttagtggtgtatttaaatggtgctggccttgtgtcatcaattgtgttgatgacacttatgggcatcctctcgcttccttgggatatatcaggcaaacaaagaccttcacgaactttggacttccttgtcgccttgactgcatgtagggctaattctggttgcccagcaatcctatgtaacttgtacttgaagaccatctcgcctttcagaccttcttgccagcattccatcacctcgtacaacccatcataaataaatgtcgaagttttcttgcctttagaatgaccaatttcacttctgttttgacctttgaatccatgaatcactctaactggggtcttggtgtcaatgcaattcttcaaggcaagattaccacgctcaagcttttgatcatctccttgtttattgccgccagccttccctccggagccagtgtatattagttcatctgagcttgacaattcgtcaggatagcctccggaggcaacaatacttatagcaacaggaacaccattcaccgtagaagtgtcaatgcctccttgatgcgggcgatggagaccaacaatcgacaactcaactctaaaatgaaattcatctccaactttaacaccaggaatgcttcccaccatggccccaggcttgttatagatagggtctctctttaaagccttaaatgcttcagtgtcaacccttccgatattgcgattaccttgttccacaagtcgtgtaatctttcggcatgccacctggaataattggagcaactttctaacttttctttgagcatctacatcatggtccccaagttgcctttggtgtgacccggaaggaacagacggaggaaccgtgacacatatttcttgcttttctccacacataaccaacaccttggagttgccatcatcttccgggttagaatcgtcattgtcctccattgtctcatcattgatcaataatcttcttggagtgacatccattccattaagtttgttccttggggcaagaggcttggaagcactagctctagatttccttcctcgtgtccaaggacatttgtcaggagccatcaatgctagtacaattagttggtcgggaacaagtttcatatcatcactttctctcatttgattggttgcaacatgttttccaaacttgctcggcttatgagcagatttattttgctttacgttcatatttgagcatgccaattcttttttagtgctcaaagttttactttgcatcttcccccctgcattaccaagcaacgtcgcattcatcttgccactctccaacctctttccttttgtctttgcatcaatgggatcgctcaaaggtgtcttatgagtacttctatgcaagcttccttctaattttatttttcatcttat

SEQ ID NO: 7701 - DNA, 233 bp, Setaria italica
  Peptide Sequence Number=SeqID_73675
taaagttcagatataaacatactttgtaggaaaagattcagcaggttaaagacagctgacgatggctctgggcctctggcaatgagctccatgatcttcatgggagctcaggctgtaaactgacataatccagctcactcatccactctttgtatacaggtgagagataaagtcactaaattaggttcctcattgcaaataacaaatgtactggcaaagacacctatgctgat

SEQ ID NO: 7702 - DNA, 417 bp, Setaria italica
  Peptide Sequence Number=SeqID_73676
tgtagaactgagcatgcaagaaccaatatacagatcctgaatctacaatctagccaatgattggcatacaacttcatcatctgagagcttgttgttatgtcttccatagtgcaaacagaagtcaagcatactctgatgcaatattggagtatgtcctgtggccacatcatcgcttactgctccatgttccactgcacccgtagccacacctgatggatatgagatggtgaaagttcaatgtcatgtcactaaattaggttcctcattgcaaataacaaatgtactggcaaagacacctatgctgatgtactcatgatctgcataaacgtctgttcgtctccccaacgtcaattttgtgcgacgtgcggtgaaccaggtgaaaaccccatgcggaggagaggacctagcttggagttg

SEQ ID NO: 7703 - DNA, 338 bp, Setaria italica
  misc_feature (325)..(325): n is a, c, g, or t
  Peptide Sequence Number=SeqID_73677
gcctgtggtccaattagcttgccatttcgtgctacaatcagctgagtagctagtaggtgtctgctggagcaattctggcccttaatgtagctggctgtgtattgattgatcccaatatagtctgctgagcccttgaccaatttagcttgctcaggagtaaaccttggcagcctctctttcacaagatcttgcattatctgtgggtaatgtccatttatcaatggatcaacaaaccaaccaatatggaagtccctagctctttgagccgctgcttggtcgtcagttgagtttgtaagagcttcgtaccagttgaagtccaggactnttccaatcttacc

SEQ ID NO: 7704 - DNA, 280 bp, Setaria italica
  Peptide Sequence Number=SeqID_73678
acaatctagccaatgattggcatacaacttcatcatctgagagcttgttgttatgtcttccatagtgcaaacagaagtcaagcatactctgatgcaatattggagtatgtcctgtggccacatcatcgcttactgctccatgttccactgcacccgtagccacacctctcgtgctttgtccagtacggattcgatgttgctgttcttggtcttgcacaagatgatgcgtcactagcatcaatcatgcgctggctgtcgctagatctgtgttgcccgcatc

SEQ ID NO: 7705 - DNA, 248 bp, Setaria italica
  Peptide Sequence Number=SeqID_73679
tcacttacttttcagctttgccagaaatttcacaaatttacaacaataaagagcatgcagctctgaggaaaggatgagagcttacagttgctaggatccaggaagccaatggccacaagagctccaggtcccacatgagccaagaacttcctccattttggctgttaccaccaacaaaaaatagctgggaagatcctggaccatgagattgaaaatcagtaggcatcaaaattcaaacttttcatgag

SEQ ID NO: 7706 - DNA, 261 bp, Setaria italica
  Peptide Sequence Number=SeqID_73680
tcctgcattgtctttggatattgtccatttattaatggatccataaacctgaattgtgaccgtttgatttggttaatattgttaactgtgttaaataaaatattgaagtttgtcacatatttgccattaagatcttaccaaccaacatggaagtccctggccctttgtgctgctgcttgatctgctgttgagttggtaagaggttcataccagttgaagtctagaactatcccaaccttgcctttctgagttgcctggtat

SEQ ID NO: 7707 - DNA, 187 bp, Setaria italica
  Peptide Sequence Number=SeqID_73681
atcacaaattcacaatacaagctccggcaccgacccatgatgcagaatctcaaggagcaactcaaatcgactatgtagatatggttctgactttctgacgaatcgaattgtccactgaaccacacacgtgtatgcagaacaatgaaagatcgagctgtgacatcgagggaaagggggaaggggactg

SEQ ID NO: 7708 - DNA, 234 bp, Setaria italica
  Peptide Sequence Number=SeqID_73682
gccgggggacaggcctgctctacacgagcagaagtcggggcagcatagctcgtcgatggagcaggcggcgaatgcgaggtcggcaccgaagccaatagcccgcgcatgacggtgctcctccgatgcaagatgcagagccggcgctggatccgccggttgagctcgcgcaatcaagcggacgggcggcagaagggcaacgatgatcgacggagcttcgcaggtgggtgagacacg

SEQ ID NO: 7709 - DNA, 550 bp, Setaria italica
  Peptide Sequence Number=SeqID_73683
attttaaattgacttacgccatctttgagcttaaccaccctccatatttctgctcgagtgcaagaggtagatcgtagtggtaaaggttgatgtaaggagtcatgcctttctgaagcaggtagtttatcagattgttgtaatacgctacaccttctgggttgactcttccctcgccatctgggaagatcctggaccatgagattgaaaatcggtaggcatcaaaattcaaacttttcatgagatcaacatcttccttgtagcgatggtattgatccactgcgacatctccattttgatttcccgcaacttttcctggtcattgcaacaaaaaggaatagagaaacttattaggcagaaattccaaagattgagcaggtgccaatgtaccaatcctgaatctgaggctcaagtttagatggactgtttgaaagtagtttaagctgaacagctgaccacagttagtgaggaccaggatgcatagatctcgatgaacgcttggagtaccaatcaacatcagattagtcgttgtccaacattccggattcggttc

SEQ ID NO: 7710 - DNA, 355 bp, Setaria italica
  Peptide Sequence Number=SeqID_73684
aagactagaaggacaagaaaacaaaaaaggggactgaattttaactgaaaacatggaaatacttcaaagaaataaggttttctgctaacacggtaatacaaaagttaaagcatttaaaagagaaacctctatgcaacagcatccaagaattcagtccatttcactagtctgatggagtggcaaaggtgaccatttcactagtctgatcttcactaatttgttgaccttcattgtctgcatctttttccttgaataccagtctttcccacacacaagggcttctaacatctctggagttagtgagcttcttgactccccaagaatcctacctccaagactaaaggctgattcggaa

SEQ ID NO: 7711 - DNA, 642 bp, Setaria italica
  Peptide Sequence Number=SeqID_73685
agacccgacaatacaattaaaggaatccctgccagcaaggctgtcaggcagcttgcccaccgagcaagccatcggctgcgccatgtagcagttgctgcgcagccgaaacaagcaaatcgactgcttgaagcatcaatgttagcacaaaatggaatcagcactgggatgaagaagtagggtctgggacggcgggcccgaagtctgcagtatctctccggtccaggtctctcttccgcatttgtcatcctggccgcgcctttgtacacccttgaagctcattgctctcggcctcttacctagcccctaaggcttcaatctcaccactgcctccaatggaaagccacccgataagaacgtcgtagcagggagctgccggaccagtccttgccggatccgtgcgagatccagacttcgggcctgcgtgagcgagctccgcagtggacctgcgggacctccagcctgacaaccttggggcggagggcctgtggaggacgacgaatcggcgcggactggctcgaatcggcgaaggcaggctccaatcggccggcggcacttgggctcgggagatggaatgggcggcagcgctcgaggcctcgagcttccttctccagccacgcctgcgaatcggccggggataggcat

SEQ ID NO: 7712 - DNA, 714 bp, Setaria italica
  Peptide Sequence Number=SeqID_73686
ttatatattataattactaatgcactaaatctgaaggacatatggttgttcacaaaacaaatgattgctcactaaacgtctgtttgtctccccaacgtcagttttgtgcgacgtgcggtgaaccaggtgaaaaccccatgcggaggagaggacctagcttggagtggttcttgaaggagtttgcagaacatatctctcgtgctttgtccagtacggattcgatgttgctgttcttggtcttgcacaagatgatgcgtcactagcatcaatcatgcgctggctgtcgctagatctgtgttgcccgcatcattaaggatccctgccagcaaggctgtcaggcagcttgcccaccgagcaagccatcggctgcgccatgtagcagttgctgcgcagcagaaacaagcaaatcgactgcttgaagcatcaatgttagcacaaaatggaatcagcactgggatgaagaagtagggtctgggacggcgggcccgaagtctgcagtatctctccggtccaggtctctcttccgcatttgtcatcctggccgcgcctttgtacacccttgaagctcattgctctcggcctcttacctagcccctaaggcttcaatcactgcctccaatggaaagccacccgataagaacgtcgtagcagggagctgccggaccagtccttgccggatccgtgcgagatccagacttcgggcctgcgtgagcg

SEQ ID NO: 7713 - DNA, 474 bp, Setaria italica
  Peptide Sequence Number=SeqID_73687
cgcttgtgcttggttgctccctggctggagagacgagacgacgacccaactgccgaccagaccctggttgttgccatcgtccaaccctgatgcttatctcctcacaggagctcggcgagttgcgttatcttttgttggccaccagtttctggttcttctggcctttgcttgttcatgtcattctcactttgctcctgcacagttgctaggatccaggaagccaatggccacaagagctccaggtcccacatgagccaagaacttcctccattttggctgttaccaccaacaaaaaatagctgggaagatcctggaccatgagattgaaaatcagtaggcatcaaaattcaaacttttcatgagatcaacatcttccttgtagcgatggtattgatccactgcgacatctccattttgatttcccgcaacttttcctgggatgtgcgcgaatgcgtcccagatggagggcccccc

SEQ ID NO: 7714 - DNA, 818 bp, Setaria italica
  Peptide Sequence Number=SeqID_73688
caacgaatggcaacagcatccatgaaccgaagattcacttgcaagataaaaaacaacaaaacaaacaaacaaggcaaggcaagagttggtctggtttcttctacactaatatagaacaattataattcctacattactgggagatttcattggaggattgcaattggactagcgagagtgtattcatgtctaagaaaacatataggttgtattataacactagcagcatcgtagaacatctggtttcatcaattagttcagacttagaaaaatagaaactcaaaccaaatattctgtccagctcaattgacatttacaggttacagaaacaagaatccaataatctggatcacaaattcacaatacaagctccggcaccgacccatgatgcagaatctcagggagcaactcaaatcgactatatagagtatggttctgacttctgaccaatcgaattctccattgaaccacacacgtgtatgcagaacaatgaaagatcgagctgtgacatagaggaaaggggaaggggactgaggagttcaacgacctcaccactgcctccaatgaaaagccacccgataagaaggctgtagcagggagctgccggaccagccctcgtcggatccgcgcgagatccagccatggacctgcatgagcgagctccgcggtggacctgcgggacctccagcctgacgaccttgggacggagggactgtgggcagcagcgacaccggcgtcaagctcggggcagagatgggcttgagcgggggtgtagctcacacagcggcagccgcgatcgagcgggggaggagaggacc

SEQ ID NO: 7715 - DNA, 617 bp, Setaria italica
  Peptide Sequence Number=SeqID_73689
ctcaccccaaatcaaacttccaccttcacacaccataccaccccaaacttttcagtgcataagttatacaaactgcttgccaaatatggttacaacccaataagaacccattagatagctactagtagtcaaacaagttgcaaagacctatgttacacatatatatatatatatatatataggttgttcacgcttgtgcttggttgctccctggctggagagacgagacgacgacccaactgccgaccagaccctggttgttgccatcgtccaaccctgatgcttatctcctcacaggagctcggcgagttgcgttatcttttgttggccaccagtttctggttcttctggcctttgcttgtccatgtcattctcactttgctcagttgctaggatccaggaagccaatggccacaagagctccaggtcccacatgagccaagaacttcctccattttggctgttaccaccaacaaaaaatagctctatgcaacagcatccaagaattcagtccatttcactagtctgatggagtggcaaaggtgaccatttcactagtctgatcttcactaatttgttgaccttcattgtctgcatctttttccttgaataaccag

SEQ ID NO: 7716 - DNA, 640 bp, Setaria italica
  Peptide Sequence Number=SeqID_73690
accttcacacaccataccaccccaaacttttcagtgcataagttatacaaactgcttgccaaatatggttacaacccaataagaacccattagatagctactagtagtcaaacaagttgcaaagacctatgttacatatatatatatatataggttgttcacgcttgtgcttggttgctccctggctggagagacgagacgacgacccaactgccgaccagaccctggttgttgccatcgtccaaccctgatgcttatctcctcacaggagctcggcgagttgcgttatcttttgttggccaccagtttctggttcttctggcctttgcttgtccatgtcattctcactttgctcctgcacagttgctaggatccaggaagccaatggccacaagagctccaggtcccacatgagccaagaacttcctccattttggctctatgcaacagcatccaagaattcagtccatttcactagtctgatggagtggcaaaggtgaccatttcactagtctgatcttcactaatttgttgaccttcattgtctgcatctttttccttgaataaccagtctttcccacacacaagggcttctaacatctctggagttagtgagcttcttgactccctaagaatccta

SEQ ID NO: 7717 - DNA, 842 bp, Setaria italica
  Peptide Sequence Number=SeqID_73691
catcagtaaggcatttattctggtaatggaatatatccagtgtgagctaatcaatggcgcaccaaccggtgataaatccgaatgtcattgacctgaaaagaaaatgacgagtgtcaaagattgtacaatgatgctaactgctaagactgaaaatgcaaaagatagttacttcaatccagaaattcctttaacagtatatacaactgaaaatgcaattactaaaaggcattctttaattcaggtacgcaacttcactcttcacaaataaaactcatcaatccgtttaaaaaatgaacatggtaatacttcaaagaaataaggttttctgtgattctcaactggtttgatatatactctagctgtagtacaaaaaggaaaaatacaaaagttaaagcatttaaaagagaaacctctatgcaacagcatccaagaaccaagagtcagttgacagataaaaaaatatgcaaactaggcaaggcaagaagaactctgatagaacaggtaatttctactattttttatgaaacaatttctacattactaggagacttaatcggagcgttgcaattggactaactaatatgtatacgggtctacgaaagcacaagtgcacatctagactgtatcacttgcaacatcacagaacatctagttttggtcaattacttgagacacagaaaaatagagttccaatccaaatacttggtccagctcaattgacacttgcaaggtctacaaaaccccataatcttgatcacaatacaagcgtgagcaacaacccatggtgcagattctcaagagagtaacacaaatagacaattttgagcattggttcgcgcgca

SEQ ID NO: 7718 - DNA, 1398 bp, Setaria italica
  Peptide Sequence Number=SeqID_73692
cagaactaagaacaggaaatccactaggtgttatctttctatgcttgttgacacctataattaacatcatgtggcagtgccagcagaaagttcagaataatttaatgtgctgatatgttaggctgtgtcagttaaaagtgaaagcaatctataaagcagagaaagatcaagaagctaaattgtgacacgctccatatgtatttctttagtcgaggccttttagctttgcatctaaatggactgaacctgctgtatgtgcatggagcggatgaatgagctggattatgtcagtttacagtctaagcttccatgaagatcatggagctcattgccagaggtccagagccaatcaaccatcccgtgtgcaggtaaccagcatgcatattacaatctgcaaaagagcttaagcattattagtatatgcaggttaaagacagctgatgatggctctggacctctggcaatgagctccatgatcttcatggaagcttagactgtaaactgacataatccagctcattcatccgctccatgcacatacagcaggttcagtccatttagatgcaaagctaaaaggcctcgactaaagaaatacatatggagcgtgtcacaattagcttcttgatcttctctgctttatagattgctttcacttttaactgacacagcctaacatatcagcacattaaattattctgaactttctgctggcactgccacatgatgttaattataggtgtcaacaagcatagaaagataacacctagtgggatttcctgttcttagttctgaaagcatctttcagtcatccattttcaggacctacagagctgcacccaggtaatttgactagtcctttttcctgcatccatctttggatagctagagatttttcccacatcccatatgaggtatacaagtttgatatcagcccatacaaatctggtctttcaggatgaagcaccatcattctcttgaaagcttcttctccaaactgtaaccttgaatggagcccacatccatggagaaaagctccccaaacactaacatctgcttgcattggcatctatggaatgatttacccataactaggtcacccagacaaacagaagctgacagagcattcaccacagaggtggcatcaggtgaagcaccctgcagcctcatctgtttaaatagcatcagagcatcatcgtccatactattctcagcatagcctgcaatcatcgaattccacgtgacaacatccttgttcaaaattcttccaaatatcctgttggcctctaacactgcttgacactttgcatacatgtcaactaatgcacaaaggcaaattaagtcaaagttaaaagagatagaagaaaatatttcgattctagatacaatgcaagcatgttt

SEQ ID NO: 7719 - DNA, 1089 bp, Setaria italica
  Peptide Sequence Number=SeqID_73693
ggtaaaaaataatgacatttgtcattgcaaaacattgcaaactcaaacttcatgttgaccttgtcagaatgagttgaaatgagtacataccacactatcctgcaaattagaaagatcataacctctacacctagaatgtcgaatgtgtgcactcataattacaacaaaatcagaaattcaagtgcagggatacactcctcacacggcctatgcacgtaaatgactaggtacttcagcaccgtagtgacactatggtgcatcagtaaggcatttattctggtaatggaatatatccagtgtgagctaatcaatggcgcaccaaccggtgatacatccgaatgtcattgacctgtttgcaaaggtgtgatctgggagctgcaggcagatgaataaagttcagatataaacatactttgtaggaaaagattcagcaggttaaagacagctgacgatggctctgggcctctggcaatgagctccatgatcttcatgggagctcaggctgtaaactgacataatccagctcactcatccactctttgtatacaggtgagagataaacctctcgtgctttgtccagtacggattcgatgttgctgttcttggtcttgcacaagatgatgcatcactagcatcaatcatgcgctggctgtcactagatctgtgttgcccgcatcattaaggatccctgccagcaaggctgtcaggcagcttgcccaccgagcaagccatcggctgcgccatgtagcagttgctgtgcagcagaaacaagcaaatcgactgcttgaagcatcaatgtaagcacaaaatggaatcagcactgggatgaagaagtagggtctgggacggcgggctcgaagtctgcagtatctctccgatccaggtctctcttccgcatttgtcatcctggccgcgcctttgtacacccttggagctcattgctctcggcctcttacctagcccctaaggcttcaatctcacccactgccctcccaaatgaaaaacccctaaaacccctaaaacccctaaaacccctaaaacccctaaaacccctaaaacccctaaaacccctaaaacccctaaaacccc

SEQ ID NO: 7720 - DNA, 933 bp, Setaria italica
  misc_feature (542)..(542): n is a, c, g, or t
  Peptide Sequence Number=SeqID_73694
catataattactctatatgatactctaggtgtttgcaagataagatttttgcatccaagaaccaagagtcagttgacagataaaaaaatatgcaaactaggcaaggcaagaagaactctgatagaacaggtaatttctacattttttatgaaacaatttctacattactaggagacttaatcggagcgttgcaattggactaactaatatgtatacgggtctacgaaagcacaagtgcacatctagactgtatcacttgcaacatcacagaacatctagttttggtcaattacttgagacacagaaaaatagagttccaatccaaatacttggtccagctcaattgacacttgcaaggtctacaaaaaccccataatcttgatcacaatacaagcgtgagcaacaacccatggtgcagattctcaagagagtaacacaaatagacaattttgagcatggttcgcgcgcacatatatatgtatatatatgcattcctcaggttgagcagtgacatagaggaacaggggaaggggaattgatcnctccactgtctccaatgaacataagaacttaccaatttattcaatgtagcatctagttttctagtcacaaataatgacgtttgtgaatgcaaaaatcttatcttgcaaacacctagagtatcatatagagtaattatatgtatatttacagccctttgccataatgcagatgaagggcaagcttgtctgttcttacctgtttgcaaaggtgtgatctgggagctgcaggcagatgaataaagttcagatataaacatactttgtaggaaaagattcagcaggttaaagacagctgacgatggctctgggcctctggcaatgagctccatgatcttcatgggagctcaggctgtaaactgacataatccagctcactcatccactctttgta

SEQ ID NO: 7721 - DNA, 1174 bp, Setaria italica
  Peptide Sequence Number=SeqID_73695
gatgatcatctcgacggtattgaagtatttcgtcaggcagcgtgacaatcttgttctgcttatgaaaagtgaggtagtacaatgtctcagcatgcagctctttggatcgatccttctagttgagcagtcacatagtcatgcctgccgaagatgctttgaccctctctccaatctgcacacacagggaaattagtaatgaataatagagtaatcatgtgcacgtcactaaattaggttcctcattgcaaataacaaatgtactggcaaagacacctatgctgatgtactcatgatctgcactgagaattgaaaaaaatattacaaatttttcagactacacagtacacacaagtgccagagataactgagaacaaagaaatcaagtattgaatgcaaatggcaatcaaactgacatttcgaaaaaaacaaataacattgctcacaaaacaaataattgtttatatattataattactaatgcactaaatctgaaggacatatggttgttcacaaaacaaatgattgctcactaaacgtctgttcgtctccccaacgtcagttttgtgcgacgtgcggtgaaccaggtgaaaacccatgcgaaggagaggacctagcttggagtggttcttgaaggagtttgcagaacatatcttcactcacatgagagtttaggagtaggaatcaattaatcactcagatgataagagaagaaaaattagaataccaaaatcagaataggaaatctatgcatcactggctagagtggttcctatcagcattcttaagagaaataatagatctaactggaaaaattataaatccaattcaaaattgattacacgctaagcccaacatatccagacacaaatcatgatatcctattcattagaaagatgatagctgtgttgaggagcctggtcgcaattcccattaccagaaattatcaaacataagaacaattgtaaagttcaacaagcctaaagagctcaaattatggaatatgaaaaataagaatagggatatgaaaaataagaacctctcgtgctttgtccagtacggattcgatgttgctgttcttggtcttgcacaagatgatgcgtcactagcatcaatcatgtgctggctgtcgctagatctgtgttgcccgcatcattaaggatccctgccagcaagg

SEQ ID NO: 7722 - DNA, 1731 bp, Setaria italica
  Peptide Sequence Number=SeqID_73696
actcaaaaaaaatctctgtagaactgagcatgcaagaaccaatatacagatcctgaatctacaatctagccaatgattggcatacaacttcatcatctgagagcttgttgttatgtcttccatagtgcaaacagaagtcaagcatactctgatgcaatattggagctgcaggcagataacggtagttcagaataaagcatacttgctagctaaagatactataggttcagcagagtcacacgcccaataggaacatactatgtcctgtggccacatcatcgcttactgctccatgttccactgcacccgtagccacacctgatggatatgagatggtgaaagttcaatgtcatctgcaggtgaatatggatttgtttcagaaacacgtcatggcttatattcaaagcaggcaaaaacattcaggcagccaaaaaacatatgtttgctgaatccaagttcctttcggtacatgtcagccacaatactttttttaagtacactgcaatgttcaatttcagtatatgattgaaactataaagattaactgtaatagtcagcttctgaaagtggagtacaatgatgatgagattaagattatattcatgtgtttggattaaaaaaatcaggctaataccacatgtgcactatatttaaaatattgcatcgtaattttaagaaaaggctatcactagttgataaatggtagaaacagctagaaaaccatttatagctctattatatatatgtaaaaacttactatacagcagattgaacatattaagtaataattaagctatgatcagcacaaacagagtgcttcatttctgcatattctttcaccatatggcacatataatgatacaaagaatgaactctggagattcagttaaatatagtgacagtcctagctgaagaaatcctcttttaactagacaacacataagcaggaaattagtaatgaataatagagtaatcatgtgaaaaaagaactttgtgatgctcacgtcactaaattaggttcctcattgcaaataacaaatgtactggcaaagacacctatgctgatgtactcatgatctgcactgagaattgaaaaaaatattactaatttttcagactacacagtacacacaagtgccagagataactgagaacaaagaaatcaagtattgaatgcaaatggcaatcaaactgacatttcgaaaaaaacaaataacattgctcacaaaacaaataattgtttatatattataattactaatgcactaaatctgaaggacatatggttgttcacaaaacaaatgattgctcactaaacgtctgtttgtctccccaacgtcagttttgtgcgacgtgcggtgaaccaggtgaaaaccccatgcggaggagaggacctagcttggagtggttcttgaaggagtttgcagaacatatcttcactcacatgagagtttaggagtaggaatcaattaatcactcagatgataagagaaggaaaattagaataccaaaatcagaataggaaatctatgcatcactggctggttcctatcagcattcttaagagaaataatagatctaactggaaaaattataaagccaattcaaaattgattacacgctaagcccaacatatccagacacaaatcatgatatcctattcattagaaagatgatagctgtgttgaggagcctggtcgcaaaatcccaattaaccaagaaaattaatta

SEQ ID NO: 7723 - DNA, 1470 bp, Setaria italica
  Peptide Sequence Number=SeqID_73697
ttataatatatatgacgtattagtttacaagtgcactcgatcataacaagattagtgttcacttccagaacaccatctccattactagtgtaaagtctaccaaagcagcagttttcatcttatttcgcaacctgtgaactgaagagcctagtctaaaatctgaagccaacggatacgaattagtgaactgaactagaatgacctaagacaacatgttatctatctctttgtaaaactgaaaggtgcagtccttcgatcaacccgtcattgtatgattctcaaccggtttgatatatactctagctgcagtacaaaaaggaaaatacaaaagttaaagcatttaaaagagaaacctctatgcaacaacatccaagaaccaagagtcacttgatagataaaaaaaaatagcaaactaggcaaggcaagaagaaatctgatagaacaggtaatttctacatttttttatgaaacagtttctacattactaggagacttaatcggagcgttgcaattggactaactaatatgtatacggttctacgaaagcacaagtgcacatctagactgtatcacttgcaacatcacagaacatctagttttgatcaattacttgagacacagaaaaatagagttccaatccaaatacttggtccagctcaattgacacttgcaaggtctacaaaaaccccataatcttgatcacaatacaagcgtgggcaccaacccatggtgcagattctcaagagagtaacacaaatagacaattttgagcatggttcgcgcgcgcgcatatatatgtatatatatgcattcctcaggttgagcagtgacatacaggaacaggggaaggggaatcgatctctccactgtctctgatgaacatgagaacttaccaatttattcaatgtagcatctagttttctagtcacgaataatgacgtttgtgaatgcaaaaatcttatcttgcaaacacccagagtatcatatagagtaattatatgtatatttagagcctttgccataatgcagatgaagggcaagcttgtttgttcttacctgtttgcaaaggtgtgatctgggagctgcaggcagatgaataaagttcagatataaacatactttgtaggaaaagattcagcaggttaaagacagctgacgatggctctgggcctctggcaatgagctccatgatcttcatgggagctcaggctgtaaactgacataatccagctcactcatccactctttgtatacaggtgagagataaactgagaggagaggaagcaagtgaaattagtaatgaataatagagtaatcatgtgaaaaaagaacttcgtgatgctcacgtcactaaattaggttcctcattgcaaataacaaatgtactggcaagacacctatgctgatgtactcatgatctgcactgagaattagaaaaaatattactaatttttcagactacacagtaca

SEQ ID NO: 7724 - DNA, 949 bp, Setaria italica
  Peptide Sequence Number=SeqID_73698
tccctggctggagagacgagacgacgacccaactgccgaccagaccctggttgttgccatcgtccaaccctgatgcttatctcctcacaggagctcggcgagttgcgttatcttttgttggccaccagtttctggttcttctggcctttgcttgtccatgtcattctcactttgctcctgcacctgccaaatgccaatgcacatgtctcatacctgcttcaagtgatccacaagtcgctggacatgaaaacatgggtgcaaatagtctttcaaaaaaaaaacatgggtgcaaataatctttcaaaaaaaaacatgggtgcaaagaaagccacaggtagaccgtcatgtctatctgtgcagctgcttatgtggctcgcatgcacaatcatgagctttgcagatgtgcggctccatgaaaatattatcaacatgcccctaggaccagaattaattgaacagatatacatcgatgctgtccaagtatgagacagcgacaccaggtaatttgagatatatatactgataggcaagaatttgagaaaaaagaagcgaaaacagcacatcaactagattacaggcttacagctagatttgcactgtcataagtaggataacaggaaaaaaaatagcaaatgatgcagtatatcaactacatccccaaggctagtacattccaaaggcactagcattcttgcaatatgagcagatacatcaaaaataacttgtttgctactctgctccatgttggtcagttaaggtctgaggaaaggatgagagcttacagttgctaggatccaggaagccaatggccacaagagctccaggtctcacatgagccaagaacttcctccattttggctgttaccaccaacaaaaaatagctctatgcaacagcatccaagaattcagtccatttcactagtctgatggagtggcaaaggtgaccatt

SEQ ID NO: 7725 - DNA, 1696 bp, Setaria italica
  Peptide Sequence Number=SeqID_73699
ccagaggacttcgtgcaaaccatccaactgaactattttgacctttggtaaacaaattggttataattggcaggcctcccgtcggcagctttgaagtattttgagggatcagcatcactatatctgggtgctaaaaatgtcatactgctgacttgtttaccttttattgattgacggtttgttctcatgccttattttcgcacttgcatcaaagaagtttgagcttgtcccttcgtcggcgtgcttgtctttggagtattctttattgaaactgaagttagttgtgtttggtctcaatattggttggtgccaagagttctccagggtatgcgagaggcctttggaaactgatccatttgctctacccatatagatgccagcatttgactcgttcaggtcagtaacttgctggcttccatgattatttttagtccgcaaacctgaggttgaactattatcactgaacctccccaaggcttctgcgctaactaatgtaaggtcagcatcgttccggggttttgtatctgatgccagaccaagaaaatctatgggcttgttgtctgatgtgttgtcatcatctatataatgatcagctggaagctgaaggtcaaaagtgccttgtctgcttcttggagcagcatcacttgacagaaacccgtttggagaggactgtacactgccttctctaaggaatttcatggaggactggtttgtatcattatgctctgcaacaggagtttttctgtatgttgtggacacaggaggaactggcatctgccacatcatctttgcaccatttggtggcacttgcgatggtgaatttgtatgtgatgcaactgccagcattggatatgaatatatctctttgctttgatgctgtttcatcatatctctctgtattttgtagacccggtgcagctcatacacctgttgtctaaatacagcttcatgttcaagcatttggtgcttgagcatttctttgtcaaattctgaataaccatttgttggttttgttgtgaagccattgcataactggccattcgatgccctgtcctcatagtatggagaccacctaccatttggctccatgttgagatcccccgtagcataatatccaggcatatagctttccccttctacttttgctcccattcttgttacaaactcaagttaagaagcctgcatttatcatgctctgatgcccattaccatcccggaatgtagccaagtggattctgtgaccttcacagcgcagcacaccaaacggatgttcaagagctaacgcaaaatgcgtaagcgcaatgcgtctcttcactgtgtcgagctaaatggatagctcgatctgctcagctgaatgagtagccaatagtaacttcctaagcttaatgtgttcacgaggaattacctcaacggctcttggcgctgcgctgcagcggattgagcctgacgaccctgagtatgcggcggacgaacagcccagcgggcgccacaacgcccatggcccctagacgccagcagagccgcccccccaccttcgcaagcgcccacctctaagtcgccagccaaggcaggattcttgcgggaaaaaggagcaaattccacgggcaggaagcaatcgagctcgagacgccaaggaattgcggcggatccgggagtgggggtcggggaaggaattggatctgaatagggaccaagg

SEQ ID NO: 7726 - DNA, 1489 bp, Setaria italica
  Peptide Sequence Number=SeqID_73700
ttttttttttagtaagcatcaccgataattatgcatttgcatataggaacctggattcagcatcacgctcccagacacaagtaatacaattgtacaacaattatagcacctagtgatcattacaaggagttgaaaagagccagtatgtcttgtacatgcaattgctgcactagaatactagatagactttcctgagaaatgataaacattggaccatggatcacagagttctcactgttgcgaggtcagaattccacacaaaaaaatctctgtagaactgagcatgcaagaaccaatatacagatcctgaatctacaatctagccaatgattggcatacaacttcatcatctgagagcttgttgttatgtcttccatagtgcaaacagaagtcaagcatactctgatgcaatattggagtatgtcctgtggccacatcatcgcttactgctccatgttccactgcacccgtagccacacctgatggatatgagatggtgaaagttcaatgtcatctctcgtgctttgtccagtacggattcgatgttgctgttcttggtcttgcacaagatgatgcgtcactagcatcaatcatgcgctggctgtcgctagatctgtgttgcccgcatcattaaggatccctgccagcaaggctgtcaggcagcttgcccaccgagcaagccatcggctgcgccatgtagcagttgctgcgcagcagaaacaagcaaatcgactgcttgaagcatcaatgtaagcacaaaatggaatcagcactgggatgaagaagtagggtctgggacggcgggcccgaagtctgcagtatctctccggtccaggtctctcttccgcatttgtcatcttggccgcgcctttgtacacccttggagctcgttgctctcggcctcttacctagcccctaaggcttcaatctcaccactgcctccaatgaaaagccacccgataagaacgtcgtagcagggagctgccggaccagtccttgccggatccgtgcgagatccagccgtgggcctgcgtgagcgagctccgcagtggacctgcgggacctccagcctgacgaccttgggacggagggcctgtgggcagcagcgacaccggcgtcaagcttgggggcagagatgggcttgagcgggggtgtagctcacacagcggcagccgcgctcgagcgggggaggagaggaccgcctgtggaggacgacgaatcggcgcggactggctcgaatcggcgaaggacaggctcaaatcggccggcggcacttgggctcgggagatgaatgggcggcagcgctcgaggcctcgagctcccttctccagccacgctgcgaatcggccgggggataggcatgctctacacgagcagaggtcgggacggcgcagatcgtcgatggagcgagcggcggatgcgggggatgccgagcggcggcggcggcgagggatggcgactggcggtgacgcgaggatcagtaggtact

SEQ ID NO: 7727 - DNA, 1654 bp, Setaria italica
  Peptide Sequence Number=SeqID_73701
gttttttttttttttttttttacgttacaaaaaaggtgaaaccttgtgctacattactggtgtcacatttccattgcagtagcaagaggaaagcaatagtgataggaaagccaggtgcagcggcctcgtaggagaggcatacatgcttaaaacagaacaaaaaactacatcaagacatgtctcctcaaaagtgtactacatggtaacaaatgactccagccacacctatctcgcgagccaattctcgcataagctttgcgaaccgccaattgccccgacaagatacacaacatttcagaagactattcaagtagacatagaatgtgaaatctgtagaggtacaaatgaataaaaattgaaataggaaaaggttgtaatgaaacaaaaaaattgatagaaaaaagggtgatgatcatctcgacggtattgaagtatttcgtcaggcagcgtgacaatcttgttctgcttatgaaaagtgaggtagtacaatgtctcagcacgcagctctttggatcgatccttctagttgagcagtcacatagtcatgcctgccgaagatgctttgaccctctctccaatctctcgtgctttgtccagtacggattcgatgttgctgttcttggtcttgcacaagatgatgcgtcactagcatcaatcatgtgctggctgtcgctagatctgtgttgcccgcatcattaaggatccctgccagcaaggctgtcaggcagcttgcccaccgagcaagccatcggctgcgccatgtagcagttgctgcgcagccgaaacaagcaaatcgactgcttgaagcatcaatgttagcacaaaatggaatcagcactgggatgaagaagtagggtctgggacggcgggcccgaagtctgcagtatctctccggtccaggtctctcttccgcatttgtcatcctggccgcgcctttgtacacccttggagctcattgctctcggcctcttacctagcccctaaggcttcaatctcaccactgcctccaatggaaagccacccgataagaacgtcgtagcagggagctgccggaccagtccttgccggatccgtgcgagatccagacttcgggcctgcgtgagcgagctccgcagtggacctgcgggacctccagcctgacaaccttggggcggagggcctgtgggcagcagcgacaccggcgtcaagcttggggcagagatgggcttgagcgggggtgtagctcacacagcggcagccgcgctcgaggcgggggaggagaggaccacctgtggaggacgacgaatcggcgaaggactggctcgaatcggcgaaggacaggctccaatcggccggcggcacttgggctcgggagatggatgggcggcagcgctcgaggcctcgagcttccttctccagccacgctgcgaatcggtcggtggataggcctgctctacacgagcagaggtcggggtggcgcagatcgtcgatggagcgggcggcgaatgcgaggtcggcaccgaagccaatagcccgcgcatgacggcgctcctccgaggtgcctgcggtctgcctgccgcgcgcccttctgtcctccacccgagcgctttcctttgccctttctagcctgatgtgagcacaagcgcaggggatctgtttgtgtcaccatcgcaat

SEQ ID NO: 7728 - DNA, 1612 bp, Setaria italica
  Peptide Sequence Number=SeqID_73702
tttttttttttttttttgttacaacaattatagcacctagtgatcattacaaggagagaaaagagtcagtaggttttgtacatgcaattgctgcactagaatactggatagactttcctgaggaatgataaatattggaccatggatcacagagttctcactcttgcaaggccagaattccacacaaaaaaatctctgtagaactgagcatgcaggaaccaatgtacagatcctgaatctacaatctagccaatgattggcatacaacttcatcatctgagagcttgttgttatgtcttccatagtgcaaacagaagtcaagcatactctgatgcaatattggagtatgtcctgtggccacatcatcgcttactgctccatgttccactgcacccgtagccgcacctgatggatatgagatggtgaaagttcaaagtcatctctcgtgctttgtccagtacggattcgatgttgctgttcttggtcttgcacaagatgatgcgtcactagcatcaatcatgcgctggctgtcgctagatctgtgttgcccgcatcattaaggatccctgccagcaaggctgtcaagcagcttgcccaccgagcaagccatcggctgcgccatgtagcagttgctgcgcagcagaaacaagcaaatcgactgcttgaagcatcaatgtaagcacaaaatggaatcagcactgggatgaagaagtagggtctgggacggcggtcccgaagtctgcagtatctctctggtccaggtctctcttccacatttgtcatcctggccgcgcctttgtacaccctcggagctcattgctcttggcctcttacctcgaccctaaggcttcaatcactgcctccaatgaaaagccacccgataagaacgtcgtagcaaggagctgccggaccagtccttgccggatccgtgcgagatccagccgtgggcctgcgtgagcgagctccgcagtggacctgcgggacctccagcctgacgaccttgggacggagggcctgtggaggacgacgaatcggcgcggactggctcgaatcggcgaaggacaggctcaaatcggccgtcggcacttgggctcgggagatgaatgggcggcagcgctcgaggcctcgagctcccttctccagccacgctgcgaatcggccgggggataggcatgctctacacgagtagaggttggggcggcgcagatcgtcgatggagcgagcggcgaatgcgaggtcggcaccgaagccaatagcccgcgcatgacggtgctcctccgatgcaagatgcagagccggcgctggatccgccggtcgagctcgcgcaatcaagcaggtaggcggcagaagggcgacgatgaccgacggaggagcttcgcggcgcgtgagtgctacaagggcgccagcaaacaaatcgcgggattttgcggcggcgccgtcgatatggagcggaggatccacgggagaactgccaatttcattcgaacccacgatctcagctgtattacgaggcagttttttggaacatgcagcccaaaagataaataacggagcgcaaaactgcaactggcaagcggcgtggacgggggcaggctggttcgacggatggctc

SEQ ID NO: 7729 - DNA, 1051 bp, Setaria italica
  Peptide Sequence Number=SeqID_73703
tttttttttttttttgtatcaaacaaggacattcatcaagatatcactcgtgatcaagcattctttcaaatatgttgaatccacaagataaataaccacagctcgaactccacagaaaacatactcacaagtcacaacatttctgaccattacatggaacggaatgcacaatcaattggagtggctgttcgtcttcttttattcccattttgatagcctagcactgagctggattcgaaccattgggccatccaaaacactaggcaaagcagagaaaaatgttaacttcgcgcttcgcctctaggaacctcaattcttcttaagcatgtccctgaaccagtaggctgaagccttcgggtgccgttcgagcttgttgttgaaatcgacgtagacaatgccaaacttggaagagtatcctgatagccactcgaagttgtcaaggagagaccaggcgaagtagccagccacgtttgcgccctgatctatggcttttttcagctggtcgaggtagcttttgtagaaccgcacccttgtcacatcgcgcaggtactggtcgcgggtcaggtttccaggttgatccattcctgtgaacaagaaaaaaagttcgatatatggatcccttcacccttggtatgcaacatattcatgtgaaatgtggagtagagaagcataggattttattgagtaccatttctcggttatgtagacagttgggtttccgtacttctccttgagatagttcacacatccgtacattcccgacgggacgatgtaaagccaattagaattcgcctgtggtccaattagcttgccatttcgtgaaacatattgaacttgccaatcagctgagtagctagtaggtgtctgctggagcaatttctggcccttaatgtagctggctgtgtattgattgatcccaatatagtctgctgagcccttgaccaatttagcttgctcaggagtaaaccttggcagcctctctttcacaagatattgcattatctgtgggtaatgtccatttatcaatggatcaacaaaccaaccaaatatg

SEQ ID NO: 7730 - DNA, 2054 bp, Setaria italica
  Peptide Sequence Number=SeqID_73704
acgaaaacaagaacaaaatacttggaggtacaccaaaaaattaacttatccataaacatgatatcagtacaaagctggctctgaatcatagcaaaaccggggccaaaaaagccctgaaccatggtccctctgccttgcaacatgtctctaaaatgaacatgccgctggcgtctgctacaaataatcaagtactttgacactagaccaaatcatttctaagcggaggaaaccatgaagacggatggaacaagcaagcacaaggagaccagcagagaaaccaggagcgcagggccactcgaggcggccggagccgaaccagccggactgccagctgaactttgtgagccagtctgaggggtggcggcctttgagcctgcccctgagagcatgtccctgaaccagtaggccgagtccttggggtaccgcttgagcgtcgtgaagtcgacgtagacgatgccgaacttggacgtgtagcccgacagccactcgaagttgtcaaggagggaccaggcgaagtaggcgaccacgttggcgccctcgtcgatccctttcttcagctccgtgagatagttcttgtagaactcgaccctcacggtgtcatgcaggtactcatcgcgcgtgaggtttccagattgatccattccgttttcagatataatgatggttggattctggtacttttcctttaggtagttcacaactccatacatgcccgttgggacgatgtagagccagacggagtttgccagctgtccaataggtaggccatttctttcaaagttatattgaacgccccaatcagacgagtagcttggtgttgcttgctgaggagtttgttggtctgaaatatagtatgtagtatattgattgatcccgaaacaatctgatgagcccttcactagcttagcctgttcaggtgtgaaacttggtaaccgatctttcacaatgtcctgcattgtctttggatattgtccatttattaatggatccataaaccaaccaacatggaagtccctggccctttgtgctgctgcttgatctgctgttgagttggtaagaggttcataccagttgaagtctagaactatcccaaccttgcctttctgagttgcctggtatttattgcggtatcttgcaactgcagtagcatgagataagagaatgttatgaacaacaatgtaaggttctgttgctgagttgccaccggcagcacattgggtgcatcggttaggggggttaagccccttatcatagccaaggaatgatactatccttggctcatttaatgtgaaccagttcttgacccgatcgccaaaagtcttgaaacaaaaatcggcatagtcagcgaatatgtccacaatttttgggcctaaccagcctttgtacttcttctcaagcgcaagtggaagatcatagtggttaaggttggcgtaaggagtaagcccttgcttaagcatgtagtctataagattgttgtaatactgtacaccttcttcattaacttcccttcgccatctgggaagatccctggaccaggagattgaaaaccgatatgcatcaaaattcaggcttttcatgagatcaacatcttccttgtagcggtgatattcatcagttgtaacatccgcgttcgcgtctccagcaatctttccgggggtgtggacgaaggggtcccagatggagggcccccggccgttggtggacgccgcgccctcgacctggaacgccgacgtcgccgtcccgaagacaaaccccttggggaacgcgtctctgctcagcccgccggtgtccgcccccacggcacggacgcggaacccgcggccaccgagcggcaccagcgccagggccagcatcagcagctgcagccggcggcaatgcgatgccgccagcggaaccgcacaccccgcggcgcccatcccagcgagcgccaacgccaagcagccgccgcagctcagctcaagcgtctcgcctccgtctccgtctccttcccctcacgctcacaggcagtcactctcgtcggtggaagtcaagtgagtgagtgagtgagatagatg

SEQ ID NO: 7731 - DNA, 2487 bp, Setaria italica
  Peptide Sequence Number=SeqID_73705
tgccgaccagaccctggttgttgccatcgtccaaccctgatgcttatctcctcacaggagctcggcgagttgcgttatcttttgttggccaccagtttctggttcttctggcctttgcttgtccatgtcattctcactttgctcctgcacagttgctaggatccaggaagccaatggccacaagagctccaggtctcacatgagccaagaacttcctccattttggctgttaccaccaacaaaaaatagctctatgcaacagcatccaagaattcagtccatttcactagtctgatggagtggcaaaggtgaccatttcactagtctgatcttcactaatttgttgaccttcattgtctgcatctttttccttgaataaccagtctttcccacacacaagggcttctaacatctctggagttagtgagcttcttgactccccaagaatcctacctccaagactaaaggctgattcggaagaaacggtactaagaggaatggcgaggaaatcacgtgccataactgataagatcgggaacttctcagccatgtgccttccaccaagccaaaatgtcaaagttttcaatgtcttccacacaatcttcttcaaagtagatgtcaaattcagattttggtggacgagtctttcttcgacttgacttgaagtttgcaaattctgatcctagctgccttttcgcaagcaccggtgagcccacacaaatgctgccctcacttgaatatgtaacagagtatgcattaactctcctcaagcgttgctcatactccaggaagtattttttcatccaaactagagcagcatcaacacttgaatcaatctgatctatattgctacaaatcttctggtagaagaactctgcatattctgcttttcccctcggatctaacattgttgcaataacaattccaaggttgacatcataatcctttttatttctgcgaggaataggctcgtttgactcatcaaaatctctaccccaatacttttcaaacttgatcctcatggctgcagccaggtcttgtagtgtcacacttgtctgccaagaagggttatccaaggcatcccgaattgaaacaattaaaggcaagaacatgtatgaagttggtttcctatgagctgatattgcttttgtagcctcttcaaaagttttaagaaacttacagattgaatcagctgtgctccattcttgttcatttggaggaatttctgcatgttgatttgcatagctattcaggacggtcttgtacttgattgcttctgcaaccatcttgaaggtggaattccaacggttgggtatgtcaagagcaataccacgttttgttggaagaccattcaccactgcaatttcattaaaagcttgcattcttgagggcgaagagacaatgtgcttcaagagctcccgaatcttctttatcccctcatgaataattttcatcccatcttgaaccaaaatattcaggatatgcgcacaacatctcacatgcaaatgtgcaccctcaagcatcaactcatacttgtgagtatctaccaacaggtcacatgcagtgttgttgttactagcattgtccactgtgagagtaaacaatttgtttcgtatgccccactcagtcaagcagctaacaagtgcttcttcgatagcaaaccctgagtgtggatatttgacctctttgaaacttattatcttcttcttgatcttgaagtcaggagtgatatagtgagctgttacaaccatgtagcctaaattttggattgatgtccacaaatccgatgtcaagcacacatgggagtctaggctttcaagttcattctgaatatcttgcttcattctctggtacttctttagacaatcattgtgaacagtttgtcgtcccacaacacttagagttggctgcatggactgaacccatggttcgaagtatggatcctcaaacttgttaaatgggatttcagcatgtatgacaaactctatcatacgctcacgactaaactgagggtcaaacacaaagttctctatgggcttctttaaggttgctatgaatctgttcctctcggcttccccaattgcatgacaatattgagaaatgtgggttctaaggctactagttccagatttggtgcttaactgcattcgacaatacttgcaaacagctctaaaacaattatccacttccacaagattctgctcaaaatgttcccacaccttggacctttttgcacgtgtttgagttgaattagagtcatcagagctttccgatgtgctaagagacatgttgaagaatcccttggccaaggaatcgccgtcagcttccttgttgccggagggagcgggatctcgggatggggagggagggaggcgaggcggaggtggcggtggcggcggcgggatctcgggagggaggcgagggtggcggcgggatctcgggactgagtcagtgactcagtgagaccttccaaccgttggaggatgc

SEQ ID NO: 7732 - DNA, 1397 bp, Setaria italica
  Peptide Sequence Number=SeqID_73706
cgccctgatctatggctttttcagctggtcgaggtagctttgtagaaccgcacccttgtcacatcgcgcaggtactggtcgcgggtcaggtttccaggttgatccattccattctcggttatgtagacagttgggtttccgtacttctccttgagatagttcacacatccgtacattcccgacgggacgatgtaaagccaattagaattcgcctgtggtccaattagcttgccatttcgtgctaaaacatattgaacttgccaatcagctgagtagctagtaggtgtctgctggagcaatttctggcccttaatgtagctggctgtgtattgattgatcccaatatagtctgctgagcccttgaccaatttagcttgctcaggagtaaaccttggcagcctctctttcacaagatcttgcattatctgtgggtaatgtccatttatcaatggatcaacaaaccaaccaatatggaagtccctagctctttgagccgctgcttggtcgtcagttgagtttgtaagagcttcgtaccagttgaagtccaggactattccaatcttacccttctgagcagcctggtactttgtacggtatcttgcagctgcagcagcatgtgccaagagaaaattatgcgcaacaatataaggttcggttgctgaattgcccaccggcagcacatttggtgcacctttgaggaggatttgaccctgcgtcataaccaagcagtgctactatccttggctcattgaatgtaaaccagtgctttacacgatcgccataggtcttaaaacagaagtcaacatactctgtaaagaggtccgccatctttgagcttaaccaccctccatatttctgctcgagtgcaagaggtagatcgtagtggtaaaggttgatgtaaggagtcatgcctttctgaagcaggtagtttatcagattgttgtaatacgctacaccttctgggttgactcttccctcgccatctgggaagatcctggaccatgagattgaaaatcggtaggcatcaaaattcaaacttttcatgagatcaacatcttccttgtagcgatggtattgatccactgcgacatctccattttgatttcccgcaacttttcctgggatgtgcgcgaatgcgtcccagatggagggcccccggccgttggtggacgcggcgccctcgacctggtacgccgacgtcgccgtcccgaacacgaaccccttggggaacgacgcgcggctcagcccgccgagccagttcgcgcccttcacccccgcggcgcgcgcgccgcccgcgccggcgctcgccaccagcagcgcgagcagcaccgcccaccgagcgtccatctcgtcgtcgccgaccgcagcagcgggcaggttggcagctcgcaatccgc

SEQ ID NO: 7733 - DNA, 337 bp, Setaria italica
  misc_feature (301)..(301): n is a, c, g, or t
  Peptide Sequence Number=SeqID_73707
gcgcctggtgcggcggctggtgctgcacctccttctggcggcgcagctctagcaccttgcggtgggagttggagtgcttcgacatcacgaaggtcggggctcgccgcgggccggtactccggcaccagccggcccgacttgtaccgcaccccgcatgcgttgcacagcgtcttggggcccatgggccccgtcctccactgcggcgtcttgtccgtctcgcagtgcaggcaccgccgcccttccgccgacgccgccgagccggccgactgcaccgcggacgcgcccgagggcgccggggttntcagcagttccttcttcttggcgggcttcgacggtt

SEQ ID NO: 7734 - DNA, 2322 bp, Setaria italica
  Peptide Sequence Number=SeqID_73708
gccttttgccttgtctggtcggctggccctcctgctctgcctatccccttcagcctgcaaggctgagctcgcaactcgacttcgcgctcacattctcatggatccataggtctgcaggacagaaggccagtgttatgtgtgaagggtaggttctcgccgagcaatggatcttgagttcgggaggggcctgagatccccaaagagggactcttggaagaccaccttgctgctggcgtaccagagcttgggggtggtctatggagacctgagcatatctccgctgtatgtgtacaagagcaccttcgccgaggacatccagcactcggagacgaacgaggagatcttcggcgtgctctccttcgtgttctggacgctcaccttgattcccctcatcaagtacgtctccattgtcctacgagccgacgacaatggcgaaggagggacatttgccctgtactctctgatatgcaggcacgcaaatgtgagccttctcccaaacaggcaaattgctgatgaggagctttccacttataaactggaatgccctcccgaaataacagacaagtctcatatcaaggtctggcttgagaagcacaggaagctgcgcattgctctcttgatcatggttatgattggcacatgtatggttatcggggacggtgttctcacgcctgctatatctgtgttctcagcagtttcaggtcttgagttctccctgtccaaggatcaccgtgaatatgctgtcattccaataacctgtgtcatattagcattcctatttgccctccagcactacggtacacaccgggttggatttctcttcgccccaatagttctagcctggctattctgcatgagtgctgttggcctttacaatatcatccactggaatcctcaagtctaccaagctctgaatccttattatatgttcaagttcttaaaaaagactagaaaatatggttggatgtcgctcggtggaatcttgctctgcatgacaggatcagaagctatgtttgcagatcttggacacttctcatacagtgcaatccagcttgctttcacttgtttagtttaccccgcactgattctagcgtacatgggtcaagctgcttacttatcaaaacatcatgacttttactcaagctcccaagttggattttacatcgcagttccagataagatcagatggcctgtgcttgtattggcaattttggcttcggtagttggaagtcaagcaatcatcagtggaaccttctcaattatcaatcagagccagtccttgagttgcttccctcgagtaaaagttgtgcatacatctgagaaaatccatggacaaatatacatccctgagatcaattggttgcttatgatactatgcattgctgtcaccgttggattcagggacacaaagcacatgggcaatgcatctggactagcggtgataacagtgatgctggtgaccacgttccttacatccctggtcatcgttctgtgctggcacaggccgccactgctggcattcgccttcctcctcttcttcggatccatcgaggcgctctacttctcggcttcgctgatcaaattcctggagggcgcgtggctcccgatcctcctcgcgctcatcctgatggccgtgatgctcatctggcactacacgaccatcaagaagtacgagttcgacctgcacaacaaggtcaccctggagtggctcctggccctgggcgacaagctgggcatggtccgcgtccccggcatcggcctcgtgtacacagacctgacatcgggcgtcccggccaacttctcccggttcgtgaccaacctcccggcgttccaccgggtgctggtgttcgtgtgcgtcaagtcggtgccggtgccgcatgtgttcccggcggagcgctacctgattggccgcgtcggcccgccagggcaccgctcgtaccggtgcatcgtgcggtacgggtaccgcgacgtgcaccaggacgtggactcgttcgaggatgagctggtggagacgctggccacgttcatcaagctggacgcgtcgtaccggtgcagcgaggccagcgagtgggagccggaggcggagatggagcccggcgagcgggagcggcggctgacggtgatcgcgagcaaccagctccggcaccgcgcgagctacgacctccaggacagcgcgcagcactcgtcggcgtccaccgtggagatgcgcgccaccgccgccggtgccggcggcggccccacggcgacagcggacgacgaggacggcgacacgggggagatcagcccggcgcggaagcaggtgcggttcttcatcgacagcca

SEQ ID NO: 7735 - DNA, 296 bp, Setaria italica
  Peptide Sequence Number=SeqID_73709
ccgggtacaacgcggactggggctccgacggcggcgacctccaggaggcggtctcggcgttcgtcgcagcgtcgtccggagcagcgcacctgccggcgctggacaacgacgagttcatgtcacttgagtgcttcaatttcgatcagagcttcgacatgggcggcgcaatgccgagcctcttctatccatgagaattgagaagaaagactagagccctgtccatgtctccatgacaggagggaagagaagcagaggagcctcttactaacaactgtgcagtagcagaaaagcatctg

SEQ ID NO: 7736 - DNA, 511 bp, Setaria italica
  Peptide Sequence Number=SeqID_73710
cattaatcaaggctgtccatgccaaccggatgggatcagcgaccaccaggacggtgatccctgacagaccgaaagaagaggactacttctatgctaaccctcaataatgcctgcgagatcccaatctgcttcgaacatcgtgatattttcagcacccctcttgccattctttctgtaacttggcatggctgtacctaagatgattcatcaatcttcggagccgtcaaatcgagagctagcattctgttggtagcagttcagagccatggaaggtctgcgattggtttagaaactagaaaggatgatggatacttgaatgcagatgtacataggtgataggcataatactggcaccgcgaggcaagtcttgattacaccagcaaatgcagagattatgttcatgtgtagatggtgtaagtcccataagaatgatctttgtaagaatagaaactattatgatgagaaaagaatagatgtgccaacatttgggttacaaacaaaaaaaaaaaaa

SEQ ID NO: 7737 - DNA, 2109 bp, Setaria italica
  misc_feature (2073)..(2073): n is a, c, g, or t
  Peptide Sequence Number=SeqID_73711
gaaaggctatggatgacatagtggctggcaaaacagcaggtgaaggagaacatgaagaatctgattgtgacacagaaaaacaggaagaaggtgatttagatcttgcaaatgtattggaaaactgctctgattcattaaggcctgtgactagccctgtttctattcctacatgcaatctgcagtcagaagataatacaatggaggctaaatctctaccaaatctccgttctcacatacatgatcttgaaaggtctgatagttttcagctaagccgctcactacaaccaaatgctgaaaataatggggttgacccagtcaagagtacggattcttcttttcttgagcagaaatcagaagttactggtgattcagaagaaaattccagcccacctgaggttaccagcaatgtagtacctgatgacaagcatgctgacaacctgaaaattgatccgttcgtcccttttgcagaattatcattatgcaggcacctgttatctgaaggcatgggggaggatgccgcccgcagtgcatttgattctgagaaggtgaccttagagaagttccataccatgaagcagtcactaatgagaaacaacaggctagttgttaggattgctggacgctattttccctgggatgcagctgcgcctatagtgctcggtttgatttctttcagcgaggaacaagtttttgaacccaaaggcatgataaaggtcgagcaaattgagacaagtgcagcaccaggtggcagctggagaatctggccgtttagtttcagacggacaaggactattagtgctgtccagccagtttgtgaaagcactgttgagacttccatatccactcctgttaaagaatccacaccgtttagtgaatcagatagagaaaggaataaatccagggcaaagaggatcgagaggaaggtgcgatcactcactccaacgtctgaggagctcgcatctcttgatctcagagagggcaggaatgtggttacatttaccttctcaactgcaattgttgggaaacagcaggttgattgtcacatatatttatggaaatggaatacacgcattgtcatatcagatgtggatggaactatcaccaagtctgatgttcttggccagttcatgccattggttggtgttgattggtctcaaaatggagtcgctcatttgttttctgcaataaaggaaaatggatatcagcttctatttctaagcgcacgtgctatttcacaagcccacattacaaggcagtttcttttcaacttaaagcaggatggaaaagcacttcctgatggccccgttgtcatatctccagatggtctctttccttcactttacagagaagtcatcagaagagctcctcatgaattcaagatttcatgcctagaggctatcaaagatttatttcctcctgactcaaacccattttatgctggattcggaaatagagatacagatgagcttagttacctcaaagttggtattcctatgggcaagatcttcataataaaccccaagggtgaagttgcagtgaatcggcgagttgatacaaagtcatacacgtccctgcatgctcttgtacatggaatgttccctccaatatcgtcatcttcggagcaggaggactacaatacctggaattactggaaaatgccattgcctgatgttgatctgtgagatacaagtgcagtctgcacaacagcgctgcgctaattttattatgcgcagcagtggtgatgagaaaatcatggtgaaggtagcaccctgaggccaattgttagttggctagatgtggatgctcctgatataagctcctgcaagaacgaaactgtatatataggatcataatagatgactagcgatctgcacgccgatgaggcagcagaagcaatgtagctgtttcttgtgactcccatctgttgttgtaggactgaacctccatgtaactgagaggtgtatactttactgaatggaggaatctgatcgagtgttgtttcccgtgcagtttcatttcatccttctttgatgtaattgtggtgccatgtaatctgtacaggagcagtttaanaatgcaatagaaagtcagctctgttcatatggaaaa

SEQ ID NO: 7738 - DNA, 1506 bp, Setaria italica
  Peptide Sequence Number=SeqID_73712
gtttcgtaaaggcttcagctaccgtataatcgctcgcaggcagaaacgttgttgaacaatccgaaagttattagctaccacgcaatctcgccatatgatcaggtccagacctacattgttctcccgagcgaggacgcatcaggccggagctcagattcctgtttccatccatggacacaagaccagcttattgagcaacaaggcacatctactagctgcagcagctggccgccggtcgattccttccaggaggctagtagcaggtccggcgctggccatggatccggcgagctccgaagaaatcatcatcgacagtcgctacttccgcatctacggcgaccgccgcatcgaccgcctggtcggcaccaccaccgtgccgccgggcttcgacgccgccaccggcgtcacgtccagggacgtcaccatcgacgccgacaccggcctctacgtccgcctctacctcccggcggacacgtcgtccaagcagcagaacgacaagaagctccccttgctcgtctacttccacggcggcgcgttcgtgacgcagtcggcggcggccccggcgtaccagccgttcctcagcaccctggcggctcgggcaggcctgctcgtcgtctccgtcaactaccgcctcgcgccggagcacccgttccccgccgggtacgaggactccctccgcgcgctcgagtgggcggtcgccagcggcggcggggacccctggctgtcgcggcacggcgacctcggccgcgtcttcctggccggcgagagcgccggcgggaacatcgcccacaacgtcgcgatgatggccgcggccggcgaggcggcggcggcggtcgagggcgcggcggtgctccacgcgttgttcagcgggagggagcccgtcgacggagagctgccgatgtgggtggagtcgttggggaagctgtgggcggtcgtgtgcccggaggcggcggaggggacggacgacccgcggatgaaccccgcggccgcgccggcgaacctgcggaggatgccgtgccggagggtgctggtgtgcgcggcggagaaggactttggggcgcccaggtgcagggcgtactacgaggcgctcaaggcgagcgggtggggcggcgaggtcgagtggttcgagtccaagggcgaggaccacgtcttcttcctcgccaagcctgccgacgatgatgtcgtggcggagctcatggaccgcctcgtcgcattcttcactgctactggcgggaactgatcgaaggccacatctttcttgttggcaaggcatcatgtaaaacagtatctgggccacagcatagttatcatgtgcagtgcacacgacgaacaattgcagccaggaatgaggtccattttcgttcctgatatgatgtaactagcagttttgcggagtgttttttgggcttcgccgtgtgccgtggatacacggcaaacgtctcctgtgctcatggcaacattactgaatcaagtcaagtagtaaaaggaagtaaagaaaaaaaaaag

SEQ ID NO: 7739 - DNA, 584 bp, Setaria italica
  Peptide Sequence Number=SeqID_73713
acgtagaaagactagactagcgcctgcgaagcctccccccgccgcggatgacctcgatccgctcatgggggcggtgcgggcgactccgggccggccatccctgggctctcgtcgtcggcagcagctggtgcggccggcagcgaggattgggacagcgatagcgaggacgacatccagatcgtgctcaacgagaccgatggccgccggggcctcggggaggatgaaggcgacgacgaggacggcgaggacctcgtcatcgtcgccgatggaccacacatccccgggatggaggagcaggattggggagaggacccagcatcggcaggggtggagggggaccggaaagacggcggcgagcctggtaaggcggtggcggcacccggcgggaggatcgggtacagtggcggcggcccggggttccatccgcagcaccattccatgttcaagtatgtacgccctggtgctcctggagcttcaataggtggggctcctggtggtcctggtcagttccgccctcctgggccttcaggccctttctctggtcgtggaagaggtgactggaggcctgctggtggtcggggcat

SEQ ID NO: 7740 - DNA, 558 bp, Setaria italica
  Peptide Sequence Number=SeqID_73714
tagtacttggggtacttgggtcggtcggttggcggcgcaggggcaggagcgggaatcggcggcggcggtccatgtggggcgtgcaagttcctgcggcgcaagtgcgtgagcggctgcatcttcgctccctacttcgactcggagcagggcgcggcgcacttcgcggcggtgcacaaggtgttcggcgccagcaacgtctccaaactgctgctccagatcccggcgtacaagcgcctcgacgccgtcgtcaccatctgctacgaggcccaggcacgcctccgcgaccccgtctacggatgcgtcgcccacatcttcgcgctccagcagcaggtggtgaatctccaggcggagctgacctacctgcaagcccacctcgccacgctggagctgccgtccccgccgccgctgccggcccgccgcagatgccgatgccgggcccgttctccatctcggacctgccgtcgtcgaccaacgtcccaaccaccgtcgatctgtcggcgctcttcgatccgccgccgcagccaccgcagtgggcggtccagcagcagcaccaccacc

SEQ ID NO: 7741 - DNA, 646 bp, Setaria italica
  Peptide Sequence Number=SeqID_73715
ctcgcgcacgcgctcgtcccccgaggcctagacctgcagcgccggcgaccgcaggtagcgaggaacacgacgacagcgatggcgctcaaccacggaatacgggccagcctccgcttcctcgtctccactgctgaggccgcctccgccccggcttctcgtggatttcattccactggagtaaggcagatgggagcacacgcgcatgaagagccatactacgtccacgccaagcacatgtacaacctgcacaggatgaagcaccagcagcttaaggtgtccctcgccgtgctggctgctgtgggcactggtgttggagtccctgtgtatgcagttgttttccagcagaagaagactgcctctgcgtagtttgaagtccaaagacagcttaaaatacctgtccatgagatttcttttcccattttcccatagcattttgagaagttcagtctggagcttcagttttacttggccatttctctattctcttcacaggtttactctttacttattgatgagttttgacgtagggacaacgatatctgttaataatacagtggcccgaacttttgccaacatgtggaaatgacagaaaccatattgtaatacattctaatatttcttcctcagtttcccttaatcttaaatg

SEQ ID NO: 7742 - DNA, 516 bp, Setaria italica
  Peptide Sequence Number=SeqID_73716
ccccagtatttcaaagcaggccatgtcatcgtattggaccattagttgggctgctcacctgcccacctccccctcgcgatctctagcggcgccactaggagctcacgtcgccgaagatatttttgacggcgccacgtccaactccccaccgccgtcaagcttgacgcttccgaatcaggtcgctagcatcaggatcaggttgctgccgtggagctcatcctctactgtgcggtgaggatgggtgggaggtagtcgaacttggtgccgagcacccacgcctggggtgtccgggaagaactccatccccggcagctgcgtgatggcgccatcggcggtgaccccgacggggtaggtgagcagttgcctggcaggtcgcgctcgggcccgtcgccgacgtacaggtcccagtacatgtccgccatggcgttcaccttgcacacgcactcgaggctctctgggtgggtgaaggcttcatccacagcgtcgaggtgctcgtaccatagtgacatccgagaa

SEQ ID NO: 7743 - DNA, 291 bp, Setaria italica
  Peptide Sequence Number=SeqID_73717
tttttttgaatgaatggaactcatcatggtaaattataatcgatcaactgcagcttgcagcttttgcaagctcttcagctcatcaatccagcacaaatgggaaagaaaaggaaaaaggatagcatcacatctctctcctctcatgaacaaatcttggccaaagactagacgacggtgtagaggatgatctccgcgggctcgaacccctgctgcctcttctgcgccatcacggccgcctccgtccgtcggtacttcgtccctttgtcgggccgttcttccggttcggtctaa

SEQ ID NO: 7744 - DNA, 952 bp, Setaria italica
  Peptide Sequence Number=SeqID_73718
caccagaaacatgcaatgccataacacaaccaacaggcctagctgctcaaaatcaacattcagacagtaacataggcagcgaaccagatcaataagctacagctagtggtaggatttgtttgacagctacaggtaatcaaaagaaactggttgctgaagaacaagcttcagattggcgtaaaacacaacttttaaactagtatatttcatcatccgggacatctggtgtaagaaacttctgcggaaccttgtacatctcttcgtagttgtacttaggctttaccctctctgggaccggctcaagtgggatgatactgtctccatcaatcacaccatcgatgagtccataatcaacagcctcaagaggacccatgtaacggtctcggtcaatgtctttctcaacctgctccagagtgcggcccgtgaagcctgatacgagccgaatgacgttcctcttgttagccagtatctccttggcttggacctctacatctaaggcctgcccacttgcacctcccacaggctgatggatcataatcctggtgttgggcatggcaaatcgcttgccctttgttccaccaccaaggattatggaagctgttgatccagctatgcccaatccaatagtggagacatctgccctcacaagctgcattacatcatagatggccattgttgcactaagggacccccctgacgagttgacgaaaagacggatgtcggagtccgggtcgatggcgtcgaggaggaggagctggctgacgacggcgtccgcgaggaagtcctcgatctcgttgccgaggaagacgatgcgctcccggaggaggagacccatgacgtcgccggcgcctgccccaccgcccgcgccatccgactccgcccgccacacgggagcatgcggcgccagtgaggcgcaaggcttgagcctgaggagggacccttgttgcgtcgg

SEQ ID NO: 7745 - DNA, 479 bp, Setaria italica
  Peptide Sequence Number=SeqID_73719
agcgcctgcagcgcggcgagcgtgcgcaccagcgccgacgtcggctccccggcgaacagccgcccggtgtcctcgaactgcagcaccctaccgccggtcctctcggacgtcgacgacgccggcgtcaccgacggcaacgacggctccgcggtggcggcgaccgcctccgggagcttggcggcggcgaaggtggacagcgcgcgcttcgagacgcgggaggcgatggccatggaaggacggaccttgccggatcgaacgcgagggaacgcaagcgtagcgaaggaagctttcctggcgacagggaagaagacgcttgtgtgcaaacaaagtacccaggcacgcacaggcaggcagaggacacaaacgcaatggagatgcgaattcagcccgggacgcagcgacgacttatataaacgagaaagaaaaggcggctgttttcgtcaaggtcctcgaggaaagctaacaggtttaggtgaatc

SEQ ID NO: 7746 - DNA, 272 bp, Setaria italica
  misc_feature (11)..(11): n is a, c, g, or t
  Peptide Sequence Number=SeqID_73720
actgttctcangtttttacataatgacttaaaagtatgcaggactctgaagattgaatctgactagcatgctagctttctgcaaaaaatgataaccaaataacttatctttcaatctttgtcaaggtgctacttgtacagcaaacaaggggtctgatgaattcttcaaatacacaaaatcagatgcaaagtctttaaattttgcaagaatggtctagatggactattccagcgacagtaagtaaaaggaaatatacttcagtgagcaattca

SEQ ID NO: 7747 - DNA, 289 bp, Setaria italica
  Peptide Sequence Number=SeqID_73721
tgcgcggacacggagggcccggcgtgccgggcaccacgcggaagaagaagtcgaggcaggggtcccccgaggacacgaacgtcggggagaggttctccgtcagcgccttccctcccggccccgccgccggcgccgcgggcttgttgaagccggcgtccatcacgtccaggaactcgttccccgtcgtcgccgccgcctccgccgctgccgcagcagcagccggcgcggcatcaaccgtggcccgcgctccagcgtggcgggcctcgggcgggcccacgaggagatggta

SEQ ID NO: 7748 - DNA, 1655 bp, Setaria italica
  Peptide Sequence Number=SeqID_73722
gcgccaggtcttcttcttcgaccccgacggtgagacatgccacagcacgtatggtatttgagcatagttcagatgcagtccctattgcctaaggcttgctagttgcttggatctaagtccatgagttgtgctatttgtacaacctgtgtattatgatcttctgaaaatttgtagaattgttaggattgtgcatgttgtatggcctacttatagaataagtaattggtgctaacttggcttttaagttataataatgttcttcaacaaaaaaaaaagttacaataatgttagttttccccctgggatttttgctagagctatgcattttctgcaccatatgcatagtaataaggttgctttgctgttgacaaccagatgatgcctgcaactaagctatgcagtgtgtatctgattatgatcaaatccattagggtgtagtaatgtaatgttcaattgccctttcttgtgtattttctggtcaaggtgttgcacttacttgcacatgtgctgttgccaaatcttaagccctaactgactaggttcttctaagagtagtaaacgtgcttggaatttggaaacagggttatgattcctgaaaactgggtactgctttgttacctcttacctggtatctgttttgcaatagtaaaagatgtgaactattgactatagatagcaaacgtgtcagcgtttaggggtagttagtgatttgcagacagagctgagccagaaaatagattggtttttgctgttatctggttaaccatgctctgtgtatggtgaaacacttaattggtttggaagaatgttgccgtttaaataaaaacagtgtaaaagggtgccagaccatcaataactcagacttagttcagagctacttaaaaatcatgtcctgattcctgaagagtttggcaaacagacctgactaaaaccatgtcctgaatagcttggcaaccgcttctctttcagagaagacaactgtttttttaaaaaaaaatattgtaaaacttattgtgagacacgagtgtcaattgtgagaccatcaataacgcagactttgcatattagtcaattcgtcaatgattttctttcacttataacttggtactgctctgtatagcactgtcacatcctataatgttattactagcttggttcttgcattcggaattttattgattgtcaagcagtagtcagtcaccttactagcttggacttactaactatgggccaaactgtgaattatgtgtatgtttatctttccccgttatgcgtaaacagccaggtcttcttcggcgctgctgcaggcaatggccttgaagttactagctcgggtggcaggcagtgataagtaattagtgagcttgatttgctggctccttctgctttagcatgtaagtacaattttttgggtcataattgtgtctgattctctttggtttagtgcctgcacgttctcagttccccgcagtagtgagaaatctgctgttgcctgttggaaactgagcaggcagctactataccacagtactatcgcatttcctcctacttttcagttccttcatgggttcctgtacagctgcacatgcatatggggtactacattgatgatctgatgcaggttggttgcagggcaaaatgtaaaatcgaagatg

SEQ ID NO: 7749 - DNA, 542 bp, Setaria italica
  misc_feature (435)..(542): n is a, c, g, or t
  Peptide Sequence Number=SeqID_73723
cgggctcaaggcgcgcggcaccgagctgttcgagaagacgcagcccgacgggcgcacgcgccaggtcttcttcttcgaccccgacggcaatggccttgaagttactagctcgggtgcaggcagtgataagtaattagtgagcttgatttgctggctccttctgctttagcatgttggttgcaggcaaatgtaaaatcgaagatgtttccagaccaagctttgtttcgataaataaataaatccgaagcttatcaagtctgcaaatccacttcctatgttgtaatatgattctgtagtctgtacttgactggattttactgtatgacaaatgaagtttgactgctttgcttctcgtcagcttcgcataagtggttctagttccagaaaattaaagcaaaggggataattctatgtgtaaaaaaaaaaaaaaaaaannnnnnnnnnnnnnnnnnnnnnnnnnnnnnnnnnnnnnnnnnnnnnnnnnnnnnnnnnnnnnnnnnnnnnnnnnnnnnnnnnnnnnnnnnnnnnnnnnnnnnnnnnnn

SEQ ID NO: 7750 - DNA, 503 bp, Setaria italica
  Peptide Sequence Number=SeqID_73724
ctttagacaaacggctttctcctcgttgatctcgtcatcatcgtaccgctccgtccgctgcatcaggcaggagaggcggaggatgaagtcatcgacgtcctcgcccggctcgaaagctagacgatcccactcctgctgaagcttctgcagaatggacttgcgagcgcaatcgctgccaactcaggccgcagtgatagggtcccaagcggccttggcagtcctcttccccgagaggttcgccgccatctccagcgggaccgcggcaagcaacgcctcgagcactcgccgatcctcgtggttgtcgacattgttgtactataccgcgtcccacatctcccgcacttggaggttcaccttcatcaccgaggaccactccatgtagttggtcttcgtcaacatcgaacattgcatgctgccgacggactcccggatgatggtcttcacaacattcatgggtcggtgcccggagtcaaggtcggagtcgtagtaggagtcgaggccgg

SEQ ID NO: 7751 - DNA, 1859 bp, Setaria italica
  misc_feature (1)..(35): n is a, c, g, or t
  Peptide Sequence Number=SeqID_73725
nnnnnnnnnnnnnnnnnnnnnnnnnnnnnnnnnnnaactaccgaaggtgcagccagattattctgaaactaagacgagtggatcaaacaccacagctcgcccaaaaggccacatacttttatctgatttttagtccaaactcaactgcacatttacagactctgcatctacatctgatctatacaacgcagcccaatgtgtcaaatgtcaatactttgatagtatctatcaatgtaacggtgtataagaacttcaactgttttaagaaactttgagctttcatgaatccctccacccctcggggagacgccactgcttgtgccagtaaatggacactcgggaccagagagggaacatgaagctgtaatctgcagcttcatcagggactccccctatcgtcagaggtagccagacgtaccgagaatctctcaggtcggacgggttccaccgatcagccatgaagatgaatgaacctggtagtcctggaactggcagcacgaatgtgctctgggagaagaatgttgttgatctgaagacctcatttcctcccacgcaggggttccctagtgtttcccaaggtcccattactgaagttgcagcgtgagccagtgcagtgtttggcgcccagcctgtgcagccagaggttaccatatagtaggtgccttcgtgcttgaaaagcgcaggagcttctcggtgctgtgcaatgagaaacctccgcataacatcagtgacatcaaggtagtcatctgttagcggaccgatgtggagctcactgttgtcctcagaagagtatatcaggtaggccttcccatcatcatccttgaatatggtcatgtctctactttcgcagtcatgtgggcgcttgctgtagagataagtgaatggaccagttggggaatcactgacagccacaccaactgaagctttagtgtagttagcatcatctatgtgcatccacatcacatatttgccagtccagtcattgtatatcaccttgggcctctctaggacattggatttgtggagatcatgtgttacattcttttcctcaccacggaggacaactccttcatttttccacgtccataggtcctttgaagaatagcaacttactccaacgatgtcaaccttcccaacagatcataacttccaacatgttccctagcaatttggcctcaccaacagaatctaaaaggtccggtctgctcccttgctgtgagctttgtaggttttgccatccttattctcccataccagaaataggtcttggtcttcttgtcatacagtacacctcctccgtgggcttggataggtttgccatcagtatcaagccaaactctccctgggtaatagaagtacatgctgtcattccgaccattgattggatctacagccatgttcgattctgggaagaacatatcatgcactgcagaagattcatccaagaactcatccactactgtaggtggcttcctctcgcccttgcgccgcacagcccggggattccttcggctccggggaggcgataaccggaacttctcctcctccactgcttccagttccctcataatcgatcgacggatctcatgtgtactcatactctcatcctcctccttatgaatgatgataagatggaaattcacaacgacaaccagcgctgctaggctccacagtaccagggttaaggacctgtggcttgccggatagcagcggagacctaacgcctttgggtgcctgctcctcatacccatggcgccccttatctactccagctgacacgcgcatgggctagtcctgtcgagatcttggcgagagatggttgggggcgccccgattagcttagcacgagccgcgatccc

SEQ ID NO: 7752 - DNA, 2738 bp, Setaria italica
  misc_feature (1)..(19): n is a, c, g, or t
  Peptide Sequence Number=SeqID_73726
nnnnnnnnnnnnnnnnnnnttttattcgcagcatacatttcaactgatatatagttaaataagcatttctagataaaccctctactccagacattattattggctggcagtttgatgcctagctacacttgttctaccataacctatggacgacagcaaccaatatttctgagctcgaaggtttacagatgacatagctcacctcacaacagagaatggacagtgtattataactaacgaagagccagctgaaaaactctcaatgtttgattccctgaaacgatggggaccgaagcataagattagccatctaccattgtccagtatgcatggcattgtatccaaccaccggctgccaggaaggacagcagactgtagaggccgagtcaatgcccgaaccaccaccattgctttgtgctaaggacctgccgaagctggatccttatcacccagcaaaggtttctttccagcgcgcggttcgttcttgactcgggctcctcgtcgacagccatccccctttcggcgatgtccactgtggcgctcaggcggaatcccactgcagcgccgtcttgatcttcttgattgtgcaggagatgaggttgttcacagtctctactgattccacagtgagcttggcggtcggctggctgttgacgaggatctggaaggcgacggtgagcaatgagccaccagtcttgtggtcagcaccggtgctgggaccatcaggcaggatggcaaacccagacggcagcagagcaacataggtggaatccccgccgttcatgacgagctgcattgccgggatgtccacaggagcatacacaaccatggagcctgatgcatcagtgcaggtctcctggaggatcaacatgctgctctggttggcactcatggcactggccctgaggagtgacactgagttcccgtgctcttgacccttggcaatgttagccatctcctgcattgggcctccgttgctgaggatatcccactctgcacgcagctgctcgtcacggaggaagttgaacagcttctccggagccacgggcacccacactgatgtagcagcactcagcaccacgcccggtggctcccctggctcatccacactcttccgtgccatgacgcgcacatcctcccctatgcttcctgtcgcaccatccagcttgctccattcacgtgcagatgacgcgctgaccccagcacagaagttttccgtcatccgccgtgccagcttcagcatgcttcgcttcccctcttgtgttataactgacgagtcatttgctgaaactgtatcaggagacatgagtatggccaggcattcacactgacgctgcagcatcgcaagccaccgcctggctccaaaggcaagcccggaccggagaagtggtctatagagctggtgtactgatgcctcatcgtattccgtatgctcgacccatgtgaccttgcagtagccattgggagtgtcttgcatcacacagccagaaggtaaccgcctgcaccttacatttccagcgttggatattgttgcagagttctgatctctcaccaatccatcaatagacacatctactactgcccatgcaccctcagccagctgcttgcaaaacctgagaaatgtgacctccctgatggggactaaaggtgagagcacctgtagctcagccttcatcagcagcagcgcaccatttctacttcctgcaatgccggaggtcacctcctctaggattgtggccttagcaatcatgcatgagaacatgtcggaccaccgtctctcatccataagagtctcaacaagggcaacgctgtcgtcgatgatgacgaggccagactccctagaggcctcggacacataccccacaggcttgacgccgatgcagggtaggaaggattgggcatactcctcaaagttcagcatctccttgttgggagaaccattgaggctcggaagccacaaaggctcatcaatctgtgccagcttgactagttcatccatcgcactgatggcaagctccaacaacatggacctgtcaatgcccaccatagacggcggagcagatccggttgcccgtgctggtgtgatcacagtgcccaacgggctggacacacccccagcaaactcgctcatggaaccaggcatcgtggcggaggggatagaccctaggccacggaagccaccgactgccagctcgagtgacgagctcggcatgggcagggacgacaggtgtggctgcagcataggtcccgagagcatggccatgggcttgccgaggaacttggtggcgagggcgtagacgcggttgagctcgtccttgagccgcgcattctcgatgcacaggtgctgctcctccagggacacctccccaagcatggcggggctcccgcagctgccgcacatcggggtgcgcatggcctcccggatcgtcatgttctcggcgcgcagcttgtcgttctcctgcttgagcagcgcgttctcgtgccgctccagttgcgtcttcatctgcgtgcggcggttctggaaccagaacttgacctggcgcgggtcgaggccgagcctcctgctgagctcgccgcgctgcttctcgtccgggtgagggcactccttgaagagcgcctcgagctcctggatctgctgcggcgtgtggcggtggtatcgcttcttgcgcttgcgcgggttgcctggctcggcgtcgtcctcgtcctcgccaccgccggacatggcgtcgaggtggtcg

SEQ ID NO: 7753 - DNA, 477 bp, Setaria italica
  Peptide Sequence Number=SeqID_73727
tcctttttttgcatacgtattatgcatttaaacattggaaagaaaagaatctccaatgttttcttagcgctagcattacctcatgatcgctgcttccaagttaacaggaagcagcagatacagaacaagaccggacctaaaaatttccttcactacaaaaaatacaaacaagatgtaataattatctaattttccgtatttcttttaactgtccctgaaatcgccttctctaagcagcagctccttgaacaccgccgacgattctgcccacagcttcttggctacttccgtgtcgtacgacagccgggaggatccgatcgttcttcctttccctccaaagaaatacttcccagattcttcaggcggtgccaaagcagcgtcaaggacggcaccaaccccggtatcaggttcctgcaggagtttcaggaagcgtagaaccaagaatgcgaaccaagagacacactcaggaagctctcg

SEQ ID NO: 7754 - DNA, 310 bp, Setaria italica
  Peptide Sequence Number=SeqID_73728
tgacaaatacaaattcattttttatttccacatatgttggcactttgcattattgcacgatcgaaacagatgggagtgcgccaaacttctctaatgtggccacggagaaagtcccaaaacagattcaattattcaaacacaacgcgccgatcgagagaatcggagagattcgctccctaaacgtcaacatctcgagatgatccctgcgcgaagtcgagcccagttccttgcaacttctcgcgaatgatcccgtccagccgcgccgccatctccggcgtcatgtggttcgcccagtccccggccgaccccc

SEQ ID NO: 7755 - DNA, 1381 bp, Setaria italica
  misc_feature (1358)..(1358): n is a, c, g, or t
  Peptide Sequence Number=SeqID_73729
tccattacttgcacacaaattacagtaactaacttttcacaataatttactcagcatgtatgcataaaaacacacccagctgttgcagttgcagcgcacgcccggcgctgcctacttggcgaccacgccgtcgttgccggccagcatcatgtacttgtcgcggcgagtcagcccggtgcactcgaactcgagcgcctcgccgagccgccgctgcacccagttcgccacctccacgcccgtcctgcccccggcgcgggtccactcccgcggcaccgcgcccaggaactccacccggtacgacggcgccgggttggcgaagaacgccacggggtccagccacttgtgcccgctcgccgtcgtgccgtagagcgccgtcacctgcgcgtccagcgccacgggctccatgtcgtccgcgagctccgcgaacagcgggctgaaccgcagcaggtagggctcgcggcacgtcgtgccctcggggcacaccgcgaggtcgccctgcctcagcagcctcgacatcgtctcggcgtcccgcgcgcggtcgcgcgtcagccgcaccgtcttgatgggcgcgatcagctctgaaagccgactgaggctgtacgtcagggccggaacgggcttctgcagagccgaggagagcatgatggggtcgaccagcgtccggtgcgtgcacacgtagaggacgcccctgcgctgcttgccatcagccggcggagtgcggaggccggaggtgcggtagcggaggccgaagatggcggcggctaaaagctggatcttgaaagggaggacgatgccgatgttgatgcggatgacggagaggatgacgccgagcggcaggaagaggaagaaggcgagcatggcggcggggtggggaggaaggcgaggcggccgtcgtggaagatgagcgccttcgggtgcttgtcccgcggtagcttggcgctctttgcgctctctctgctcacgacataaacttccttgcagtagggtgcgaaatgatggtcgaccgggttggggttgctgacgacgcccacgtcggccattgcaccctcggccccgaacgcctccttcagtacgttctgcctcagctccgtcccctgcgtgggcccggtcagcagccccgtgaagtagcggcggcggccgaccgtgacgacctgcagctgggggccgaccaccgcgtcggcggccatgtattccctgaggaaccactcggacatggccctaggcgcgctggtgaccaccaccttcctcctcgaggggagccacaggcgctcgtagaccagcgcgttgagctgctccatgtagtgcttgggcagaacggcgcgggcgacgaggtccatgtccctgggcctgagccccgngaaggtgacgagcgccatgaccc

SEQ ID NO: 7756 - DNA, 631 bp, Setaria italica
  misc_feature (585)..(631): n is a, c, g, or t
  Peptide Sequence Number=SeqID_73730
tactgatctcatttgcttctgtgaccttgaacacaaaggtgacagcctcactgcgtcctactaccacttggtgaatgcggagaagaacactgctgttggagcagaggtgacccgcagcttctcaagcaaaaagaacatcgtcaccttcgggacgcagcatgccctggaccccagcaccactgtgaaggcccgctacaacagcaacggcatggccagcgccctcatccagcacgagtggaggcccaagtcattcgttaccctcaccactgaggtcgacaccaaggctttcgagaagagctccaaggttgggctgtccctagtccttaagccctgatgatgatgccgatccctttttggtcctaggatggttaggttcctgtgtcagcacctgaggaggtctgagtgtaataattctgaacatcttcctggctcaactttggtgtcatgtggcatcttcgattctgcaagcttgcccttctgtaagtgtcatccggaatgttagtagtcacccctggctggtttagatgttgaaactgaatcggcgaatgagattatcagttatccagtttattggcctatgaaaannnnnnnnnnnnnnnnnnnnnnnnnnnnnnnnnnnnnnnnnnnnnnn

SEQ ID NO: 7757 - DNA, 808 bp, Setaria italica
  Peptide Sequence Number=SeqID_73731
acgttagacaataatgatactgctactggggatttcaccaagtacaatgctggattgaatttcaccaatactgatctcattgcttctgtgaccttgaacaacaaaggtgacagcctcactgcgtcctactaccacttggtgaatgcggagaagaacacagctgttggaggagagcttactcacagcttctcaagcaatgagaacaccctcacctttgggacacagcacgccctggaccctctgaccactgtgaaggcgcgcttcaacaactacggcatggcaagtgcactcatccagcacgagtggaggcccaagtcattggtcaccatctccacggaggtcgacaccaaggccattgagaagagctccaaggtcgggctctccctggtcctcaagccctgaggtcaccagcttctggttttaggatgttagtttttttatctgcagctgaagtccaacaaacaagcctggactaaacttgtaggctcaactttggtgccgtggcatcttgatcccacaaactaaaatcgttgcctgttaccctgttctagacttacttgaggggtttctgttaccagttaattcgtgcttccaactgtttttgccattcacgggcctttttggtggaaaaccatgtcaagacaacttgagtctcaagttgtctaatactggatgatatttgtttggctgacctcttaaatcctgagtgttcagtttgaatcgtcactaaacttaagttgtcttgacatgtactggatgatattttaagttttaaggtaacttaagtaaaccttaacttaaaaaaaaa

SEQ ID NO: 7758 - DNA, 318 bp, Setaria italica
  Peptide Sequence Number=SeqID_73732
cgcgagagacagccgcagcaaaagcctctgctctgctccttcaccagttcacctgacctctcctccattgccgccactgctctcccgacctcctcgccgccgcctcagggcctcagcatagcacggcgcagaagccaagcaacagcaggaggaggaagaagaagatggaggtggaggcgatgctggaggacgacgtgttcttcgccgagctcagcaagcggatatcgctgctcatcaccgacgacgacgacggcgccgacttcgccgccgccgcgcagttcatccccgccgccgcgcccctcccggggttcacgtcgc

SEQ ID NO: 7759 - DNA, 1569 bp, Setaria italica
  Peptide Sequence Number=SeqID_73733
tttttacttggaacatcaggtagacatgtacccagatatatacttgcgagaaacatagaatagcccaaatacacaacgtggctgcaaggtagggtccgtgctcacaacttgcattttagagcacattgacagctaagcgttgtttaaacaaagaaccagttctttacatcttcacgaatacaatgtggaatagacaattacctagagcaaaactgccgagaccgcgaaacactagcaggaaccacaattctttcaagaatatctccgtatatactaaaggaacctaaataatgaaagaattcaattgcttcagaaaccctgacacgagaacaaagtgggacagaaaagtagcaaaatgcaatagcctcttataaaatgccaaatcaaaaacattttggcctgactcctccaaatagccgacttatttggttagcggtatacatcttgctaatatttatactcttggttcttctccagaccaaccccagcgatgttcttccactctcaggtggattgctccttccaagctgcaagctttctcaggaaatccatcacctcagctggatccctcaaggagtagaaggcatcgctctccttgggtatagacgacaccaatattccaaagccacggttgcttgccttcagcaccttgaatgcatcttcatcagttctgtcatctccaacatagatagggagaacatcttcactctcattgagcccaagcgattcaagtaaaaattccacagctttacctttgttccaatcaatcacaggacggacctcaaaaaccttccttccatgggttagccttaggcaagggtaatcttccaaaacagcagttacacgctggaaaacctttttatagtcttcttctgccacattacggtaatgcacagacacacagaacttgttgtcttccatcctggcaccaacaatgtccttgacactctcatcaagtttttcatacacctcagtgatcatgggtaaaaactcacttgcaggttggaacaggttgacctctttaccctgcgaatcagtggaccgaatacattccacaccattggagtcagcagccttcctaacagggcccattatgtccatcccatgacttccggcgtagtacagttcattaagcttgacaaagtcaaaaaccttatcacgagaccttccactaatgattgcagttgggaaaagtgatgccacatgcctaacagcagcacgcatctcatctgacattaatgcatttgcaggattgtccacaattggcgaaagagttccatcatagtcaagaaacaatgccagtcttttactcccagcaagatcagtaattgtctcaaatgaggtcaaagcagaaggatagtccaccatccagttatgatattgcaaatcgagatcatcagcttgagtgtcattgacgacatccttgatctgtcttttgcgggtaggtgatgaggccatcatgaggtcgagccatccagtggcacgaacttcttcgaccttaccaggcagaggtatcttcttggtagtattcaagcaaagccccggagaggggaagctagtaggagttgt

SEQ ID NO: 7760 - DNA, 870 bp, Setaria italica
  Peptide Sequence Number=SeqID_73734
ttttttttttttttgattgaacaaaaactagtgcagcttgcgtatttattcatcacatccgggggcttgctgcctattatttcaaataaatacaacagcacgaactacaagtgctagctaggattgtcttggcataataataataataatattacaaagggtggaacaggctcaacatgatcctgcacaatgttcaccgagaaaaggaacactttgaatacaatgatgcatgagtcgtgtgcgcttctctgaccccctctctaatcggcacgagattggccagcgcgagaggagaggatgataccgacgatgagaccgtacagagcaagagcttccgcgaagatgaggatgaggatcatgcccacaaacaactttggctgctgtgcatttgccctgacacccgcgtctccgacgatgccgatggccattccggcggcgagcccggcgaggccgcaggcgagtccggaggagaggtgcgcgtagccgtcgaagaggaagtagggcttggccttggggttgatcccggtggatatgatgacggcgatgatgaggccgtagatgccgaggactccggccatgacgacggggacgatggacttcatgacgagctcggggcgcatgacccccatcgaggcgacgccgacgccgctcttggccgtcccgtaggcggcgcccatgcatgagaagacgagcgcggcggcggcgccgaggaagccgaagaagggagcggtctcgtcgccgctgaaggtggcgaccgccatgggggtggaggggaaggaccggaggagatctcgcctgagaggatcggagggagggaggatggacggggtcaggccacgatgatcctgctcgatctgcctgcctgtctca

SEQ ID NO: 7761 - DNA, 509 bp, Setaria italica
  Peptide Sequence Number=SeqID_73735
ggggaatgcaggctttctacgaactttttacctgctgagttacttgagggacaaagtaaggttcagaagttggttgagtctgttgatcctttggttcgagccgttgatggcattgcaggagagcgtgtctccatgagagtagacttggagtgttcaaatgggcgcaataccattggattattcactcataaaaagctatctgtatcagtgggcttcggaacagccgcatttgctttagcggttcttgagggcaacacacagccaggagtttggtttccagaagagcctgagggaataccaatcgaagcaagaaagctgcttcttgagcgtgcatctcaagggacaagtaacttcgtgatgaacaagccttcctggatggtagaaactgatccaaaggaagtcatcctaggaatctatgtgtgagaagatataaatgtgcttaaatttcctggatgctggacagtggccaactaaatattggagtaatttaccagctgcgagaagttgaa

SEQ ID NO: 7762 - DNA, 1113 bp, Setaria italica
  Peptide Sequence Number=SeqID_73736
cgctccgtcagccgacgctgccaagaggaagccctccaggagcgcccgcgtgctcgtgctcggcggcgccggtcgcgtcggaggctccacggccaccgcgctctccaagctccgccctgacctcaacattctcgtcggagacaggaaccgggagaaaggtgaatcctttgccgctaagcttggcgagaagtctgaattcgtccaagttgatatccgcaatgcgagcttgctggaggacgtgctacagggtgtggatttagttgtccatactgctggacctttccaaagggcggaggagtgcactgtgttgcaggcagcgatatctactaagacagcatatattgatgtttgcgatgatactgatttttcgtggagagcaaaaggtttccatgaacaggcaaaggctgcaggtgttccagctattactactgctggcatatatcctggagtcagcaatgtgatggctgctgagcttgtacatgctgccaaaagtgaaaatggcgaacctgagagattaagattcttctactatactgcaggtactggtggtgctggtccaacaatactgacaacaagtttcctgcttcttggggaggatgtaattgcatataacaagggagaagaaatcaaattgaagccctacagtggagctctgaacattgatttcggaaagggggtcagaaagaaaaatgtttacttattgaatttgcctgaagtgaagagtgcttttaagattttaggtgtgccgactgttagtgcccgatttggtactgctcctttcttctggaactggggaatgcaggctttcacgaactttttacctgctgagttcttgagggacaaaagtaaggttcagaagttggttgagtctgttgatcctttggttcgagccgttgatggcattgcaggagagcgtgtctccatgagagtagacttggagtgttcaaatgggcgcaataccattggattattcactcataaaaagctatctgtatcagtgggcttcggaacagccgcatttgctttagcggttcttgagggcaacacccagccaggcgtttggaggccagttgtccctaaagtgggtgtagcaatcgaagcaaggtagcggga

SEQ ID NO: 7763 - DNA, 747 bp, Setaria italica
  Peptide Sequence Number=SeqID_73737
ctatacaatgtttcgatctcccttgctgctgcctctgaattggcagcttctagggtccagatttcctgcaacgcatgcaggcaattggcaactacctgtgcgtctgggtcagagagcatgagcgccttgagcgaagcaggcaggtcagcatcaatgcaggcggtagcagatatgtgatacagcttggcagcaccaacggcggcgatcatccggacgtaggcgctggggtccttgagcccggtcgtcagcggcgtgacgagatactcgacaaggttgggaacacggagagagcagaggctgcggagcgcgaggccgcggatagtggggtcctgatcgcggcagtcccgctggaggaagttgatggtgagcagcgcgaggtccgggtgcgcgcgcgcgtgggcgccgacgtagaggtagcacatcttcttggtgacgacgtcggaggtggcggagcagagcaccatctccccgaacgcggccgacacgtcgatgccggccgtcatgcaggagatcacccgcttgaagacgtcccggcgctggtcgtccgcatcgggggcgcggctcccggccagctgccgcagctgctgcttcagatccgccacctcgctcttcccggagggttgggaaggggaggcggacttcgccgccgatgggacggtgggagccatggcggtggtcggccgcggcggggagttggatctgacctcgcgtggggaggaagacgactgcgactacgtaggccgttgt

SEQ ID NO: 7764 - DNA, 343 bp, Setaria italica
  Peptide Sequence Number=SeqID_73738
cccattctccatctcctcagcacccaaaccctggttcttgcaaccagttaactgctcatcggaaaccacagtgacatcaatctcctgcagacgggagaaaacagaacggataacctcctgcattgtctggcgggagacacgctgcagcagctcccccttggtcccagcctgctgcacgacgcggaagcaggtactaacgaccgcgcagacgtggcggttggccagcgccggcgccgcgcggctgcgcacgcaggcgagcagcacctgcaggactcgcgccaggacggcttcctcggacgccgggtcggtgacctcgaagcggcaggctgtgacagcgtcgatg

SEQ ID NO: 7765 - DNA, 1004 bp, Setaria italica
  Peptide Sequence Number=SeqID_73739
ttgttcgttcttgtccgtctttttccttttgtctatttcattaacaaatgtgacatcctcattctctagcatggaactttgtactgtggtatgtgtaaattttaatttttaaagcgttccatcaaactacatgcgtttagattcaagtggatattggaactcctgaaggagacatgagttttcattcgtctgcatcaagactggacttcaagggataccaagccgtctatggggacagtgaggcaagtccatccagcgacaactctgagggagatgctgtgcatgaggctaattttgaggccttgtccaaattaaaggttaaggacttggtgtctccagttaatgtgcatcttgggcaacactttactaagccaccaccacgttattctgagggtgcactgattaaaaagctagaagaacttggaattggaagaccatctacttatgcatctatactgaaagtgttacaggaccggaaatacgtgacaataaaaagtcgagctctgcaccctgaattccgcggtcgaatggtttcggcattcgttttgcaccatttctctgaggttgctgattacagctttacagctaacatggagacagagctagacaatgtatctgctggttcaactgaatggaagggtcttctgaaagattactgggaacgattcagtaaatattgtgcagatgctagtaaactggatggcagaaaggtagagagaatgttcgaagaaaaatttggtcctatcctctttcctgatgatgataaggacagtagaatttgccctagctgttctgagggaaccctgagatttaaagtaagtaggtatggtgaaggttactttataggctgtgatcgacatccgaaatgcaagtacatagctcgttcattgtcacagcaagaagatgatactgaacccacagaggaaagtcctaagtcttttgaacccaggttactaggtgtcatgcctgattccgatgaaaaggtgtttttgaaacaaggtccg

SEQ ID NO: 7766 - DNA, 622 bp, Setaria italica
  Peptide Sequence Number=SeqID_73740
atcaacatcctttttttttgtgtgtgtgtttccaattcctgcagctgttctgagggaacccctgagatttaaagtaagtaggtatggtgaaggttactttataggctgtgatcgacatccgaaatgcaaatacattgctcgctcattgtcacagcaagaagatgataccgaacccatagatgaaagtcctaagtcttttgaacccaggttactaggtgtcatgcctgattctgataaaaaggtgtttttgaaacaaggtccgtatggtcactatgtccaggttggagaggacaaaaagggactgtttccaaaaagggcttccctttctgaggagctcaaaacaactgttattgacctcttgtttcaggtcaaagatatagatactgtcactctagaagatgcaattgagctgttgcaatatcccaaaattctgggaaaacatcccgatgatgagcatcctgtacttataacacattctaaacttggatacaacatcaagcataggagatctcttgctgcagttccaaagaatatggatccgaaggagatcacgcttgagcgtgcactgaagcttctgagtggtaaaagtgtcagacagattggtcggccaaaggggaaagac

SEQ ID NO: 7767 - DNA, 1067 bp, Setaria italica
  Peptide Sequence Number=SeqID_73741
tagaaaggttaactttaattaaggtacttagttagaattacgaacatccgaaatgcaagtacattgctcgctcattgtcacagcaagaagatgataccgaacccatagatgaaagtcctaagtcttttgaacccaggttactaggtgtcatgcctgattctgatgaaaaggtgtttttgaaacaaggtccgtatggtcactatgtccagattggagaggacaaaaagggactgtatccaaaaagggcttccctttctgaggtcaaagatatagatactgtcactctagaagatgcaattgagctgttgcaatatcccaaaattctgggaaaacatcctgatgatgatcatcctgtacttataacacattctaaagttggatacaacatcaagcataggagatctcttgctgcagttccaaagaatatggacccgaaggagatcacgcttgagcatgcactgaagcttctgagtggtaaaagtgtcagacagattggtcggccaaaggggaaagctaaaaaaaaggaaccccttgaatggcattaatggagcctaaactcgttgcaaaatctgaaacgtgtgtgattgattgttgatcagttgtatccgtgcagaaaattcagagacggtcagcacaaagcatgagaagtcaatattcataccataaattggttcggccttcagcatggtcagcacaaggctctctgcgtgacaatgaagccggtcaacaagaacatgaactgcgcttcacaagctgccttacatttgatacctaatgctgggtttctccacactggccagggggctagggtgatacataactagtcaaattcaggtcatcttttcatttcatttttctcgtagtcgtcatcagaagttgtatagaagactatacactcataggctgaatttatacatgtttgcaagtcccaggctccctgctgcctacatttttgactgaaggtaaccgtcttaattcagaaaacacaaccatttgtaatgcaactttggtgtggccttacgggagctaggctgtctttttggtcttaacaaaaaaaaaaaaaaaaa

SEQ ID NO: 7768 - DNA, 745 bp, Setaria italica
  Peptide Sequence Number=SeqID_73742
tgagcctatattactatggcttgcaagatacgacggcatcctacgccatcatattcctgaatataattcccctgacaactttcatcctctccttcgtgctcagaatggaggcattgcacatcagaagcatgctaggattgcttaagattgctggggttttgctctctgtcgggggcacaatgatcatcagcctatacaagggaaagattttgcatctatggaaccctattcttcaccgccataatgaagaggatgtggatgttgcaagtcatcatctacgtggaacaatcttgttggcagccagcagcttcatgtttgcttgctggtatctaattcagtctaaggttctcaaggtgtatccatacaaatattggtcgtccatggccacgtgcttggttggagggtttcaaactgcacttgctggagttatactgagaagggacaagaacgcctggaagataggatgggatataaaccttgtgaccatcgtgtactcgggggcacttgcaactgcaggaaaatatagcttgaactcgtgggctgtggctaagaaaggcccgtcctaccctccaatgttcagcccattatctgtagtctttactgttgtcctgggctccatcttcataggtgacgacatcaccattggaagcctcattgggacaatactggtgattgtggggacatatgtcttcctctgggcgaaagcgaacgagctacctgaaaagtgaatatgtcaaatggttca

SEQ ID NO: 7769 - DNA, 626 bp, Setaria italica
  Peptide Sequence Number=SeqID_73743
tatctgcattgatatttttgtcccttgccccaaccaactcaagtaccatcattccataactataaacatcagatttgctgcttactgttccaaatcgttttgaatagacctcaggggcaatatagcctattgttcctcttgcaccgacaatggatatagcactctctttattcaggcatagcttggccaatccaaaatcagagatcttaggacagaaatcttgatctaatagaatgttgtggggcttgatatcaaaatgcacaatgcgagtattgcatcctcgatggagatattcaagccctctagcaatgccaattgctatttcaaataatttctcccaacttagtatattttcactgttgatgttggtgccgaaggtatacctttccaatgaaccattaggcatgtactcataaatgagagcccttttggatccttgcaaacaaaatcctagaagggtaacaacattgacatgagaagttctgctaatgctagccacctcattcataaattcctccccatcacccttgacgtcctttagcatctttactgctacctggccgccatcagagaggttacctttgtatacagcaccaaatccaccttggcctagcttaacagcaaaa

SEQ ID NO: 7770 - DNA, 283 bp, Setaria italica
  Peptide Sequence Number=SeqID_73744
acccagttttctcctgaagcagtggatgaaatcataaaagatacaaggcattcccaaagtcggagaccgacgagttggacgagaagcggggctggttgatggtgctggctacgctgacggcctccatcacttacagcgcggcgcttaacccacctggcggcgtgtggcaagctgatgatgccaccaatgggtatgttgctggcagccctgttctccttagcaaaccacccccatcggtataaggcattctactacttcaacgtcatgtccttcctggtatcag

SEQ ID NO: 7771 - DNA, 409 bp, Setaria italica
  Peptide Sequence Number=SeqID_73745
gtacgaagaaagtcgagaacacatccacacaactagctacctactactctactaagctcgcaatggcctcctccaagtccatagcctcccctgcgctggtgttcctcgccatggctctcatgctcgcggcctgtgcccaggccttggcaccagcaccaacaccagctccggcgccgtcgcaaggttcatgccctccaggcttcaaaagctacctcgacttgacagatttcattcgaggtgccggtcgaatggccatcacctttgtcgaccctgctttggtgcccgtggttcagagcatcctgaccctcatcccacacacaggcctcaagctatgtgtgtgcttcgagtcatgtcatctcccttccccatccaatgtgtgtcatactaagcatggaacaacaagcatgtg

SEQ ID NO: 7772 - DNA, 1397 bp, Setaria italica
  Peptide Sequence Number=SeqID_73746
cgccggtaccaccaacgccgacgccgagggccaaggccgagaacctcccacccgtttgacccgcgcaacaacagccatatatgcattgttcggcttgaagtccactattcatcatcaaatcatcaatttctgtaatctgtaattccgtacgctacagttctagatgtgtgcgtcgtatgagaatcgatgggtaaacagcagaagattgcaacatttgcagtgaagcttaacgcactttttttatcctatgtgcatgtttaacacacaacagctaagtatgcgtggaatcagatagccaggtgccgtcttcagctggagctgagaagggacttgaaccactgcaccgagttcttggggtatctcttgaggttgtccctgtagtccacgaagtagagcccgaatctcgaggtgtatccggcggcccactcccagttgtccagcagcgaccacgcgaagtacccacgcacgtcgcacccgtcctcctttatggaggcagcaaggttggtgaggtagtcgttgtggtacttgatcctcttgctgtccttgagggcgtccttgatggaagtgaaagggttgttgctgtcatccatcccgttttcagtgatgtaaactggtgggctattgtacctctccttgacatagttcatcagcttcctcatcccgctgggtacgatgtacagccatatcgaattggccctatctccaatcggcttcccgttcttgtcgaatggaaggctgatggttccagtgtcggccaaggtatcattcagcagtactccaatgatattggtatcgttatgcctcgtgtagaaagtggtgtagtggtttatgcccacaaagtccagagcccccttgacaagggcagcctcctctgccgtgaacttgggaagtctttctgcaacccgcgttctcatcgtcgccgggtaatcgccgaagaagaacggatccgcgaaccatcctaactgaaactcttgtgccctcttggtagcttcaatgtcaattgtgctatttgtcatcggttcataccagatgacgtcaaatgcaatcccaagctggccattctgagtagccttgtatttccttctgtaaatgtctgaaacggtggcatgagctaagatgaagttgtgagcaacaatgtagggctcagtgcctgaattccccgacttgcagtacagatggagcagcactgaacaacgccctggcgcgtgaagcccggcgtcatagccctgaacggcaacggtgtggggctcgttgatcgtgatccaggtgcttacaacacgatccccaaatgccttgaagcatgtctcagcataggccgcaaaatcattaactatctgcctgtccagccatccgttgtacctgtcttccagggcctgtgggaggtcccagtggtagag

SEQ ID NO: 7773 - DNA, 583 bp, Setaria italica
  Peptide Sequence Number=SeqID_73747
tcgatcaagccaacgccttgaccacaagcgggctcctcacgaactgcttcccgttcgtccagacgagcgcgccgaacgagtagtccttggcgagcgcggcgttcttcacctggaagctcacctcgaaccccttctcctcccccttggcgcggaactcgaggacgttgggtgtcaccgacacggcgacgccggcgggctcgacgacgaaggcccagtacgtgccgggcctgccgacgttcttgaccctgcgccgcgccgtggcacccgcggcggtgacgttgacgacggtgatggacgggtagttgaggtcggcgacgcggcggggcgcctcgccggggcacgtgtagggcgcgccgttgaacatggccatcactgtggcgttgtactttagcgcgcagaggaagtcgaggtagtcggcgtcgccgaggtcgtagacgaggccagggttcatggcgcgggccggggagacgtggccggcgccgtagccgaaggggctcgacggcaacgaggacgcgttcaggatcagctcccccttgttgtccatctccatcgcggtggtcatgatggccgacttgatcgcggg

SEQ ID NO: 7774 - DNA, 235 bp, Setaria italica
  Peptide Sequence Number=SeqID_73748
cgaaagttgactcttttctaaagatatgtcaaatccttgggttagctggaattgatctgtttaccccttctgatgtggttgaaaaagaaatgttcggaaagtctgtataccccttctgatgtggttgaaaaaagaaatgttcggaaagtctgtatatgcatccgatcagtatctaaaaagtctcacatgatgcgcctaaatgtccctgattttgatattgtgtaggtgactatat

SEQ ID NO: 7775 - DNA, 698 bp, Setaria italica
  misc_feature (31)..(31): n is a, c, g, or t
  Peptide Sequence Number=SeqID_73749
cggcggggcgcacgaggatctgagctggagnaccctcgggaagcgggcggcgccccttgacgtgatagtcggcgatcgaggagggggagtggggatgaggagggcgcagcagcagggaggaccggcgggggcggtgcgcgtggatgaggcgtcgtccgcgtccaccttccgcgagctcgacgacgccttcctgcagaaacaaacaaaaatctggcttggcgaagttcttcatcttaggtttgatgaagacgttttagttgctgaccttcttgcttatggagaattactgtttcaagtttccaaagtactatggaaaaggttactgaaaaagaacagagagcaactgaagcaatcaaaagtgtatatttatgagagactatcctttggcaggagcaatggaaagtacatgccctattcgaaagttgactcttttctaaagatatgtcaaatccttgggttagctggaattgatctgtttaccccttctgatgtggttgaaaaagaatgttcggaaagtctgtatatgcatccgatcagtatctaaaaagtctcacatgatgcgcctaaatgtccctgattttgatatagtcacctacacaatatccatgcccaactatattgttggaggtatctgtagaagtctggagcagccacaatacagttcttccggttcaagtggatacagtccagtgacagtt

SEQ ID NO: 7776 - DNA, 802 bp, Setaria italica
  Peptide Sequence Number=SeqID_73750
caccattttctacggagggaaggtgctggtgttcaacgacttccccgccgacaaggcaaaggacctgatgcagctggccagcaagggcagcccagtggttcaaaacgttggtttgcctcagccctctgcacctgcaactgtcaccgacaacgcgaaggtccacaaggtcatgcctgctcctgtgagcagcttgcctgttgctcaggctgctgatgcccagaagcctgctcgaacaaatgcttctggtacttgaccctttcttcctgttgttactgttggttcattttcattgaagcttcaaaatacagattgccgaactttgtcatgtttattattcaccaaaaccgttgctttctcttgctgcagacatgcctattgctaggaaggcatcacttcaccgcttccttgagaagagaaaggatcggtaagcagctaatttgctgtgattgtcctcttataatatgttcaatctctttttaccagccttgtatttgaatctaatttttatctttcttattgttcttcagcctcaacgcaaagacaccataccaaacttctcctgccgatgcagcaccagtcaagaaggagcctgagagccagccatggcttggactagggccgaatgccgcgaagtccaacctgagctagcgcaaaactcagaccaataagatggcatggcaacctcaccaaaccttcgcataacgttccgaatatgcttgccattagagtactgaaatcataaatattctctcgttatggtgttgttttagctttttctttaggtcattgttctacgccctct

SEQ ID NO: 7777 - DNA, 266 bp, Setaria italica
  Peptide Sequence Number=SeqID_73751
ctgggcgcggagttggaggctgcggcggggagattttgcttgagggaggtggaggaaggaggagagaggccggcgatggcggcgtccgcgaggcccggggagaaggcgacaagcttcgccatggcgtgcagcctcctcagccgcttcgtccgccagaacggccccgcggccgccgagctcggcctcgggatgaaaggttagcgccgcaccgccggtcagggtttagctgttacagctggttgcttttgagctgagacacgggggaa

SEQ ID NO: 7778 - DNA, 483 bp, Setaria italica
  Peptide Sequence Number=SeqID_73752
tgttggtttctaaaacgtttggttttgtccttctagtcccttcttgtctaccttgtctaacttgttctaccgactaacgcgaaggtccacaaggtcatgcctgctcctgtgagcagcttgcctgttgctcaggctgctgatgcccagaagcctgctcgaacaaatgcttctgacatgcctattgctaggaaggcatcacttcaccgcttccttgagaagagaaaggatcgcctcaacgcaaagacaccataccaaacttctcctgccgatgcagcaccagtcaagaaggagcctgagagccagccatggcttggactagggccgaatgccgcgaagtccaacctgagctagcgcaaaactcagaccaataagatggcatggcaacctcaccaaaccttcgcataacgttccgaatatgcttgccattagagtactgaaatcataaatattctaatggcaagcatactcagaccaataagatgg

SEQ ID NO: 7779 - DNA, 658 bp, Setaria italica
  Peptide Sequence Number=SeqID_73753
gtgttttaaccaggaaaaaaggggtagtgtacttggtagtgaagacatattaggccatggatgcaaaactgaagtagcgatgtagtacatgcatgttcttagtgttcctctgtgtaattattctcagggaaccagaaaagaaagacaaatctcagcaactcaccattttctacggagggaaggtgctggtgttcaacgacttccccgccgacaaggcaaaggacctgatgcagctggccagcaagggcagcccagtggttcaaaacgttgggttgcctcagccctctgcacctgcaactgtcaccgacaacgcgaaggtccacaaggtcatgcctgctcctgtgagcagcttgcctgttgctcaggctgctgatgcccagaagcctgctcgaacaaatgcttctgacatgcctattgctaggaaggcatcacttcaccgcttccttgagaagagaaaggatcgcctcaacgcaaagacaccataccaaacttctcctgccgatgcagcaccagtcaagaaggagcctgagagccagccatggcttggactagggccgaatgccgcgaagtccaacctgagctagcgcaaaactcagaaccaaataaagaataggacaataggacaaacctacaaccaaaaccttacgacaataaacga

SEQ ID NO: 7780 - DNA, 1695 bp, Setaria italica
  Peptide Sequence Number=SeqID_73754
tgataattcaattcccgtggtttttaatcgcgggggatttggattgattacggccggaaaacggaggggcttctttataagcgcgtgcggccgcggcgtgctcacacgagctcgcgcttgcatctcgcgcacgagaccgaggggaagagagagggagagggagaggtgaaccaccgccgaggagaataagcacgagctgggcgcggagttggaggctgcggcggggagattttgcttgagggaggtggaggaaggaggagagaggccggcgatggcggcgtccgcgaggcccggggagaaggcgacaagcttcgccatggcgtgcagcctcctcagccgcttcgtccgccagaacggccccgcggccgccgagctcggcctcgggatgaaaggtgaggccgagccgcagagggcgccggcgacgatgagcttgctgcctacagcggaggccgaggaggcggagaggaagaaggagaccatggagctgttcccgcagagcgccgggttcggcgtgcaggatgctgctagggaaccagaaaagaaagacaaatctcagcaactcaccattttctacggagggaaggtgctggtgttcaacgacttccccgccgacaaggcaaaggacctgatgcagctggccagcaagggcagcccagtggttcaaaacgttggtttgcctcagccctctgcacctgcaactgtcaccgacaacgcgaaggtccacaaggtcatgcctgctcctgtgagcagcttgcctgttgctcaggctgctgatgcccagaagcctgctcgaacaaatgcttctgacatgcctattgctaggaaggcatcacttcaccgcttccttgagaagagaaaggatcgcctcaacgcaaagacaccataccaaacttctcctgccgatgcagcaccagtcaagaaggagcctgagagccagccatggcttggactagggccgaatgccgcgaagtccaacctgagctagcgcaaaactcagaccaataagatggcatggcaacctcaccaaaccttcgcataacgttccgaatatgcttgccattagagtactgaaatcataaatattctctcgttatggtgttgttttagctttttctttaggtcattgttctacgccctcttgtcacatagttctgttggtcttctggatgtaaagaaaaagtagccagtcatgaccattaccgagagtccgagagaagttttgggttgttaacacacggcgactctgaattggccatgctaagtaaaatgatagtgcaaatagacctttatgtatttttctgaaacctggattgtttggctctagccttgatgtatgaagaacaagtgattgtaatggatccagagtatcataagattaatattgttgttttctgataacaaaaaaaaattgtcaagcttgtttggattcttgttacaactgctgttgcaaatctgtggtagtttccggtaactggagcaatctagtgatgtaaaactacatataagtaattcatggtgtttttttatgtttctgttgaactattacatatgcttctccaattatagggcttgctgcaataataataataataataataataaaaaataataatgaaacatgatatcataatactacgcaatcagtggtacatttgaatagactactaaaaaacaactaagtaagtaaaataccca

SEQ ID NO: 7781 - DNA, 283 bp, Setaria italica
  Peptide Sequence Number=SeqID_73755
tcgtggtgcgcggggccaaccgcgcgccagaggagccgctgcgccgtggcgtaggatgcccaccacgcggcgctggacggcgcgtaggtcagcaccgagacgccgaagcctcggtacagaccgcgcacgccgtcggcgaccaagatcttccggaacgcgtcggcgccgccgcggtagtgggcggcggcgggcgcgggtgcggtctgaaccatgaggcgctggctgacgacatcgactggggtccagacgacctgcgccgcgacggcggcggagacgccgcccg

SEQ ID NO: 7782 - DNA, 753 bp, Setaria italica
  Peptide Sequence Number=SeqID_73756
ttccacgccgcgctctgctgccgagccctctagccccgagccccgacatcccgacgaccgccgccgggcatcctagaccctacggccctcgaatcgaggagctgtcgctcggaatcgaagccaggccgcacgaatcgaggatcccccagcctccaatcgatgacgtgccgcacgaattgaggagtcgcagccccaaatcgacggcggccacccagaatcgatcccgcgccacacggatcgatgcacccctgcctcgaatcgacaagctgcctcatcgagatgacgccgagctctctgaatcgacgacgagttgcgggcctgcggcggtccggcggaaagagaggtgctgtagttgcgcggatgcagagttgcaggcctgcggacgtcggggaagtgcagtgggcggcgatggaggcttgagatggtagtgcgggaagctaatttgccaaacggtgaacttttttggctggagcttttcgaccaaggagctgcagagggaagctaaacaaaaagctacttctgcttaattttaagctgcgccaaacggggcccatcagcctctctccgttcccggttccaactactgacataccctctccacaccgtcaaatctcccagcgtaggcagacctgcgttgtgcgtctagtttattgcccccatcatggtttcaccgtggctgatggtgatgttcttcttcacagtggctgccatggcgacggcagcacttggtaccttagtcttgtaccttacgta

SEQ ID NO: 7783 - DNA, 285 bp, Setaria italica
  Peptide Sequence Number=SeqID_73757
ggcctctcgcagggcgtgctgcccagcaggcgcgccgccagcagggctaggacggccgtcgtcagggcgtccgccgacggcgaggccggccgccgcgccgtgctcgggctggtggccaccggcatcgtcggcagcgtcttctcccaggcggcgcacgccgaggccgtcaagaccatcaagatcggccccccgccgccgccctccggtggacttcccgggaccttgaactctgaccaggccagggacttcgacctcgccttgaaggagcggttctacctgcagccg

SEQ ID NO: 7784 - DNA, 755 bp, Setaria italica
  misc_feature (687)..(755): n is a, c, g, or t
  Peptide Sequence Number=SeqID_73758
gaatgaagagagagaactgcacaacgattccacgccgaagcgtagagcgcagcagaggacgcgagaaggggcggcgagttcttgaatcctctctctccgctgctgagcctgctcatcaacccggcatggatgcaaagaacgtaggcaatgaacaagaagctcaacaaaagcttgatgcggtgacaggcagtgttccaagacctaatcaagagaccttgaaacagttcgcagattcagacgctggaaacatcagtccagcaaatggccaggaagctgacgtgaacatggaagctgccatctccaccgaggacgtcatgcgagctggcgggtttggagcaaaagatgacattggcagcctcctcccaacagctattgattcgacagatttcgaggcctcgctgcgggacgcccgcgacttcgaaggtgagaaagaggcaccatcacatcctggactgggctggaagggggagaaagctgatgatggtagcaaaccatcagatgtgccgcagcagttaccatgatatcttaccttgtaggctagtccagcttcagcttcagaaaacatttgctgatcacgtttatgtacgttgttcccaagagctgctgtacgtttgaactttttgccacaatgttatgtgtgtagcattctgctgtttcagactatcagtgctgtgtgatcatgaaggnnnnnnnnnnnnnnnnnnnnnnnnnnnnnnnnnnnnnnnnnnnnnnnnnnnnnnnnnnnnnnnnnnnnn

SEQ ID NO: 7785 - DNA, 1040 bp, Setaria italica
  Peptide Sequence Number=SeqID_73759
acgttttcttgacttgatgattttgcaccctgcttatattttggaaagaatcaaatttgtccctttcctttttttaatatcatttacattacatatatggtatgaacgtataccataggatcctacatataacgaaaattcaactaaatatattgagatcaagaaaccatctcctctgttgccatcttgttgcgcagctaaaatccccactttgttctgaccgatgccggcttgcccctggctggctcccgctgctcatggtgtttctgttctttcactgcaacgtcgccatgatctgcctcgtcctccggcaggatctcaatctctgaactgtaattccgcgcatgtccaatcttctcagatgtctttccatcaagcatctcaccttctttcttgctctcatcatccatccgcgtggttccagtcttccccctgtcgcctggccccctggactccccacgcgagagctccatggctgccttcgcggcggctgcggccgaggcggccgactcgaacgcggcctgcgccgccgcttccacgtccttgtacctctgcgccgagtcgccagagacgtcttcgtccaggtcatcagctggtggcatcctgatcatctcttcgtcgtgcttcgtcttcctgcggttgtggttggagcgtccggagccctcgcagggtggtggctcgtagacgctcacggcgaaccctttctctgcggcgatctcctggagcaccatctgccggctctcgaggctcggctgcttggtcgacagcttctgcacgatcttggggttgatcccgcatccgctgcggagctcggaggcggcggagacgaacccccttccgaacttggcggcaaggatgccccgtacctcctgcagctccggcaggtccccgcaccttgcggcggcgtacacgagccccgccgccgcctcccgcagctcctcggggcactccctgtgcgcatcgacgagcgccgcccgctcgacgatgaggccgcagtaggcctcgagctcggcgagcacgtcgagcgcgttctgctaccc

SEQ ID NO: 7786 - DNA, 472 bp, Setaria italica
  Peptide Sequence Number=SeqID_73760
cgcagggcaccgcggcggccatggcctcgcagtgggcgtggtagaagacggtggccggggagaagaggacgaagccgccgccgtggaagaagagcacgacggggagcttgttgttgttgctggtggcgggggaggtcggcggcgggacggggttgggcaggtacaggcggaggtacgtgccgagcgaggcgtcgagcggcacgtcccgggagacggcggctgctgcggactcggaggccgggacgagcgggacctcgggccgcgtcaccgtgccgtccgggttgacggcgatccgcatgaagaggttgttctccttggtcagcgccggcggcggggccggggcgtcggcggcgggtgtggcggcgtccgtgatgtcgcccatggcgattcctctgatcctctcggcttgctctgtgcgcgtgtgtttcttctgccttgtggtggtggcctggtggggactgcggtgcggctc

SEQ ID NO: 7787 - DNA, 1159 bp, Setaria italica
  Peptide Sequence Number=SeqID_73761
caaagtttgcatagcacaacatatttctcaagctaagggtttatacatgctacaaaacagctctgtgctatgcaagaacaattaatttgagccgccgatcagaaaaagggagaacatctatttctagctgacaaactgaacagtgcaagcgcaatgaagccacgtttcaatccaattccatcgcattatcctgaatgctgcttctgcatgaccaaatctttattgtacgatcatgcgccacagtcacgatttgctgtccatctccactaatatccaaactagtaaccttcgactcatggcccaccaaacttttgattggtttgtaatcccgagctgaccacagagctgctttggtgtcatacgaagaagttgctaaataatacccttcttggggttcaaacttcacctgtgaaacaagactcttatgagctggtatagaatataacatttcctttttcctcaaatcccatattcggcagaaattgtcttcacttccagttgctactagataaccattaggagagaagctgattcctaggacaggtttcacatgccccttaagggtgaagaacaatcttcccgatctcagatcccacactcgagcatatgcatcaagactgcaagatgccaccaaagaaccatctgggtgaaagctaactccataaacacttctgctgtgcccctcttgaaggagcagttcctttccagtattgatgtcccacaatctccaagtcttgtcaaagctagctgtaccaaggtactttccagatgggtgaaaagcaacgcgagcaagacgatcaaggtgaccatcaaaggacattagaagtgatccatccggtttccataattttgcagttttatcagctgaagctgttgctaagcagtcatcagctggagaaaaggcaacatcagttgctcgttctgtatgacctttcagggttgcaactttagttatttgtggcatgctccatattttgattaatccactccaggaactggtggcaagcagtgatgcatcccgggagaaggagcagccggtgagcgggcgatcatctccaatctcgctgcactcgagcacaaactccccagcctgcttcacgacaaggtcggcctccgcctccggatcctcatcgggatcctcgtggcggcgcttggccct

SEQ ID NO: 7788 - DNA, 836 bp, Setaria italica
  misc_feature (733)..(836): n is a, c, g, or t
  Peptide Sequence Number=SeqID_73762
gaagaagagaaatactccctccactcgaggtagtacaagttctctctccatcaaccgcttctcttttccacctcgattcgccgtctccgctcttatccccgctgtgccctgtgcctttcctctccgtcgtcgtcttcgtcgtctcctcccacccgcaaccgcaggacttttcccagcggatcgggacctctgctccgcgcaatccatccatggcggaggaatcaggtcgccccttgcctaagtttggtgaatgggatgtgaacgacccagcttctgctgatggattcacagtgatattcaacaaagccagagatgagaagaagggtgggaatggacaagagaccgagtctccttcgaaggacaccaggaccgagagggtggaatcttatgccgccaagccaaactcgaagaaatggttttgctgcgtgacatccagccccacacaatcttgaggaagacaaccacccgcttgcggaaatactgcccctttaattttttctatacatactatccataagacaatgtagggatacccagggctctccgggctccaggatgggtatctcgtaaaactctggagtgcgtgtatgtatgtgtgggtgttgtcgacacacatttgcaaagtggacttccgagttatgaattgtaattgtagtcctccatcagtcttatccttgttggtctcgctacctcagtgatgcgaatggatatgtggtctgtggattggtaaagnnnnnnnnnnnnnnnnnnnnnnnnnnnnnnnnnnnnnnnnnnnnnnnnnnnnnnnnnnnnnnnnnnnnnnnnnnnnnnnnnnnnnnnnnnnnnnnnnnnnnnnn

SEQ ID NO: 7789 - DNA, 1252 bp, Setaria italica
  Peptide Sequence Number=SeqID_73763
ggcagcaggcctatcttccagctcgggaatcccatcctcggccgggccatggcgcgcctgctgctcttcccgtcgcaagcgtgggtcgatcccggccgcctcctcctccgcccggcggcaccctcttcggtcgccaagccttccgcgcactgccatcacggaggtcgcgtcttcatagctcgcgccgctgagcgcgcctccgtgactactcccgccggagctcgccgcctcggggtcctccccgctgtccgccgccgtcctcttccttccctctgctggaaggagggcgcttctcttggcatatcaccaacgagaggagtcattttagcttcagaaatagaagaagctttctgtctctcttcagacaaggataatagaagcagcaggaatttgcttctgcaattcggtgcacttccatgttgcactatggtatggttgagtactgcacaatcagcacagtccagtgtgggaacaaaattaaatatggtgtatgaggtcggtgagctgtttgagctgggaattcagctgtcgtatcttctcatactacttggcctgcttggagctggtacattttttgttattcgtcaggttctcgttcgcagagagcttgatctttctgccaaagagctgcaagaacaagtgagaagtggtgatgcaagcgctactgagtattttgagcttggagcagttatgctacggagaaaattttatccagccgctatcaaatatctgcagcaagcaattgacaaatgggatagagatgagcaagatcttgcacaggtgtacaatgccctgggggtcagttacaagcgagataacaaactggacatggcaatcaagcagtttgagaaggccgtggagctccagccaggctatgtgacggcttggaataacctaggcgacgcgtatgagctgaagaaagacctgaagtcggccctcaaggcctttgaggaggtcctcctctttgatcccaacaacaaggttgcaaggccgcgcgtggatgacctccggcaacgcgccaacatgtacaagggcgtgcccataaaatctgaaaagcgatagctatatcccatggcagaatagcacttgttcaatttttgaacggtagcatttgtaaacatgatgaggagttgtagtagcattggaatggcccctgaaaataggcggatgtaatatgtttctcttgctggaccaaaagatgcagaatgtagtgttcttttacaaagtaaaaaaaaaaaaaaaaaaactaaaa

SEQ ID NO: 7790 - DNA, 390 bp, Setaria italica
  misc_feature (74)..(74): n is a, c, g, or t
  Peptide Sequence Number=SeqID_73764
tagttactaatactacaatgtatttcaaataacaaaagttaattatagatcatattaatcaggaattatctcangttttgcaagtatgtgctgcgggaattcgaggacggagggggaaataggaggaactgagcaatttggagcatggggttgtgatttgtagaggatacgggcagctaattggacaatcttggtccatgtaagacctagctgccctcaccggatccgcacgagtggacctgcatggaacaacgcacaggacctagggagctccggatgccaccagacccatggcgccgccaccaggaggccccgccgtccacatcgtgccgccacctagaggtactccgggccggagcagggagagaaccgatgagctccgtggggtga

SEQ ID NO: 7791 - DNA, 356 bp, Setaria italica
  Peptide Sequence Number=SeqID_73765
tacgggtctagcttaattggacaatcttggtccatgtaagacctagctgcgacagagaggaacagggtaagagaatgagcagtttagggatctcaccaatgaaaaaacgcccgatgaggagatcgtagcagggagctaccgtacctgccctcactggatccgcacgagtggacctgcatggaacaacgcacgtgaactagggagctccggatgcctgtcgatcagcactggtcttgatctggtgtaccaatccctgtcgtggccaaccgaccggcttccggtgaaacccttaccaaaggctccctcccctcatactgacggaatcacggaagtaccggaaaacatcctgagatagg

SEQ ID NO: 7792 - DNA, 348 bp, Setaria italica
  Peptide Sequence Number=SeqID_73766
tatttatcactattttgtaggccaggaccaaccccttataaagttttgcaataatcgtgatcacttgtgttgcctcaacgccacaaagcagaaagtgcttctgttagatgcagagtttgacagcgcatgctactgcttgtgcttgaaattcttcagtaagactccactcgctctagattgttaccaatgaaaaaacgcccgatgaggagatcgtagcagggagctactgtacctgccctcaccggatccgcacgagtggacctgcatggaacaacgcacaggacctagggagctccggatgccaccagacccatggcgccgccaccaggacggcccccgccgtccaca

SEQ ID NO: 7793 - DNA, 274 bp, Setaria italica
  Peptide Sequence Number=SeqID_73767
tttttttaaacagaatagcaagaattgcaaatttagcccttcaaaacagaccatgtttgcaaaatactatatgtcagctaatcaaactatggatcagtagccaaacttcacccagaaattacaaatgtagaacaattagagcatgcaatgaacattgtaacgtgtaaaaagaaccggcaagccttgcacttgcaaacgctgcaccgcgcaagacaccctgaggagaacaagcttctgattctttcatacaagatagacaatggctcgcagagag

SEQ ID NO: 7794 - DNA, 308 bp, Setaria italica
  Peptide Sequence Number=SeqID_73768
cgctcacctgcttgtcatgtccactagactataacatccactctcgccatcgaaccaacagcttgtgcatcaccatggatgtccactatgagtttcaaatgcaatgcgccatcggactcaatgaaaaaacgcctgatgaggagatcgtagcagggagctaccggacctgccctcaccggatccgcacgagtggacctgcatggaacaacgcacggaacctagggagctccggatgccaccagacccacggcgccgcaaccaggaggaggccccgccgtccacatcgtgccgccacctagaggtgctcc

SEQ ID NO: 7795 - DNA, 1491 bp, Setaria italica
  Peptide Sequence Number=SeqID_73769
agcgcatgatactgcttgtgcttgtaattcttcagcaaaaattcactcgctctagattgttacctggaaggaaggatactgcaaagtcttctgtcaaaatatcacagctttgcctcctgtgcattttgtcaaacacatcacaggcatggcggatgtgctcccttggacaagctggtgctgatcttagtgcagcagagccaccagattccatccctagaagaattttctgcagacgaattgggtttcatggccgtgctgccacggccgccgccaagtaagctgaaaatcactgtcctgcactactgctcgccgctgtcctgtccctacctgagctcgagaaacctgaacccgcccatgagtacatccaccatgctactaatgaaccaatggaaatcaggtactgcatgtcgatcggtctctgatctgcatgtagaagacggaaattaagtagtaagaacaaaattgatattgcaaattggatgagaaatgaatttctgcaccactatatgacacaggaagttgcagtctgccgaaaagaataagatcagaataaagtcagaagataacattggttttccacaccctggtgtgctgtactatgctgtatatatactccatagctcagagaaagactgaggtagacaagattcttctgctcatgacagggggaaaaactcatggcaacaactgctggatgtacataaacattaaggatcggattgatcagtgcctctatagcactaaaccctggaactgagctcaattagatgtatatctttgatttaacatgtacaacaaaattgataaatcctaattagtttcagtcatactactgaaatagatgtacattaagttttaatcaattagccgaacccagagaaatagaggtttcaaacaaaatacctggtccagctcaattgacacttgcaggtcataaaaacaagaatcccatcatctgggtaacaatacaagctttggcgcacccagccacggtgcacgttatcaagggagcaatctatatttataaagctgattcaagctaagaaatgaaggatttggttggattcatatgagaggaccctgaaattcatacaatgactattgggaagaaatgataagcgccttcagttaggaatcaagcttttctcagcctcctttagccttctttctgattagtgcatcaaatttggaatttgcgaaaatgattggcaatcccaaagacacatgaacaggtgcatggatatcacctcccctgaactcatgggataaatgaattatcatcagcaccgtgcaccatataatctcaactgctgagggaattaatccagcttctccgtatagcataaccagaaaaaacagccttgccattaacaaatagttatatcataccagattttttattggttaacaattaactatatcctaccagcattcccactgtcaaaggtgaatttaattagaggtagtagtcacaaacaaaatctataaaac

SEQ ID NO: 7796 - DNA, 330 bp, Setaria italica
  Peptide Sequence Number=SeqID_73770
ataatcgtgatcacttgtgttgcctcaacgccacaaagcagaaagtgcttctgttagatgcagagtttgacagcgcatgctactgcttgtgcttgaaattcttcagtaagactccactcgctctagattgttaccaatgaaaacgcccgatgaggagtacgtatgccctcaccggatccgcacgagtggacctgcatggaacaacgcacaggacctagggagctccggatgccaccagacccatggcgccgccaccaggaggccccgccgtccacatcgtgccgccacctagaggtactccgggccggagcagggagagaaccgattgta

SEQ ID NO: 7797 - DNA, 566 bp, Setaria italica
  Peptide Sequence Number=SeqID_73771
ggccaggaccaaccccttataaagttttgcaacaatagtgatcacttgtgttgcctcaatgccacaaagcagaaagtgcttctgttggctgcaaagtttgacagcgcatgatactgcttgtgcttgtaattcttcagcaaaaattcactcgctctagattgttacctgtaagataaaacaaggcatattgatcaggcaaactagtatcatgaaccacaatcgttagaagatcaaagcttcagaatatttaaaattatttgcaaagtacattgatccaaatatattaattcatacaaggcaatcaacccaaccaggtctgcacctaggaccaaatttggattggcaaatctgatcgtatcagtcaccggcagtaagaagcaccgcctcctgtgcattaagggaaaggaagatcatgcctggaaggaaggatactgcaaagtcttctgtcaaaatatcacagctttgcctcctgtgcattttgtcaaacacatcacaggcatggcggatgtgctcccttggacaagctggtgctgatcttagtgcagcagagccaccagattccatcc

SEQ ID NO: 7798 - DNA, 418 bp, Setaria italica
  Peptide Sequence Number=SeqID_73772
gtgtcttaatcagaagcagaccatagtgagctcgtcgcaatctctgttagtgtattcgttcctgaagtttgcttgtgacctcgttgtactcactgccgcccgagcttgcaatagaacatgataacaaaaggttgcgtataacaatgtcacatgtggatagaaaagcttctatgattgtgtaattgtaaataatgaaatataggtgcagaaaccttgctacattccaattgaagtgagtgaatccttgcaactgaaataacctcgccacaagtggtgtcatgtctgactctgagaataaaaattcaattatatgcaatgtagtataaccataaattatatatcactggaaaaacatcaagaatcaagataggttccttgtggcaaatagtggcatatttacatgtaaaatcttgctatc

SEQ ID NO: 7799 - DNA, 2913 bp, Setaria italica
  Peptide Sequence Number=SeqID_73773
aaataccaaataataattaaactacaataacaaagacttaaggacaaatacaaaacccaaaccaagttttggcaaaactgccggatattttttggtcaaagttaagatacagatatctaatcagaagtagtacagtgtttgggcccaagagttaatcaaacattggatcagtaaccaaacttcaccaagaaattacaaatgtagaacaattagagcatgcaatgaacattacaatgtgtaaaaagaaccagcaagccttgcacttgcaaacgctgcaccgcgcaagacaccctgaggagaacaagcttctgattctttcatacaagatagacaatggatcgcagagagtattatcactattttgaggccaggaccaaccccttataaagttttgcaataatcgtgatcacttgtgttgcctcaacgccacaaagcagaaagtgcttctgttagatgcagagtttgacagcgcatgctactgcttgtgcttgaaattcttcagtaagactccactcgctctagattgttacctgtaagataaacaaggcatattgatcaggcaaactagtatcatgaaccacaatggttagaagatcgaagcttctgaatatttaaaattatttgcaaagtatattgatccaaatatattaattcatacaagcttaggcaatcaacccaaccagattcttctggtcatgacagggggaaaaactcatggcaacaactgctggatgtacataaacattaaggatgggattgatcagtgcttctccatagcactgaaccctggaattgagctcaattagatgtatatctttgatttaacatgtgcaaaaaaattgataaatcctaattagtttcagttgcacaaaacgcatatcaaaatcaaccacatctcgatttccactcataatctgaccatgcacatactaccaatccagtccatttagatgcaaaagctaggaagcctctactactgaaatagatgtatacatgtaatttgtatattactgggagatttcatcggagcattacaattgaagtagctacttagctaggatgtacacaggtgtaaaaaagggactaggcagcacatctaggttgtatcaattgcagtatcatagaacatcaaatttttatcaatcagccgaacccagagaaataaaggtttcaaacaaaatacctggtccagctcaattgacacttgcaggtcatagaaacaagaatcccatcatctgggtaacaatacaagctttggcgcacccacccacgatgcacgttatcaagggagcaatctatatttatgaagctgattcaagctaagaaatgaaggatttggttggattcatatgagaggaccctgaaattcatacaatgactattgggaagaaatgataagcgccttcagttaggaatcaagcttttctcagcctccgttagccttctttctgattagtgcatcaaatttggaatttgcgaaacaaatgattggcaatcctaaagacacatgaacaggtgcatgaattatcatcagcaccgtgcaccatataatctcaactgctgagggaattaatccagcttctccgtatagcataaccagaaaaaaacagcattgccattaacaaatagttatatcataccagattttttattggttaacaattaagtacatcctaccagcattcccacggtcaaaggtgaatttaattagaggtagtagtcacaaacaaaatctataaaacaatatggttcagaagtcggaaggggcaaggagtcataaaaatacaagaacaatttttgttcccactaggaagatctgaactcaatcagggggtatcgtacttgacctcttttattaaactgtcaactaaaaatgatagttaagggaaaatcgatagaatataatcagttcaaagtacatgagcatgagcagagcatccagtgttttgagtacgtcaagatcacaattccgtgctcacagttgccattgccagagctgtcaaggacatgggatttatacaaaacagagtacaatactacaatgtatttcaaataacaaaagttaattatagatcatattaatcaggaattatctcatgtttttgcaagtatgtgctgcgggaattcgaggacattacagaggtatgtatccctgccttgaggtcatatcatgtcaaatgaaaattttgtataataggaaagatacatgactaacagatggccatacaagatggaatcatgtactaaaaagggggtatgctatcatttggagaaaccctaaccacttgataactggagtattcacaacttgcgggatttattcatctacatattggagggggaaataggaggaactgagcaatttggcgcatggggttgtgatttgtagaggatacgggcagctaattggacaatcttggtccatgtaagacctagctgcgacagagaggaacagggtaagagaatgagcaatttagggatctcaccaatgaaaaaacgcccgatgaggagatcgtagcagggagctactgtacctgccctcaccggatccgcacgagtggacctgcatggaacaacgcacaggacctagggagctccggatgccaccagacccatggcgccgccaccaggaggccccgccgtccacatcgtgccgccacctagaggtactccgggccggagcagggagagaaccgatgagctcctggggtggatctagcattgtagaactagctcctgccggctgccgccatgcagcacccggcgaatcttgccgccgtcgcctcagataaattgagggtgggcatgagacggaatcacagaatcgccgaatcagggaaaagcgagtggcggcggcgggtggcgagtgggaggcgagaaccgggcacgcggggcggcgggtggcgagtgggg

SEQ ID NO: 7800 - DNA, 1464 bp, Setaria italica
  Peptide Sequence Number=SeqID_73774
ccatcaggcacgagtacttacatctaagatgcagcagcacatgtgcacccaaataaatctgaaaaagaaaagcatataaaataatcaaaaactccattgaggattagtcagacttgtgatactgaacaagtagattattttaaagcataatgcttagcagaaagatatatgtacgactgcatataagatggtccatttgacataacgaaattagaaaagtttcggatatcagaaaggtttatgaatcattgtgacatatagtgacaacttgctaacctaaactaaaaatggagcagacatgcatttccacatacgaatcttacagctgaaaatggagtaagtaaaaaatcaatcctactttatattatccattgtccattttgcacttcaactggtcggaaacacaaaaacagagcatcaagaataccagatcaaaaaatccataatgttcttcctggaaagcaaaacattagtgcttctagttcaaaataaagctttgtgtgcttctaatagcatattttctgattagcacctcaaattaaaaattagagcaaaatgatcgatcgtctctaaaaatgacaggagcgtggatgtgcattacaccaaggttgcatataacgatgtcacatgtggatagaaaagtttctatgattgtgtaattgtaaataatgaaatataggtgcagaaaccttgctacattccaattgaagtgagtgaatcgttgcaactgaaataacctcgccacaagtggtgtcatgtctgactctaagaataaaaattcaattatatgcaaaaagcttatcctgcaaacatccagggtatcatatagtgatgacgatagaaaacaattaggtgtatatatattttttcttttgaggaagaattaggtgtatatctttgatacaacttgtacatcaaaagtgatacctaatcagtttcagttgaactaatcacaaataaaaatcaaccatgtctggatttccgatcgtaatctgaccatgcacatacaactggttcagtccatttagatgcgaagctaaaaagcctcgactagagaaatacatatgaaaggcaacctacctgcaaaatccctcaaacagcaatgtagctgccactgaagcaaagtatcaacactctgaactagtaatcaataaaaactattaatccccaaaaacaatggattcacaggttccacaacctcaggccatggcacgtccaataaaaatttagtaccatggttatgcaagatggatcacatactaaaaaataggatattgatataatttgaagatatactaattactagtttactggattagtctcaaattgtggatttttcatccaccgacacacgttagaatcaatcaaccactatgatcaggcaacctgtaagataaacaaggcatattgatcaggcaaacaagtatcatgaaccacaatggttagaagataaaagcttctgaa

SEQ ID NO: 7801 - DNA, 308 bp, Setaria italica
  Peptide Sequence Number=SeqID_73775
ccacagccagataccatgaactctgggagctttatgacgagtcaacaaggcttattttcgagtgcagggacaaggttctcgtcattcccggctccaaggccggaggcgagctggtctggggtcatcaagtccgaggacagctcatactacacgcaccaccaggtcctcagcgccaggccgcacttcgccggctcggcggcggcggcctactccaaggaagggcggcgcttcccgttcctccaggacggcgaccaggtcagcttcggcgctggcgcggcggcggcggcgctcgaggcctccacggcgtg

SEQ ID NO: 7802 - DNA, 232 bp, Setaria italica
  Peptide Sequence Number=SeqID_73776
ttgacattcacttacctatttattttcaagtaacctagctaatcttccaagttggttatatacatgaatctgattaatatgccttcaaatctagagtacacgctgcatcaatgaaaaaggggacacacatttcacgtacaactgtcgtacaaccatgtgttgaagccatccattcatttcacatcgatgaagacacaatgcctttaatgggttgtgcctgagaaatgcaaat

SEQ ID NO: 7803 - DNA, 388 bp, Setaria italica
  Peptide Sequence Number=SeqID_73777
caagaaaagaaaagaagaaaggcagatgtcatcagcatccacaaaaataatcagcaaagagagccgaagccaccaccgccaggtgtgaaaatctgaagaacatcaccagcactaactgttacagtgttctttcctccaaggtaaatctttctgccatctttcctgaccagatagttttgcaccacgagcaccgtgtgcacctcctttgagtcctctgggagcatgcacccgcctctcagaaagaatgctaacaacaataggccgccggaattcaatctcccttacaagcccatcaccgcctctgcggaaaccagaacctccactgttctccctgatgctgaatctgtgcaagagaacagggtaccgctgttcaaagatctcaggatca

SEQ ID NO: 7804 - DNA, 1446 bp, Setaria italica
  Peptide Sequence Number=SeqID_73778
tttttaagcaacaaccatgctttaattcaactccaatgcctcagggagcaatgatagcacctggaaagaatccctgccaggttttgtttgtcggtttcgttgcaatttatttcagtaggggtgtaaatataactacgggagtacataggcaagaaaagaaaagaagaaaggcagatgtcatcagcatccacaaaaatatcagcaaagagagccgaagccaccaccgccaggtgtgaaaatctgaagaacatcaccagcactaactgttacagtgttctttcctccaaggtaaatctttctgccatctttcctgaccagatagtttgcaccacgagcaccgtgtgcacctcctttgagtcctctgggagcatgcagcaattgctcagacagactgcttaggtccatacgccgccggaattcattgaattccagaggcccatcaccgcctctgcggaaaccagaacctccactgttctccctgatgctgaatctgtgcaagagaacagggtaccgctgttcaaagatctcaggatcagtcatccttgtgttcgtcatgtgacattgaacgccacttgtgccatcccaggttggcccagctccacagccacctccaatggtctcatagtaaccaaaggtgtcatctccaaaggtcaaattgttcatgcagccctgagaacaggcacaggcttggaacgccattaggacaacatctgtcactctctgagaggttagcacgttgccaccaaccacagcagccttgtcacttggtgaaaggaaagagcctttaggaatgaggatcttcacaggagcaaggcagccttgatttagcggtatatccacatccaccaagcaccgtaggcagtatatgacagcagctgttgtaactgcttcaggagcattccagttgccatagacctcaggactggtaccctcaaagtcaattgtagcttcacctttactagcatcaagggtgagcttcaagtggagcactgagccatcatccatataatcttcatcctcaataacacaggacccattctccttttgaactcgagatgcaactgccttgagcatctccctcacagcaacctcagcattcttttgaacatggctcatataagattgcacagtggccaaaccatactgatttattagttctttgataagtgctattcctcgctggtttgctgcgacctgagcacggagatcagaaagattatcctggatccgacgtgttcctgggatcttgtagccagaaagttcatctgagcaaggtgactgcagcagctggactattccttcctcttggaaaacacccctttcaacaagtttaaatgttttgatggcagcaccttcctcccaaatacatttcgagaaaggaggcatacttcctggggtgataccaccaatctctgcattggttggtccttcttacttagtctaact

SEQ ID NO: 7805 - DNA, 491 bp, Setaria italica
  Peptide Sequence Number=SeqID_73779
gagactacttcagatttctatcagcaaaatatgggaactccatttttcacctaggaggtccaaggaaagtagcatccaagtggagtcaggaccaagcgctgtttgaatcttggagagagggtaaaactgggtaccctcttattgatgccaacatgagggagctttcagccaccggtttcatgtctaaccgtggacgtcagattgtctgctcatttcttgtccgagatatgggtatcgattggagaatgggagcagaatggtttgaaacatgtttattggattatgacccagcttcaaattatggtaactggacatatggagcaggagttggcaatgacccacgagaagatcgatacttcagtatcccaaagcaagctaaaacgtatgatcctgaaggggagtatgttgcatactggttaccagaactccagtcacttacgaaggaaagaagaaacttcccaggggcttcatacatcaggcagatcaatacc

SEQ ID NO: 7806 - DNA, 321 bp, Setaria italica
  Peptide Sequence Number=SeqID_73780
ctctcaggaacacaggcaggacgagacccttggagaacctcatgatcggcatcttcatcctgtgagacatcctcatcatcgtcatcaatcattaaagcatcatcaatctcaactggagaagcatcaagatcttcatcctctaacgtgctgtggccatttgatggcttcagttcaacatcattctctgaagcagcttttctgcgtgcagcattcctagtatgtgggccttttggttcatccaaactcgattttagaacagctttaccttttccttttaatgcatttatgctcccctcctgatgatccttgttaattgcacca

SEQ ID NO: 7807 - DNA, 1075 bp, Setaria italica
  Peptide Sequence Number=SeqID_73781
cccatccccggcggcgcccgcttcgacgcgtccctcctccccgccggcgccggccccgtcctctactgcctggaggtggccctgtaccagtacccggacggcgcggtggaggacgacgaggacaaggctgcggcggcggccgtgagccggatgatggcgccgctcaagtacgtgcggggcctggagttcgcggcgggtgtcgggtacgtggacttcctgtcccgcgtgaaccgggtggaggaggaggcccgccgtaacggcagctgggacgcgccgcacccgtggctcaacctcttcgtctcctcccgcgacatcgccgacttcgaccgagccatcatcaagggcatgctcgccgacggtatcgacgggcccatgctcgtctaccccatgctcaagagcaagtgggacccgaacacgtcggtggcgctgccggacggcgaggtcttctacctggtggcgctgctgcggttctgccggggcggcgggccggcggtggacgagctggtggcgcagaacggcgcgatcctccgcgcgtgccgcgccaacggttacgaccacaaggcctacttcccgagctaccggggcgaggcggagtgggcgcgccacttcggcgccgccaggtggaggcgcttcgtggagcgcaaggcccgctacgacccgctggcgatcctcgcgccgggccagaaaatcttccccagggccccggcgtccgtcgtcgccgtgtagcgcgggcacccgcagggggtggggggccggggctggcatggcatggccgcatgggatggggggaggaccagccaggagttagctgctggtggtagatgatcgatcgatcgcccctgctgttgccggtaatgatggtgattacgctgctgatcctggtgatgatgggcgatcgaggagctagctgcagggcaatgatggcgatagggccaccgttaggtgcatctgatcgatctgcatgggattggtgtgtggggagatccgcatgaattttccatgggaaaagtttgaatgagctcgctgcgtgaaggcgcagaggaaaacgaaagctgtagccttttccgcttgcatt

SEQ ID NO: 7808 - DNA, 1851 bp, Setaria italica
  misc_feature (1833)..(1851): n is a, c, g, or t
  Peptide Sequence Number=SeqID_73782
taattagtaccttccccttcgccagtcgcctcgagcgagcgatctcggcccagctccagctcctcccggccgcttccactgccggtaatgtctcggtatcggtcaccgtagagtcggttggtggatgctccagcagcggcagcgttggctcgcgttgggaatgcggcgttgtgaccactgcggacctggtgcttggtgacgaggtgtttgatgagttgctgcactcagcattgggcagcggccgcggggatgggtctagggtttacactgttgtggttgtggaaactggtgatgcagagggaatgagggttgtcattgggaagcatcggcatgcttgggtggctggaaaggtcgacgaggctaaggctgtgtcagttattgggaaggtatttgtcaagtatttcatgaatggcggtgttgaggagggtgagacaggcattgggaaaggcgagttcatgccagttggatcagatggaaatgtcgttctatcctttagcttgttgaatgctgatccaagtgattgggtgtatgattgggagtttgaaaagattggtgagaggatgttaaatcctgtgattgaggcactgcggcctattgcagaaattaatatagagagtcaggttttgtaccacactcctaagtcgtcctattcttattctgatgataaactgggtggcaatgtccttagtatgggagacattcctttctttgtaaattcaaatgagtggcacttggatacatcaatttcagctacaggacaatcaaaagttcttcaatttgtggtatacattccatctgcaaaggaatgcccattatacttacaacttcctgatggtgggctttcaaaaactaatgcatttatatcccctatgtggggaggtgttcttatctggaacccaccagactgttcacttggttcccagaagactcatggtacccggaagaaaatgtcatctcaggaacttatggagactcttgaaatcttcattggacaactaaggcagttgtttggtctaaaaccatcttatctctcacaagatatggacatgccaactaaatttgcagttagtgaaaaggggttcacagaatgggagttagatttactatatagacatcatgcatcttccaatctgttgtcatgtctcaccaccttggagtctctatctagtctggtccattctctcccaagaatgattgtcatggatgaaattggaagacaggttgagctctctcttgaagctgcaaatttagctcaaagaaatgcaactcttggaataagtgactcttcagcagtatctgcaacaagagcgagggcattggctgaggaagcatttttccacccatccattatgtcaatcagttatgcttcaatagagcattattttgccatttacatgccatttttcgcaccagtttccttgcatgtgcttctggcggcaatcaaagagctaaaacgttacaaggcagagcgagcaaaatattcagcagttcttgcttcccgttcgacatcctcctgatctggtggtggtttagggcagcgtcactgcctggcacttcatacaagtttgacagggaggtcgttggtcattactggcatcgtcaacttgttctggtgcacacggaaatggctggaacgtccagctgatgctaggctgagaagtagacacacgggtgcttataaagctagctgtaagttgtaacttgcaacccatattttatcgctagatttagaaagaatggacgttcgggtttctgaccaaagatactgtagtggctaatacatcgatgcaattatctgtgtgtttggcaaccgagcggacctgtgttggttannnnnnnnnnnnnnnnnnn

SEQ ID NO: 7809 - DNA, 303 bp, Setaria italica
  Peptide Sequence Number=SeqID_73783
gtgcacggtcgtcgtccaggcatgggaggtggacggcgaaactctggagcccatcccttccgcgtcgagcgatgcaatgccgcccgagttgtcggagaggctgttccctcgcgacgacaccgacgacgaagatgatcttgacgacatcgaccccgagcggctgtccatcggggtttgcggcaacgccgcgggcgggtacgtgtacaatgcggccgagccgtcgcacggcgcggtgctctacgagctgcgggaggaggaagggaaggccaccgccgtggcgcggtgggagtgggtgccgtgcgc

SEQ ID NO: 7810 - DNA, 586 bp, Setaria italica
  Peptide Sequence Number=SeqID_73784
aatccggctggtgaagtagagttagtgtataccaagaatccaaaatatgaacatcttacaacaacaaacatcgtccctaaaaaactaagagtttaggcggggagagccgccgccggtgtagctgggggaacccggttctcgacagggatctccacaaactcagaaagaattgcccggaactcgtctccgttcaatgtctccttctcgataagcacctcaacgatcttgtcaattgcctccctgttgttcctaatgtgcatcaaagcaatctcataggcctcatctgacaactgcttcactgccgaatcgatgtcctctgcgagcttctccgacatggagttccttgccattcatttcttctattgtattgacatccccactctgtgctccaccctccatcagagaccatgggccgatctcagacataccgaaagttacgaccatctgcttcgccaagccggtaatttgctgcaaatcaccggcagctccggtagtcacctcaggctctccaaatataatctcctcagcagctctaccaccaagaccgccaacaattctcgcaaagagttgctgccgtggagatcag

SEQ ID NO: 7811 - DNA, 398 bp, Setaria italica
  Peptide Sequence Number=SeqID_73785
tttttttttttttttttttgtttaaaggtcaaaatattgactattcattgaaagaaaaacaactggaaaattatctaaacagggcgcaagcagcagcggtccggtgacgaggacggcgacgcatgtggcggccgatccaaatatctagctagctagctctagcactggtcgtggtcggcgggtcggcaaccagcggatccatccatccatctgacgaggacgcacacgcaaatgatcgggaggagcgtgatgccacctgggcgaccgagcccctcttgctctcctgggctcgcatgccgccgcgatctttgcgagccaggacacgccgccgacgacaatgaagctctagaaacgaaaccaaagccctcgagaaaggcatggcgacaggcagggatgct

SEQ ID NO: 7812 - DNA, 304 bp, Setaria italica
  Peptide Sequence Number=SeqID_73786
gtgtatcttgtgcgagttgattggtgtgattgctctggggaggatcaccatcctcgtcatcttctaacattgcatactgcacctcctctggacaagcagtagcaatagtgtggttggccttatggagctccttggatatgtggtcatagcgttcaacgagggctctgtaggctctgtagacttgctccacatggcttatcacctccggtcttgtgcggtagtacatctccggcctcttgccgaaggagtcggcctcctggccgaggagtttaagcatgatcttgactcgattctccattactcc

SEQ ID NO: 7813 - DNA, 1805 bp, Setaria italica
  Peptide Sequence Number=SeqID_73787
aaagtggcaagcagagttggagagctacagaagtaaagaagactctgatgaagaagatgggatggatgctatggatgatgatgatgactctaatgatggaaattatccaaatgctaagatccttacaagcaagactataagtgaatggtgccagttagtgtcaaaggaacctaaatcacctgcactacgtaatctgctaaatgcttttcgggatgcttgtcaatatggtgttcactccgatagcccctcgatgcagagatttcaaaataccagagtgttttatcagataataacatttgtcctttctgagtcagacaacctttttcgtgctcttttggaaattccggatgatgccaacaaagggagaattatgaatctgaaaaattcaaagaaatggcaaactgttgatcctctcttaaagtcctacttacggagttctcttaatctgcttagtcaacttactgataacaaaatacttgcctttgttttgactcggctgagagcgtcagcggttcttttttctgcgtatccatcaacagcaagtacgcttctcaagattttatttcgcttgtgggcaagtggtgatcagagcttgtctctgtctgcatttcttatgatccgagaagtagcttcactgttacccgattgtttggatctctgcttaattaaagcctacaatacataccttgccagtaccaagcttgtgaacgacagaaatacaaagcatattgattttctgatgaactgtctggtagagctgtattctctggatgttcagaactcatgtgagagggcagtaacctctgtggggcaactgaatgctattcttagacaggcttctaaaacaaaggaaaaggaagaccttaggaagatagataactggcaatatatcaattgtgtgaacctatgggttcggtttctgtgttgtaactacaaggattacaatctccatccattattttctcaagtgcttcaagtattaagaggagtggctcacttattcccaggcacacggtacttaccgttaagattgaagcttgcgcagatgctgaatgagctttccacttgcagtcagatgttctttcccattccatcattgctatttgactgcctcgaatttagagagatctctcaaaaagaacaaacacaaaaaacaaaggttaacttcttatcgctattgaaggtgccaaagaatatgctgaaatccagagatttccaagaggagtgtgttctttcagcaatccaggttctatcagcacattttgcccaatggagctaccacatatctttcccagaagtagccaccattcctcttatcctcttgaaaagactacatgagcagacaacaattgaatcgcttcaccgccctattaaacgattgatagatcaggtaaatgagaacaaggaatttattgaaaggaaaagagaggtggtatccttttcacccaatgacaaggcaccagttgatagctttcttcaggaggagaagagcagtggaaatgcttcatttacacgattctatgcatccatagcggaaaaccgtcaaccaaaagggagaaagacttgaaagtgccaacggaataactgggagccatctggaaactggttggatgccaagtgaggactgggaaagattgctttaatgtggaacatgcatgtattgacccttgcattttggtcgcagatacatgctgactcgccgttgtgtaacatgaactgatgctgctactcagttattcagattgggcgacgagcattatgcgctcagcaattttgtgtcattgtagccttgcgatgcatttgta

SEQ ID NO: 7814 - DNA, 472 bp, Setaria italica
  Peptide Sequence Number=SeqID_73788
cccagattcttcctttggaaacccatgccgaacttaatttaaccagctagctagttggagcctcgttgctttggacaccagcggatatgacagattgacagcagaatgcgcgtacttataagcagcccaacaaagggaacataaaagatctttgcaaaggagcagaaaagaggaggaaaagaaatgctaatgaagggccagtgaaggaacgacagagcatcagatcaaggaatcaaaggaagttgcacagcaaatgaaaagtgaggagctctttctgttcattagcacaaaactaatcttctttccagaacagcataggataaaaattaacaagatgcaggggaaagataaaagtgccttaatttgagaggggagggagggaaaatatgctcgctgatgatggcgcacgtgagcaggagccaaaagtgaggctcaaagtggagtaaaggaaagatgacgagaaaagtatacc

SEQ ID NO: 7815 - DNA, 154 bp, Setaria italica
  Peptide Sequence Number=SeqID_73789
agctcccaaagcagaagctgctagttgtattcttttgttactgtacgtgagtgcgagtgtgcaactttgactgccagtgcagtcttactacttctacctctagcattccatcgccaatacacttaaaaacaacatttgacatgccctgcactgg

SEQ ID NO: 7816 - DNA, 348 bp, Setaria italica
  Peptide Sequence Number=SeqID_73790
taggcagtctttcacatgataaaatgcttagatatctcttatcatttgagaaagcaagggcctccaatgggatattctgaatgttcagcgagtggcccttgctttctcaaatgataagagatatctaggcagtctttcacatgataaaatgcttaagctgtgggacttgcaagagctcttgaatggcccgcaggcagttaatggtgaggaacctgctgagtctggtagcgatgatgacaatgacaatgacaatgataatgatggcatggatgtagacatggcaccaacctcttcgaaaggatcaaggagtaaaaaaggcaggcaagggtcagagttcaagtagaccgg

SEQ ID NO: 7817 - DNA, 509 bp, Setaria italica
  Peptide Sequence Number=SeqID_73791
ttttgatgcttaataatggttatctgttcctacccatattttgtctaataatcatcgaattatcatcgccaggatctattttgttcttacgagtaatttgataagttgaggctttattggatcgacaatcagtttattcgatcgttccaatttgcaaagatccattgccaactttattgaactcttttcattaattactgatttaccgttaccgcataccttggaaggatcttgatgtgtttagcatccatagttcctaatcatgccgctatgagatgttgctacagtctgcttcttgcaatttctgtggttagacaaattaatcctgcaagcgatgtggtcatagttcactgacatactttttgtggttagtgaccgcttcctggggcacacacagtctgtggacacaatgctgaagctggatgaagaaactctgatttctggttcatcagatggcgtgatcagattagtgggcatcttacctaataggataatacagccactcgctg

SEQ ID NO: 7818 - DNA, 424 bp, Setaria italica
  Peptide Sequence Number=SeqID_73792
agatgagttgctatccttggtggtaatgaagaatggtaaaaaggttgtttgtggaactccaagtggagcactgttattgtattcatggggtacttcaaagattgcaggtaaccatgtttcatcatgcaacactagctgcagaaatgaaagggctcatttataaaaacttcattgactaatttaattttgtctaaagctatctgtatagtataaagttttgcctatagcagtagctgttgccatatgccacgatacccatcaaagtagttatccgaatgtggtgctctcatattttgatgcttaaataatagttatctgtttcctacccatattttgtctaatgatcatcgaaattatcatcgccagttgttcttaattgtattcttattcgttaaattttatttcttatttcgttccttagttt

SEQ ID NO: 7819 - DNA, 1597 bp, Setaria italica
  misc_feature (1565)..(1597): n is a, c, g, or t
  Peptide Sequence Number=SeqID_73793
aagaaataatacccaattagaaggacccttagactttactacacgcctctccacctccgatttgcgacgacgcctccgcctcggccaccacctccgcatccaccacggtggctccatacgtcttcctcctcagcacgccatattgctcgagacgccctcggttcccgcccgcctctgtccccgcccgccaccacgatggaggttctccacgaggagatgcccttcgacctcgacttccacccgtcttccccccttgtcgtcacctccctcatcaccggcgagctctgcttgtttcgctacggctcggagtcgcagcctgagaggttgttttcggtaaaacctcacaaggagtcatgcagagctgttcgctttctggactcaggaaaagcgattttgtcagggtctgctgattgctcagttcttgcttcggatgtagaaacaggcaaggccattgcccgtttggaggatgcgcatgagaacggcataaaccgccttgtctgtcttactgaaactacgattgctacaggtgatgatgaaggctgcattaaggtatgggatacccgggaacgttcttgctgcaacacttttgatgtccatgaagattacatttcagatatgagctatgttgctgactcaaatcagatattggcaacaagtggggatggaactttgtctgtgaacaacctgcgtaggaataaagtaaagtcacaatctgaattttcagaagatgagttgctatccttggtggtaatgaagaatggtaaaaaggttgtttgtggaactccaagtggagcactgttattgtattcatggggttacttcaaagattgcagtgaccgcttcctgggacacacacagtctgtggacacaatgctgaagctggatgaagaaactctgatttctggtgcatcagatggcgtgatcagattagtgggcatcttacctaataggataatacagccactcgctgaacattcagaatatcccattgaggcccttgctttctcaaatgataagagatatctaggcagtctttcacatgataaaatgcttaagctgtgggacttgcaagagctcttgaatggcccgcaggcagttaatggtgaggaacctgctgagtctggtagcgatgatgacaatgacaatgacaatgataatgatggcatggatgtagacatggcaccaacctcttcgaaaggatcaaggagtaaaaaggcaggcaagggtcagagttcaagtagaccggcatcagatttctttgcagatttataggcgccaagctcccaaagcagaagctgctagttgttttgttactgtacgtgagtgcgagtgtgcaactttgactgccagtgcagttttggtattttccaatgcagggcatgtcaaatgttgtttttaagtgtattggcgatggaatgctagaggtagaagtagtaagctgtggtttatctccaggaaacatgacctcgttgtggtatgcattgcacatatacatgctttgccaattttccagtaaaaaagggttctgcttaggagaaaaaagaaaaaaaaaaaacaaaaaaaannnnnnnnnnnnnnnnnnnnnnnnnnnnnnnnn

SEQ ID NO: 7820 - DNA, 298 bp, Setaria italica
  Peptide Sequence Number=SeqID_73794
aaacaaaaccaatccctgagcggtcgtctccctctagcttccgagtgctcgccggccggggtcgcagcgcgcggctgatcgagcggcgagatggcggggcagtcggacgccatgatcgagaagatgcagctgcggcagagctaccgcaacgtctggcacaccgacctcaccaacgccgtcgtcgcggacctcccgtggtgctgcctgtcactgtggtgcggcccatgcgtgtcctacatgctgcgcagacgtgcgctctacaatgacatgtcaagatacgtgtgctgcgccgggtaca

SEQ ID NO: 7821 - DNA, 1680 bp, Setaria italica
  Peptide Sequence Number=SeqID_73795
gtgccacaagccgccgcgtcgcgaccccgcggactccatccacaaggtcgcgcgccgcgagatcggcggcggccaccgacgaccgccgaggcccgcggcgccctcctcctccgcgttctcatgccccgagaaattccgcaacttccagctccaggaagaatatgacacctatgatgatgaagtccattttcttgtccagttgccatttttgtggaccagaaccaaaatcattgaaattgttgcagcaaaggatgttatatttgcacttgcccaatcaggtttatgtgctgcatttaatcgaacaacaaacaagcgcatatgctacttgaatataagtcccgatgaagttattaggagcttgttttataataagaacaatgattcccttatcaccgtttcagtttatgaatcagatcgtttcagttcgttgaagtgcagaacaactccaatagagtacatcagaagagggcaattgaatgatggatttcctttgtttgaaactgaatcattaaaatatcctggctttgttgagtttgatgatgttaatggcaaagtattgaccttttcagcccaggatagcacttacaaagtttttgatctaaagaactacaactttctgtattccatatgcgataagaacatccaggagataaaaataagtcctggaatcatgctcgtgatatatcagaagacgaattgtcatgttccactgacgatattgtcaattgaggacggaagtccgctgaaaaccttcagtcagttgctgcatagaaatagaaaggttgatttcattgaacagtttaatgaaaagctactcgtgaagcaagacaaggaaaatctccagattattgatgttagaaactccgatctgattgaagtcaacaaaactgagttcatgaccccttcagcattcatctttctctacgaaaataatctgttcctgacattttgcaataggacagttgcagcctggaatttccgtggagagctagttacatcatttgaggatcatgagttatggcatcctaactgcaatacaaataatatatacatcactgctgaccaggacctgattatctcatattgcaaagtttcaaagcaggtagcagattgtgttgacagtgaggctggaggagtttcatccatgggatcaattaacatgagcaacatctttacgggaaagtgcgttgcaaagatctcccccagtgatcctactctcacaattgctcctcgaaatagaggcgacaaaagcagatctactatccatagcactgtttcagaagctctcgaggacatcaccgctctcttctacgatgaggaccgcaacgaaatatacactggaaacagcaaaggcctggtgcatgtctggtcaaattaaccttgacatccattcccatccctgtacatacctcttgtaccttgtttttccttagagaacaaaaagatgtaatgctcatcctgtctgattatagcgggactgtaatttcctagacatgatatcattggtagaataatttgaatgtagagtatgttttcgggtaatgtatgttggcgaaaaggttcgtcacatatggcggttttgttcattcctaaatctggtccaagtttccagcgatacttaagaaaagttcggacttctgctctgatcaatgtattaatctttttcctgtaaaaaaaaaa

SEQ ID NO: 7822 - DNA, 258 bp, Setaria italica
  Peptide Sequence Number=SeqID_73796
tccatcccactttctgccacacctcgagcgaagcaacagcaccacaagaagaggccagggagacccatcccccctatccatggccgacgagtggtggagtagcacctctcacaggagccatggcacgtcggcgtgctcggccgcgcgcgcgccgctcatggtcacggacagggtggcctgtggctgggctactacctcctcccccaccgcggccgccgagtcgacgagctccataaccttccaggacccctacaggag

SEQ ID NO: 7823 - DNA, 277 bp, Setaria italica
  misc_feature (266)..(266): n is a, c, g, or t
  Peptide Sequence Number=SeqID_73797
ttttttttttttttgttagtaaaacaatgttagtacttcttgatttgtattgaagtacaacatgttggcaaatgcaattgaggtgacatataaaatttatgaagcatctgttgtacaataacttttacacaaaccagaataaatgagaagaaatggggttaacttgaacagagctaacagaagcaagcagctaaccagtcttccaatgacaaaatatctgagaaaagcacacactgaagactcatctgcatccgaagagcataacnttggggtgcag

SEQ ID NO: 7824 - DNA, 1108 bp, Setaria italica
  Peptide Sequence Number=SeqID_73798
gggcgcccgttggcaccaccagcattgctgcccatagccggatagcccaagataagctgaagcgaacaggccgagggaggaccaatcttagcacaacatggagcttttcacagccaattattacagtatatagtagttgccataacatctaaatgcactggcctagtggcacggggtactagtacagattattggccatgccaaatataagcttcagccagatttacaatctagactgcatccctccagcaacaacaatggtttcggctgtaatgaatgatgcatcgtcggaggccaggaatgcagcagccgcagccatgtcttccacagagcccaatctcttaagcgcggtcttgtcagtaagctctttcctaatggtctcattagttgtgaggaaactagcaaaccgtgtaggaacaaaacctggggctatacagttaacacgagtattgggtcccatctcaccagcaagagcctttgtgagaccaaagagagcagtctttgtaacaccgtacattgtcaatccttgttctggattgtaaccagtaattgaagaaataataatcacagatgatccctttcgtagatggggagcagcttcctgaagaagaagaatagaagccttgacgttaatatcccacagtttatcgagaacagcctctttcatttcaagtatgctatctacggtaggatttgcagcagcattcgagacaagaatatcaatgtgtccaaagttcttgacggccgtgtcgatgaggtccttgcgctgctgggcgttggagacgtggcagacggccccgaccgcggtgatcccctttgccttgagcccctccaccgcctcgtccacgttcttctgcttccgggaggagatgacgacggcggcgccctccaggccaaggcgctcggcgatggcgaggccgatcccctgcgtggacgccgtcacgacggccaccttcccctccaggcgccggcacttgacctccatcgctgcgccggccgagcttcgatatcgatcttttgctgctgctttgtagtagttgcccgtgcaggacggcaggagtgctgcttgtaggagttttgtttcgatttgtgggagggggaaggagag

SEQ ID NO: 7825 - DNA, 382 bp, Setaria italica
  Peptide Sequence Number=SeqID_73799
taggtacttagtacttgttctaagtaagtattgttattgtactatttcaggcaaagaaggtcaacaccctgatcaggcctgatgggaagaagaaggctccgactcagtcgcactagtacgtgaagctgacaccggactacgatgctcttgatgtggccaacaaatcggcatcatctaagttacttgctactgtattaggcatctgtgtcctagttctatgggaaacgagagttttgtagctattccttatcttgggccgcagtggctctgttaccatgtcttgatgcacacttatgaattcggtatcgtccaagtgaccggttgagctaatttgagctttgacaaaaaaatactagagagtgaaagacgacacagggagtag

SEQ ID NO: 7826 - DNA, 576 bp, Setaria italica
  Peptide Sequence Number=SeqID_73800
tgtaagtaacctaagtaagtattccgtctacgttcttgttgacatttcaccgccccaagacccttaagaaggctagggacccgaagtacccaagagtcagcgctcctggaaggaacaagcttgatcagtaccaaatcctgaagtaccctctcaccactgaatcagcaatgaagaagattgaagataacaacactctggtcttcatcgtggacctcaaggcggacaagaagaagatcaaggctgctgtcaagaagatgtatgacattcaggcaaagaaggtcaacaccctgatcaggcctgatgggaagaagaaggcttacgtgaagctgacaccggactacgatgctcttgatgtggccaacaaaatcggcatcatctaagttacttgctactgtattaggcatctgtgtcctagttctatgggaaacgagagttttgtagctattccttatcttgggccgcagtggctctgttaccatgtcttgatgcacacttatgaattcggtatcgtccaagttgaccggtttgtagtcttaattttgtagtcttttgttcttacttttgttctttaaaaaa

SEQ ID NO: 7827 - DNA, 864 bp, Setaria italica
  Peptide Sequence Number=SeqID_73801
gccagcccaggccatccttccctttcatcgcttcgcgtccgccgccgccccgccgccaggagaggtaagtccaggaggcagttctgagaagcacaaatggctcctaaagctgctcctgctaagaagggtgatgccaaggcccaggccttgaaggttgccaaggctgtgaagtctggtacagtgaagaagaagaccaagaagatccgcacgtctgtgacatttcaccgccccaagaccctgaagaaggctagggacccgaagtacccaagagtcagcgctcctggaaggaacaagcttgatcagtaccaaatcctgaagtaccctctcaccactgaatcagcaatgaagaagattgaagataacaacactctggtcttcatcgtggacctcaaggcggacaagaagaagatcaaggctgctgtcaagaagatgtatgacattcaggcaaagaaggtcaacaccctgatcaggcctgatgggaagaagaaggcttacgtgaagctgacaccggactacgatgctcttgatgtggccaacaaaatcggcatcatctaagttacttgctactgtattaggcatctgtgtcctagttctatgggaaacgagagttttgtagctattccttatcttgggccgcagtggctctgttaccatgtcttgatgcacacttatgaattcggtatcgtccaagtgaccggttgagctaatttgagctttgcacttgcttgtactatcagttcctttatgagcagaccattaggttttcttgcatcaccagtggttttgtatgtcatattggatatgttgtttgcaactaaaaaaaaaaaaaaggactgaagaaccaaaaaaaaaaaaaaaaataaa

SEQ ID NO: 7828 - DNA, 782 bp, Setaria italica
  misc_feature (755)..(755): n is a, c, g, or t
  Peptide Sequence Number=SeqID_73802
cgtatgttccgttggcaaggtttagctctcacagacaacctgaaattttgataccacttgatgtagcactggtccgatcttccgataggtatgggtaattcgattggtggagaacttgatgttgacgatccaggtttcaatcaaatacgatttgaacccctgcaaccactatagcgctactccgttggttatcaaccaagcacaactcgattgacctcaccaagaaggcttttcgttaacaagaacaggggccttggatcatagtaaaaggacttgtcgcacagttacaatgaataaatctcagtttctcaataaaaaactagttaaaaaaacccgagtttctaaagcggcagctactgagtttatatcaaaaagagcgagctagggttgggggcaaccaggggggcgcccacaacatgggcttaaggcccgacacgatacaaagccaacgtggtccaaaattggtgacacaacaccttatcgtagtcacacagaatgatccacaatatttctggagctaggtccagaaccaaatgaaagccttcatcatcttccttccaaccatcaaagaactcttcagttcgatgttgtatgaaggagatatcgctgtttccgtctagggtggtcagctgaatccgaactgaacgcaaagactaagttggtgacgacttgtaacttggagaagacgaaagcttgtgcgtatccatcatggtgatatccttataagtcagtgtgcatgaagctattatagggtncatccttgagacaaatggacaactaac

SEQ ID NO: 7829 - DNA, 347 bp, Setaria italica
  Peptide Sequence Number=SeqID_73803
tcgaagaaggcgtcgtcggcgccctggacctcgtcctcgaggtagtacatcttgacctcgtcgtgcttgaacttgctcctgccccttccggatccggcctcccccttgccgatgaggcccttgtacgcgcggccgacggtgggcttggagtggttggtgggcttgcgcggcgccttgacgaacccgccgttggccgcggcggcgccctcgacctgcacggcgcgcgtgcgggacttgtcctccgggtccaccaggctgcggtcgacggcgaacacccacccgtgctggcgaccctcgcgacgcatcgtgctgctcgtttcttggttcgccttggttgctgtttggtg

SEQ ID NO: 7830 - DNA, 400 bp, Setaria italica
  Peptide Sequence Number=SeqID_73804
ggggaatggcggcgggtggagagcatctccgtcgccgccggggaggtgtggtgcggcgggcgtcgcgtgacgccccaaggttgcgaaggatctggtgctacaccgcctcctccatgcggtcaacggcgagccactactgcccacaaatgctaccggggcgggaactgtggtgcgacgagtgtcggccgtgcagcacggaggggcggagcatcctctgcgatgcccagctcttcccatgcggtcaacggcaagccgccatctcccccgaagcctacctctcctcccggcgcagatttggctcggtggcaacgcaggggtctccaaggccttggccttcactgtccagcccagaattgagtcggataattagaccacttgctccagcaagtagggttgatga

SEQ ID NO: 7831 - DNA, 1251 bp, Setaria italica
  misc_feature (1158)..(1251): n is a, c, g, or t
  Peptide Sequence Number=SeqID_73805
tcgtcgtccccacgcggccgccccgtcctgctcccaccctccgccgcggccgccggcgaggcgttctcgtctgacggagaggagttcgacggggaagaggatgagtactttgatgagggagagagcgagccggaggagcaggtggaggtcccgcgcgcgtactcgtcgccgagaggccggccgccgcgtggcgaggagcccggccggctcttcgtcggcaacctgccctacacctttacctccgacgagctcaacgatgctttctccgaggccggaagggtcgacgacgcgcagataatctatgacaaggtcaccaaccggagccgcggcttcgccttcgtcaccatggccaccgccgaggaagccgccaaggccatccagatgtttgatggcgccctgctgggagggaggacggcaagggtgaactacccagaggtgccgcggggcggggagaggagaacggttacaatggatggccgcaggcgtgatgatggcacttacaagatttatgccggcaacctggggtggggagtgcgagccgatgcgctgaggtcagtgtttgaggggcagaccggcttgcttgatgccagggtcatcttcgagcgtgagactgggcggtcgagggggttcgggttcgtctccttcaggactgcagaggatgcacaggctgcattggaggctttggatggagtggagttggaagggaggccactgcggcttagtctagcagaacagaacccaccacctggttcgccgcctagcgcggtgcaggcacagcaggaggaaactgcttcagacatttctgatgcagagactgaagcaaccagttcttcagaatcatctgatgcacaggtggacgagagcaacttacagactgctacgacttattaataactacggaccagggtttataagacgttgtaatgatttccaaattccaccattcaaatccaagttgtacctatttgagcgaaaattttgacaccaccaatgctgtagtgaggattcaacatttcagctatagatactagaaggtgttaggtacctagatactgccgttgttcttgtgatgtattatgctaaatatattgttctaaagtgcaacagtgtagccattggcttcctgtaaaatgatccaattcacatgctaactatttnnnnnnnnnnnnnnnnnnnnnnnnnnnnnnnnnnnnnnnnnnnnnnnnnnnnnnnnnnnnnnnnnnnnnnnnnnnnnnnnnnnnnnnnnnnnnn

SEQ ID NO: 7832 - DNA, 1149 bp, Setaria italica
  misc_feature (1086)..(1149): n is a, c, g, or t
  Peptide Sequence Number=SeqID_73806
taaaccaaaaaccgaaaccgaaaaccgaaaccaaaaggaaacggaacctaagaacaaacctagacctacaaagaagcaatgaccggcaggctcggcggaggcggcgccagcatgggcaacgccgccaacatcccaagcaagtgcggcgtcagcgtcggcgtacccatcagccccaacgtcgactgctccaagattaactgatcagaaggtggcagggcatcatatggatggatgtcggttatcagattcggagcagtgatcactcgtgtttactaccttccctttacaccatatatgcatctatacatctctgtcgtcgtcgtaccagctgctaggccagcaatacaatccttgccttgttcatgggtttgctgggcctctgtttttcctgttgctgcatatgcttcgttataggcaggcagctctccgaatgaataaactctttgtatcggatccgtatgcgccatccttttgcatttttcagtagtacgcgcgactctatcagatctgcaagtcaagcagtcacctcgcccttcatgagtcatgacaatgcgtggccctgactcctgccagccagttcccttgcccctgctttctgaatgcatcctggttcagagagagaataaaaccactctgttttttttttttgaaaagaaaccactctgttgggactgcattgaatgcacaacagcaacagtcttgctgggacgtacggatatggcctgaaatccggatgtggtcttttctgaagagggagatttctatgcttacgctaaagcctttctagttttatgggctctgttttgggtctcggcccaagcaagggaggtgggtgacgtggcgccacacatttggaggagcaaattctatctcgcacgaagttgaagagtgtcaaatagacttttcctgtttgtataaaatagctttgtttctgttttgtatatgggctgatctgttttgtttgcaggtttttctttaacctttttgggatgagcccaaaaatatgatagcatgccataatttttatttgttaaaaaaatttgagcaagaataaaacaaaagtcagtccattattagttaagaccnnnnnnnnnnnnnnnnnnnnnnnnnnnnnnnnnnnnnnnnnnnnnnnnnnnnnnnnnnnnnnnn

SEQ ID NO: 7833 - DNA, 852 bp, Setaria italica
  Peptide Sequence Number=SeqID_73807
aaaatagctaaaactaccaaacaatcagctagcttacacttcactgatcagatcagtagtcacacagtatacacttgtcgttgcgtgtgcaatggctcctcgcgttgccgttgtggcggtggtggccgtgctggctgcgctggtggcggcggagacggcgtcggcggccgtgagctgcagcgaggtgacgtcggcggtgttgccgtgcctgggttacgcgacgggcagcgcggcgtccccgtcgtcggcgtgctgcaacggggtcaggtccctcagcgccagggcctcctccaccgccgaccgccaggcggcctgcacctgcctcaagagcatgaccggcaggctcggcggaggcggcgccagcatgggcaacgccgccaacatcccaagcaagtgcggcgtcaacgtcggcgtacccatcagccccaacgtcgactgctccaagattaactgatcagaaggtggcagggcatcatatggatggatgtcggttatcagattcggagcagtgatcactcgtgtttactaccttccctttacaccatatatgcatctatacatctctgtcgtcgtcgtaccagctgctaggccagcaatacaatccttgccttgttcatgaccgggtttgctgggcctctgtgtttcctgttgctgcatatgcttcgttataggcaggcagctctccgaatgaataaactctttgtatcggatccgtatgcgccaaaaaaaaaaaacaagagtactaagaatattctaaagaactgaatgccaataacgaagtagacggacgtacaagacgtaacggaacgtaaacccaaataacaaagaaccccaaaaacgttaaacgtaaaa

SEQ ID NO: 7834 - DNA, 338 bp, Setaria italica
  Peptide Sequence Number=SeqID_73808
ttacttaaaattactaacactcagcaaagtgactgaagtttcccataaaaagtattatggaaacatactaaaagcctaaaacaatgaagtgatcttggtacatacacaacttataatcagacatatactgtgaaacacaagtgcatgcctgcgtagtttctcatgcaaagctcacaactgagctggacagaggaagcttttggaagacattattacctcggtgggggagaagaacgccactgcatcaggatcagtagatccagcagggtgtaacgacactatagcccgaaatattgaaggaaccagcaactcaattactgcaacctggtccatggaag

SEQ ID NO: 7835 - DNA, 1169 bp, Setaria italica
  Peptide Sequence Number=SeqID_73809
gtttttttttttaagactacccgcagggtagaaataaaatccttctttctgttctcaacggtactatgttacatgtctgaaaaaacactgttccacgcgattgttgtacatgtactttgtcaggtgacgacattagaaacaatctatgctacctcaaagagtctcgagtgttcgttagaatctagccatcgtaggaagaacatccaatgtgataggcctcctgaagatctggtccaacatttgaagtctggtgataggggcggtggactggtggcaaaagcaaagccaatgatttgtccatcatcagaagccgtcggcatttgctgcaaacctttgtaaacagagtctgatagctggcaatccaacgcaaaagcagagatagtgctttactgggctccacactgataaagtactgcaatgccttgtcagcatgctcctttacatgcttaaatacatgatgcattgacacgcctcttgcatgaaggtagcttcctccctcggtgggggagaagaacgccactgcatcaggatcagtagatccagcagggtgtaacgacactatagcccgaaatattgaaggaaccagcaactcaattactgcaacctggtccatggaagttgtcagagcactggatctcaaattgcccgtattttgcaagttcaactccttagatggatctacaaagtcatcatccatcagagatgctaacgatgaagctctttttgaccaatccagatgccggtatgtgaatattttcatgttaggcacttcattttctagatttttcagtatttcagataaagattcttcctcctgctctccattgctggcagataatcttggctttttggtgacaccaggttcgccatcatggagatggctaaggacttcatcttctagatgaggaaaaaatcttcttttctggtcagtgaaggcctttagagctaacctagttctgtccacagcagatgcaccagcctgacctgccagttgacgcttccaagcataagctacaacagcaccatctgggcaaacaagtggcatgtgcaagccccatgaatttcctcgagctttaagggccccattaagaactccagattcctctaattgcctgccgagggcgcggaggtcctggaagtggcggcgcatggtggcctcctcctggacg

SEQ ID NO: 7836 - DNA, 1030 bp, Setaria italica
  Peptide Sequence Number=SeqID_73810
caataagcgccaataatgctgcattctgtgagctttgtgttgaggaaattacagccggtaacagcaataaaaggacacttgactaatagggcctacaacaacatagctgcgaaatttgaagagaggacaggactgcgtcactccaagcagcagttcaagaaccgatgggatgcccttcgacgcatgtatgccttctggttgtatgcaaacaaacagagtggacttggatggggtaggggcacggtcgtggcagatgacgcttggtggaaaaagcacacaaagaatcatggcgaatggaggaagctgcgatatgggcctccagataatctagatgagcttcaagtgatgtttcagaatattgcggtggatgggtcatcttcttgcatacctggcgaacaggtaattgaaagtgatgaaggtgatgaaggtgatgttggtgacaggagtcctgaacgtacccttcctagaaagcggtgcaggagtactagcactactgcaactagcccgaggaagaggacaaagagtcctatggtgaaggtaatgaaggggatatgggagactatgcaagaaaattgtgctgttgctcagaaggcattgcagggggactacattttcgaatctgtacaacactgtatgcgtttggcggtagagagtggggcagttgaaggaactgatgagcattttatggctagcaaattatttgtgaaaacagagcatcgtgccgtgtttctcagtttgaccaccaaagaaggaaggctagcctggttgaagaggtggtgccaggagaagaaaagcaagtagacaatgaacttgaaggtctcttttgtgatgtgtgatgggcaggagaaggaaagacgtacacagtgaacttgtggcatgtatatatgatctcttttgtgatgtgctgtccagaagaagaacagcaagtagcttgtgaattatggcatgtatatatgacaaactcttttgttatgtgggatgtctattttgttaaagtctgtgttatggttatatattagtcatcaccttt

SEQ ID NO: 7837 - DNA, 365 bp, Setaria italica
  Peptide Sequence Number=SeqID_73811
ccagcagctcctccgccgaccccgtctccgccgcgctcaccgccctgtcctgcagctccttctgccggatgacgtagtcctcctccttctcgaggaagaaggcgttgaacttttcgagctcggcgtcgaggagggcgacgaacccggcctcctccggggtcatcgccggcgaggaaccgccgccgtcctccacgcgctggcgcttgctccgccgctcgccggagccggcgccgatctgcttgagccgcttcttgaggtccttgtaggacaggaacttgtcgcgccagtcggggagcgtctccacgatctggttgttcaggcttcttgccgaacttcattgttgtgagaagaagaacagaatcgga

SEQ ID NO: 7838 - DNA, 284 bp, Setaria italica
  Peptide Sequence Number=SeqID_73812
gacgtccacgaacgcgaactccccgccgccgaagaactccttgtccccgagctcgccgtccaggttccggagcacctgcacgagctcgtcccgcgcctgcgcccgctcctcctcgcccctgagcttccacagcttggtgccgagctcgtagaccttgtcggagtaggcggcccagaagcgggcccgcgcgcgggcgtacgggtcggaggggaggaggctgcgggcggcggaggggaaggcctcgtcgaggtagttgaggatgacgagggactcgcagacggggc

SEQ ID NO: 7839 - DNA, 595 bp, Setaria italica
  Peptide Sequence Number=SeqID_73813
atatcgggactgccgctcgttcctctaccagcgaatcctccgagcttgtataagtccaggttgttacacaaggtttgttacaagtacactcatgcatatctataatctctaacacatggcagacacgtatcatccacttccacttgcagacgccgcgggaccgatcgatctactcgatgccgtagaacttcttgagcatggtgatgaactcatccaccttctccggcgagtggaggctcttggcgacgctctccctctcgccgcacctcctcgcccacgccgcgagcctcggcgccgtctccttcacggtgaaccccccgtacctctcgtagctgggtagccacggcatgaacgtcacgaccgcgacgtccacgaacgcgaactccccgccgccgaagaactccttgtccccgagctcgccgtccaggttccggagcacctgcacgagctcgtcccgcgcctgcgcccgctcctcctcgcccctgagcttccacagcttggtgccgagctcgtagaccttgtcggagtaggcggaccctaagaaagtacgggtacccgtacgtacgtacgggtaacgttaacgggttaacggtaa

SEQ ID NO: 7840 - DNA, 949 bp, Setaria italica
  Peptide Sequence Number=SeqID_73814
caagacaatgacgggaacactgcattgcacctggctgcccaggccgggagtctacggatgttctgttctctatttgggaatccgcaggtgcacataaatattataaataagaaagtgcaaactcccctcgatatagcacggtgtaagatccccccaggaatgtatcataatcagagcagcgaagcaaagattcgcttgatactgcaactaaccgggggtaggtacggtggtcatcgatgggaccattttgaaggaaaatacattcagcgagaggtcgaaagcaaagaattggagaagttgaaagactcaacgcaagctctatgtattggctcagttctaatcgcaacagtggcatttggtgcaactttcgcccttcctggtggttacaaagctgacgatcacacaaatggggggacaccaactctcgctgggaggtatgcttttgatgcattcataatggccaacacaatagcattcatctgctcctcgatagcgactgttggtttcatgttctctggaacttcaatggttgacctgaagatccgcaaagtctaccttggaacagcagtattcttcatgggtagttcagtcacgagcttggctgctgcctttgcactaggtgtgtatatggtcctagtcccagttgctcacaagactgccgttgcaatcgttgtgacgagtcctctcgtagttatattcacaaacatcgaaatttggctgaaaaatgctctttctgcacgagctatgtgcagtagaatcggaataattccagtctttatggggaccatattttttatccctgtatccgcgctctttcagtgctggcccttggtccctcattatttggttggctgcagtcgcaaggacaactagcttcatttggatagaggcataaaggcaccttgtcttagttaaagttatatggaaagttggaaacggctggtgctgg

SEQ ID NO: 7841 - DNA, 372 bp, Setaria italica
  Peptide Sequence Number=SeqID_73815
gtaaaataatgcttaaaaatcaatgcgatcaatttggttaggaatgtctcaccatggcatctgaagttttcaggaaaaaaacgattacaggggtttagccccggccatattagatggcttaatatctgtgcaaacagggattcaaaccgcggttgctagctccgctctacaatgagctagccaaccaggccagaacccgcttgcaattgttcagaaaacatcagcattatcctatgatctaggattctggctagatagtgagattattaggcatccactgtcatatgcattaattccaatagcatgcctcaggagttaaatagcatcctcctgatgttccatttccatatggtaaaatttaaaatgcttcag

SEQ ID NO: 7842 - DNA, 159 bp, Setaria italica
  Peptide Sequence Number=SeqID_73816
cctatcccctgtgtgccttgcctatctcctgttgcgtgtctcagattttttgcatgcatgtactatttctgtggtgacaaaaattgaaggcgccggttgggagggtttacttcaccggtgagcacaccagcgagcgctacaacggctacgtccacggag

SEQ ID NO: 7843 - DNA, 453 bp, Setaria italica
  Peptide Sequence Number=SeqID_73817
ggcatcaacgtcgaggtcggcgccaacgtgggtggagggcgtgaatggcggcaagatgaaacccccatctgggcccatcgtcaactccaccctcaagctcaggaacttccgctccgactttgactacctcgcccaaaaacgtctacaaggagaagtacgccgtcgatgagtgaactggaaaaggcttatgctaaaccaatatgtataattaaactaatcaggcgcatgtgaacggaaaaaattgcaccaatcagaattattagacgttaattatactcttatatatacatatatgttagcatgcatattgttgtccaaattaacattaccatgttattttgtatattttgctggcagtggtggcctctatgaccaagattacgttcagaaaagacttgaccaggcggataaggcagaagagagtgggaagaaactctccggcacgtttgccag

SEQ ID NO: 7844 - DNA, 411 bp, Setaria italica
  Peptide Sequence Number=SeqID_73818
tggaagatctgggcgccaacctcaccaagatgatggaccccagcggccgcgacgacatctccatcctagccatgcaacgcctgttcaaccagtacgtccttcgtctcgtcgtctaccttgatctgaatctgatcgcgttgcgtgccgtgcgtcgccgatgaacgaaatgatcgatcgacgacgatccatcgtcgtcggtgtgcatgtgcagccagccgaacgggccgtcgacgccggtggacatggcgctggactactacaagttcgactacgagttcgcggagccgccgcgcgtgaccagcctgcagaacacggagccgacgcccaccaacgccgacttcggcgaggactccaacttcgtcgccgaccagagggggttcagtccatcatacactacatcggcagctccta

SEQ ID NO: 7845 - DNA, 1850 bp, Setaria italica
  Peptide Sequence Number=SeqID_73819
atcaaaaaaaaaaaactaaccagagttgcgtgcagtagaggatcggaagagggaggaaagatgaagccctccgtagtgattgctctagcggcggtgctggtcgcagcacagtacgcctccctcgccgacgcctacgggccaagggtcatcatcgtcggcgccggcatgtccgggatctcggcggggaagcggctgtgggagtcgggtgtccgggagctgctgttcctggaggcgacggagcgcgtgggcgggcggatgcacaagcacaacttcggcggcctcaacgtggagatcggggctaactgggtggagggcatcggcggcgaaagggtcaaccccatcctgcccatcgtcaacgacacgctcaagctcaggaacttctactccgacttcgacagcgtcgtcggcaacttctacagggagaacggtgggctctacgacaaggactacgtgcagaagagaatggaccgtgccgacgaggtggaagatctgggcgccaacctcaccaagatgatggaccccagcggccgcgacgacatctccatcctagccatgcaacgcctgttcaaccaccagccgaacgggccgtcgacgccggtggacatggcgctggactactacaagttcgactacgagttcgcggagccgccgcgcgtgaccagcctgcagaacacggagccgacgcccaccaacgccgacttcggcgaggactccaacttcgtcgccgaccagagggggttcgagtccatcatacactacatcggcagctcctacctctccaccaacgccaacggcaagatctccgaccgcagggtcctgctcaacaaggtggtgcgacagatcgcctacaacaaccgcggcgtggtggtgaagacggaggacggctcgtcgtacgccgcggacttcgtcgtcgtctccaccagcctgggcgtcctgcagagcgacctcatacagttcaagccccagcttgcctttctggaagatcttctcgatctaccggttcgacatggcggtgtacaccaagatcttcctcaagttcccccggcggttctggcccgtgggcgacggcaagcagttcttcgtgtacgccagccggcgccgcggctactacggcatgtggcagtcgttcgagcgggagtacccgggcgtacccgtgctcctggtcacggtcaccgacgacgagtcccggcggatcgagcagcagcccgacgacgtcaccaaggcggaggccgtggcggtgctgcggaagatgttccccgacgtcgatgtccccaacgccaccgacatctacgtcccgcgctggtggtccaaccgcttcttcaagggatcctactccaactggcccatcggcgtcaaccgctatgaatacgaccagctcagggcgccggttgggagggtttacttcaccggtgagcacaccagcgagcgctacaacggctacgtccacggagcataccttgcaggtatcgactctgcagatatcctgatcaatcgcatcttcaagaacgaggagtacaaggtccgtggcaagtatgaggaccaagctgcagaggtaaacggccaggttgcagaggctaaatgagtggtgatgactcgacgtgcctcgctacgggcaccgcattagctcaccaggggaataaactgctgatcgagatgccatggttacttcggatggctttttcaggttgcacagtcggttcttcatgtgtttctgtcgtctagtgttctcggatgcttgcgcagctccgctggagcatatatccgtgtgatgtattttctgccggtctaattctaataaaagcacagacactactccggtttgctgtttttttacggctgcacatcaaagt

SEQ ID NO: 7846 - DNA, 240 bp, Setaria italica
  Peptide Sequence Number=SeqID_73820
cgctggacgacgcgccgctgcgcacggacggcgcggaggacgcgtgcctgcccgcgtcgacccgcttccggttcacggcgcagggctcggcggcgcggccgaagctgctgccgggccgcttcaggtgcggcatcgcctccttctcgctcagcagggtgcgcagcttcttctgctccctgagccgcctcctctcctcctcctgcctcagcctggcttgcttgtgctcctccaggacggcca

SEQ ID NO: 7847 - DNA, 633 bp, Setaria italica
  Peptide Sequence Number=SeqID_73821
aagaaactaacaaagtaagtagaagtaagtggtacaattagctttggatttgtgctgtcaagctcagcatctgtcatggaatccatcatcgtcatgtaccgcttaatcttagcctgactttccttctcatgcccttttggcatcaattcagagctaaacccgggcaacatagagaagagctggccaataggacccatactatggagattctggaactgctcatacagaagtctgagagtgaaacctccagtcaggttatccaccagttctggaagttgatcagcaggcataacatcctggatcttgtccatcaagccagacaagtctcccatgcctaacaggcgactaacaaatggtttcacatcgaaaacctcaaagtctggaatatgctctccagttccaataaatatgaccgggctttttgtagctgcaaccgcgctaagtgcacccccgccttttgcatgaccatccatttttgtaacaatcacagcaccaaccgaagcactctgtttaaatgcttgtgcctgatcaaatgcagcctgaccaatactaccatccatcacaaatatcactaggtttggtttcgtagcttcagaaacttggcgcatttcttcaaagagagcagcttcctgc

SEQ ID NO: 7848 - DNA, 924 bp, Setaria italica
  Peptide Sequence Number=SeqID_73822
cgggtgatgcacgccagcgagtacaggtcggggaaggggatggaggggaagagcgtcctcgtcgtcggatgcggcaactctagtattcggagtcctctcaacctcgctgaaaacggcgctatcacctccatcgtcgtgcgcagcgaggtccacatcctgacgaagcagatactgaacctgggggtgaagctgggcttttacctgccgatctggatgatcgacatgctggcgctgttcctgtgctacctcgtgttcggggacacgtccaagcacgggatcaagaggcccgccgtcgggcccttcaccatgaataggcagaccgccgccctccccgtcatcgacgtcggcacctacaagaagatcaagagcggcgagattcaggttataccgacaggcatgacgagcgtgcaagggaacgtcgtcgagttcgccgacgggaggcggcatcctttcgacgccatcgtcttcgccaccggctaccggagcggcataaagcggtggctccaggacggcagcagcgagctggtcggcaacgacgggatcctgaagcagcgcagccccaaggcggggaacgggctctactacgcggggctctccgggagaggcatctttggcagcggcacggacgccgagttcatcgccgacgacatcagcaagcagctgcagcccgtgcacgagcacgaagcccatggcaagccagagcactagctaatgtgagtctgcagacagagatcaacaagagtctaggtctagctgtccttggggcttagcttgcctgcaaaacggaatagaaactagcaaccccttgtagccgtgcgggtagcttgcttcaattctgatggttgcgcttgcattgcatgagtggaaattagaaataagtaattttaattaaaaacgtttacttaagaaaaaaaaaaaaaaaaa

SEQ ID NO: 7849 - DNA, 309 bp, Setaria italica
  Peptide Sequence Number=SeqID_73823
ctttttcttgagctcggcagtatgctagatcttgatcgacaaaatacaggaaaagccacggtattaggtgatgctgcgcgagtactgcgagatctggttactcaagtagaatctcttagaaaggaacaatctgctcttctatcggaacaacaatatgtcagttcagagaagaacgagctgcaagaggagaatgctacactcaaatcccaaatatcagaactagcaaacgatctctgtgcaaggatggggagtagcagtctcagtctaagcagtcctgggatgtcacatccagtggcgaacgctacaagt

SEQ ID NO: 7850 - DNA, 270 bp, Setaria italica
  Peptide Sequence Number=SeqID_73824
acaattgaagctgttgcggacatttacggtattgactccatagcagcggatctgaaggagaacaagatgaccatcataggagacatggatgctgtggcaattgccaagaagttaaagaagattgggaaaattgacattgtatctgttggacctgcaaaagaagaaaagaaggaagaaaagaaggaagaaaagaaggaagaaaagaaagaggagaaaaagaggaaaagaaagaagagaagaaagaggagaagaaagaagagaaagaaatga

SEQ ID NO: 7851 - DNA, 680 bp, Setaria italica
  misc_feature (661)..(661): n is a, c, g, or t
  Peptide Sequence Number=SeqID_73825
gtttctagcaagcgctgtatcagcaacagcagccacacatgcaaaatcagccacctcaataccccaacccgcatcctcaacacatgccgtaccagcagggtccttacaacatgcaaccccagcagcaacagcaaggaccgccatatccgtatcaggcagacaagcagccacaaatgccgcaacctgcctaccatcaaacacagcagccaccgatgccgcaagctgcctacaatcaaggtcagcagccaccgatgccgcaatcttcctacagtcaaggtcagcagcccgtgataccacaatctgcctacaatcaggctcaaccgccgcaaatgccacacggtgcatataaccaaagccagcagccgcaaggaatgaggattcctcaaaatcaagtgcaacaccctcaacaatctatgagctttcaccaccctgcccaggctccacagttaccgcaagtttctcaatctcaaggacttcaaatgcccctcaacaaggccaactgctgcatggattgcagttctctcagcatggaaaacagccactgtcacatgggcaacaaagtccattgttgaaggatgatgattcaggaggtcatgaaggcaagaggactggctttcattaccacttagtcagcagcgtggccaagctcctattcaaaccngcagttaccttctagtcat

SEQ ID NO: 7852 - DNA, 1363 bp, Setaria italica
  misc_feature (1357)..(1357): n is a, c, g, or t
  Peptide Sequence Number=SeqID_73826
ggcagtaagaagcagtgaatttagttctgccaattctgtctagctagtaagtagcattgcctgactaacacgttcatggatcataccagtatcagtgtgtcagacacctctctctctcagctcagagagcaccagagccatggctgctccgaagaagacgatgaaagcctttcagtacgacaagtatggcggagggggcagaaggcctcaagcatgtggaggtgcctgtcccgtcgctgaagaagggggaggtgctgctcaagctggaggcggccagcatcaaccccatcgactggaaaattcagaagggcatggtccggcccttccttcccaggaaattccccttcataccagttggagacatttccggtgaagtcgtcgagctgggcaccggtgtgaccaacttcaaaacaggcgacaaggtcatctccatcagcttcccgactggcggcgggcttgcggagtacgcggtggcgccggcgtcgcttacggtggcacggccgcctgaggtgtccgcggccgaaggcgcctctctgccgacggccgcgtcgaccgcgctccagcagctgaaggccttgcgggtcaccagcttcgacggctccggcggcggcaacaacaacgcccccaagaacgtcctggtcaccgcggcctccggcggcgtcggccactacgccgtgcagctggccaaactggcggggctccacgtcacggccacctgcggcgcgcgcaacctgggcttcgtcaggggccttggcgccgacgaggtgctggactacaagacccccgagggcgccaggctgcagagcccctccggcgtgaagtacgacgcggtggcgcactgcgcgacgggcaccccgtggtcggcgttcgcgccggtcctggccgacagtgccacggtcgccgacgtgacgccggggatcgccgccaccgccaggtcgttcctgcagaaggtgacgctcgccaagcagaggctggtgccgatgatcctgatacccaagaaggaggagatggagtggctggcggacatgacgaggcaggggaagctcaagacggtgatcgactccaggtaccccctgagcagggcgcgggaggcgtgggcgaagagcatcgaagggcacgccaccggcaagatcgtcgtggagatgggagacgaagagtgatgagccggccggcgcgcgtgcacgatgacatggttgagaacattcagcattgtgtcgtgcagtgtatgtaaagctatgggtcctattggatttcttgtgtggcagtaagaaagaataagttgcgttgtgcagtctgaaatcagattcaggattaaccatgtttctatgctgcttgcatccctccataaaaaaaaaanaactag

SEQ ID NO: 7853 - DNA, 997 bp, Setaria italica
  Peptide Sequence Number=SeqID_73827
taaagatattacttcagtatagacctttctttcagttactcttattgttaaaccacaggagggaaatgcattttgcagtatcattacaaatgtacacactgctaattctgaactatctattacagtaagtcccaacaattcaggtaaataaggccgggcaaaatttgattggatttgattcttacaaggatacaccaactggaagtctggaacagatgaggctgtatcagtcgttcaggccttcagggcttgtgcactgctgaatacccatgcgtgtgctcgttgtgcattggagcagtgacaaacagcacaacagaagcgccaagcagtaccacgagaagagctgtgaagttcaccagcagggcctccgagctgtacctgccgaggccgttggcctgaaggaaggtgagcttctccaggaaccccaactctgccgcaagcagtgccagcatgtagacgacaagcccggagcgaacgtgccatgggagcattctgcgccgcactgttggcgaagcaccagggaagaagaaggttgtaacgccaagtagccactgtataccatacaggcagatagttccgagtccaatccacgaatgcaagctgtagagattagcgattccactttcattgtggaacttgaaggcagcatatatcccaacagaacctaggaagagtgcaacagcatgaagaagcatgtgaaccatcttatttgtatcatgactccatggcagtattttgtagctcattatggcttcactccctaggatgatgaatcctatcagcataagcacaggatgcacgttgaagatgaggcccttgttggttggggagccaagggagagaccaccgcggaaatggacgcaccacagcagcacgagcgccgccgcggaggacgcaagcgcgcgcgccaccttcgcgtgcgccggcgtggccatctcctcctccgacctccggctgtggaggggaggggaagggaaccggaattcggaaatctccc

SEQ ID NO: 7854 - DNA, 500 bp, Setaria italica
  Peptide Sequence Number=SeqID_73828
acggcacggtggccgggtacgtccggaccggcgacccgggcgcgttcaacgcctacatggcgcgcttccacgccgcgggggcgcgcagcgtcgcggggatcgtggacgcgttcgcggcgcggggccgcccggtctcccgcgtcgtgtacacgctcttactcccgtgggcggccgacgtcgcgcgggagcgcggcgtcccgtccgcgctctactggatccagccggtcgccgtgttcgccatctactaccactacttccacggccaagacggcgtcatcaccgagcaccgtcacgaccgtccttcgtcgtggagctcccgggcctcgcgcctcagaccatcggcgatctgccgtccttcctgaccgaatccaccgacccttccaatatgttccacagcgtcttcaccgggatccgcgacctgatcgaaacgcttgacaaggaaagccccaaggcctaccgttccttcgtcctaactacgtttgttccttaagtttagttta

SEQ ID NO: 7855 - DNA, 420 bp, Setaria italica
  Peptide Sequence Number=SeqID_73829
catactaccgatccatgcaagctaagctgctaagcaaggatcgccgctagctaacaacccgcgtgcggatgacgagtgcagttcacgtttaacctgatggcgaagaacataatgagcatggaccccggcgaggaggagacggagcggctgcggctggagtacatcaccttcatgaagggcgtcgtgtccgcgccgctcaacttcccgggcacggcctactggaaggcgctcaagtcacgcgcgtccatacttggagtaatagagaggaaaatggaggacaggcttgagaaaatgagcaaggagaactcaagtgtagaggaagatgatcttcttggatgggcgctgaagcaatccaatctctcgaaggaacagatcctggacctcttgctgagcctgctcttcgccgggcacgagacgtcg

SEQ ID NO: 7856 - DNA, 303 bp, Setaria italica
  Peptide Sequence Number=SeqID_73830
ctcgaggtttatccgtcacagccgcgcggcgctccgggggtttacagatggcggactgcatgcaggagtggccggagcccgtcgtccgcgtgcaggcgctcgccgagagcggcctgtccgccatcccgcgctgctatgtcaagccgccgtgcgaccgccccgtggcgccgccgccggccgcagccctggaaaaggagcattttttggacgacgtcagcattccggtgatcgacctcggcgagctgctggcggcggaaggcggcggcgccggcctcggcgacgtcaccgaggccgtcgcggccg

SEQ ID NO: 7857 - DNA, 538 bp, Setaria italica
  misc_feature (12)..(12): n is a, c, g, or t
  Peptide Sequence Number=SeqID_73831
aagttcacaggnaaaccagcttctgatagattagtagtaatggacatgacaaacaacagtgcaatatcaggtagtgggagtgctggaaggagaaaaattcttgtcttgcatcttattcggtcttgtagggaaatggagatgaaatttcttgtcagaacgctggttcgtaacttgcgtatcggggctatgatgaagacgatattacctgcgcttgcacatgctgttgtttttgatagaaagtgtgcaggagatcctgtggtgtccttggaaggcatacaatcacaactacagagtctttcaactgaagttgctgaggcatacaatgtcattcctaatctggcactgcattttcagcttcatccttggcaatggtgcctggcacacctattccacctatgctggcaagaattactaatggattgacccaatcattgaaagcttttaatggcaaatcatttacgtgtgagtacaagtatgatggtcagcgtgcccagattcacagattacttgaataggaatctagtgcgaatattttcga

SEQ ID NO: 7858 - DNA, 714 bp, Setaria italica
  Peptide Sequence Number=SeqID_73832
gggagaaatgtttgacatcttctgtgtttcctgaagtatatgctatcatcattgtttgcaggtcaagcgtgactacgtggaaggcttaggtgatagccttgacttagttccagtcggtgcatggtatggaaatgggcggaaagctggatggtacagtccttttcttatggcatgctacaaccctgaaactgaagagttccaaagtgtatgccgtgttatgtctggtttctcagatgagttctataaagagatgaaggagttttattctggggaaaggatactgctcaggaagcctgtttactacaaaacagatgagcaaccagaggtgtggttcactgcagaacaagtttgggaggtccgaggcgcagacctcaccctatcgcctgttcaccatgcggccattgggtatgtccacccatcgcgtggcatctcggtgaggatgccgaggtacatccgctcggttccagatcggagcccagaggattgcagcacggtcgctgatattgccacaatgttcaaagctcagacccggaagatggatgtcagcagtgagggctaggagtagggatgcaagcgagcagatgaggtcggcccattgcctcatcctagtttttcttttgtttaccaattttgcatacaaaatgaactagcgatacaccactggttaaatggtgaaaaatgtagaacagtcaccactgactcccccctgtattt

SEQ ID NO: 7859 - DNA, 1618 bp, Setaria italica
  Peptide Sequence Number=SeqID_73833
ataggatgattctttgctgagagagaagtctatttgtcccgacaataacaccatacttgcacttggctcgcacttttaatctggttgaaaaagaaaaaggaaagatcaaaactacggcagcattttgcaacatgttcaggagtttgcttgccttatcccctgatgatgtgctacctgctgtttatctatgcactaataaaatttctcctgaccatgaaaatatgctaggaactgaacattggtgggagtcttgttgtatctgctctggaggaatcattaggtaccagcagatctaaaatacatgagatgtacaaaacttatggcgatcttggtaatgttgcccaagaatgccgtcagaatcaaacattacttgcccctcctcgtcctctctccattcgtgatgtatattccacacttcggaaactaagtgcaatatcaggtagtgggagtgctggaaggagaaaattcttgtcttgcatcttattcggtcttgtagggaaatggagatgaaatttcttgtcagaacgctggttcgtaacttgcgtatcggggctatgatgaagacgatattacctgcgcttgcacatgctgttgtttttgatagaaagtgtgcaggagatcctgtggtgtccttggaaggcatacaatcacaactacagagtctttcaactgaagttgctgaggcatacaatgtcattcctaatctggatctgctcattccttctcttctgagcgaaggcactgcattttcagcttcatccttggcaatggtgcctggcacacctattccacctatgctggcaagaattactaatggattgacccaatcattgaaagcttttaatggcaaatcatttacgtgtgagtacaagtatgatggtcagcgtgcccagattcacagattacttgatggatctgtgcgaatattttcgaggcaaatgaaagaatcaactccaagatttcctgacctagtgaacatgattaaggagttgtgcaggcctgaggtgtccagctttatactggatgctgaggtggtaggagtcgatagaaagaaaggaaataagttgatgtcattccaagagctatcttcaagagaaagaggaaacaagcactcatcaattgcaatcgataacataaaggttgacatttgtgtgtttgtttttgacatcatgttctgtgatggagagaggctgctggattgtcctcttcggcaaagaagaaagtacattcatgacttgttccaggagaagccaggatattttgagttagctcagcagctaactgtagaagccagcgaagcttcaccagacaactctagcactttgcatagaatgaacacatttttcaaaaaggcatgcgagtcttcttgtgagggtataatgttaaagactttggatgttgatgctggatactctgcttccaaacgctatgaatcatggttaaaggtcaagcgtgactacgtggaaggcttaggtgatagccttgacttagttccagtcggtgcatggtatggaaatgggcggaaagctggatttgacaactagttcctttttctttattggtctattgtcttactaacccttgtaaacttgtaaagtaagtttacctaaagttagta

SEQ ID NO: 7860 - DNA, 220 bp, Setaria italica
  Peptide Sequence Number=SeqID_73834
tcagacatggatttgtatctcttccgcaagaatctgcaacaccataagttttcactagaaattagaaataatgccagacacacacatacacagagagatataacacaacacacgcggagagatatcacataacacacagagatatcacataacacacagacatatcacataagacacacatgcacatacacgcacacagatataacataacaaactaggg

SEQ ID NO: 7861 - DNA, 452 bp, Setaria italica
  Peptide Sequence Number=SeqID_73835
cctatcccctgtgtgccttgtctatcccctgttgcgtttctcagttttttttcaagaaaacaccttcagtttattagataccatacacatcgaaaaaggattacatgcactccacctcgaaccctgctaacattacaagcacgaccccatcctccacacaccatccatttgacacagcaggtagaggaaacaaacacaacgcggcgagattgcaggctgcggcaaagctccacgcagccctaacccgccatatgcacacagcagcttattgacacggcacaacaccaagagctttcagcatattctacagactaaagccacagagtggatgcaaaaacactacacatagcggcatctacaatatatcacagtagaggttaagtactagtcctagtcgtaactttaattaccccgtttacccctttacttttagttaatttagtttactttta

SEQ ID NO: 7862 - DNA, 785 bp, Setaria italica
  Peptide Sequence Number=SeqID_73836
taacccgccatatgcacacagcagcttattgacacggcacaacaccaagagctttcagcatattctacagactaaagccacagagtggatgcaaaaacactacacatagcggcatctacaatatatcacagtagaggtaagacagccagcgacttatccccgttcccctcttgatgtcttccctcctccttcccctgacttaggtgaagtagatgcttgtcaaggagcaaaaaggggtgtgaacatgttgcgtgctcacacttcaaagggaggagggtggctggtcgtccctggcggggatgccctctcatatgcatcagatgatgatttccttctgaagcgaccaccggcgccggcgaacggcgagatgggcggggtggtccccagcggcgaggccggcggcgtgctggccgcgctcctcggcgacgacgggtaccccgcggggcgcttgatcatgatgctgcgcgtcaccttcacgggcgtctcctcgctgcccgacgccggcgacggcgggacgaacgccgtggcgtcccctgccggatcattgatcttgacggcggcggggcgcgcgggctgcttgcggaggcggccgagcccggtgtccgggcggggccccgcgacggtgtcgtcccacagcttgtcgaggaggcccatccctctcccgtcgtaatcaccgaaggccgatccggtgcacagtctcccttcccttcccccaaagctttcgggatctgagcggctgagcgagcgagaagaaggtatgaggccgagcggttatagcgcagtgt

SEQ ID NO: 7863 - DNA, 696 bp, Setaria italica
  Peptide Sequence Number=SeqID_73837
ttggttcttatttactttaaaggcataactaaacaaataatatcacagtagaggtaagacagccagcgacttatccccgttcccctcttgatgtcttccctcctccttcccctgacttaggtgaagtagatgcttgtcaaggagcaaaaaggggtgtgaacatgttgcgtgctcacacttcaaagggaggagggtggctggtcgtccctggcggggatgccctctcatatgcatcagatgatgatttccttctgaagcgaccacctgatggattcagtgctcaaagttaggcaagattcaatcagatgaaagaggtagcatctctgaaacactgaactaatacatgctggacataagctaatatcgtgagtgcaatcagcggtactactgaaggtccatgttattcgcgctaacgagtacatataatccgcaacactcagctactgcaaacagtggatagcagcaccaacaagagttaaaagaaataggactaccagataagaattcgctaaaacttaaacatggttgtagattttaaaattgaatgaaacgctgaaatgattacaaatatcatccttgattggttgattctagaaggtgcctcgaataatccatatcacaatattggcttcagtaaagtcatttgtataccagggactcgtgaggttgttcctccgtgactagataactagttcg

SEQ ID NO: 7864 - DNA, 677 bp, Setaria italica
  misc_feature (1)..(25): n is a, c, g, or t
  Peptide Sequence Number=SeqID_73838
nnnnnnnnnnnnnnnnnnnnnnnnnttttttttttggcatcatatggcatcatagattcacagcaagttcaagaaaacaccttcagtttattagataccatacacatcgaaaaaggattacatgcactccacctcgaaccctgctaacattacaagcacgaccccatcctccacacaccatccatttgacacagcaggtagaggaaacaaacacaacgcggcgagattgcaggctgcggcaaagctccacgcagccctaacccgccatatgcacacagcagcttattgacacggcacaacaccaagagctttcagcatattctacagactaaagccacagagtggatgcaaaaacactacacatagcggcatctacaatatatcacagtagaggtaagacagccagcgacttatccccgttcccctcttgatgtcttccctcctccttcccctgacttaggtgaagtagatgcttgtcaaggagcaaaaaggggtgtgaacatgttgcgtgctcacacttcaaagggaggagggtggctggtcgtccctggcggggatgccctctcatatgcatcagatgatgatttccttctgaagcgaccaccggcgccggcgaacggcgagatgggctgatggattcagtgctcaaagttaggcaagattcaatcagatgaaag

SEQ ID NO: 7865 - DNA, 627 bp, Setaria italica
  Peptide Sequence Number=SeqID_73839
gtcatattcttgtacttcaccaggtagcacaagacaattgttgtacttcggccccttcccagctttgcagtgaatatatgttattttcccagaagatgcatttctatgaatgaaatcaactgcttgattaatatccacaagtgaaggagcaaacatataatctcttgtaggaagaacaaggtgatcaatcccacgtgactgatacattgatgatggtaccaaagtctcaaatggttcatttagagttatcacaccacgtaccccaagcttctgcaagcgtgaaacatctctgcggaacggaaccgctccaagcaaaatgaactgatcgacctcgtcccaccaccggaactcggcctgggccttgctccgcactacattgtatagcagcgtcgggtagaagagcaccctcgcggcgacgcccaccgcggcctccttcgccttcctccgtgccgccgccccccgccgccccaccgcctccgcggccatggcgaacgctcgaacggctggtgtcgatagcttccaacggggaggaatttccgatgatagggacggtgggggcttggggtgagatcaaggaaaattaagcgctaaatcgcgcccaattttctcttgatcgtttagcgcttg

SEQ ID NO: 7866 - DNA, 269 bp, Setaria italica
  Peptide Sequence Number=SeqID_73840
aaaaaaattccctcgattgcgcagcccagagggacccgcccgccgccgcggtgggccggcgctgcggcgaggaggcggcgggggaggaggccgaggagcccgtgatcggcggcgagtacacactggtgtacgaggacgaggagggcgaccgggtgctggtcggcgacgtcccctgggagatgttcgtggccaccgcgaagaggctgcgcgtgctcaagagctccgacctgccggcctcgtcgctgagagcaggcgggggaggaagaggg

SEQ ID NO: 7867 - DNA, 264 bp, Setaria italica
  Peptide Sequence Number=SeqID_73841
ttttttaataacaacatcctcctccatttccttctctgaatccttctggtacaattttcacaagtctatactccacgaataaaccctctcactcttaagtcttaactcattacagattggacgataagttatccctcactgagacactgacaacgcaccaagcagtcgaactaatgtctggcctggctaccattccccatctaggtcttcaactcgtgccttgtggttcatgaccatgccgtgccgtaaacgaaacatcttaca

SEQ ID NO: 7868 - DNA, 397 bp, Setaria italica
  Peptide Sequence Number=SeqID_73842
cccctcccttcccctctcctctctcctctctctcgtagtgtgctgagagagagaggcgtggtgggaggaggagcagagccggccagcagctgcagcccagcacactacgagagagaggagagagggagaggggaagggagggggcagcaggggctgcagcagaggccagaagcattagaagcggcagtggtaaccaagtggcatcagtagatagagccagccatctatccatccatctatctagctctacaggtataaatcctcacgcatcggtaggagggcgagaaggtggggaggaggggacgggcagcggccgccaccaggctaactacctagtgtgggggaggaccggcggtgggggatttcgtcgggggcggagtggccgggagacctgatt

SEQ ID NO: 7869 - DNA, 723 bp, Setaria italica
  Peptide Sequence Number=SeqID_73843
tgtatctcaaggttaagtttcctcactcgggccaacccagtgagtagcttcacaaaatcacggccatcagtgtcttcatatgttgtgatcaccacttcctcaatagatggaagatcttcaatctgccaattgtagtcaccataatctgaataaatactcaggtttcagagtttgggcgccttaatgtgggttcttcaagcccattgttgtctggaaaccataggtcatcaagcaacagcacctcaagcatcggcgactcagcaatcaacgcctccaaaaccctcacccccattaccctggaatccaacttcccgtaagcataacctggtcagcttcgggaacccggctaatcccgatggggcggccaggatcttacagccaccacttaagtcaaggctggtgagctcgcggcaggagaagatggaaacgtccatgtagtgggcggaggggaaaaactatcatagctgaagtggagcttgaggatctggactcccttatcggcgaggtgggggacccagtcgtcggcgcgccagaacgacccttggtgtaggtcgaactcgaagctgcggacggggccggagtagcgcgggaggacgccgtcgaccacggcggcgtccgtgccgggacgccactcgagagcgaggccgggagcagattcccagagacggcgccaggcgcgggagaccgcggaggtgcggacggcgtcgcggagcgggagggagg

SEQ ID NO: 7870 - DNA, 410 bp, Setaria italica
  Peptide Sequence Number=SeqID_73844
ctattactctgtatgatacatcaacgtacagtggtgccgagtatgtcaagttcctgagccttgccgattttggaaataaagtagctgtctctccatcagcttctgtcatcattggcttgctgagatagatttgaccaaagctgatcttgtgcagagtctcggcgaactcggcctggcggccggggttgtgctgcgactcggggcggatctcgatgtcggcggactcgtcgacgatctcctgcatggtgttctggatgaactcgtcgaatgagtcgagctgctggcgcacgaggcccttctcctcgaagtaggcggagatgacggcccaggcgtcctcctgggtgatctcctcctcgtcccgctgctcggcgtccccgtcctcttccatctcgtccccgtccccgccgccg

SEQ ID NO: 7871 - DNA, 627 bp, Setaria italica
  misc_feature (593)..(627): n is a, c, g, or t
  Peptide Sequence Number=SeqID_73845
cacgattcaacatttctcctgattttttccggtcccttccaaatcgccgcagcgccgtttgtcgagctcgccgccccgccgtttcgtctgcatctacagggaggcggaagctggatccaaccccgtttcgccgctcaaatcgtttcatctccgacggcggcatcagatcgaaggtgatgtggatattgtcttcaatccagttccacttcccctccttttttgcgtgcatcgtggctcagcaatttttttagtgcctgcgggggaggcaaatcgagacgagaggatgcttccgatgtggccgaaaccaggcgccgtgcaggtgggcgacggcgtggctgactgtgatgtccaactacagcaacgagcggcagcacaagagcgtgatgggtctcttctacatcctcgagcacgagcaacaactgacagccaatagggtttcaccatggttccttttgttaaagattaaagcttgtttcctatccattattttggccgaaaaaaatgtaatgagattgtcttttcaatggatatgcatattttatatacatgtttgatttgtctctgttgacacatcttcaaaatttgtataagannnnnnnnnnnnnnnnnnnnnnnnnnnnnnnnnnn

SEQ ID NO: 7872 - DNA, 727 bp, Setaria italica
  Peptide Sequence Number=SeqID_73846
ttttttttttttcagttaaaggtaaggatgctgcattagctaagatttagttacacattacaaccgtacaattgaagtggaaatgaacactgccaaaactcacatagttttgcgctttgcagggccaaaaaaagaactcaaatcgttgaaactgtgtatctgaacttatgaacttcattgttttacaggagaccgtcaatctcccagttgtcatcatcatcatcacgagcctttgcggcgcctgcatcttcttctgggaaccttggctcatccatcatgcgcctgcggcggttgcggcgtccggcctcgcgcgccttgcgcttcttctcatccttcttgctttcgtacctccggcggcgcttgatctcctgcagcacgccggcgcgcatcacctcccgccggaaccgccggaagatggactcctccccctcgttctcgtccaccaggatctgcacattgtaccccttggcggccaccaccgccgtcggcgcccgccgcggcacgtgcaccacggacggcggcgagctcttccctgagaacggggccaggggcagctgcagcagcgtgctcagcagggacgtcgtggcgggggcggccatggctgtggcctgcttcggctggctggctgtctggtaagtgggcgctaatggctgccggtgctgcgcgctcccgggtctggaatttttcggggttcttggatggataggatgagaggctgaggaaggag

SEQ ID NO: 7873 - DNA, 793 bp, Setaria italica
  Peptide Sequence Number=SeqID_73847
ggaactaaatttttcattttgcggacagtctgtcccaggtctcagtttggattgtagctccagcattagatcagtaaaacgaatggtctcattgggcactatttgcatgaccacggccatctaacctcatgtttactgatgaaaaggggagagaatagcgcaacatttatcagatgggtattctttcggtcactctttcagatcaaagtatcatctaccaacgtgattttgagaacaaaaatgtgtgtcaagaacaagaacaggagattgcttatccagcatgcacatcttatgggaaaacaagagcaagaatgtaggcacaatgaacctttatttttcttttatttctgtttctttttccccatctccaactcgttcttggtaacatcagccgccgctgatgggcggtatgacggcgagctcgtcgccgtcggcaaccttggcggagtcgggcgcgtactcctcgttgagcgcgagcaccatggagccgcggatctcctccagcttggggaactgcgccagcacccgggcgaggcactcccccgcggtgccccccgccggcacctccaccgacgactccgccacgcccgtcaggtcccgcgcgcgggcgaagtagagcaccttcaacctcgcggctggcgcagccgggtcggccgcggcggggccctcctcctccgtgggagcagcatctttgggatcctgcgtcgccatcgccggaggaaaggaagctgatcgccgcctcgtccggtgcttatttgctgccgtggtcaacctggctgggtaggggttggag

SEQ ID NO: 7874 - DNA, 263 bp, Setaria italica
  Peptide Sequence Number=SeqID_73848
aacaacaaccctgatctttgcagaaacaaaacgaggatccgattcttcctggtagtttgctataatacatatcttgagaggctccccatttgtgtcgaagatgttcttctttgtaaaaacttcagtgcccaagccattcaggaaggtgagcttgtatctcggaggccggttctgatcaaccagagttctgcacaaactaggagcacggcttaagaagcttgtcagtgctttggcaacctcctctggtatccgggcgacggcgg

SEQ ID NO: 7875 - DNA, 2863 bp, Setaria italica
  misc_feature (2803)..(2803): n is a, c, g, or t
  misc_feature (2852)..(2852): n is a, c, g, or t
  Peptide Sequence Number=SeqID_73849
ctcaaaactttcaccctagctctgtcccaaagcggtcatttgactctgcagtctggttgatggatcacgcaatgctccacaagataggttccgaccacttctatcaggtgtccctgccagcacatttggctctggcaatggaaatgatgtgcacaagcctatgttctcacacatttcctctttgacaactagcagcaatgcaagctctgatcatggtgcaattttttggctcttataagcatggcaaccaagagcaacaagatttggttggtgaatgggaagcagatgacagctctcgaggtcatgaggacatatttatgtttgataaattggacgaactaaatgaagaaaacattcattacaagagcacggaatctatggagaactccccaagcatagtaaaacgtcaagtaagtgacaaacaagacttcgacatggaaggaagtggaacatgtgatcagtccttatgccattctactaatagttctctggttggctatggtaaaactgcaacttgtgtgagatgtgggaagtttttggatgtggatggtgagggtgactattgcgacatatgtgcgtcaaaggttgggaataccttcactgattctatcgcacaaactatagaaaaagcaaaccagcaggatgataaagctgcaaatttgaaaccttacattgtatctgatcgtcatatagccccagactctatagaccataggaaagaagtatctcttgatcatcaactagtgaacaatgaacctcacactgactgcctggaccatgcacttccattgcactcaatgatggacacacctcaggaaatgatgctggtgcaggaggggaagattgatgcagaacatacaaagcaacatgtcggagattccgcactaggaaatagaatcaatatcccatttcatcaatctagtgtgactgaccctcaacaaacagaactgacatctgtggagcatgagctattcagagaccaaatggacaaccgcaatcatggattgtcccaatgtggtgaaactatttccgaaactgtgacctgtgatgactctcatcaactggtatcaacaagccctaagcttgaaaatactgaggccactgggatatcagtactattactccagaagtcaaatagcaatagatggcctgttgttgaagggagggccctgggttctgcaaatacgctttgttcagaaccatattacgcaagagatggtgtcaatataatgaagcgtagctttggacgggacagctcttcagctgcttcttctagtgatcttgggtcttcaaggcaatcagtcatttattgtgagcgccctaggagtggtaagaggggtgactttgagaagtctcagataagcagtactatgagtcgtcaaagcatcgcttctgtctcagatatgtcaattagtagctcttcagcttcactttgccctcagagtgatgcagtaggagatacttatttgccaatagacactttggagagtagtgcttcaagaaaagtgatccctaccaaagaacatgatagttctggtaaggttgctttgacaagtgctatggagtgttggtctgctgcacaggctattgtcagtgatgacagccttgttgacttgaacacctcgagctttgtaagtgtggtagaaggagatgcgacaattgagaaccattgtacagacaggatggctgacagcgatcatttcagttcaaatatttgtttgtcagatactgaaatgccaagtgacatccaagagtcatcagctccagaggaaagttgcataccagaaactgaagaggacacttctgttattagtaagcacaatacaagtagcactccagaacatccaagtgatgagaacaaccttgataatatgcaaatgcagttcgaagcagctcagggttcaaatgaggaaaacagattggatgattgttgcatgtctgccatttccgaggaggatgtgttggtttctgaaccaaaaactaacataacggaacttcctaatgatgaagaatctcatgcagtggtagaaggatcaaagaaacaaatccagagatgcttcacactagaagaagccgctgacacaattctcttctgtagttctattgtccacgaccttgcatacaaggcagcaacaattgccttggaaaacgagaaggaatcagaatgtctcgattctattcgccccactgttaccgttgttgcaagatctggtcaaaaggaagatagtttaccaaagctgcctcacagacgaactccaaatcggaaggttaaaaggaaaagattggaaggcgaaacaactacaacggaaactactgagaaagatgctgttgctaaggactcctcgcctgtacgttctgcttccggcattacaaggaattctgataacatgaagcctccaaagctggagtccaagtgcaactgtataattatgtaggtacctccattgtccatgatctaaggagatttttgggatattggttggatggaatcacatgtttcatatcatgaggtgggcacagagctgaagcatggcttcacctgttaccagcaaagaaggtattccgcacgggtcttctgctagattattttcgtatggtgcatttgctgtgttttaggtgacagaatgcactgcgagctattcttttgtaaattcttgtttctttttttttcctgcttgccattgcggtttgtgcaaagtgtaagaaactactagaggaggtgttgtgttgatagcgtattttcctgcaatgcacgtggcttgttgtgtcaatatctttcaacatttgtagtacgtgacttgtnagcatgggcttgttctgatagttagaaaacctaaacggaagacaataanaataaaaaaaa

SEQ ID NO: 7876 - DNA, 388 bp, Setaria italica
  Peptide Sequence Number=SeqID_73850
tccaccagtttctatttcatctttttcgtctcatggtgatgctatcaaattttggcaaccgggttttgctgttggtagtgcatgcaatgctctgaacctattatcagttgaaagatctgaaacaaggtggaaaccctggcaaatagaagttttggatagagcattgttgtatgaagggcctgcactagcagataggctctgctgggagaatggatgggacttgaaagtctctaggttacgttggctgcaattggccctgcattactcgatgattgctgatctagagcagtcacttgatatgctcgctgaggtcaatcttgcagaagaaggtgtcttgcaactgctattggcatctattcatcggttatctggtaggtctggaagcgat

SEQ ID NO: 7877 - DNA, 266 bp, Setaria italica
  Peptide Sequence Number=SeqID_73851
gcgtggcgatcccgtgcaggatgggcgcggggatcgcggacgagggcctggaagcgagcaggcggtgcgcccgccttagcaaggccagcgaacgcgagtcggcgcaggactggaggagcgcggcttgctcttccggctggagctcggcgccgcctcctcgttggagcatttggtcgagcagtctaatggcagcctccgggttgggtccacggcacagcctcctgagctcatcgctctcgaatcccccatggatgggatccggcgag

SEQ ID NO: 7878 - DNA, 410 bp, Setaria italica
  Peptide Sequence Number=SeqID_73852
tcaaccgcaacctgatccttctgctcatcaacaattcagggacatactccataggtcctttgactttcaggctgacaatcttgaacttaaccttgcacttctgttctaacggcttctcattgttctccggatgctccacaaatttgaacaccgttgctatgatgctttcccctggagcaagtatgccgcccggaggcctcatgaagcaactctttggtgctgtcgtttggaacttgaatgccacatgggacttgctgatgttcttgatcctgaccgcgctccggacttgcttcccaggttcatatgggaagtagagcttggcgggcgggtcgagccggaggcggcgccgggtggggagcagcgaccggatcaccttgacaccgccggcgccgccccggctggacccgggc

SEQ ID NO: 7879 - DNA, 231 bp, Setaria italica
  Peptide Sequence Number=SeqID_73853
cgtgcctcaagagcagcttctgcttcagcaagctggcgcttgagcttgtccatttgtgggctctgacgctcagcatccaagaatactacccgcaaaatttgctcaaccgcaacctgatccttctgctcatcaaactgcaacacaatgttaaaacttcagcttacacgacgatttgaatagagacaagtagaggcttcgaacaattaaactgaatatacattgtcagggttg

SEQ ID NO: 7880 - DNA, 370 bp, Setaria italica
  Peptide Sequence Number=SeqID_73854
tttgtggatgtttttattaatgtaacatgatgggaggacgtccattaatcaccttggagggtgcctttcgagattacattacactttcaatattgataggacagcagctaagggaatgtatcacattcacatgtccacagtccacaaattccaaatacatggctagcacagattatctacacacatgcagacccaagagagaagtacagcatgaagctcaaatcctaattacataaagcctcattcttgtttgattgctacaatccgaaccttcacaaaattaagctccaaccgcttgacaaatggagtgtgaaaggacagtattttggcgcccataaaatggtatgttcaatttgctgttttagtagtt

SEQ ID NO: 7881 - DNA, 923 bp, Setaria italica
  Peptide Sequence Number=SeqID_73855
aatctgtgctagccatgtattatctacacacatgcagacccaagagagaagtacagcatgaagctcaaatcctaattacataaagccgtactcaaattccaaatacatggctagcacagattatctacacacatgcagacccaagagagaagtacagcatgaagctcaaatcctaattacataaagcctcattcttgtttgattgctacaatccgaaccttcacaaaattaagctccaaccgcttgacaaatggagtgtgaaaggacagtattttggcgcccataaaatggtatgttcaatttgctgtttagagtgctgcgttgtgtctacactgaatcaacaccttcgatctgctggcgagcaaggtatctctctcttcgttccttccattcgtcaataacaaggccttcgccaacgatacggggaccgttgtcctctggaggtttcttgcgtgcctcaagagcagcttctgcttcagcaagctggcgcttgagcttgtccatttgtgggctctgacgctcagcatccaagaatactacccgcaaaatttgctcaaccgcaacctgatccttctgctcatcaaacaattcagggacatactccataggtcctttgactttcaggctgacaatcttgaacttaaccttgcacttctgttctaacggcttctcattgttctccggatgctccacaaatttgaacaccgttgctatgatgctttcccctggagcaagtatgccgcccggaggcctcatgaagcaactctttggtgctgtcgtttggaacttgaatgccacatgggacttgctgatgttcttgatcctgaccgcgctccggacttgcttcccaggttcatatgggaagtagagcttggcgggcgggcaacacaatgttaaaacttcagcttacacgacgatttgaa

SEQ ID NO: 7882 - DNA, 447 bp, Setaria italica
  Peptide Sequence Number=SeqID_73856
gggaaaagatgaggttcccgtgtctgcccatttcagctttcagtttctttaacgaaacaaatatcttgcatttagtgctaaactgcaaatactcataacttgcaaaagtttcttcagttttccccttttttgacaccacagtgatgttttcttttctggccttaattgtgccttaaagaaaaccatcaggtttaaccactaaaaaaggcaattacaggacatcacctaatgtgtgcgtcgattgattgagttgcacctatcctcagcacctgcttactagcaaactttccatgcccaacgcatttaaagattctgcactatcttagtactaatacctctgtagattacgcccaagaaactgcttttgttgaccgtaggcaacaaagatttagtttaatataccgtgacggaatgaacgaaggatctaaagcaaagtaacttacgcaa

SEQ ID NO: 7883 - DNA, 232 bp, Setaria italica
  Peptide Sequence Number=SeqID_73857
ctgctgatcacagcgcatcgcatctctctccggtcataggacccgccctcctccgcggctccggcgccgcacccgtctccaggagcagctgtcccttctccgcgcggtggagacggcttggttatttctcagacataatttggtgatgctggggctctagtagtcatattgcttcgaagatatcagctatggatcatctgaatcatgaaagctatttccctctactgctctg

SEQ ID NO: 7884 - DNA, 813 bp, Setaria italica
  Peptide Sequence Number=SeqID_73858
aggggctactctcctatctggtgacagcatttgcacgcctttgcaagctgcaaccgccgtgcccgatgtgcacaaggttggatcatgtcttgggcaaggtgcagaagggcttttactgcgaccttatgtgcagttctcacaaggcagaagcatcatcatgggcattttgccacatccaccaaaagcttgttgacgtccacagtatgtgtgaggcctgccttctttcatttgctactgacaagaagtcaagccttgagacataccgatccttggtagggaaactcggtgtcggtattgataatgcaggtcgcagagacaacttcacttcggggaatgatacatctgaagtacaagacatgaaggaaactatatgctcatgctgctcgaggccattggaagtgaagtctcatccttttgtcgttcttcaaagcaaagctagtggaattggcatcgaggggatttgcagagttgtatcaagagatcatcagaatatcgatgagatcaattatgccgcatacagtgagttgaggacttctgatactgaatcagagccctggcagcctgttggtaatgttggaaatttgctaaaggattacaatgataatttgaaggaaggttttgcaatgaggcatccactaacaaagattgcagatgacatgcctccatatgacaactcacaggggaaaattcctgagcagtctgagttgacactagtccagaatgatggttctgacattaagccttttgaaaattcagaagagttgggcaacatcctagatgatggaaaggcaaacctccagccaactgatctta

SEQ ID NO: 7885 - DNA, 193 bp, Setaria italica
  Peptide Sequence Number=SeqID_73859
aacttaaaaccctaaagaaagaaggaagatctctaaccggcggcggcgatggaggtggtggccctggtgagcggcggcaaggacagctgcttcgccatgatgcgatgcctcgactacggccacaaggttgttgctttggctaatcttatccccctcgacgacgccgtcgatgagctcgatagctacatgtacc

SEQ ID NO: 7886 - DNA, 750 bp, Setaria italica
  Peptide Sequence Number=SeqID_73860
tataaagtaagtaagtttaatatattaactttacatagaggtactaaatccatatcaacatgcaatcagtaaattaagtatggttaaataaccacacgatccacgggccggggaggctgaacgctgcacactaggcaccaaagctgaaagctgcacggagacaatttgcacccaagaagccaaaacagtgtaagcttgtttgataattcaagggcttcaatttgcccgtcgaaagcaggcacccaacccaacgcaatcgatctatcgctacaaatgagttccatcaggtacactttatgccaacctccaattaatttggcgtgctcccgtccattggcaccagtgcagtggttagtcgtcctaatcgcaatcagttcgcggttggcccgtccctcatccagcgccagggccaccggccgaacccaagcacgcacgggcatgtggtacgatcagccgtaccgtgccctgccaatgccaagtaggccggcgcggcggcgcggcagcaggttggagcggcacagcgggcacgtcacctcgcccatgtcgatccagcggtcgatgcagcgcgtgtggaacgcgtgggcgcagttgcccagccgccgcacctcgtccgtcgcctccagccgctcgaggcacacccggcaagtcgccggctcccccgacggcggcgacgacgacgacgatgcctcctcgtcgtcctcgccgcggcgcgccgacggccgccggcgcgaggctgagctcgaggaaccc

SEQ ID NO: 7887 - DNA, 353 bp, Setaria italica
  Peptide Sequence Number=SeqID_73861
cggcttcggcttcttccacctggtgttcgccatgggcgccatgtacttcgccatgatcttcgtcggctggaacgcgcaccagaccatggagaagtggacgatcgacgtcgggtgggcgagcacgtgggtgcgcgtcggcaacgagtggctggcggcgatcgtgtacatatggatgatgatcgcgcccatcatctggaagacacggcaggtgggatcatcggcggagacatgagcaatcctcactcactagtcactaatgtgacatcaggatcgaaagaaaaagaataggaagaggtgtgatcaagacgccctgctggtcagctaatttttgctaagcagaagaggtgaaaggg

SEQ ID NO: 7888 - DNA, 426 bp, Setaria italica
  Peptide Sequence Number=SeqID_73862
tcatcggcggagacatgagcaatcctcactcactagtcactaatgtgacatcaggagatcatcggcggagacatgagcaatcctcactcactagtcactaatgtgacatcaggatcgaaagaaaaagaataggaagaggtgtgatcaagacgccctgctggtcagctaatttttgctaagcagaagaggtgaagggaagacaagggtcaaggaagaggcaactagtagtagtagtagtagtaacggcaaccaagtaattgaggtggcgtgaagctcggttgaggaagctcatcgatcgatcgatcgctcgctgtacaaaattgaactcaaaacgtcatcttttgcttgtcgctgactctcggttgaggaagctcatcgatcgatcgatcgctcgctgtacaaagatgacgttttgagttcaatttt

SEQ ID NO: 7889 - DNA, 1875 bp, Setaria italica
  Peptide Sequence Number=SeqID_73863
attaatccttgccaataattaatataccggtgttgaccaacaaattacacatgtgcttctacacactgtataacaataaatcagttacagttgacccgtatagacaaatgttgtttggaattgttctccaaaggagcgtcagttccttcagctacttcactaactcataatgctctttatttcagttgttcggcgatctgtgtattagtcccaattgttgtacaaactccagctctccatgcttgcctccaaacttcccatcggctccaagtcttcagagaatctagcttgatgtgttgactctggattttctctcttttgagcaccgcgtgcactatctttttcttcataaaaatcaaaatcatccagaattgatgctccctgaggatgatccttgaaaattttcaacatttgcacaccttgcagcaacccaatctcctgagtgtccctactaaatgtaactggtctgttatcattgtattcaagaattatatgcctgaacagccgatttggaatgtcctttataatatgccatattatagggaaaaaaccactccatctatcgtctttccaaaaatccatggtcttcttgaaatcaacagggcctaacatttcagccaaccctacaaactgtccgctggtgttaaccgagaagaataggaacacaggacacttttccccattctctttcattaaaatttgagcatcatggtaagcagcatccagcttattgttcccgtttggtgtacttgcccaaacattgtatttgatacctttatgaatatcatcttcactatatgattttatcatgaaaaacttggcctgtttatactgaactgaaaagtccgatctattgaattgttccctacagaccaatggactcatgatatctttcacaggggatgatgctgaagcatcattcaatttatttgctcttggcccacgaacttggtccattacagcctctggatttctgcagcgattatctttcatattggtcctatagtggtcactactgtttgcaactctgttgaccatcctaggttttataaaagcatgtttgcttgtggtaactttggcttgctcattggtattaatcctggaaaaattttgtcttgaatgaccattccgatgagaagcaccttgccggtaccttgatggcgcatgtggcccaacatcatggcaccaatgaccagagcacgaagggatcttatctcggtagcgccaatttggagaaagtgacgggatctcatcaccatactcatatcttcttgagaacaatggggtttgaggaccatagtgccattggcttgagcgtgaaggtgcatacttcttactagacaaagaagggatctcatcgccatactgcagccctcttggtagcgaagggcctccatcatcaaagcaccattgacgtgaaacaggattgatatcatctacatagtggtgtcctctggcataatcgaccatctcattgcaatgtcctgcagattgaccgttgtggcttgaaaaggcagtaactcggcctgatcttctgtaacaatgttctgaatgatctaaaccataatcgagttcaacttctcgatgttttctcacgtgagaagcagtagtaggatatgaagaaaaataatctggccttgcactgagggtgttgattttggttctcattttccccaatgcatgccctaatgcatctgggctacttggtgctgcttctaatgcagaagatttttcacaagaacagcttgaagtaggaagacatgacttctgcctatgatattctcttcccagtggcgatggatcctcagaatatgcatgtgatctaaggtcagtaacatagttggactccacaggccgtgcttgataatccacaca

SEQ ID NO: 7890 - DNA, 289 bp, Setaria italica
  Peptide Sequence Number=SeqID_73864
ttcgtttaccttctttcgacgcgaacgcgcagtctcggtgcgccgagtacctagacctgatgagggtggaggtcgatgcgcagctcggcaagctcaaggggggcggtcaccggtctcgagagctatgccttgccggacaacggccgcgtgatcggcggtgcgcacctcggcatgtcccttgacgtcatgctgattgagatagacgagaggttcaacgccctgaagctgctcatgggtgccgtgttccgacaggcgagggagatgcttggatcggtcaacgcgtcggcgt

SEQ ID NO: 7891 - DNA, 874 bp, Setaria italica
  misc_feature (769)..(769): n is a, c, g, or t
  Peptide Sequence Number=SeqID_73865
cacggcgcggcggccggttcgtggcccgcgcgtccgcggtggcgatggcgccggcgctggggacaacggcgaggacgcactacgaggtgctcggggtcggggccgccgcgagcaggggcgagatcaaggcggcgtaccggcgcctcgcgagggaggtgcacccggacgccggcggccgcggtgacgagggattcatccggctgcacgccgcgtacgccacgctcgctgaccccgacgagcgcgcgcgctacgaccgctccgtcgcgcgccccgcgccggcccgggccgtggggttccggccgcggaggtgggagacggaccagtgctggtaggaggacataccaagcgtggccggcggtgaggttgccggagcagcaggctctgcgcaccgggcggcccacctcgaaaacgggatcgcgactatttctccgcgacccatcggggcccacctgcaactgaccctcccgggctcccggccgatgagttggatcgtggacgtcaccggcatgcccagcgccggcggcttcgccgggcttcccgcggcgacctcggaggtcgctgaccatggtggaggatggatcgagggagcagggacgcctctctcttcgtaccttgtccaaagttgcacgaagagaggcatttttaacatctcttgtgtacttaatcaccttgtaaatatggttaatctatgtgaatataaaattctcgtcttggacggtaaattacattgtccaagaaaaaggtaaaaaaaaaaaaaaaaaaaaaaaanaaaaaaaaaattttcaaggattgcacaagtgaatgtgatggccgtgacaatttggaagcgctggcaaaatggatccggatccagctcctgctccctggattttgc

SEQ ID NO: 7892 - DNA, 274 bp, Setaria italica
  Peptide Sequence Number=SeqID_73866
cggtcgccacccgcctcagctcggggccgtccatgcccgtggcggcggcggcccgccggaaccgcttcgcgacggccgacggcagcgcccaggcgacggcgacgagcgaggtgagacagccggcggcgcggtgggcgcgaaggagcagcacccaggtgaactgcttggcgctccggccccggtccttgtccatgggcggcaggccggcccggagcgcctccgcctcgggctcgtcgatctccaccaccgagtaggttggggttctccatggtca

SEQ ID NO: 7893 - DNA, 936 bp, Setaria italica
  misc_feature (1)..(1): n is a, c, g, or t
  Peptide Sequence Number=SeqID_73867
ntttttttttttggttcgtgaatgccagaatactttaccgatctgaaaatactcaattcatgcaaaattcacaacctttgagaggtttacagaacaaaattctactagctgaaagaaacacaaaagaaaattaagaaaagaaacgctaaagcaattcaagaataatctgaaactcaagcaaatgtggcgacggacctccgttgaacgccttaccaatgctttcctgggacagcaaagagacttgcagctcacccgagcttcagcgctcacatttgagttcaccaccgaaagcatatgggactggcacaattctagaacagcaagctcagacatctgaagcagaacctgagcttacttgcagcgtctgttgcattgcatgtgccttgacagactgggaatgtctcgggattcagatttctacatgcagtaggcctttgtatagtcactgcactcggatagcaccatgggttttgcaccatcctcctccttggacttcaactcatctacaagtttcaaggatatcctttgatgaacatcctcgataaagccgaaacatgcttcaaatttgaaccgcacaaatgtattcattgcgaaggcttaatccccttccagcaagtgaactcagaaggtattacgttttcgtcacagcaaatagcagctttggcagtcagcttcccaaccaaaccatgatacaaaaggcctctcgcaccaagcccaccaactagccaaaatttgcagttgctcttcttgcctaccatttcatctaaacaacccaaaagtggtaatgatccattagttgttagtggaggcatggctcgtatcccagcccttgcgtgtacaaaatcccatttacttattcctggataaacgccagaagcttttgggagcagctcatcctttgcagtaagagcttcttcatcagatacagttgaagag

SEQ ID NO: 7894 - DNA, 1105 bp, Setaria italica
  Peptide Sequence Number=SeqID_73868
tttttttttttaagctgaaaaccataggttctagatcacatttctgaatatctggtgtatatagtagtacttgaaagagtaagtgtacatgtattctgctagtatacagtccttttggtatatatatccgacaaatccgaaagaaaaagaaataacccatcaacacgttgtctgaatgtcctgtacgatcagtttgatgaagcaaaagcaacgcagcaaccaaagccgtgcaatttaaccacctgtacgatacgatgaccgtcagtttgaagaagcaaagcaaccatcgaaacgatcaatggatgcaggctcccgggacggtccacttggcggcgtgctttgcccagtgcggcatcctggtgtagttcttccagtcgccgagcacggtggcgaggtccctgagcttgttggcgagcccaacgcagcagttggcgtgcatggtgcagatcttgcggaggtccttgccgtagctgcagaagccgcccatgaaggccgggtccatgtactgcacccgcaggccgaggtccctgacgagccccttcttgatggcgttgaacaccggctgctcgttcctgcccgggtacctctccctggcctcgtgccacgccctcgtcatggcgatcgtccggttgttgggacggacgtggaagaagcccgtgttggggaagttgtcgatgttgtccgggtcgccgaagaagacgtcgctggagatgctcatgtccgcgtacgccgtcacgtgcttgaacgggttccggaaccacatcacgtccacgtcagtgaataggaagttgtatccgagctgcaggacgcgtcgctggagcttgagcttgctccagacgagctcgaggtactccttggagaggaagaacttgacggaggcgaagtcgacgccggggatggtgtataggtagcagtgcgggtgcagggctcggcagcgctccatggccggcgggtccatggcgacgatgaggacgtgggacagcaggtgcgcgatgccgtcgccgatgcggaaactctcgaggaagaggtccagcagcgaccccggcgccgcccacgcgtggttcacgcacgtgattgattctaccgttccggttcgttccgtcct

SEQ ID NO: 7895 - DNA, 262 bp, Setaria italica
  Peptide Sequence Number=SeqID_73869
ccggcacgggccgccggcgccggggacgacgagcggaggttcaaggtggcaaaccttcacctcggcggcctgcggctgaagtcgcccgaccggcagaacatgtgggacggcgagaagcagcggctcacggcgatgcactggctcgtcgcctacgggctcggcaaggccgggaagaagagccgggccgcggccgccgggaaggccgggaatgatgtgctgtggagcatgtcgtcgagggtgatggctgatatgtggttcaagc

SEQ ID NO: 7896 - DNA, 756 bp, Setaria italica
  Peptide Sequence Number=SeqID_73870
tagcataggcttgataaaaagaaaaaataacaaacactagcatgagtttggtaccacatcgttttactaattcatgcaggacagcaaggcaataccaatttagcaacaaaggagaaatacaccaatgtaagtcagaactcagtacagatgccacaacagaaacccttctaaaaaaataagtcttaactaacaattctcgtcactgcatcaacttcaggatcaacacaagagctctatgggcacatttgttaaactataccttcaaaaaagatatggtacatgaacatgatgtccccacttgggtaagtgtttcatgctagcagcaggagctaaagctaccaacttgtccaagacgtgtgcatacatatggctctggcattttcaaatccaggatcttgatccttatccatggccgtgaactcataggatgacatacaacaggctactcgatgcgatcatctgatgcttcttctgaagaggtcacaaactctgctatcagccgcgaaatttcctcggaggcatcctcctgaggccatcggccaccggaatggtagacaaatctggcatccggcaatgcagcagccaccttcttaccctcatcaatccacatatctgaccaagtacctgaccacagcaccatcatcggcagcctcctcacctcgtctgaagaacccctccattcacccaactgaaagctgtgattcatcgccttccaagcttcaatcacctcatgtcgtcctcccctccccccgcact

SEQ ID NO: 7897 - DNA, 462 bp, Setaria italica
  Peptide Sequence Number=SeqID_73871
gggagccggaggcgtgggtgtggaagagcggcggcggaggccgaggaggggaaggagtgggaggtggtcaggatgatacgggacggcatcaaggaattcgagcgccggagccaaaccagcgagatttttgaggggttgcgcagcaccggggagctcgttgagaaattcaagtccagcctgaagtcgttcaacatggagtctcaaggatccaaggaaatccctccacttgatctaactgaaatactggcaaatctagcaaggcaatctgaaccatttttggatcaacttggtgtacggagagatcaatgtgatagactagtggaggcattgtataggaaacaaaatcaattccctttcagaagacacatccttgcttgtaaatgataactcatcagatgaacttgacttgagaattgccagtgtgcttcaaagtctggctatcatgctgatgatggttctgga

SEQ ID NO: 7898 - DNA, 420 bp, Setaria italica
  Peptide Sequence Number=SeqID_73872
aataaaggtgaagttataagtacgcactacaagctattttctgccgatattcgtgacataccaaaactggattcagttattcgcatggctgaaatggatcctagcttgccgacctttataattgcagagtgtgtacttatttacctggacccaactgccacgggtgccattgttaattgggcttctgaaaagttcaccactgccatctttttcttatatgagcagattcatcctgatgatgcatttggggagcaaatgattagaaaccttgagagtagaggatgccccctcctcggtataaatgctacaccgaccttgagtcacaaagagaaacttttccttgacaatggatggcagagagccgttgcatgggatatgctgaaaatctaataatgacttcatcgacagtcaagaaaggcg

SEQ ID NO: 7899 - DNA, 934 bp, Setaria italica
  Peptide Sequence Number=SeqID_73873
gtaacatgaaggatgattacgtgcgcttttttgtcaggcgtgcaacaaggagggcgccaataatcaatcgtgggtactatgcacgttggtctgttcttaggaagcttctgcatcagttccttaatgcggggaagaatagcaatgacgagaagccgaagcaaatattatctcttggcgcaggctttgacacaacattcttccagttgcaagatgaaggaattgctccgcacctttatgtagagctggatttcaaggaggtaaccagcaaaaaagccgccatcattaaccactatagtgaaatgaaggaaaagttaggctcagaagcttcaatatcgatcgataaaggtgaagttataagtacgcactacaagctattttctgccgatattcgtgacatccaaaactggattcagttattcgcatggctgaaatggatcctagagtgtgtacttatttacctggacccaactgccacgggtgccattgttaattgggcttctgaaaagttcaccactgccatctttttcttatatgagcagattcatcctgatgatgcatttggggagcaaatgattagaaaccttgagagtagaggatgccccctcctcggtataaatgctacaccgaccttgagtcacaaagagaaacttttccttgacaatggatggcagagagccgttgcatgggatatgctgaaaatctataatgacttcatcgacagtcaagaaaggcgcaggattgaacgattagaattgtttgatgagtttgaagagtggcatatgatgcaggaacactattgtgtggcttatggaatcaatgatgccgagggcatatttcaaaattttgggttcgacaaggaatagtgtcttttatgcctcttctttcattggtagcagcagcagttgttaaacttgattacgttcttaaacttaga

SEQ ID NO: 7900 - DNA, 332 bp, Setaria italica
  Peptide Sequence Number=SeqID_73874
gatatggcggcggaagaaggagatggggaaggagggcctcatggcggtggcgcagctcaagcggctcgcggcgcttccgccggctggggcccacccgcgcctggagcagttcatgggctcgcacgtctcgcggctcctccgcaccgacctgctcgccgtcctcgccgagctgctccgccaggaccacgtcatcctctccatgaagatatatggtgtcgtgcggaaagaaatctggtaccgtcctgacatgtacttctaccgagatatgctgtacttgctagcaaggaacaggaaggttgatgagacgaggcaggtctgggcagatctcaagt

SEQ ID NO: 7901 - DNA, 829 bp, Setaria italica
  Peptide Sequence Number=SeqID_73875
acgccgggatcgttgttaccaaaaacggaaaacgtaaaagaaaacgaaacaaaacggaacgggaaacggaagactaggacgaatacaaagacggctcgtcgggcggggctgcggcgaccacgaccgcgggttcacggcggaggtgacgacgctggggcgcatccggcaccgcaacatcgtgcggctgctgggcttcgtctccaacagggaggccaacctgctgctctacgagtacatgcccaacgggtccctcggcgagatgctgcacggcggcaagggcggccacctcgggtgggaggccagggcgcgcgtcgcagcggaggcggcgtgcgggctctgctacctccaccacgactgcgcgcccaggatcatccaccgcgatgtcaagtccaacaacatcctgctcgactccgccttcgaggcgcacgtcgccgacttcggcctagccaagttcctcggcggcggaggcggcggcgcaacctccgagtgcatgtctgccatcgccggatcctacggctacatcgcgccagagtatgcctacaccctccgcgtggacgagaagagcgacgtgtacagcttcggcgtggtgctgctggagctcatcacgggtcggcgccccgtcggcagcttcggcgacggcgtggacatcgtgcactgggtccggaaggtgacggcggagctcccggacacgtcggacgcggcggcggtgctggcggtggccgaccgccggctggccccggagccggtggcgctggtcgtggacctgtacaaggtggccatggcgtgcgtggaggaggccagcacggcccggcccaccatgcgcgaggtc

SEQ ID NO: 7902 - DNA, 736 bp, Setaria italica
  Peptide Sequence Number=SeqID_73876
acgacaacgagaggctcctgtcgatcggagagcacgccactccaccaacgcaagctagcgccctcggttggctcctggcggcgacggcctcaacctcgatcgccggctttgtgtgtatcgctgatcggagcgactgctagctgcttctgccgtcgtctcgtgcccatggccatggcggagcgattcggagctcggtggccgccgtcccacttcttattcgccggcgtggtcctcgtcctgctcacagttgcagatcggcgagtagtgctgagagccgaagccatgtcggtcggcatcaactacgggcagatcgccgacaacctcccctccccagcccgggtgtcgtggatgctccggtcgatgcaggtgagcaaggtgaagctctacgacgcggacccgtacgtgctgagcgcgttcctggacaccggcgtggagttcgtcgtgggcatcggcaacgagaacgtgtcggcatgatggacccggcggcggcgctggcgtggatccagcggcacgtgcagccgtacctccccggcacgcgcatcacctgcatcaccgtcggcaacgaggtgttcaagggcaacgacacggagctcaaggccaacctcctccccgccatgcagtccgtgtaccaggcggtcacagcgctgggcctgcagggccgggtgaacgtcaccacggcgcactccctggacatcatgggcagctcgttcccgccctccgccggcgcgttccggcc

SEQ ID NO: 7903 - DNA, 230 bp, Setaria italica
  Peptide Sequence Number=SeqID_73877
gttgcagcatggcatgaatacaagatccaaaacaagtgattagcatatcatgatagcagcaagatctaggtaaaacatgcttatgagtgaaactatagcaataacatgctagaggtcaaacaaaagacatatacaagcaactatagagatcctgttagcgaacttttcagggatgaacatgctactaataaagagcataaaaatatttattagcctataatttcagcata

SEQ ID NO: 7904 - DNA, 921 bp, Setaria italica
  misc_feature (818)..(818): n is a, c, g, or t
  Peptide Sequence Number=SeqID_73878
ctctattaaaaggattttaagatatcatccagtgttgaaaatacttgatgctaaaacaacaatttgcatctactactacctgtatgaaagctgattaatggcactgttacacaatttgatgttctaatccatcaattggttttctatttgtcttcagtaatgtcatcctatgattactctcagttgctagacctcagaagatgtatgtgcaagccaccccagtaagaacagttgtcaagaatacagacactacattgaccccgttgttatccagtatgttgattccggaaattctcgttacggttggaccgtctactccgaccacctttttacgaacactgcagaaaccactgtactgaactgttgcgcccaagattgaatcaatcaggcttccacataggccagcagctgtagccaagggtataactagcagctgcctccagaatacatcagaagcacagtgagtggttaaaaatcctatcagcacaaacgcaagcccaattgagaatcctgctgctgctgctgcgagaagtccatctatggttacaccaccattggtacccttttgcactctcttgaatgttgtgataattcgtggctcagctttgctaagaatgccaagttcagaagaccatgtatcaccattgcagcaagcataatgtccaataacaccaccaataagtgcagttacaagagtcgactctttagaatccaaacacctatctgtccctccagtaactaatgctatcaaaacaaccaagatacttgcaatgccgctatttgacaaaaacttgcttcctgccaataagagtgggggnaccagttacgctgcccgccctccttaaactcgggatcaaagagcacgcttcctcgcctccccgaccctcgtcacccgcgacacgtgaagaagaataccagcag

SEQ ID NO: 7905 - DNA, 666 bp, Setaria italica
  misc_feature (52)..(52): n is a, c, g, or t
  Peptide Sequence Number=SeqID_73879
agctgctatagtctcatttaacccgccattaactgtttttagagtccagtgntaaaccccttagcccactatttagaactatgatcatacaggagttgttcattctgcagcataggctcagatatttacatgtgttacattgttgccagcttgtgcgcggcaacgccttggagttggagcaagaagaaagatcatttctgcatctctttcctgttgctagatgtcctccacgtatacaaacatcatcatcatcatcctcccttcacacatgcgccatctttctccatcccctcttcattgtctctgtagaaacgaggtgttggatggttgggaagcagattggttgcatcagtgatggcagcctctaacgcctccacctcttcaacctttgccccttcgcaattaatccagacattgagatccctgagcgaggcgaggtggtggatacccagatcagggtgatcggcaaatgcagattgttcctcgcatgctctgatttcaattgacaatgcttcgagctgtggaacagctccagcctcaaacatcagacccttaatggggccatacaagcggaagatcttcagacatcgaaatttactgttgcagagactcagcatttccatgggttcatccgcagcttctaaccgtactccaggtctagcagtg

SEQ ID NO: 7906 - DNA, 1629 bp, Setaria italica
  Peptide Sequence Number=SeqID_73880
ttttttttttttgtacacatggtgacattgcattgcaaggtagatttttgtatacatacgtagctacatactgtaccacccaccaagaaatatatttcactatggtagatattctctcaaaagaaacctaaaaactgatcaactggacaatggaccagtaggatatatagggtagggctatatgcgaatacgcccccagtgagccaggtgagtggatcaccgatcgaagagcacgtagagcagcatcacaggccagtgtgtccggccggatcacctccccgccacgagaccactgaacacctggctgttcccagcctgcgttgactcccactcgatggacgacagcagtatttgagagagcgtgatcaccacctgcttcatgtccggccgtagaacagggtcttcgtccacacactgtttcgctagcatggccatcttgaacacacagtcatgaggataaaggtcccttagattacggtcaatgcagtctttcaggttccccatatacattgagctaggacatttccttagagcattcaacataactgatgccagtgagcgcctttcagagtttgagcttgcacccattccttcagctcttgtaatagcctcctttccagatattagctcaaaaagtactacgccaaaagcatagacatcactcttcgtagttgccaggccatctcgcaggtattcaggggccagataaccaaaagtaccaacaaccttagtgacagaagcctctgcatcactggatttcactactagttttgcaaggccaaaatctgaaatcttcgctctgaaggaaccatcaagcaagatattacttgatttaatgtctctatgaacataatgatcttttgtgtgctcatgaatgtattcgagtcctctggcagcatcaagtgcaatttggaccctaaagatccatgaaagtgatgaataccccttgctttcaggatcgtgcagatgatttttgagtgaaccattttgagaatactcataaaccaggaaaagctcatccttacttgctgcatagccgatcaactctaccagactagcatgatgaaccttacaaagaactttcatctccactaaaaattctttagttttagtggccatcattctctttattgcaacctcctgatctcggagaacaccataatagacagatccatatgtaccatgaccaagaagatttgcatcagcaaatgagtcagttgatgtcagtatttcttcatatgtaaacacaacaggcttctccctatcaaatacgtctgctgccacacctttggggacactggtgttatgatcaccaccatccgctcttgttggttttgtatttccaaattggcaacacaagtatcttccagaaccataacagaaactaccactcttaaggagctgaaacttatgttggtctgggctctttccctggttactaggatcttggagattgtgcctgaaggatttccataggacaagtgcaaggagagcaacagcgattaaagcaagtgcaactcccatgctgccaataacccatccaaaaggaaatttggttgaatggtgatccggtgtctctggcaatgtgttatctgttggtgctggggcaggagcaggaggaggggtagt

SEQ ID NO: 7907 - DNA, 252 bp, Setaria italica
  misc_feature (237)..(237): n is a, c, g, or t
  Peptide Sequence Number=SeqID_73881
cggcctgctcctattcgcaccgctgctgcacacatcgctgttcatatcaaatccgacatcaatggtgaaggggctacccttcagctccctgttctacaccactaactcggcccaggacacgccgccgccgtcaccaccaccagccgccccaccggcatggatgtggccctcctgcaagcacccaagaacccagtccttccggaccccgtcgccgccgccaagaccatcgcgtccctnttcctggacctccgg

SEQ ID NO: 7908 - DNA, 474 bp, Setaria italica
  Peptide Sequence Number=SeqID_73882
gtgagccgcaattgcagacgggggaggaggggaaggttgcttcctttccctttgagatcaggctgtggttgttgagaggcgaagagagggagtcttcacctcgaccctagttggagataggatgatggtgataggtaccctatcgcggcaggtgtacccgatgtgttgagagatttgggatggtggctatggagtttatctttatacttgctgctgctataggaaaacccggaccttttccttgtctactttttaccccttagcattaggccacataaagtttgcatacgaatggtgatgtggagctatcccaattccttgggaatagctcgtgagtttgcaggttacgtttccgacttcgacaacaactacgacgattggtacgattgagggttgcagtgctacactcagggatgcctgtggggatgatcgtgaagatggagaagtagccagacctaaattctgctgtgttgg

SEQ ID NO: 7909 - DNA, 880 bp, Setaria italica
  Peptide Sequence Number=SeqID_73883
cgccgacagcgccgtgatgtcgaggaggcggacggggctcttcatcccccgcagcacggcctggatcacctgctcctggcccgatgaggcctggccggtggtggtcgtcgaattgagcccaaccaccggagtcgtctcgccgtagcagtttttggataccgggttgggccactccttcgaactgtagtgcgtgggcgacatggcctggaagaagacacgggtcttcgccgggtcgacgttgaggtccacccagttggcccaggtggtgaggccgcgctggaacgccaccgtccgatccatgtcctcgtagtaccgcccggcctcccccatgtaatcccacccctgcatcgcgccggtgtgcgtccaccagtggccggagttgaaggagagcacgtcggcgtcgcgccacgcctcggcgttctcggtgatgtcgtccagcatcaggaccttcttcccctggaccacgtcgatgtccacaagatacggcgcacggtagaaggagaccgtcacctcgtactccaggaacttgtagttgtagagagggtccgaggagacgagctgcgccggcgactgcggcgcggcggcgtggagcaggcagacgagcgactcccactggttgcgccccagcgagtcccccacgaacatcaccgtcttccccttcatccgcgtcaagaagtccgcgccatcgaacctcgggagctcgcatccggccggcttccagcggtaccggaggtagtcggagtccggccggccgtagagctggcagttgaactcggcgtcgatgagcgggcaattgtaaccggtgtacgccgaggccgacgcgtcgccgaggacccagctgccgctgaagacgtcgcagctcgccgcgccgggcgtggcg

SEQ ID NO: 7910 - DNA, 571 bp, Setaria italica
  Peptide Sequence Number=SeqID_73884
tttttttttttggttcgaacgacaagtgtgatcaaacatatcgcaattagcaagagagcttggttgatctccaaacccttcaattgttcaatgcccccaattcacactaatattttccaactatacatataacagttatatatattatcactccctttagcccccaaaccttttagctgtatacatacatacaggatagctggaacaagaagcatggtcacgccgctgcgacagtgccctcgggttccttctccttcttggccgcctggtcctcctttttatcgtcatcatccacgagctccgcgacgaggtcctctagcaccacggacttggggttgaccatgggcgggcccttctccctgccctcgagctcgtcgaggttgaaggtgatgagcctgtcccagttgccgccctcgaagagcaccgcgaccttgccgtcggtgacgcgctgcacgatcccgcagtacatgtggtaggcgttgttggggttcttcaccagcaccaccatgccaggcaggaacagcgggagctccggcggccgcggcggcgcggagatgccggcttgggtttg

SEQ ID NO: 7911 - DNA, 269 bp, Setaria italica
  Peptide Sequence Number=SeqID_73885
aagtagtccatttagggacttctgcagccactcggcggagatctgatggctcaaatgttacattccacctcacacaattgcagtggcatcatagtgagctggacacagagaatggaaatgttgtgtgtcaagaagaagcatggttcgactctgttagtattttgggatctgactctgatgaagatttcagcagtgtcaatggagacctccctgctatgtcaaattcagtaggtacacaattgatgcagtgcgaagatgcttcatccatt

SEQ ID NO: 7912 - DNA, 456 bp, Setaria italica
  Peptide Sequence Number=SeqID_73886
ttaaaaggtctatccaaatatatttcatatttatctacagttttccactgttttaaaatattgttattcattattcaaatttagatgttctacatgtaaattgactgtcttttgtagctctgaagctgtagcttttgtcagagaccaactgcgtcaacatggtgatgtccaggtattcagtttatccgagctcagaaaactatgacagtcacaatcatcccttttgcagctgattctgtaatttcacttattgttcatttggtttgtgtagttggcctgtgaggcacttggtcaaaaagctctggtattaatgcctgccacattcatcttttctgttgtcctttcttttatgtcgtaaagctgatttgagtataatttaattggtgttcattccagaaccgaaaatgatgtgctaatttcttccttttattctctaattgcaggatgaacggtcac

SEQ ID NO: 7913 - DNA, 839 bp, Setaria italica
  Peptide Sequence Number=SeqID_73887
gtatctcgtgcttttggggatataagatttaagacacgaaagaatgagatgctgatgaaaggagttaaagaaggaaggtggactgaaaagttcatctcacgaataaaatttaaagaggatataataatctcgtcacctgatgtatctctgatagagcttggaccagatgtggaatttgttctactagctactgatggtctttgggattacattaaaaggtctatccaaatatatttcatatttatctacagttttccactgttttaaaatattgttattcattattcaaatttagatgttctacatgtaaattgactgtcttttgtagctctgaagctgtagcttttgtcagagaccaactgcgtcaacatggtgatgtccagttggcctgtgaggcacttggtcaaaaagctctggatgaacggtcacaagacaatattagcatagtcatagctgacttggggaggacgaactggaaggcgttgccagttgaaaggccaaacttgttcttggaactaagtcaagcggttgtgactctagggtttgtctcaataggaatttggttttcgtcattccttgcattacagtaagtaggactagttctgttcagatgtgtacattacttatcgaattgcatcttccgcttgtatagctgcaaatatatgtacattcttatagggttgattaatagggtaatctatctgataattgtgaacatgtgaagtaccgacgaagatcctgtagttcagctcctgctgataacagctgagtggcattgagtccgttgggacgaaatgaattatatgtctggatttccccttgaaaaaaaaaaaaaaaaa

SEQ ID NO: 7914 - DNA, 973 bp, Setaria italica
  Peptide Sequence Number=SeqID_73888
ggacgaggtcgtgctccgcacgggctgcctcctcgacggcttctccttcgctgccgtattcgatggccacgctggcttctccgccgtcaagttcctcagggacgagctgtacaaggagtgcgcggcggcgttggacggtggcaaggtactcagtaccaagaatctcgaggccatcacggattctatccaacgtgccttcgctgcggtggacgccaagctctccacctggctcgagcaaatggagaaggacgacgactctggcgcgacggccacggccatgtttctcaggaacgatgtccttgttgtttcgcacattggggactcttgcttggtgatatcccgtggtggaagacctgaagctttgaccggctctcatcgaccatacgggaacaacaaaacgtcccttgaagaggtcaagcggatcagagcagcaggtggatggattgttgatgggcgcatatgtggagacatttctgtatctcgtgcttttggggatataagatttaagacacgaaagaatgagatgctgatgaaaggagttaaagaaggaaggtggactgaaaagttcatctcacgaataaaatttaaagaggatataataatctcgtcacctgatgtatctctgatagagcttggaccagatgtggaatttgttctactagctactgatggtctttgggattacattaaaagctctgaagctgtagcttttgtcagagaccaactgcgtcaacatggtgatgtccagttggcctgtgaggcacttggtcaaaaagctctggatgaacggtcacaagacaatattagcatagtcatagctgacttggggaggacgaactggaaggcgttgccagttgaaaggccaaacttgttcttggaactaagtcaagcggttgtgactctagggactaaactaaaagggtttaaaagtaaaactaaaacaaaaataaaaaggaaaaatttaaaaggaaaa

SEQ ID NO: 7915 - DNA, 426 bp, Setaria italica
  Peptide Sequence Number=SeqID_73889
ctcgtgggagggccccgtgccgctcttccgcaggtccgaggactcatcgtgcccggacgcgccggggcaggccggcgatgacgacacggtctacttcctgagcaagtccggcgacgtggtggccaccaacatgcagcgcagcgcgtcgaagcagtactcctcggtggtcgtgccctcgccggcgcgcggcgaggagggcgccgtggcctacttcctcagccactcgggcaccgtcgtcgcctgcgacacggcgcgccgcacgttccgcgagctgccccgcatcctccccgtctacttcgagtactccatcgacgtcgtggcctgcggcggcgccgcctacgccgtcgtgctatcggagtacctggacacggcgagcctgcgggtgtgggagttcgccggcggcgcgtggcggcaggtggccgccat

SEQ ID NO: 7916 - DNA, 941 bp, Setaria italica
  misc_feature (82)..(82): n is a, c, g, or t
  Peptide Sequence Number=SeqID_73890
cctccatgtctaacgttggatcgacttgtttttatctttaacttttgcctccttcaccaatatatcgtcattcttcaggaanacggctaattcctcatcttcagcagcctcagctgctgctgctgcagtgtttttttgtcctaagtagatactcagctctacagtactttctccaaaattctaggtctgtcatctttttcggaacgaaatctaaaaatgcccgacgaacagcaggcttttcagcaaaaatctgatgtatcatctcaggtgtgagattgaaagtaaccttgtttgtccgaccatcagctgacggcctaacatcagacatcgcagtcttgaaaccaggcttttgttttgatgctttatttgctacatcatcaagtaaattctttcttgttgcccaaaattcagattcttgcagaatatttccaagaacaaacttcttatgtaatttctgcaattcactatcttctcgcaacagtttcacacgtcgctccacttcagcagcactcagctgttccataccagcagatggaactgagatttcaggaggcatggttggtcgagggggcatcccttgatgtttgcctaaaaccctagctacaaagtctcgacataggtcgcggttaccaacattgtcaaactcaaacatgtagcctccacccttgtcagaatcttttgaaagattcaacaatgctggtttgttaccatctaccttgttgaacttgtgacctttgatacttcggaattcgacatttagcttcattgccgacctaggatcattcggggtgaaagtgaacttatcatcgttcatgcggaggatccccggggtgccggggtccttgagagtggtcttgtacttggctccgatcgtcagcgaccccatcgccgccaccgccgccgccgcggtggctcgcctcgcccctcggtctcgctcgccg

SEQ ID NO: 7917 - DNA, 484 bp, Setaria italica
  Peptide Sequence Number=SeqID_73891
cctttaaagatgcaatgcatatacaccaaccatttccaatatggcaccatactaccggtatcagccttctgatgtgacattgttaactgtttgcagccaaagcttacttaaaattcaacaatagagactaaaagctgaaactctaatactttctttatgtacaagatcataagaaaaataaatctattttttataaaaataaaatcttaaagatcactaatcaaccaaacacctgaaagaatgtatatgagctaaagaaattctgccagattaaaacttgtgctagtaatattcagctatcatcacaacttcacattccagatatcaaaagaaatagtgcgggtacatcaagtaatcacattacctatcttctcgcaacagtttcacacgtcgctccacttcagcagcactcagctgttccataccagcagatggaactgagatttcaggaggcatggttggtcgagggggcatcccttgatgt

SEQ ID NO: 7918 - DNA, 1787 bp, Setaria italica
  Peptide Sequence Number=SeqID_73892
agacccggttaataatactcgagtaatccaagaacgccacgtacaacgcgtcctcgcaaaaaattggcagcagcaacatccgttacaagtcactattcactcagctataaacaacaaatgagagatacatcaagattcttgttgtgcaaaatcatggacgcctccggcagtcaaagagaaaacggaacaaaatcgtcggagcctccagaatcgcaggatcatagacgggaactgtacagcagctctttttatgtcagggcacgggccccctcctctcgcctcatgtgttggtcaagccatctactagtaggctcaaaacccgttggatttgttcccggccttggccgatttctgctgctgctccagatcatggctgaaggcagcgtccaaggcctgagtcatgggctttactagccgagatatttcatgccttacatcaggctgtgctgattcctttattgcctgcaacttttgatatatctgtgtcattgcgtccttgactctttgaaccttattataaaggactgtgcttgttattggatatgatgaccagaaatggcgcagcaattcctggatagccgtccaatgatccataagctcgtccctcgtatgttgaggcacccgaccaaggagaccctcttgaggattcttgaggttaagtctccttgaacgtgaaatcccttcattcaattcattaagaaccttaacagccatatctgactgaataactgtacagttcgacttattaactttaatcgaagatatttgatccgttaaatgatggaacgcttcttcaatgctcaagctgcaattacgggattttcttccatcattgctcgcacctaaagatctcagagcatttgcttgttgggaatcaaaatactctctcggatcctttatacaaagtggtgcatagggaaggcttcgtggagcttgcagatcctctatctctgtcattctggccaccttcaacagtctctcatgactagtatcatcaacagcagaagtggaaggtggttccttcttggaccttgcaagggcttccgctacactctttgcatcagtcagctccacatctgaagctatcccttcaagaacaacagcggcatggcgattcagctcctgagacagtgttctcctggcaaactcactgtcattgtcaactgtctctttgctgccatcacggagaatcccatggtccggaagatggatataatcatctccagcatctgcctccatgtctaacgttggatcgacttgttttatctttaactttgcctccttcaccaatatatcgtcattcttcaggaagacggctaattcctcatcttcagcagcctcagctgctgctgctgcagtgttttttgtcctaagtagatactcagctctacagtactttctccaaaattctaggtctgtcatctttttcggaacgaaatctaaaaatgcccgacgaacagcaggcttttcagcataaatatgatgtatcatctcaggtgtgagaacaaggtagaccttccatttaggtagttaggatttcctgctcatgcaatttaatagcttaagaatagagaagccacagtagcagcaacacaacatcatgcaaatcatgcatatgtacaattcaagtcatcaagtgtttataagcttagaacagacaactgttgtaagaaatatgaagtatggactttacatattaagaagtgtgatagcaataagttaagatgaactgattcactaaacgatagatctattcccatgaggtgactgtacggactttatatgat

SEQ ID NO: 7919 - DNA, 828 bp, Setaria italica
  Peptide Sequence Number=SeqID_73893
cgcgtccgagtccgccccgccatcactctccttcgtcctcttcctcctcctcgtcgtcttcgtcttcctcgggatccacgtctacatctccgcgctctggcacctcgccagcgtcgtctccgtgctcgagccgctctgcgggctcgccgccatggccaagagcaagcagctgctccagggccgcgccggcaccgctgccacgctcgtcgtctcctacttcgcggtctgcggcgtcacctcgttgctcttccgtgccgcagtcgtcaaggcccgcggcgaggacgggagcttcggcctggccttgcccgggcgcctgctcgtcggcgccctgctcgtgtgcgtccttgcctgcgtcaatttgctgggattgctcgtgcagagcgtcttctactacgcctgcaaggcattccacaaccagcagattgacaggagcgcgttgtacgagcaccttggagggtaccttggggagtacgtcccgctcaagagcaacatccagatggagaaccttgaaattggagcttaggggaagggtaagctgctcacctctttgcttcctacttcagtgtatggtgaatcttgctctaaacaagagtggtttactagcagctacttagttcacctcttgctcgttcagtgtactagtttgtaatctgtaagtgatagtgtgcagtatggaactactctatggaatggaacagagatgtatgaactgagtaatctttgtctggcaaaaccgtgcttgcctgaaagtcatgctgttcttattgatgttgactgtgattcttggtttaacaaaaaaaaaaaaaaaaactaaaaaaagagaactag

SEQ ID NO: 7920 - DNA, 497 bp, Setaria italica
  Peptide Sequence Number=SeqID_73894
ggggagggtagggtatgaggaaggtacaattaatcaattggatatgtatatatatgtagtacaaagttaattatccattggatatgggtgggattggggaggataaggagtggataataattgtatggatttgggtgtgaacaagagtgggtttgcccataccctacccagtggcaggcctaacaatcatccttgctatcactgtctaaagcatgacaacacattcctatagaaatttataaccactgacagagccgctagaaaaatgaaagttttctgcatgacataaactttataaaactttgacctatctcttctctattcaagtacaatttactgcttgcgaaactcaaaaaactatgcagttctaatcttgtaacataagcaaggataactgtcaccaggaacatatggttaggttaggccataactgggaatagcttgatgcaaaagatgtaacaaataagcacaaaagctatgagtgcaaatcagtctag

SEQ ID NO: 7921 - DNA, 352 bp, Setaria italica
  Peptide Sequence Number=SeqID_73895
ggtggttatggtggaggcatgtacggtggtggcgggatgtatggtggaggcatgtacggtggtggcgggatgggaggatatggtagttacggcatgggtggaatgggtggcatgggtggtatgggaatgggtccttatggtaatcaggatccaaatgcaatgggccctccggcatcaccgccaggtttctgggtgtccttccttcgagtggtaagatacttattcatgatacatgccattaatcattactgtgaatccttaaaattgattaaacatgtattttatctgaggtgttgattatgagcatttgtagcattaccagggttccaaaatgtccaatagtcagattcac

SEQ ID NO: 7922 - DNA, 294 bp, Setaria italica
  Peptide Sequence Number=SeqID_73896
ataacactgcgctcagttgcatctgctcatctgatcaatgatgagaggggggggggggagtcacctttccaagcgatccaacggatcttcaagaagagacacaatgactgtcattgcaacattgcgtgtcagtgcagccttcaaatcccacagatactctatctgttgtgcaacttcctctgacgagggctccacgggcattgtaaggaacaccagtactttcaccgcagtgaccaccagattgcggtcggtctggtaattctcaatgatgggcaccagatctctagacgctaa

SEQ ID NO: 7923 - DNA, 543 bp, Setaria italica
  Peptide Sequence Number=SeqID_73897
gaaataagttagcaggagagtgagagattgttgcaaccactgagcacaaggagtgaccatgacctgcaccttttctttccccttatcatgctaatgtagtatcaagataaatatagatatttagagtacaaatggcagaggtcctagctactttgactaaagctgggaggctgtgagtttgattgatagctccaaatgcttttggcttttcagaagcacgagagcacaaaggcctaaattctgagttgtggcatgtgccctgccctcatgtattggttgcctgtggtagtggtgtattttcctcatcacatggcatttccatttgctctggattggaacggaccagcagaatggtgaggctctcccttgcctgcattatcattttatttatctttgaaatcttcagatggagccatttaccctacctctccatgtctccaccattttaaaatgtttctttttgtaaataattgcattgatttccctgtcatatcaaaaccaaagtagaattttttaggaagttatatagcctaatcaatagtt

SEQ ID NO: 7924 - DNA, 383 bp, Setaria italica
  misc_feature (366)..(366): n is a, c, g, or t
  Peptide Sequence Number=SeqID_73898
tggtacccgaggcggccgccggacggcgagaagaagggttgtagtggtggaggtccgggttgaggagctcggtgagcggggagaagcgctcggtctcgaggtcgaacagctcgatgtgccgctgcgcgcggtccttccgccgcgtcgcgactgcgatccagccggcccccacctcggccggccgcgggggggtgaagcagtggagccccggcggcgtcacgcggcgctcgccgtcgccggtgggctcgagggtgtccggcgagaggtccacccggaacacgctccaccacccgtcgtcggcgacgcggtggaagaagagcgtgcgctccccgtgccaggtcggccacccgccccgccccgcgaccncgcgcggcgcgccgggt

SEQ ID NO: 7925 - DNA, 1098 bp, Setaria italica
  Peptide Sequence Number=SeqID_73899
ctgaataatttagttagaagtggcataaagcttacatatactcatatacacaaaatcgcctcaagagttcagacaagtacaagaggtgatgaactgaagtcacactataagaagtgcagaccacagcaaatacatagaaccactttccaaaaccacatatttgtttaacggatgcacaatgtatggctgacctattcatggtagcactgaaaatatttacagtttttggttggtgtagcatacaacagtgatgaaaatttagcagagtgtggcacagtgacgaatatttcaactgtctgctcatactgtcgattcaatataatgctctagttagaaaattggggaggattggcacacctctgtttctacttcctgtgggtcagactcaaggaacacgccctagtactctttgcacagccttctttatcccctcctggtctagggaagttgtcaaatacacttcctggacctgcctcccagctcgtgcaagaagcgtgaacttgttatccttagctggcacgttggaaagccaaagctccaaatcttgtgaaacaacacgtttctccaatgcttggcgcccaaactgtacgtctgttataccatcctcttgcaatagttcattacatataccatcaagtcctggcagaagttcaacttctgatggagacatgacacgatcaggtgattgatcagcctccaaagggataactttgtccaatgtctccaatagaggatcttcttccagttgtctgattgataaagctatccttgacttcaccgtatcgacattgaccactttgaccttgacagcatccccttcatttagaaaatcctggacgtcttggacaagatcccaagacacctcagagaggtgtacaagaccagtaagatgatataatccatcaggaaatcgcaggtgaacaaatgcaccatagtggaacactgagcccacgattccatcatagatgtcgccaatcttgatttgggaagaatatgttgaccaactagcatccttctcggagaagaaagcttcctttcctcctcatttacttcagaaaccttgacagaaatggacgtccctactaggtccttggtaac

SEQ ID NO: 7926 - DNA, 534 bp, Setaria italica
  Peptide Sequence Number=SeqID_73900
gttagtaagtattgttccttccctagttcctattgttcgttccaccggcgccaccgcctcgccgcgctgctcggcctccaccagcgcctccagcgtgcgcaccggctccgacgccttgaacccggcctcccggatgcggtagcactcggagcacaccttcttcacgcgctcaagaagctccaatggaatcccatggttcaccagctgaaagaacccccactcctcgcagccattggcgatctgcgccatggtctccgccctctcggcagcggcgccatcgagcttggagaagtcgatcaccgggaccaccattgttaattgtgcgtgtcaggggattgaagatgaacagaatgtgaaatgtttgtatgcaattgcaacagaagtgaagtgttttatgcagttgctgtagcactaggagggctttgatgcttgagtgaaggttttgcagctgatggatttgagatggagaggccatggatggcaccatatatatagtggcgccatggatggatgagcttgattaatttggtcaac

SEQ ID NO: 7927 - DNA, 306 bp, Setaria italica
  misc_feature (1)..(31): n is a, c, g, or t
  Peptide Sequence Number=SeqID_73901
nnnnnnnnnnnnnnnnnnnnnnnnnnnnnnntcgttgttcttcttttttttacttgtaaaggggtcgcattttattgcatttgaacaataatagtacaacattaatcttacaattattattgtcgctttaagtacatgaaaaaacccaagagctggatgtgcatgtgcttaactctatcctattcttgttactagaacaatatagcaccataccatgccactacagttaacacagtgaaacacctcagatacttgcccacattacacttatttcttcaggatattatattatatccaataaacaaa

SEQ ID NO: 7928 - DNA, 370 bp, Setaria italica
  Peptide Sequence Number=SeqID_73902
gcccaaatagaaattactccctccggttcggtattatatgacgtttccgacagctcaacatagctaattaaaagtcattttagctgtctgaaacgtcaggtaatcaagaacggaggtagtatttcaaaggccatcaactatactcgacaaataataaccagtaattgaggtttaatcaccttaacaactactagatactctggcaaaggtttaagccgccggagatgactttggcgccttgacggcctcgaatctgggctccttggcctggaatttctgcttggcgtacacgtccatgtagtcgccgaagacgtacttgggggtaggcctcgccgccggccaccgccgccggcgagatggtggcctcgtt

SEQ ID NO: 7929 - DNA, 1388 bp, Setaria italica
  Peptide Sequence Number=SeqID_73903
tcaacatagctaattaaaagtcattttagctgtctgaaacgtcaggtaatcaagaacggaggtagtatttcaaaggccatcaactatactcgacaaataataaccagtaattgaggtttaatcaccttaacaactactagatactctggcaaaggtcttgttctagaacaatatagcaccataccatgccactacagttaacacagtgaaacacctcagatacttgcccacattacacttatttcttcaggatattatattatatccaataaacaaatgaataattattttttaccacactaatgtttttttttacttttaagccgctggagatgacttgggcgccttgacggcctcgaaccttggctccttggcctggaacttctgcttggcgtacacgtccatgtagtcgccgaagacgtacttggggtaggcttcgccgccggccgccaccgccggcgagatggtggcctcgttggccgggttgtagaaggaggcgatggagcggcggttggcgttgcgcatggggaggacgcggtgccacgcgctgcggtagcggccgttgctgagcacctcgatctggtcgccggtgttgacgacgatggcgccggcgagcggctgcacgtccgtccactggccgtccttgagcacctccaggccgccgacctggtcgtcctggtacagcaggatgacgccgccggcgtccgtgtgcgcgcggaggcccgtgacgaggtccgggcgcgggcacggcggatagtggctgaccttggtgccgaagaagggctcgtggcggccgtcgccggagaaggcgcgctggatggcgcccttctcaaggccgaggttctcgtccatggcctccatgacgcgcccggcgagcttcctcagctcggcgcggtactcgcgcatggtctccttgaactccggcgggttcgacggccactggctgccgtcgtggatgtagaagatgtcctcccagtccatgtcgtccaccggcgccaccgcctcgccgcgctgctcggcctccaccagcgcctccagcgtgcgcaccggctccgacgccttgaacccggcctcccggatgcggtagcactcggagcacaccttcttcacgcgctcaagaagctccaacggaatgccatggttcacaagctggaagaaaccccactcctcgcagccgttggcgatctgcgccatcgtctccgccctctcggcggcggcgccatcgagcttggagaagtcgatcaccggaacaaccatggttgacaaagaagattaagctaaagctttgatctctctcactgaagcagacctgaactctttagacttcagatgttgcagcggctatttcttcagtgaaagtcgcaagtaagaaaagactaggtttagac

SEQ ID NO: 7930 - DNA, 1550 bp, Setaria italica
  Peptide Sequence Number=SeqID_73904
tttagtaggtttccaggcaacagatagaattagacaggtgctgattcgtctgaacatttacatacggccatgtcaaattgcgccaaacacatcacttctcggaatctccataggcagaaacagaataataagaacataaaacccaaaaggttggcgccccgatgatcccagttcgccacgccgatgaacccttggcgaaagaaaggcacccaggaagaaagatgatacaagctcagaagatgttttcttcttcacggcacatcacgggaggtgtcaacactcagccaccgctcttttccggcctgatggtgttagagatgaagagaggtcagatgtcttgagaactcgcagcctcttcactgaagaaacaaacatcccccagggaacatcgccaaccagcaccctgtcaccttcataatcctcataaactagagtgtactcgccagttccatctagtaaacctgatatggccacctcttcctgtgaacactcccttgtaccggcagctagagggtcttgttgtgctgcaaggagtccacgaaatagcttgtcaacagccagagacagattctcatagctatcaagggcattcaggtcgatttttctaccaataggaataccatccatgttaatctttacaaatggagctctttttgtggtctcttcaggtttggcagccttcttcccattctgatgatcaagggatgctttgctagaggtagccagatttcttctgaatgtacgaactggaggccacccgataactggggcattaggagatcttgtctgggaggcattgttggtggacgcaagagcatgccctgtagctggagccgctgctggggacccctttgccttgccttgtgagcagggggagaaagctgctgcgttggagtagccgagggagagcatggaggtgtcggcagcagagtggtggtggtggtggttccccttctctctgcccgccgctccccaggctcctcctcccccacctccggggagcccgaggctgagctgcagcgtcttctcctcgtcgtcctggtctctcggcctcggctcgcccatccagttgcgaagagccttgttgccctctgctgcctcccccatctctcctcctcccttcccttgaagctgccaagcacgactggacgggacggcgtgctctgaaggtgctgtgctgtggtgggctctcttataccctctgctccccccgtctcgcctccttcgtgttctatgtcgggatcggctgctacctctgctcgcccaaagggaagcgaacaaatgagcagacgcagcagcttgcggctacaggaggaggaggaagagcaggaggaggaagcaagcgattgccgtgcgggagtcaaatgtcccccggggcggtcgcctcttgtggactcgctcgtgagccgctggagcgcaagcaaaatgggcagcgagctgttggctgctagcgatggtgagggtcagagataggaaaggagaggagaggagacgggtttgggttgggggtgattccacggggtcttaggggtctaagtctagtaaacggt

SEQ ID NO: 7931 - DNA, 798 bp, Setaria italica
  Peptide Sequence Number=SeqID_73905
cgcaaaacaagttacaatctaaagcaggatcactagttgttaggcatggacaaaattggattcgtcaatggtgctggcgtcgacgaggactcgacttgcttgcacgcacaatcactggtctacgcctacaacgtcaccatggccgtcaaggcggctgtcaagctcggcctcctcgatgagctcagcgcggccgacggccgcgccgttaccgccgacgagctcgccgcgaaggttgtccaagcagaggacaagaccgtctcggctgcctggattggccggatcctcaggtttctcgcgtccttcgacgtcgtgaggttctcggccgagaaaggtgccgacggttcggtgctctggcggtactcgccggcgccggcatgccgctggctcaccagaaacaacggcgacgggtcgcttggcccaatgtcggtgttcgccgtcgacgaggacaacttgtcgtcctggcattacatagccgacgcggttgccgggggcgtcaagcaaacgccgttcgagcttgcccatggggggacgccggcgtacgagtactttggaaagaccccacgtctgagcacgctgttcgaccaggccatggcccagcagtcgctgctggtgatcaggaagctgctcgaccaccccaaagtgttcgctggcgttggagtcctcgtcgacgttggaggcggcaccggtgcaaccctagcggtgatcagagaccggtacaagaacatcaggggcatcaacatggacctgcctcacgtcatctctgacgctccgttacttccaggcgtggaacatgtagcg

SEQ ID NO: 7932 - DNA, 474 bp, Setaria italica
  misc_feature (451)..(474): n is a, c, g, or t
  Peptide Sequence Number=SeqID_73906
ggaagatgtggggcttcgtgtgccccgaggggacggacggcgcggacgacccgcggctgaatcccctgaccgccacggcgccgagccttcggaacttcccgtgcaagagggtgctcgtctgcgtggcggagaaggacttcacgcggccgagggcagggcgtactacgaggccctggcggcgagcgggtggagcggcacggcggagttgttcgagtcggagggccaggagcacgtcttcttcctcttcaagcccggttgcgatgaggccgcggcgctcatggagcggctcgtttccttcttcgctgggaactgaatacgtcatgcgtgactacgaccacactggccgaaacgaatggagcaacaagcgacggtgcagctgattgctgaattatgtaaaaataaaaatctgattgctgaattgaataatcagaaacttctgttgaataaaagnnnnnnnnnnnnnnnnnnnnnnnn

SEQ ID NO: 7933 - DNA, 1401 bp, Setaria italica
  Peptide Sequence Number=SeqID_73907
ggcgctactgctgcccgtgctcctcctcgccttctcctcctcctccgcggcggcggcggccgcgatgcataacaacaactgggccgtgctcgtctgcacctcccgtttctggtttaattatcgacatatggcgaatactctgtctttgtacaggactgtaaagagattaggaatacctgacgagcggatcatacttatgttggcagatgatatggcttgtaatcctaggaacagttatcctgcccaagttttcaacaatgagaaccaccagctaaatctttatggtgacaatgttgaggttgattatcgagggtacgaggtaacagttgaaaactttttgagaattttgactggcagacatgaaagtgcagtaccaagatcaaagcgtctcctaagtgatgaaggaagccatattcttctgtacatgactgggcatggtggtgatgagtttttgaagttccaagattctgaagagcttcagagccatgatttagcagatgcagtgaagcagatgaaggagaaacatagatttaaagagctgctgataatggtagatacttgccaagctgctactctcttttcacagcttcattcacctggtgttttggcgatcggtagcagcatgaagggtgaaaattcttattctcaccatcttgattcagatattggtgtttctgttgttgataggtttacctattatacacttgctttctttgagaaactgaacatgtatagcaatgcttcactgaacagtcttttcaactcatacgatcgttccatgttgatgtccactgcgtattatcgaatggatctttatgagcggcccttaaatgaggtgcctgtgacaaatttctttggatcagtcatgaagactctccacacagattcagcctacacaggtttcttggctgcacatgacgatgaagttcccatgtccatgagagataatcaacatgatcatttcatgtcaaagaatgaggctagtgcaagaagattaaacagagaaaaggaggcacaaataattccccatggatggacagaagttctgcttgaacagctggagggcaagaatactgacattgttgcgctgtatggtctgggagctatgggtatattgttggcactttcaacctggttatcaatgtaggcactatgaagagtattcacacgccattctcatccacagagcactgaatcatactaaccccatagagactgggatcaaaaataggaaagaacacggtttgaaggttctttttgtatttttatcctttttaaaatatcattagtgtcattatcattgattctaaattgatgtatgtagtttttgtatccaccttctattctattgtgttagtactcattgtttaacatgatctttgggaacaatttgatgattat

SEQ ID NO: 7934 - DNA, 1076 bp, Setaria italica
  Peptide Sequence Number=SeqID_73908
tttttttttttttagtttgctgtgctgaactgaaataagcaatgtttcatctggacaattatttcttgaaagtttgatgataaacaatcaaatcctctttcccaagctcttaacttcatagcatagctgcatccagcttgtattgatcaaattcaacaaccatcgaacaatcgtatgcctccaagggcttcatcctcctgtgtcacttccagaacaatatttgcctgaacaccgtgtttctaccatgtaaacgaaggcaaaacataagagggatatgatccatgcttgctacatagagcattgatggcatcctccccagcagtttctccaaattcagtgagcccaagttcagctgcatgaatccctccagtaatgaacgcagatgcgattcctgttgcatttgcccctttgatgtcgtggtgcagtgaatcacccaccatgatgcattcatgagcatcaactccagctagggacatcgctgaggtatagatcaccttatcaggcttgcccatccatttcacttccccaccaagactctcatatttagctgccagagtgccaggcatgacacgcagatctcgagcttcaacggtgacataatctggattagctaccaccattggaagtcgcttttctaggccaagcattagaacctgctcaagctcctcaagacttttgggaagagggtcaccagaaggtgaaccaagggcttcagtaccatgtgctaatataaactctgcatcatcaacattgttcacaacttgcaaaccaagaccctcaagagaaattgcgccacgattgccccaagtgatatggatacactttcttccaagggcagcaaaccatgggtcattcctctttagaaggtgttgatgtgtgagctccccactggtgatggtcccgaggaaacaagatgtgtcgaaccccaggctctgcagcttctcaattgtcacagacgaccgcctagaggaattgctgattatcaccatcttcgccccattccccgcgagcttctccactgcaatttgcctaacttgtattcttcttgccatcgtgaaggacgtcctaaacttggt

SEQ ID NO: 7935 - DNA, 289 bp, Setaria italica
  misc_feature (281)..(281): n is a, c, g, or t
  Peptide Sequence Number=SeqID_73909
cgcgccggcaactcctaccccttcccggcgccggaccaggaggtccccactcgtactcggtaaccggtgtgctgtaatgcatttttggtccgccgccgccgctgcctggcatggggtcgcccgtgccaggcgcgagctcgtgcatatcttgatggtgtggacagaaagaagaatctgacgtttctttgcctcaggatgtggggttgtcaatgtcatcgacaggcgagtggtggaaccggaatgtggtcgacgtcgagaacgacgccatcttgtccggccancttcccac

SEQ ID NO: 7936 - DNA, 284 bp, Setaria italica
  Peptide Sequence Number=SeqID_73910
tccgctgcactctgctcgaccttccattccacccatggtgcggcttctcctggcgctcgcgcttctcctcgtcggaccggtggcggatgcggcgacggcgaagtacacgttcacagtggggagcacgcagatcagtcagctatgcagcaccaccagtattattgcagtgaacggtcagttgccgggcccgtcgatcgaagtgaacgaaggtgacgcggttgaggtcaaagtcatcaacaattcaccatacaacgtaaccatccactggcatggtgtgttccagc

SEQ ID NO: 7937 - DNA, 1964 bp, Setaria italica
  Peptide Sequence Number=SeqID_73911
ctttggaaattgacaggcatggtgtgttccagctcatgacgccgtgggccgacgggccgagcatggtgtcgcagtgccccatccagcccagcggctcctacacctaccggttcagcgtcccggggcaggagggcacgctgtggtggcacgcccactcctccttcctccgcgccaccgtgtacggcgccttcatcgtccgcccccgcgccggcaactcctaccccttcccggcgccggaccaggaggtccccatcgtactcggcgagtggtggaaccggaatgtggtcgacgtcgagaacgacgccatcttgtccggccagcttcccacccagtccgacgccttcaccgtgaacggcaagaccggcctgctctaccagtgcgcgaatgagacgttcacggcggtggtggagcccaacacgcgggtgctgctccgggtcatcaacgccggcctcaactcgcacctcttcttcaaggtggccggccacaacttcaccgtcgtcgccgtcgacgggagttacacctccaacctgaacacggacacgctcgtgatcgcgccggggcagaccgtggacgcgctcgtgaccaccagcgcggcgccggggagctactacatggcggtgctggcccacgacaccatgagcccgctggcgttcgccgcgtcggacaccaccaccgccaccgcgatcctccagtacaacggcacgtcgacgaacccgccggcgatgccggtcatgccgtccagctccgactccgcgacggccaacgccttctacttcgggctgaggggcctgggcacgcccgccgtgccgtcgccggtggacgtgagcatgaccatcgagctggggctcggccagctgccgtgcgacccgtcgcagacgaagtgcaacggcaccgccgccgccgccgccatgaacggcgtctcgttccggctaccggcgccggagacgtccctcctcggggcgcacttgaacggcctgacgggggtcttcaccgccgacttccccgacggcccgccgcccagcggcacggcgatggcggtggggaccaaggtgaagaagctcgcttacaactcggtggtggagatcgtgctgcagaacccgtcggccgtcccgacggagaaccacccgatccacctccatggattcaacttcttcgtgctggcgcagggggtgggaaccttcaccccgggcagcgcgtcctacaacctggtggacccggtggcccgcaacaccatcgccgtgcccggaggtggatgggccgtcatccggttcgtcgccaacaacccaggcatgtggttctttcactgccacctggacccgcacgtgccgatgggcctgggaatggtgtttcacgtggacagcgggacgacggccggcgcgacgctgcctccgccgccggcggattgggtgggagtgtgcgacgcgcaaaactacgcgacggcggcagcggcggcggcggcggcgacgccagcgccggtaccagccccagccccagcaccaacattagcaccaggatcagccccagcggcagcaacatcgccacgggcggcggcaggatcgccggtgaaaccttcgagcccggtggatcacaaaccgtcacccaaccttcctcagcgcaggggggacgggcgcccctctgctacctccgctgcagctgagccgagagcgactgggcatctcacttgtctcctctgtaccattattcttttcttcgttcttcacgaacacaaggcctagtgcgtgagtgagaagctgcatagacgtgatacccgctcaaaagttacagttttgttcattcgtgtaagtaaaagtgatcattgtttctatacatgtgtatatggatttgattcgatgtaattgtgacattctcctccctccacagggggaagatgtgcataacaaagttcagagttcagattatttgactttgtattcattcatgaattaaaaaaaaaaaaaaaacaa

SEQ ID NO: 7938 - DNA, 474 bp, Setaria italica
  Peptide Sequence Number=SeqID_73912
ctccgccgcgcccgacggccctccccaaaccccgcattttccttcgccgccttccaatctctcgcccctcgccatgtcggagaaaaagcgccgcgctggggcggccgcggccggccccgcatccagctccaagaagccgcgcgcctccgcggccgcgtcctacgccgagtccctccgctcgaagctccgccccgacgcctccatcctcgccaccctccgctccctcgcctccgcctccgcctcctcctccaagtccaaggccgccgccaagttcctcgcggaccacgaccccccgatgaccccacctcctcgtacatcgtggtggccgaccaggactccgcctccgtcacctcccgcatcaaccgcctcgtcctcgccgccgcgcgcagcatcctctccggccggggcttctccttcgcggtgccctcccgcgccgcctccaacctaggtctacctcccggacctcgaccgtca

SEQ ID NO: 7939 - DNA, 664 bp, Setaria italica
  Peptide Sequence Number=SeqID_73913
aagatacatgcgtgcgtgcgtgcagctccttggctactgcttactactggcaagatttctgagatcagcgaatgaagcgtctctctgctcttatctgaattccggacattgttctgtcatgtttggtaccgagattcaggttcctgcacatgattcaggcagtctgaaagacgttctggatcattctcttcggagctgccatcgccgcggactcgagctctgagatctcagcggggctcagcctccagccgagcgcgcccaagttctcctcgacgtgcctgaccgttttcacgccggggatagggatcgtgcctctgcagatgcaccagtttatggccacctgagacatggttttccccttcttttctgcaattcttcttagacaggacagcaaagactccaacccaggaagaatttgccggaacaacacagaccttggtccttttggaaggttagaagcatcatactttccggtcagcatccctaacccaagcggactatatgcgatgagacgaatgcccaacgagtcacacacggttttcagttccatctgctcgtcacccatgctcagtagtgagaactgaacctgcctgagctgagctcaagggaacacctttagaagacagatagctgtaaaaagtttgacaagacatagaactaactt

SEQ ID NO: 7940 - DNA, 273 bp, Setaria italica
  Peptide Sequence Number=SeqID_73914
ggctcgacgaccatggcagcgacgacccccgcggcggcgccgaggcacagctgcgcgaagctgtcggtggcggtggaggaccccaaggcggccggcggcggcgcggtgttcgtcagggccacgtggctccccacccgcttctccctcgccgtcacggacggcgccggcgcctgggtcgccgacgcctccgacgccgaggtgcgcctccgcgccgagcagtgggaccagcccgtggccgagtacctcgccctcgccgagcgctacctcgccttt

SEQ ID NO: 7941 - DNA, 394 bp, Setaria italica
  Peptide Sequence Number=SeqID_73915
cacgggccgcctgcgccgcctcgtcctgatgtgcccgcgacgccgcctcccgctccgcgtcgcgcagggcatgctctggcatcttggcatcccggaggactactttaaggaccccgatcacggcattgagcatgatggattccggattttaacttcagcagatggagttatctgccaggataatgatggcgatgggagggaattggggctaattgatgatggaaaaggtcaagaaatgccactatcggttctccagatgaaattcggatctgtggcagacgtgcctatcccactcttcccgtcgaagggtctccggttgaagcagaagatcaaggactggttggaaggcttccagaggctgccttatgtgtctccatacgaagatttcagccac

SEQ ID NO: 7942 - DNA, 397 bp, Setaria italica
  Peptide Sequence Number=SeqID_73916
cacaatcaaactagctgcaaactgcaagtgttctcaggtactactcgagagtcgagagcctagcagccgagctcggtagcccaacaatggcttccacctcgagcttctccccgatggcgctcgtcgtggcactcgtgctagtcctaggaaccagcacttgccacgcggctcgccggcttgccgacgacacggcgcctgccgcggcaccggccgccatcccggccattccggcagtgccgaagccgacggtgccggcagttcccaccgtgccgcagatccctgccgtgcccgcggtcaccgtgcctcctatgccagcggtgcccgcggtgaccttgccgccgatgccggcggtgaccgtgccagcggtgcccgcgatgccagccgtgccgggcgccgc

SEQ ID NO: 7943 - DNA, 1961 bp, Setaria italica
  Peptide Sequence Number=SeqID_73917
taggtagtgagcagctgaaagcacaaaggacggacaaatcatgctggtggtgagcatggaagagcatccaatgggcgccgtagtcctggcgctcattattgcggccgtcgccgccgtgtccttgcagcacctcatctcccggcgagcctcccgtcgtcttccccctggcccgactagcctcccagtgatcgggcacctccacctgctccggccgccggtgcaccgcaccttccaggagctggctgcccgggtggggcccctgatgcacatccgcctggggtccacgcactgcgtcgtggcgagcaccgcggaggtggcgagcgagctgatccgcagccacgaggggagcatctcggagcggccgctcacggcggtggcccggcagttcgcctacggctccgccggcttcgccttcgccccctacaacacccactggcgcttcatgaagcgcctctgcatgtcggagctcctcggaccccgcaccgtcgagcacctccgccccgtccgtcgcgccggcaccgtgtccctgctgcgggccgcgctggcggcggcctcctcgccggcggccgaacccttcgacctcacccgcgagctcatccgcctctccaacacctccatcatccgcatggtcgccagcaccgtgccggggagcgtcgcggacgaggcgcaggagctcgtcaaggacgtggcggagctcgtcggcgccttcaacgccgacgactacatcgccctctgccgcggctgggacctgcagggcctccgccggcgagccgccgccgtccaccgccgcttcgacgcgctgctcgaggagatactcaggcacaaggaggacgccagggaggcgaggaaactcctcatgctcgacgacgacggcgacgacggcaggaagaaggaggccgcgacggcgacgatgcacaaggacctgcttgacatcctcatggacaaagccgaggacaagacggcggaggtcaagctcacacgggacaacatcaaggccttcatcatcgacgtggtcactgctggttcggacacgtcggcggccatggtggagtggatgctggcggaattgatgaaccacccggaggccctgcgcaacgtggtggcggagatcgacgccgtcgtcggcggggaccggatcgccggcgaggcggacctgccgcggctgccatacctgattgcggcgtacaaggagacgctgcggctgcacccggcggcgcccatcgcgcaccgccagtcgtcggaggagatgcagctccgagggttcaccgtgccgccgcagaccgccgtgttcatcaacatctgggccatcggccgcgacccggcattctgggaggagcccctggcgttccgcccggagcggttcatgcctggcggcgccgccgagagcctggagccccgcgggcagcacttccacttcatgcccttcggcagcggccgccgcggatgccccggcatgggcctcgcgctgcagtccgtgccggccgtgctggcggcgctcgtgcagtgcttcgactgggccaccgctggcggcggcgacgacgacggggtcaagggcatgccgatagacatggatgagtcggacggcctggtgtgcgctcgcaagcacccgctcctgctccgccccacgcctcgcctcaaccccttcccggccgtcgtctagctccatgggcccacaccgcgttagtgatgacgatgtcactatacattacctacccaccatggaagggcgaagagtgtgcagatgagcaagcaacgaatcagaagctaggcagcaccatggatacgtacgatgtgtgacatctatttgtccttgtcatcccttggttgagcatcaacatcaacttggcactttggcagtacactgcgtttttattaattaatattattattaattccgcaaacaataattatctgtcatttctcaccaaatattcaccaaatatgcgaaagctcagtcttta

SEQ ID NO: 7944 - DNA, 1096 bp, Setaria italica
  Peptide Sequence Number=SeqID_73918
gacgcgagttcggcgcaagcggaggcagcagccgccgccaccgcgtagtggcctaacaaacgcccagctccatccgtggttcatcctctaggttttcagcatgatttattctgttcgtagctttgagttactgaaggcatgtattgaagacatactctctacaataaaaccaggggaagatgatcgaatgaaacgattgcgtgcaattcaggagctggaagattccatttactcagttggggccttgagaggtgctgttgtcaaaccttttggatcctttatatcaaacctttatgcaaagtcaggtgatttggatgtttcagttgatctctggagtagctcaaggcctataagcaagaaaaagaagcaaaatgccttgagagaactgatgagagctttacaaattagaggtgttgctagatgtatggagttcattcctaatgcaagggttccaatttttcagtacctgagcaaccaatttggcatttcctgtgatatatcgattaacaactaccctggtcgaattaaatccagaattttctactggatcataccatagatgaacgctttggtgatatggttttattggtcaaggaatgggccaaagctcaagatattaacgatccaaaaaatggaaccctgaactcatattctctgtgcctactggtcatttttatttccagacatgtgagcctgcaattttaccacctctgaaggagatttatgatggaaacgttgcagaagaaacagtgttttatgatgagaaacatgttgatgaggtttgtatggcaaatatagaaaggtttctatgccagaacatgagacaacgaaatcagaactctctcacacgtctcctcgcatccttttttcataagtttttaggcatccggcgcttttcaagtaaggtgatatccacttacacaggccggattgagctaatccaggataacccaagttggatggccaaatcatacagcttgtttgttgaagatccattcgagagacctgataatgctgctagagcagttgatgcggaggagcttgaacgtattgagcttgccttcaatcatacgagcagtaggtttgttgatggcgc

SEQ ID NO: 7945 - DNA, 815 bp, Setaria italica
  Peptide Sequence Number=SeqID_73919
ctacttaccacacttaaattaattaataagcaaagtaaatttatttgttaattatttaccgtcccgggtaacaaatttttactactagattaatttattatgaaataccaagaaatcaaaaggaacaaaaggtcagtgtgtgcacataaaacaacaaggtcggcggcaggacgcgattcttgtagaaacacatctgcagccttttgacctgacgttggaaatccactgagttttctatccccagaaagcgacatttaactgaaaatttgtatgtatgcatggacgctcacggattgcttcctgctctctctatctggaggactcattgctgatgttacgtgagaccttttcttttttacagcgagtagtctcagttggtgtcaggtgcacgcacagacaatggcgccgaggaatattttgggcagcagcttgaccgggttgtcgctgcgtgcaacagagtaattaactaataagaggaattaagtggcttaaacaacgggataaaactttgacctgtcgagtggaacttttgagctagccactaaccccctttatttcttccctggttcgcatcctagttgctagttctaccttaaacttcggcagataactttgctgaaaatctgctgggaaccaggtaaagctactctatatttttatccttttgaaatcggtaacagatatttaacaggcgtgcaagtacgcaaccgctagtcaacttaggaaatggactaggaatatgctcaagcgggagagagggaggtagagagagagagaggaccacatgctagagagagaggaggagagacgaggga

SEQ ID NO: 7946 - DNA, 511 bp, Setaria italica
  Peptide Sequence Number=SeqID_73920
tagcaagcgctacgcacttttgaacagaactccattgcttgcacatgaggagctactctgtcgttctgctgtgcttctgtcccaaaagctgttgacttgtgatccagaattcttggataagtcagaacatccatattcccaatattgtgtgaaatcctgcttcgtgcggttgatgcgattccagcgacgtgcacgtggcctacttgctaaaatgggctctcaaatatgctataagccaaaaacttttccaaatctgtcctgtagcatgtgccggcgtgattgctacatcacacacgtgttgtgtggatgtaactttgatcctgtctgcctacatcacgaacaagaagtccggagctgcccttgtaagtccaaccgtgttgtctatgttagagaggacatactggagctagaggctctatcaagaaaatttgagcaggatatttccttgtacaaggaaaggctttgcattggctcatctaaggaggctgagatatctgatttaaatgttgag

SEQ ID NO: 7947 - DNA, 269 bp, Setaria italica
  Peptide Sequence Number=SeqID_73921
ggcagaggtgagggggatagagaggtgtgtcgtggtagtcgagcgggatggcgtccggcgcgtcgtcgtctcccatggtgccggcgctctcgctcgccgtcgtcctcttgctcgcgctgtgcggcgcccccggcggcgaggccaggccgccgccgccgctgcacggcgtgcgcccgctcgccttcgacgaggggtacgcccagatcttcggcagcagcaacctcgcgctcctccgcgacgggaggcgcgtccacctcgccctcgacgag

SEQ ID NO: 7948 - DNA, 277 bp, Setaria italica
  Peptide Sequence Number=SeqID_73922
aattgagcaaaacagaagcacgcaccatggcgctcagcaaggagcaacacagcagcagcgctgatcagcaggccgtgcggctggatgctcaggtccagctctggcatcacaccttcggctacgtcaagtccatggcgctcaagaccgccctggacctccacatacccgacgccatccaccaacatggcggctcagccaccctcccacagatagtcaccgaggtcacactccacccgtcaaagataccatgcctgcgacgcctcatgcgtgttctcac

SEQ ID NO: 7949 - DNA, 253 bp, Setaria italica
  Peptide Sequence Number=SeqID_73923
gagggcacgagcgtcgttcaccaagcttggagcatcgctgaggatctcatggatttatgcaaagacaacgatcagaaaatgtggcgggtgatccagggcgtgtgggtggagatgctctgcttctccgccggcaggtgcagagggtacctacacgccaagagcttgggcacgggcggggaatacctctcctacgtctggctcctcctcttgtacatggggatggagaccttgtcggagaagatgcagaggacgg

SEQ ID NO: 7950 - DNA, 423 bp, Setaria italica
  Peptide Sequence Number=SeqID_73924
gccacgcacgcccccgctgtctccctcccgccgtcccaccacctcgcccgccgccgccgctgccgctgccgtcatcggagtctcccaccgccgccgccgctctcctgccttcgccacgccctggtctcctgcggccgcccgccgcttcacccgccccactccccgtcgctttcgcctggccagatccaggtgtccttggaccgcgaccgcgcctctccgcctttccccgtcggcatccttgtcgtcttcgtctcccctgggcgccgccgcagtggaccggagatctgatctgccgaaacctgaggagttgcttccttctcccactgagcatgatcctgcggtgagtgcggatagctcgtgcaagctgctggcttgggagtttcctttgtaaactgttctagagaaatcctgaggtgatagacg

SEQ ID NO: 7951 - DNA, 556 bp, Setaria italica
  Peptide Sequence Number=SeqID_73925
caatggtgatgctatcaactagatctggatcagaaactcttgcaatgggtgccttaggataagaaggactaggagagcttctcctagcttgaggagaagattcatgcacaggaactggagaaaagcaacttgcaggccaaatcaaaggaagctgaagaagctgaactcaaaatgcttagaaagagtttaaatttcaaggcagcaccaatgcctagcttttacaaggaaccacctcctcccaaggttgagttaaagaagatccctacaacaagacctagatcaccaaagcttggccgctccaagaacacaacctcaacaggcacagaaggaaatacaaatcctacagtgcgttcagctcgtctgagcctcgacgaaagggtctcccaaaatggtatcaagaaagcacccgccacaaatgcagtgaagaagccccaacgaaaatctctccctaagttgccatcagagcaaaaggctaaagttgatgtcgcagcttctcttttctattcttactagtaagtagtcttagttaaaacttaagttccttatttcgttactt

SEQ ID NO: 7952 - DNA, 1758 bp, Setaria italica
  Peptide Sequence Number=SeqID_73926
tgtaacttgtacagttgtagtagagattcttattttacaggttagcagaaaatgaataattatcttgagcatcatatcattcatgtcttcctttggccatttgttgtattaggtttgtaccctaaatccctaatatgtagttccttggtgaattcattgcaagttcataatccatactttgtgaagcacttaatagccttttgaaaaaaaatgaggcaacaattattagacttcaaaagcctattcttgacttgttttcactagatggctggttttggatttccaactaaaattttatctagtcagatgtaactaggtgcaatgttgctattcctaacttcgaggatgcttttactattctctttttgatattgatagctcgtgcaagctgctggcttgggagtttcctttgtaaactgttctagagaaatcctgaggtgatagcgtaaaatggatgcgagcgcggaggttgctgatgctattggtacaatgggcattgaaaatgcggcaaaggggaagttgccgccctgtgacaatgtagaggggcatggagaagaacacggtgcgctggctgatggagcgcattcgggcgaaagtgaggtgatcaacccatctgaagaggtggaaggagaagccacctcacaatcacaggacataaagccccgtgttcctgaggggagtcaaaaccattcaccaaaagtcgttaaatctcagagacagagccctcgaggcggagacaagagtcaagctaggagaagctctcctagtccttcttatcctaaggcacccattgcaagagtttctgatccagatctagttgatagctcttcaagcaatggtgatgctagtgtcagtaagaaaaaggccgaaaagagcagtttccgcccagttgccaaggagagcccatcacatgaggactcaaaagagaagaagaaaactcagaagccatcaaaccaacattctgtcgaaaaggatattgaagaagaatcaaatgaaagtataaaacctcaaagggttggcagcactcctgcttatggctttagttttaagtgtgatgagagagctgaaaaaagaagagagttctactcaaagcttgaggagaagattcatgcacaggaactggagaaaagcaacttgcaggccaaatcaaaggaagctgaagaagctgaactcaaaatgcttagaaagagtttaaatttcaaggcagcaccaatgcctagcttttacaaggaaccacctcctcccaaggttgagttaaagaagatccctacaacaagacctagatcaccaaagcttggccgctccaagaacacaacctcaacaggcacagaaggaaatacaaatcctacagtgcgttcagctcgtctgagcctcgacgaaagggtctcccaaaatggtatcaagaaagcacccgccacaaatgcagtgaagaagccccaacgaaaatctctccctaagttgccatcagagcaaaaggctaaagttgatgtcgcagcttctctttcatctacagaagagctagaaaacaagccatcgacagatcccgttcgagagccaatccgtgctcaagtcactcccgaagaacctggactcaacgtgtagaagaaacctaccaagtcggctccagtgaaatgggagggctgtgcctttttcctttatcacattttgctatttctgcagtaaactgctggctggtattatgtactaaaattagtctcatccccaggagtttgaagaatggcaagtgacccccccgta

SEQ ID NO: 7953 - DNA, 348 bp, Setaria italica
  Peptide Sequence Number=SeqID_73927
gctgcatacttgcaaattgcacgcgattctgataggaaacataagaacaagttaaagaagatataacatcattggtagatacaaaaggattctacaggagcattcaactgtctaaaacctctcagaaagtgatgataaatagaaagaaaaaaaacataacacctcttcacttgattagattttacatcgaaattatcctgatgagtgatcagaatgcaagtagacagtgtaagtttgatgtgtgtgcttgaataatcttactggattcaagtttgcaaattatcacttctttggaacaatacccactcatcactaagtgacaccgcatgacgagccaggacaagttga

SEQ ID NO: 7954 - DNA, 1350 bp, Setaria italica
  misc_feature (1329)..(1350): n is a, c, g, or t
  Peptide Sequence Number=SeqID_73928
acttttacttttaagtttacttttaatttttagtttttactttaacttttaagttttccctaagttctaaattatttgtttttattcttgatttacaaaccaaagtgctttatgattcaatctgctataggttgcatatgatcttggttagcaaaataaactagtaatttggttgctcacattcttgtaggcagagttccaaaatgttaccgatccagtctctagatttggaaaaccttcatgcacttctgcatctatagcatggaatccaagaagaggtggaagccaacaagctagttttgcaattggcttcgattcagattcgtctcattttaactcttgtaagatttgggagtttgaagaagctcatcagcgctggcttccacttgttgagctcggttcacctgaggataagggagatagagtgtttgctgtagcatgggctcctaacattggcagatcatatgagatcattgcagttgcaacctgcaaaggaattgcaatctggcatataggttcgaacactgactctgaaggtagaccatcgacagagaatgttgctttactttccggccacgatggcgaggtgtggcaactggaatgggacatgggtggtatgacactcgcatccaccggaggcgatggcatggttaagctatggcaggccaacttggatggagtttggcatgagcaggctgttcttgactgcagcggatcacatgtctaggggttcccaaaaccattttcgtttcccttgtgcagacaggtcacaaggtggtggtgctcttgctgcagaattcttcggtgtctctttcttatctcctgcgacctatcatagtacggttttttggcgctatcgaaatctggtccctcaaggtggcgctgctgctgttctcatgacatgtcacgtgtcactgatgtaaacagtttttatggcgtacctgaagggtgattgtaacacagtagcaatcgactttgaaaaggaatggcacactcgttttaattggaagccacagagcgtttggtgtaagctatcgatgggtcgaggtcacccacgtgatcatgaatgctttgtataagaggtcacccacgtgatcatgcatgctttgtatcatgtaacaactggtttgaaatcttggggttgtaacatcagtgtcctcgaaacaacactgatgtccttgtactattaagagcagataagataactatgcctaccgtgatgtaacttcgatgtgcaaactgctctgcaaggacctccggtccccaaaaaatctgttggactcaatcaggttatttcactatgcagtaaatgtaagatttagagttacnnnnnnnnnnnnnnnnnnnnnn

SEQ ID NO: 7955 - DNA, 466 bp, Setaria italica
  misc_feature (367)..(367): n is a, c, g, or t
  Peptide Sequence Number=SeqID_73929
tctagttgtaccctttctttgtcccttatttgtaaatgaactacagttccttgtacgagaccccagacatcaatatcttcaacacggcacacctgaagggtaaatgacaatgaagaatttagattgcaatcttcaggtggatgtataatttccacaggacaactatcatcttcacaattcagttttggagccctaatagatatacaagaaatcattagcgagcaaaaatattccaaacacaggaaatagggaaaagaacatcgcaatgtgatagctgaaggtgaaagtatttacacatcaccactacttctgtttacaagtgggccccgtaaaattgaaccaggtccaacttgtatgctgtagaacngtgacaaaataaggcgttgcgcctcaattgtgtctccatccccagacaaattcagtagaccttggccgcgaactccaagattagcattagaatgtatca

SEQ ID NO: 7956 - DNA, 353 bp, Setaria italica
  Peptide Sequence Number=SeqID_73930
agacccaatgactaaaaagagcatttataccagcaggaaaaggtgacaaaatcccaagaggtagaataaacaaaaccaagagtacgtcgaccatagagtatgaatatagctggagaaaagtaagcaaaactaagctgaaatctgcgagaagcagtattgagattactaaaccaacaagatcctgcagttaaaaccaaactatgattagcgcaaaatgaagaattgatccataataattctgtgaacagaagcaatggcagcgaaagacctgatgcccgactggttttgtattgtgcaagataagagaaaatggataaacaaatctctcctgtctctcagggtccttaagctat

SEQ ID NO: 7957 - DNA, 546 bp, Setaria italica
  Peptide Sequence Number=SeqID_73931
tgaaaaaaaagaaaagataatttcccactatctattgaaattagcttaggtaaattataattctatggtatctaaatcctaaatcctacaatgaatggatcaactaaacccttttcctatgtacaaggaaaataaagatgggtgagtaactggacaaaaggtcaacgatgcactataagtctataggcaggcatctgtaagcattctactttgtacatgcttcccctgactggccgacaaagaacggactcttcctagtcttcttttcatcaactcccaaaaaacttgagttgtgtaaagctcccatcatgagcactcctgtgatccaaaatgctgtcactgccaaaaatattgttgggtcattgctataaactgcgcggtcctggatctctaagattgatacatgccaatcaacaagccttgcttgaatgcatttgcatagcacaagtcctgttgggaatagccaccagctggtttcatccccgccaaattccatggctgcatgcttgaatgtttcttgtttgatgacttataatgcagaaaacc

SEQ ID NO: 7958 - DNA, 1140 bp, Setaria italica
  Peptide Sequence Number=SeqID_73932
agctggatataactctcaaaagatggcagtggacggtaaggggaaattatgcttacgttcccaggttccatggctgcacgctcgggtgtcttttggttgatgacttataatgtacgaaaccacacatgaaagccacaacctagagagtacaagcacagaaagaaggttatagaggcatagaacttgatagaaacaaactggtccaattgctgttatcaagtgtgatggataccaataagcacataaaattgaatgtaggcaaagaatacttacaacattgaccagcgaagttatgttccacaatgcatatacacgagcaaggcctgctgaccgccgcggcccatgactaaaaagagcatttatcccagcgggaaacggtgccagtatcccaagaggaagaatgaacaagactaataaaacatcgaccatggaatatgaatatagttggaggaaagtaagcaagactaagctgaaatctgcaagaagcaatattgagatgactaggccaacgaggtcctgatgtccaactggttttgtattgtgcaagataagagagagagggtaaaacaaatctctcctgtctttgagcatctttaagttttcaacattgagaacggtgccagttatccttttacacaaaagagcatcgttgatccttgagtggctcaactgagaatcagcatatgtattctggtttactgaatgctgctcggttataattacagagtcaccttgaagttcagcagccaccggtccccccacagcatgaagaacaagaccaaactgacagtaacctaatgctgtagtttggaaccatgcaaggtcaacacgcacatggtacgtgttcaatgcaggatttgcgtgagtttcaagccatttgagcacaggaagaaatgttgtgtttagatttccacgacgaaccaaacgcaactgggcattcaatccagctacaagacgatgccatattgacgatggtacagcctgacttataagacttgtaaccactctgtcactatgaagtgaaaatggagccatataacttccatcacctccaaagatgagggacattggaaacctttgatgaagtcgagggggaagatcagtccttttctcatcgccaaccaaaggaaagaaatacta

SEQ ID NO: 7959 - DNA, 1086 bp, Setaria italica
  Peptide Sequence Number=SeqID_73933
tacttttttaggtttagtattgtactttattaattgttacgtaaaccacactattgaaagccacaacaacattgaccagcgaagttatgttccacaatgcatatacacgagcaaggcctgctgaccgcctcggcccatgactaaaaagagcatttataccagcaggaaaaggtgacaaaatcccaagaggtagaataaacaaaaccaagagtacgtcgaccatagagtatgaatatagctggagaaaagtaagcaaaactaagctgaaatctgcgagaagcagtattgagattactaaaccaacaagatcctgatgcccgactggttttgtattgtgcaagataagagaaaatggataaaacaaatctctcctgtctctcagggtccttaagctattactatcaagaactccaccagtaatccttttgcgcattagagcatccttaacccttgcctgccctagttggatatcagtgagcatgttttgtgttagtgagcgttgctctagttttattctagggcttccatcatgttcagcaaccactggttctccgtcaacagcataaacaacaagaccaagttggcagtaccctaatgctgtagcttggaaccacgcaagatcaacgcggataccattcacagctaaagagggattcgcgtgagtttcaagccaatcaatgacaggaagaaacgttactttcaagtttccacagcgaaccaaacgcagctgtgcattcaacccagcaacaagacggtgccatatccatgagggaacagcctggctcataagactagtgagcacactgtcactatgaagtgaaaatggagccatgtaacttccatcgcctccaaagatcaaagacattggaaacctttgacgaagacgaggtggaaggtcgggccttttttcatctcccccaaggaagaaatctagataccctagcattagatctggagtcgcggtcaccttgaggccctcatagagtgcacgtgaacggcaagaccgtaagcatgaatgatcatattcggatcgaacaaattcacatagtttctgtaatttctttctcctgcgccactgttgccagg

SEQ ID NO: 7960 - DNA, 3124 bp, Setaria italica
  Peptide Sequence Number=SeqID_73934
ttacctttagttaactttaggtaccgtaactaaagtaacggtacttctttccttagttctttctttttctattctaacttccctaaaaaaactttgtagtttgttctattgtctttccccttgtacttggtccgtactaaagtaacggtacttctttccttagttctttcttttcatcaactcccaaaaaacttgagttgtgtaaagctcccatcatgagcactcctgtgatccaaaatgctgtcactgccaaaatattgttgggtcattgctatatactgcgcggtcctggatctctaagtttgatacatgccaatcaacaagccttgcttgaatgcatttgcatagcacaagtcctgttgggaatagccaccaaccactttcatccgttcccaggttccatggctgcacgctcgggtgtctcttggttgatgacttataatgtacgaaaccacacatgaaagccacaacaacattgaccagcgaagttatgttccacaatgcatatacacgagcaaggcctgctgaccgcctcggcccatgactaaaaagagcatttataccagcaggaaaaggtgacagtatcccaagaggtagaataaacaaaaccaagagtacgtcgaccatagagtatgaatatagctggagaaaagtaagcaaaactaagctgaaatctgcgagaagcagtattgagattactaaaccaacaagatcctgatgcccgactggttttgtattgtgcaagataagagaaaatggataaaacaaatctctcctgtctctcagggtccttaagctattaacttttcgaagaaagccactacaataaagaactaagtagaagacaacaactagtacaactaatgaagtgaaaatggagccatgtaacttccatcgcctccaaagatcaaagacattggaaacctttgacgaagacgaggtggaaggtcgggccttttttcatctccaccaaggaagaaatctagataacccagcattaaatctggagtcgcagccaccttcaggccttcatagagtgcacgtgaacggcaagaccgtaagcatgaatgatcatattcagagcgaacaaattcgcgaagtctctgtaatttctttctcctacgccactgttgccatgaccaggccagagggtatgcaaggatacagaggatactgtaaatagatccttcccaccactgataagctgcaagggtgtttatatcatcgacaaatcgattaaacgcatcttcatatacaatctctgttatttgttccggtggactgtgtgggagatgccacggttcactgaaggtgttgggacccatgaaatacatcctgtgtacatgaccatgtgactcctcagccctattagtttccaagacctcatttaaagattctaggaagggaaaggaatgatcaatttgggacccttgttgagttggcgctggcccaggcaactcatcagtgccgacaaatttcatacgagcaacacttaaaacaagagctaaaaggataagaaggcctgaaagaagtaggccaaataaccaaggtcctccaaaagtgtatattaactcctccagagctgtataacagtgaggcatgcgatatctgtcagacacacatctgtagggacatggagtttcagcaacacctcctcggacatttacgtatatagcacggtgagggagttctgccggagggcatggaaggcacagagatttagaagatccagtaacatttttgtatgttcccagagggcattccttgcagaatgtaccataaaggccttttgggcaagcttttcctgtgaccgttccattcccaccagaaaatccttgtcctttactgactcctccacttgtaagtattgatcccttaacagctgcaacaggtacatattcatctccagtaggaatattagaccaatggaagtgaatccttccccctccacctccaccgctgccagcacttccaaagccaccaacacttgaaaggactgagctttctgctagggacaaagtgtgcacaaatagaagaattgtgcccccagaaccaccaccgggtcctccagtagagccattagtaaccatattaacgtagctgccaccatttgattctactgaaccatagagggcgagacttggcaacgaatattcgcatgagcccatcactattatacccccaccagctgtagaaaactctgtagtgtcattcccactgccgctgccaagttcacaaggtagatcagcattaccataggtaggtccaccctcagcatggcttccattataaaaaccatccccgcctttaccaccatgtccaccaccaccacttacaccactgcttaacatttttccttgtcctactccagttcggcagcccaagcctgatgcgctgatcgtcccagatgtatgcacagtgacccttcttgccctattgaaatgaactacagttccttgtacgagaccccagacatcaatatcttcaacacggcacacctgaagggtaaatgacaatgaagaatttagattgcaatcttcaggtggatgtataatttccacaggacaactatcatcttcacaattcagttttggagccacatcaccactacttctgtttacaagtgggccccgtaaaattgaaccaggtccaacttgtatgctgtagaacagtgacaaaataaggcgttgcgcctcaattgtgtctccatccccagacaaattcagtagaccttggccgcgaactccaagattagcattagaatgtatcacagatgattccttcaagactatcaaattgctcgcatccaacaaagaagttgcaactattgaatctccaccgccatcaattaacattctggagttccacataaggagcatcttcacagacattctcaaagcaccgaacaccttgattgttgagtcactcataaggagctcctcagccatcagttcgaactccgagtatggataacgagtgagaccaaaagttagaataccacctgaaagaaggctaagttgcccttgcacctgaacacgactccagagcaagggaacagcaactttcgcatgatttctcaacaaaaacattagtccacagtggttgatttgggaactctaaaaag

SEQ ID NO: 7961 - DNA, 894 bp, Setaria italica
  misc_feature (854)..(854): n is a, c, g, or t
  Peptide Sequence Number=SeqID_73935
tccctgtgtgtccgtttggctagtccccttagagtttttttttttttgtgtcagttaaaaccatggagcatgttaattcttatgttgcccatcagaaacaacagatacaacagaaggtttttgcatcctccgatgacttgttttgcccctctgcccagctcaacaacataagggccagggcatgatagtaagagaacagcaacaaccaaaaccgacatccccccaatgtgtctcttaggttagctttggcattgtttataaccctatggtgtctaaatcctacaaagaatggatcaagtacacctcttatatatacaacagaacaccggttgcaactgcacatgatcatcgaaggacgctgaaatatgcatctattataactgtagttgcttctttggcctggtcaataaagaaaggccttgctgctcgcactcgtccttttatcaactcccaaaaaatcgagttgtaaaaagctttccagttacaccaggtgtcatgactgccaaaagatgtttgggtcattgctatataccgcgcggtcttggatctctaaattagcaacatgccaatcaacaagccttgcttggatgcatttcaacaacatgagtccggttgggaagagccaccaaccactttcatccgttcccaggttccatggctgcacgctcgggtgtcttttggttgatgacttataatgtacgaaaccacatacgaaagccacagcaacattgaccagtgatgtaatattccataaggcatacacacgagcaaggccagctgaccgccgcggtccatgactaaaaagagcatttatcccagcgggaaaaggtgccagtatcccaagaggaagaggntcaagtacacctcttatatatacaacagaacaccggttgc

SEQ ID NO: 7962 - DNA, 443 bp, Setaria italica
  Peptide Sequence Number=SeqID_73936
ctcctcctccgcaagctccgcctcgtcgccgctatcttcgacctctcggactcgctcaagcacccgcgagagaaggaggccaagcgccaggcgctcctagaactcgtcgattacgtgcaggccccctcgcaggctgccaacgcggctgcgcgcctcccggaccacgtccaggaggcgctcgtcgccgccatctcagccaacatcttccgcccgctgccacctgcgctgcacgagtccgctgcggcaatcgaccccggcgccgcccccgacgacgaggaggagccctacctcgatcctgcctggccgcacctccagctcgtctatgagctcctgctccgatacgtggtgtcgcccgacaccgacaccaaggtcgccaagcggtacgtggaccatgccttcgtgcttcgcctcctcgacctctttgactccgaggatccccgaga

SEQ ID NO: 7963 - DNA, 1370 bp, Setaria italica
  Peptide Sequence Number=SeqID_73937
aatgatgaaatgaagaaggagctaatatttccaactttcggaaagataagctagggattggaagtaatgggactgtatactggtatgatggtgactcaactattggccatagattatataaagaagatgtaacggttaattttaagcagaattggaagggaaagagtggccatttgacaaaaccagacatcaatattcattgggaaacagttgcaactaacctggacgagtttcttgagatatcagagaagctatctagaaagggtcgaactgaatctgctattgctgagcatcttaaggcagaaattattccagctgtggagaagttacaaaagaaaaaagagagggatttaaaacgtcaggagaagaaggacaaacttttagcttttgctaacagtttccaaacccgttcactgcgtaaccgtaggcctgtcaactacaattactctgattatgatcgctcgattgaggaggcaataaaagctacatcgaaagcaaaagaacacgattcacatgaggcaggaacaaaagagaagtgtgcttcacatctgggaaacaaaggagccaatggaagacctgacatcaattctgagcgcaacaaagatggaggactggatgatgccaagtacctaagtgacctgagctctggtgatgaggaagacagagactatactgagcaggatggtggctctgctgatagtgatggagacaataatgcttctgatccctacaggagcgacttggaagaggaggatgtgtttgtaccgcgcaagagaacccgtcttgctgcccgcttgttgaaggagaagcctagacaagggctccgtcggagtcaaagaaacatgaagaatgacgaagaggctatgcatccaggtcagctcactcctccaccaatgacaaagaaaacactgaggcaaaggcccacgccggtctctaagcaaccaggcgctgcttcctcgggctctgaagatgatgttgcacagtttgttgctgactcagaggatgaatctgagtaatattagctgagggttcatgtggtattttgtattcttttccttgtggaagcggttggtttaggaggtttagcatcaccagctgcttccacttgtacaccggctgggggaaaacggactcagacagcactagcattttccccattgctgatgagtaatcttcgcaaagtcatgggggcacctctgccccacttgtgtggtgatttgtacatatgcgtctagattgcgacgcatcaccactgacgccaaccaaaatctagtttatgaatgtttattgttattatagcgctagaagcgctataataacaataaacattcatcctagattctgaagcagaaatggtgtcttttatcctt

SEQ ID NO: 7964 - DNA, 816 bp, Setaria italica
  Peptide Sequence Number=SeqID_73938
gcacaatctcatgacaaaacaacaattacacatgagttatgcactcagatcccattccaaacgctacaaagtgcatcgtaaatatgcttggatgttccctcatcatcacagtatataaccgtcctatcagatgttatcttcacaagagcatctactggacttgtaatcagaacagaccgttcacctgcacagttatcatctgcagcaaacgaacataacatccccttttcttgtagtgctggcaacaagcgatccggatcaacagcgccccaatgtagtaagtgtcgctttgatcgatccgattgcttctctgcagcagccagctgatactgtccactgcttacaagcagatctgttctcaatctcgccactgcagtggtctcattcagttgcctaggctgcaatcctaaggccacattatgtgcaaggtgcacctcaaagtcttcccgtaaatttgggagctcgatggttttgcccttggtgtaatacaagaatgaccatggcctcttctttactgaacaccgggacttcagaccttcaggaagcattacgaacttcggattgagcactcccagtaatgaatcaatttttgccacccttactccagaaagaaaagaacactcaaggacttgaattgccaagggcatgaaaggcttaagactcaactcagcatcattcccttgctccaaaactagaaggcagcgtttgtcagcatgccagcgacgaagcagatggacagctgggccaagcctaaggctccagtgtggacaaagcacaatacaaggctccttccatgctgccagcaggccctttgag

SEQ ID NO: 7965 - DNA, 2029 bp, Setaria italica
  Peptide Sequence Number=SeqID_73939
tcgtctagtagtccgtcgggttcctaccgttgttcgtagtacccgtcgtccctttgtcgtcttcgttgtcttccttgtctaccctagtttcgaatttggtgagaacagtcaattcaaaacagcatgcagccagcaggcagccaacgaagcatcattggaagggatccattacaaccacgtttgtgtcagtgtgtgctggaacggaatggatggatggacacgaatcacaaatgagcggacgcagcagccaagcccggccgcgcgcgtctcttggctcttgctatctatcccgttcgcgcggcccgatgccggaagaaaccaacggccgtcgcggccatcttttggccgccatcgtgacaagcacggcgtcaagtaccgcccgccgcggccacgagtgcgatgccagcggccgggccgccgtcgccgtgtcagtggctctgccctgactcccgaggtcaactgaggtcaacagatatgatagccaagtttgtccatttctcttttctagatgccgtgacgctgatgcttctcatgacgtttgaatgttccgctcctgcctggcacgtcgcacttccagggttacatcaagctaaaactgttcacggttattggagttcttaccggtactaaacctgtactgctagagttttaccgactcgaggtacaactatgttacaggaaattccaagtcaagtcgccaccacgacgcgcaaaaaactgtgctctttcgtcactacgacagcgaccgccctatcgatcacctcccgccggagaggccggacacgtccgagaacgcgccggagacggggctgacgccggacgtgaccgtggacgggaacgacatggcgaacgagtcgaacccctcgttctgcatcagcgccagcatcgtgtagctcacgtacgtcggcgccacctccggcatcggggcgtcgccctccaggtactgcaccacctgccgcatcccggggcgcgcgtcgggcagcgggtgcgcgcacatgagccccagcctgatcgccagccgggcctcgtcggcgtcgtacttgccgcagagccgcgggtccaccgtgtcgagacccgcgcccttgcgctcgtgctcctgcacccagtccagcagcacgttctgctcgtcgggcgcgatgcacccgagcgggcggcgcccgcaggtcacctccagcacgaacacgccgaaggcgaacacgtcggtgaccggggtggccttccccgtgcgcacgagctccggggcgaggtagcccatggtgccgacgacgtgcgtggtctgggggtcggcgccgtggtcgtacagcctcgcgagaccaaagtcgcctagccggccgttcatctcgctgtccagtagcacgttgctcgccttgatgtcgcggtggatgacgacctgctcccagtcctcgtggaggtacagcaggccggacgcgacgcccttgatgatgcggaacctctgcgcccagtccaggggggtcttcctcttgtcgtagaggtacttgtcgaggctgccgttgggcatgtagtcgtagacgaggaggagctcgcccttgcgccggcagtagccgagcagctgcacgaggttccggtgccggaggtcggccgatgctgacgacctcggcgacgaactcctttatcccctgccgcgattcgtgtgacaccctcttgacggcgacctcgagctttgatttcgggagcacgcccttgtatactctcccgaatcctccgatgccgaggagcttcttgctcttgaacccctccgtggcgtggaagagctccttgtacgagaaacggtgcgggccgaactccacctcccagtcctcgcgcacctcggcgtacctcacccgccgccgcacgaacaggaagacgccgacgagcagcgcgaggacgaacgccgcggtggcgatcggaagcacgatctccagcaccttcgacctgggcttgggcccgaaccgcggcagcgacggcagcttcgaggtgtccagcggcggggccgcgccgcccatggcgaagctccagcccaggacgtagg

SEQ ID NO: 7966 - DNA, 500 bp, Setaria italica
  misc_feature (490)..(500): n is a, c, g, or t
  Peptide Sequence Number=SeqID_73940
ctgttgagtagcagaggtattagcaggcttagcaatggcagcccgtcaaggtagcaggacgacgaaggcagataagtggctgtttggtgggaagtggaggggaacctcgaaggagacaagacatcctgttgttcctgaggctaagcctccgaatcctgctgtcgttcaggatgaaggccatctgccttgagaagtctagagtacatgtatctggtctggggcagagaaagagcattgatattgcgcccgggaggagatcaatgccggagatggagatcaacatgaaagaagttgttggagtgctcggggtgaaggtgatggccgcagacatgccgccattcatgcagttgcatgccttccggtgtgctaagcgatcccatgatagcttggacaagttcagttcaaggcagctggcccatgatgtgaagaaggagtttgataaagtgtatgggccaacgtggcactgcatcgttggcacaagctacggctnnnnnnnnnnn

SEQ ID NO: 7967 - DNA, 469 bp, Setaria italica
  Peptide Sequence Number=SeqID_73941
agcaacttgttatagacagcttcactgggtataacaagttgctagtattgaaatcaatataatcataatgttttctgcacttgggcagcatgaaaccttatctgcttatacttttcgatcttaacttgttgctattccatttacctacctttgtttcagaggacacttattatgaatcagcatctgatgcacttttgttgatatccaaagaaggagtttgataaagtgtatgggccaacgtggcactgcatcgttggcacaagctacggctccttcgtgacacattcccgaggctgtttcctctacttctccatggacaaaatcatcgtgatgctgttcaagaccaagataaggaaagtgctagcatcctgagcttctgtaatgagatggcttgcttttgtgcccatcatgaagggcttggtcagtccagccctatgataacgacacttgtaaaatattggtgcttgga

SEQ ID NO: 7968 - DNA, 1127 bp, Setaria italica
  Peptide Sequence Number=SeqID_73942
tccgtccacgctcctcctcgcccccgccgcgcagctcactagttccgcagtcgccgctagtgctgtcagcggtaggcggtggagaagcgtgaggacgaacgccggtgggggttggctttccgggttgttgggaggcaagggcggcggcgcgcccacggcgatgacggtgactccggggaccgtgaaggccggcgaccccgtgctgcatgaaccggcacaggaggtggcgccaggggacgtacggtccgacagggtccagggcatcatcgaccggatgatcgacgtcatgcgcaaggcccccggcgtcggcctcgccgccccgcagatcggcgtcccgctcaggattattgttctcgaggatacccaagagtacatcagttatacatccaagaaggacatagaagagcaagatcgccgcccttttgctcttcttgttattattaatcccaagcttaagaacacaagtaaaagaactgcacttttcttcgagggttgtctgagtgttgatggatatagggctgtcgtggagcgacatctagatgttgaagtttcaggtttggaccataatgggaaccccattaaggtacaggcctcaggatggcaagcacgcatcctacaacatgaatgtgaccatcttgaaggcacgctgtatgttgacaagatggtcccaaggacattcagaattgttgataacttggatatgccgcttccaattggatgtcctccactcggtgcaagataatgtggatagcttgcaatctttcctcatcaaatagaggcatttagatggctccatacaatcagggcagcagagtgattattttccttcaatcactcttaccaggaaggctacaaaatttggacaactgtttcagaggcattaatttgcaggtcatgattatgaaaatgtagaagagctttcagatgataaatgtaatcatgcattataaccaaagccatcaacataacttgcaaaataacagttgttcaaatctgtgctcttgctcttgagatttttatgctttactggatgcaagagagaaatcagttgtgtagtgtaatgctatagtttagaatcaaagaaagagaaatatgaaggtcctgtggaaggaaataagacaaattaa

SEQ ID NO: 7969 - DNA, 335 bp, Setaria italica
  Peptide Sequence Number=SeqID_73943
caacacgaacaccttacagtgtctgcactgcgagtatacatcagcaaagttcgacaaccaccacatataagctgagccatatctagtcctgcattacaaatttaaataacttttataagcacattaaaatagtgtgtcaagcactatgaaccagttataggccttggaagtgcttcatgcaaaaggccaaaaaaaattgcttcatgaaaatgagggcaaaagacagagaaggtaaaacattgatattgtagtgttggactcatttcaaaacgaatagtgaacaggtgcatggtggtagaaatgaatggagtgcagaggtgagtgcagatataatt

SEQ ID NO: 7970 - DNA, 323 bp, Setaria italica
  Peptide Sequence Number=SeqID_73944
cacagatttcgaccttcatgggttcatttgcaagatcccagaaatacttggtgtatctttgttcttcaaggacaaccaagcaatatctttgttcttcaaggacaaccaagcaaccaatcactgggcagcactataacttatggtacttcttggcttctgatatagaacacacaacaatgatgtacaacgtaatgatagcagtcagtttttcccagttgtgactccaacgacaacgttgctcacctgtgtataaagttataaaacgaagtaaattccaaggttcaagcagcattggagaagatgtctaaattctagttattatt

SEQ ID NO: 7971 - DNA, 614 bp, Setaria italica
  Peptide Sequence Number=SeqID_73945
agattctcccactacatctaccagacaccgtgaaaccccgtacctcactattaaaacaaacattattgcgccataacgtgagagctaagctttatgttcccctgcacgccagctgtttcgcgctgccagtgcacgactggccgtagaggtgatgattgccaacctcccaagctcagacgaaaggaaacgaagcgtccaacacgtacctggtggcggcacggtggtgacggcctggcacagcgcgcagcagacgctgggcgcccctcgcgggtagagcaggacggtccggcacgcgtggcacacgatctggttctgcatagctgcaattggaggagaagaagggccgaatgagcgtccgattccaaccgagatcgaaatccacgaagcaatccgatcgtagggcggctgaattcgattgggggcgacggcgagatcggtcgatcgatcgatcaaccaaacaaccgcgtacccaccgcaatccacccctacgctgcagaaaccgaggaaccaaactgcttccctgccatcccggacggatccgagctcgatcgagacttagccaagcgtgagaggaggaggaggaggaggacggggacgaggcgactcaccggcgg

SEQ ID NO: 7972 - DNA, 1133 bp, Setaria italica
  Peptide Sequence Number=SeqID_73946
ctcctattcagtgtcattgtttgcagtatattccttctaaaatgcaaaccgtacatgtataatagtaaccactatcaacaataaagattgaagacaacacaaactaacaaacaaattgtaccaaagcatgtatacaactaaatgaaactatgctatcattcccctcaactatctgatcacacggtgaaatctagcagcattcatatacacacaaaaaagaatcgatcgattcaagacacagatttcgaccttcatgggttcatttgcaagatcccagaaatacttggtgtatctttgttcttcaaggacaaccaagcaatatctttgttcttcaaggacaaccaagcaaccaatcactgggcagcactataacttatggtacttcttggcttctgatatagaacacacaacaatgatgtacaacgtaatgatagcagtcagtttttcccagttgtgactccaacgacaacgttgctcacaagttttcccttatcatcaactgtcatagggttctcaacaacaacagttacattctggggttgagatttaggagcagaagtagatgaggtactatatgaaggtccattggatgctggccttgcggatgttgtgggtgccactgtatttactccagtagcagtgacatgattgcatatggcacattttactgaatgtgctccatatggatacatcaaagttgtctggcagcggccgcagtttacatgagctatattattcactggtctaacaagattgactgtattgcaacacgaacaccttacagtgtctgcactgcgagtatacatcagcaaagttcgacaaccaccacatataagctgagccatatctagtcctggtggcggcacggtggtgacggcctggcacagcgcgcagcagacgctgggcgcccctcgcgggtagagcaggacggtccggcacgcgtggcacacgatctggttctgcatagcggcgtcgggcgcgggatgactgcccgcccgtctacgcctccggtggggctccgggaagaaagagaaagaggtcgacgcggcggggcggcgagcgagcgcggcgtcgcttgtctctcctctccccggcggagcgaggggggcagttgattccggattggatttgtc

SEQ ID NO: 7973 - DNA, 1719 bp, Setaria italica
  misc_feature (1614)..(1614): n is a, c, g, or t
  Peptide Sequence Number=SeqID_73947
ccacgaaccggtgaaacagagtaataaatcgggtcgcaggctcgcagcgcacgagctcgacggaacaccctagtccaagaccaccgcgaggtactccagccgtcaccggagaagagccagctccgaagctatggcgccggagcccgatgatgacgtgctcaacgagaagaacccgcgcccgctcgacgaggacgacatcgccctcctcaagacctacggtctcgggccgtactcgaccagcatcaagaaggtcgagaaggagataaaggagatggcaaaaaagatcaatgacctttgtggcatcaaggagtcagatactggattggctccaccaagccaatgggatcttgtatcagacaagcagatgatgcaggaggagcaaccgttgcaggttgccaggtgcacaaaaatcatcagtcctaatactgatgatgccaaatatgtcataaacgtgaaacaaattgcaaagtttgtggttggattgggagacaaagtttcaccaactgatatcgaggaaggcatgcgagttggagttgatcggaacaagtaccagattcaaattcctttgccacccaaaattgatccaagtgtaacgatgatgacggttgaagaaaaacctgatgtcacatacaatgacgtcggtggttgcaaggaacagattgagaagatgcgggaggttgttgagcttcctatgctccaccctgaaaagtttgtcaagcttggtatcgatcctcccaagggagtcctctgctacggtcctcctggaaccgggaagacccttcttgctagagctgtagccaaccgcacagacgcttgcttcatccgtgtgataggcagtgagctggttcagaagtatgttggtgaaggtgctcgcatggtccgtgagcttttccagatggcccggtcaaagaaggcatgcatcgtcttcttcgacgaggttgatgccattggtggtgcgcgctttgatgacggtgttggtggtgacaatgaggttcagcgcactatgctcgagatcgtgaaccagctagatgggtttgatgctaggggaaacatcaaggtgctcatggctaccaacaggccggacacattggaccctgctcttctgcgtccagggaggctggataggaaggttgagttcggcttgccggatcttgagggccgtacccagatcttcaaaatccacacccgcaccatgaactgcgagcgggacatccgctttgagcttcttgctcgcctctgccccaactccactggtgccgacatcaggagcgtgtgcacagaggccggcatgtacgccatccgcgcgcgcaggaagaccgtcaccgagaaggatttcttggatgccgtaaacaaggtcatcaagggttaccaaaagttcagtgcgacgcccaagtacatggtgtacaactaggcagtcttgttgtcgttcttttcctgtgcctcgttgggcttcttctgcacgagtgttcttcattttttgttaccctttctgcgccactcgcaacatttgcatcaatatgtattcaggattgtatgtatctattctgtactgaaaacgttgaaagatcaaaataggaggattgttcccctttcaaaaaaaaaaaaaaaaaaaanaaaaaaaaaaaaaaaactaaaaacgtggaacgaaccgaccgaaccaaacggggaagggtaaggtacggaacggacggaccaaccaacggggaagggtaaggtagg

SEQ ID NO: 7974 - DNA, 428 bp, Setaria italica
  Peptide Sequence Number=SeqID_73948
ggcgcgggcggccatcttcggccacgcgctgaacccgacgggaaagcgcgcggccacgaagctgctgcggaagaagatggttggggaccaggtggcgcagtggtacccctacgacatcaagcgcgacgacccgctcgtcatggcgcgcgaggagaaggagcgtctgtccaagctggaaatgctgaagcgtcgtggcaagggtccgccgaagaagggccagggaagacgtgcggtcaagagaagcaaataatcgccacactgatgcccagttctgttttctggcgtttgccttgtttgcatactgcaatgttttcttgggtgacgatagatgaagaaaccctcactgtttgctcaaacaagtttagtctacgactgattttcaatgaaatcgcgttccccgtttgaagcatgatgcttaccaaaaaaaa

SEQ ID NO: 7975 - DNA, 633 bp, Setaria italica
  Peptide Sequence Number=SeqID_73949
cacatgttcagcctgcggcggagcaaggccaacttctaccgcatcacgtcgctcttctccggcgcggtggcggtgggcaagtggatggacggcatctgcaagtggaagaacccgctgacgacggtgctggtgcacgtgctgttcctcatcctggtgtgctacccggagctgatcctcccgacggtgttcctgtacctgttcatgatcggcgtgtggaactaccggcggcggccgcgcaagccgccgcacatggacacggtgctgtcgcacgcggagcccgggctggtgcaccccgacgagctggacgaggagttcgacaccttccccacgagcaagccgggggacgtggtgcggatgcgctacgaccgcctgcgcagcgtcgccggccgcgtccagacggtggtcggcgacctggccacgcagggggagcgcgcgcagtcgctgctgagctggcgcgacccgagggcgacggccatcttcctcatcctgtcgctggtggtggcggtggtgctgtacgtgacgcccttccaggtggtggccgtggtggtggggctctacctgctgcgccacccgcgcttccggagcaagcagccgtccgtgcccttcaacttctacaagaggctgcccgccaag

SEQ ID NO: 7976 - DNA, 743 bp, Setaria italica
  misc_feature (719)..(743): n is a, c, g, or t
  Peptide Sequence Number=SeqID_73950
tttttcaggcggcggcggcggagcgggaggggtgaaccgggcgaccgagcaactgagcaagcgacaggcgacagccatggcgttctggcaggcgcgcgatttcctcttctgcggcgtgtgcggcaccctcctgaccttcgactccatccgctccgcgtcctgccctctctgcggcttcaagcgcaaggccaaagagattgaagggaaggaaacacggtacaccgtcaccgccgaggatattcgaagggagctgaagatcgagccatttgtgactcttgaatcagcaccaatgcaggaggtggttgtgcgaagacctaagacaagaaaaccctgtccggagtgcaatcatccaatagctgaatactacagcagacaaatgcgttcagcagacgagggagagacgacattctacgagtgcatgaaatgccatcacaacttcatcaacagttagaatggcaatcttattgcccaagtggccaagtaccagtgttacatggaagtgcacacccgtgctttgtgccaaactacttttgacggaacctcaatgtgctgagtagcctattccttgtgtataaatatgaatgtgcacgtatccataggaagtgctactactttctcactactttctaaaagtgattgacctgaaagctgcatttctgcagcgtgcttgttgaaacatgctggctggtccattttgttgtcttttatctttacccttnnnnnnnnnnnnnnnnnnnnnnnnn

SEQ ID NO: 7977 - DNA, 846 bp, Setaria italica
  Peptide Sequence Number=SeqID_73951
aagccaaccgaagagactttcttttgctttgcatatcggttagagaacaatctttgcaactttacaagatctagatctgtaccggctccactccaccactcctttagttcaacatggaatgtgaaatgtgaacacgtcgtctgaaacttcttctcctacctacacatcttttcaacaccctcggctcacgcaaacccccatttctcaaacctcacatcaacaaccatgcacaccctcaaactcaaacacgaccatatctacacatgcacgcattgcagggcacaattaagtggaatcaaatctcctaatcccttctcactcgtcatcacctggtaattaactgcagctgtggctggcttctatgagatgctgatcactgtggcggctctcgacggctccagggcgacgcactgcaccagcccacagagcatgctcacctcctgctcgctcaccgctgccggcttgcaactgtcaccgtagccgtcagttgcggcggcggcggcggctttgatgtcgaggcactcctcgaagcggtagcaggtgacgaggtggtcgttggccatgccgacggcctgcatgaaggcgtagaccaccgtggggccgacgccgaggaacccccggcgcatcaggtcctggctgatggcgtcggccttcgccgtccggagcggcacctcccgcgtgtgccggtagctgccaaccatcggcttgttgctcacgaagctccagcagtagctgtcgaacgatccaaactcctctatgaccttcagcaactcacgtgcgttttcgatgattatgcgcagcctgtgttccgacagcagggagctagcagggctgcctggcgccaag

SEQ ID NO: 7978 - DNA, 281 bp, Setaria italica
  Peptide Sequence Number=SeqID_73952
ctaccgccgcccacaccaagtatgcagctaggctctgcctcttgccgtcgccatggctcggccatgtgagcatcctacaggagccgccatctcccacctctcaccggcgggtggcggcgccatggccgcttcttggtcctagcagagatcaggagttgggcgctgcgctgccacgctgctgaacgtttggagaaggtggagggcttgtgttgacctgcctgttagattctgcacttcggtgtttctgatcaatcgctcctgcccggttcctgtcttgtgaa

SEQ ID NO: 7979 - DNA, 405 bp, Setaria italica
  Peptide Sequence Number=SeqID_73953
catgaatcttgaattgcttaggtgctaatgttgaaattctgacctatatatgaaactgtgctatttatcagtcttcattaaaatgagttgttcaactttcttggcactgattggatatcttgatgtttgccaggttctatgtagcagaggtgctactcgcgctggaatacctgcatatgcttgggattatataccgtgatttgaagccagagaatgtccttgttcgggaagatgggcacatcatgctgtctgatttttgacctctcccttcgttgcgatgtaagccctactgttgtcaagtcttccaaccctggaccagatgcacttgcagaggaacaaccaagcatactgcgttcagcctgcttgtatcgagccgtcctgctattccaagccaagacaatagta

SEQ ID NO: 7980 - DNA, 552 bp, Setaria italica
  Peptide Sequence Number=SeqID_73954
tctagtcaatttggtatattgaaagactaaaattttgaacttgccggtcagcagaggaatcaaattaaataggtacgttgagacacacttttactaatttagaaacaatatttatttaacacaccaaaggtctacattcggagcgtaaacttgaaataacatgggtcatttaatcattttgaaacttgaaagcaaatacaaaagtgatgcttctttgcatggttttcctcccagtagaattcatcttgtttataacctactgaacaacataggtaccttgacattctcatcttccattggataagtgggccatggaatcttcattgtgcatgtgtaaactcccctggaatgtaggaatcgaacaggaactctgcttatctggtctccagtaaaaccggcactgcatgcaggagctattcgttgttttttggtgtctcatacatagaacagttagttagctgctttattgctatattctcaaaaggaatctattcttggatgatctagcacagttatttggcattattgctatattcttaaaaggaatctatt

SEQ ID NO: 7981 - DNA, 2175 bp, Setaria italica
  misc_feature (13)..(13): n is a, c, g, or t
  Peptide Sequence Number=SeqID_73955
aaaattgatggangtttttcagaccattctggcggcattgtgcccacaaatgcttatctgacaccagcttataaagtgcttcagctatttcattttgattatggggtcaacaagaatcccattatcaagaacccgatgtatgtcgacaggcccaccatttcgggtggcaaccatgggtaaaccatatgcagcagcctcaatcaaggtaagtccaaatggttcaatgaatgcacagttgataaaaaccccctttgttctcgccgctaaacgataaatatcaggaacttcagattgcttatggtgcttggggtatgccacttggccatatagatcatatttatcaattagcttgagtactgaagtcaaaacagctgcatttgtgcttgacatttcatcaatgacatcacgattgcccatgatcagtgtaagatttgctaaatttcttaattcacgatgttcaccaaatgccttgactagagtagttatattcttcttgggatctggacgtgcaagggcaagaatcatgggcttacgggggtttgagaagaagcgcattatatcagcccaaataggtggatctggtgaagctgagccatcttcatttccttcttcaccatccagatcgacatcatgcggtgctatatggctaaactccatgccaggaggtattgcaatcatacgaggcatgtaacgaccaaagcagctcacaccacgctttattcttgctctaagttttcgggccatagttagatcaaaaccatcatacagtccccattgttgttctatttcttgcctggtgcttgtaattatgatttcagatgcatcaagacaaagttcttcagcctcaattcggcgcattatcttgtaggttgcatttatttcatccctggtttgacgcccttgcttcaaaatctgctccaacttgtctctgccaagagaatggcctgtgaataccatgggtacattaagtgccccagacagtaaagcagcagaatcaccagcatcagcatagtgtccgtgtataacaacaggccatactggttgcccactaccaacttgttctccaagtaccttggacatctgcatgatgtggacaagtgcaccatcaacgaattcctggatgtggggccacagatgctctttagggatatatttatctcttggtccaaatggtatccggacaatataggcaccactgctttcgcccacctcgtgcccaaaattatctgaacttatcggactgagcatctcagtaggttccccgtaactccaatcaacatcaggtgcaggaatctgccttgtaagtagatccactctgtatacgcctggtgttgaacctaaagccctagcaagttccacaacatatttgacctgaccacctgtatctgaatcgcgccccagctccatattctcaccgcgtataagaccatgaatgcttatcagtactatgtacattttttttctttctgctggcttgcccaagcctcaatagcatcagttgaaccaatccttggcatccgtgtccttgtgatctcatcatgaatagatgggtcattattgttttctcctttttctccttcagataggtcttcggacaaatcagctgcagcatattgacgagctttctcacgttccaggcgtcttttagacaaacgagaggcttcctctccttcaatctgcttcttcttcctggcgagattccagatcctccaggacatgttctccagacgcgtgttccgctcctgtgggctcctcatcgccgacgttcggacccaggtcttgtaaaggtcggtctcgtcgaagccggagataacctcctcgacgaagtatcgcgcggggctgaaccggccgcgctcccggagcatcagcgacgatttgtcccgcttctccccggccggcccctcacccccgccaccgccgcctgcggctgccgagatttcccccgcggccccgcccgcgtcgaggatagcctccaggtagctgttgatccagtcgttcccggccatggcgcccacccgagctcggcccgcgagcgtgcgccctctctgctcaggcgatgcgattggagatgcgtggagtgggaggatggttctggaagggatggaggtgcgccttgctgctggtagtgctaatgattcgtgatttcgtggcgtttatcgggaattattttatttc

SEQ ID NO: 7982 - DNA, 2282 bp, Setaria italica
  Peptide Sequence Number=SeqID_73956
tggtcgttattggggtcgtcttggtattcttgtttgttccggcgcgaggccgtagcgtgtggggaacctgcaaggagttgggcgctgcgctgccacgctgctgaacgtttggagaaggtggagggcttgtgttgacctgcctgttagattctgcacttcggtgtttctgatcaatcgctcctgcccggttcctgtcttgtgaatccgtctccccaagcatggctgggcaagcggcaaaggcgaaggagtcagggaaagacgacagacaagaacccggagctgaggtgatgaaagagaaggtactgccatctcaccagcaggaagagtcttcagcgtctctgatggacaaggattcttcgggtgtctctggtgatgtgtcgcccgtcctagatggggattctggggagttgaaagtggagaacttggatatcaatgggaataaggaaaagaaaacgtctcagaagagcagcacgagtgagggcttcgcttctgctaaagtgagtgatgggacaagtagtttgaggaagaccagtggtagtgcgacgatgagtacacgggctgatttcactgagagtgggaagagtagcatgtgccgtgcgagcacaggcagtgacattagtgatgagagctcctgcagcagcatgagcagtgccaccacaaagccgcacaaggggaatgattcaaggtgggaggcaatccatgtggtgaagtccagggatggcattcttggtttgagccattttaggctgcttaagaagctgggttctggtgatattggcagtgtctatctctctgaactgaatggtacaaaaagctactttgcgatgaaggtcatggacaaagggtctttggcgagccggaagaagcttcttcgagcacagacagagcgggagatactgcagtctctggaccatccatttctaccaactctatatacccactttgagacagataagttctcatgcttggtgatggagttctgtcctggaggggaccttcacactcttcgccagaggcaacctggaaaatatttttcagagcaagcagcaaagttctatgtagcagaggtgctccttgcgttggaatacctgcatatgcttgggattatataccgtgatcttaaaccagaaaatgtccttgttcgggaagatggccacatcatgctgtcggactttgacctctctcttcgctgttcagtaagcctaacagtgatcaagtctgcaaatccaggcctagatgcacttcagaggaacaatgcagcatactgtgcccagcctgcttgcatcgaaccatcctgcattcagccctcgtgtgttgctccaactacttgctttggccctcggttcttcaggaaatccaagtccaaatctaagtccaagaaggataagtcaaagcctgatgctccaaaccaagagaacctattcccagagctcatcgctgagccaactgatgcccgttccatgtcctttgttggcacccatgagtacttggccccagaaataataaaaggggagggccatggaagcgcggtggattggtggacgtttggtatattcttgtacgagctgctgtttggcaagacccctttcaagggttcaggcaatcgggctacgctcttcaacgtcgttggccagcccttgaggttcccagagtccccaatagtgagcttctctgcaagggacatgataaggggattgctggtcaaggacccgcagcaccgacttggatataagcgaggtgctactgagataaagcagcaccctttcttcgagggcgtgaactgggcgctcataagatgtgcgagccctccggacattccgaagcctgtggagcttgactgccgcccgaagcaagtgccgtcgacaaatggaaaggtcgcacctgtcgccaatccaaaggggccagataattacctagagtttgaattcttctagattttttccttttctcttttttttgatacctgaactgaaagagtgcatctgggccgatgttgcaaaagaaagcgaaagacgaggagctactctaggcatgagaatgcttggctggaatgtttccgcttatagactgtatgctcgctccaggagccccccaagttgtttacttgttgaactgcttgactctaggatgtactccattcatcttgtatgttgcaaattttcgaaaccacctatggtatcgagctgtcgatgtaattgttgctgtactctgtaattgatgcttcctcctagaacatgtcttgctctacaaaatgctgatatgatatctgaacctggaatcgc

SEQ ID NO: 7983 - DNA, 310 bp, Setaria italica
  Peptide Sequence Number=SeqID_73957
cccagggcgcgtcgctctccctcgcgctcgcgcctgatgaggtcgcgcgcgcgctcaccggcacgcccgtcttcacggtctgcaactccaacaacgattcggcgtgctcgtttccgaccccgccaccggcctccgctccctcggcctgctctgcttccgttccgaggatgccaacgcccttctctcacatgtgaggacgcggcaaccggtgttagggaggggagcgaaagtagtgcctattacacttgatcaggtttatatgttgaaggctgaaggtatcgcattccggttcttacctgacccgcttcaa

SEQ ID NO: 7984 - DNA, 863 bp, Setaria italica
  Peptide Sequence Number=SeqID_73958
aaatactttatgccaaagaaaacacacacactggcagagatattaccaggattaaagaaatacaggcaatataattttgcacatgttcaaaagctgttaaagaatattgggggttgagctttgtatgcagtgtgtgtggaagtattcactcacaggattataacagtcttacagctccatcaacataatatcatttttgctaggacaagttaaaaaggatagttgccaaagggtgtaagaaatttgtatggtacagactacagacaatccattccgttctggaattaatacattcttacacttacactcttatactcaatttcgtttctgtttctcctgttacacaaactcgccctggtgctttcctgatactatgcagaaacaatgtaatagttctaatatgtagatagtgaagtgtggtattggtgcgctgtaaggtaagtgaatgaacttctaatgctagaaagaacctgggtatgacaataatattactctgcaatttatttaagaacgatttcatcattaaatgaaacaaaacagatgccaataattcaatataaggttagaataaaattaagatttagcaattgtagttttcctcctcgtaagtattaccataaccagttccacactttaagaagcacctccaagttaagggctcaacttgttacctagtaaagaagaaggccatgccatgatgtatggatgaaagtggccatcagtttttccataaaagagcttttccagcttccttgtttccaggcagaaggataggtaccaacaaggtgaagtaaaatctctgaatgtctcaaaagttgacatgtacacaatgccatccagaattgccaaaactttgagctctt

SEQ ID NO: 7985 - DNA, 696 bp, Setaria italica
  Peptide Sequence Number=SeqID_73959
catgtcagtgacaaagtcacagcttgcagttacgtcagaggatcccatcacaaagctcccagataaatttgattgtgttgatgggtggggtcatctttattgatgaagttagaactcagaatttagaatagtaagctactagatctttatggttgatgatcccctaatcttttcatttttctggacctattaagtcagttcatttataattttcttgttaaacagtatacacagtatcaacagaccagaataccagatacattcagtcaagttcaccagtgatagttactaagcatgcaagcaacagtcaattacccgttccttggatgaacagaaacaggtttacatatcagatagccctttgaaaagtggctgccaatattctggtctaatgatctgttgcactgaatttgtgatgtgctctgtacccttgagtcaattacttcaagtgcacacggcatttctcagagaacctcagcgataggatgcatggcgatcaccggaagcgagcggttacggaatcgaatcggaaaaaggacaaatgtggaggcaagaaaacagtcggaaatccctagagaggattaggatgcaatctaacacacagaatattaaagattattttttttcaaaaaaaatggcaacagaaaggaggaggaatgacgatgatgaatctgctggaaagcggacagcgaaacg

SEQ ID NO: 7986 - DNA, 346 bp, Setaria italica
  Peptide Sequence Number=SeqID_73960
aagttcccggtgttgttgagaacagcactgatactagtatctgtgctattggcaacttcagtgaaccatagtctggattcagtgctggtgtttttgtttaaggcaaagatgacgaggttgccatctcctgagatcctgagctgcgttgtgttgaggtcggactcagcgattggcttgtcccggttagcgacccagacggtggtgcaaaccgggatcttgttgaaccatatgccaaggtaccagccgggggaggagacggccttaccggctacgctgtgacggagctggaagaagccgagcgcgaacttgccgttccttgagacgagcttgtcgccgatggcgagcg

SEQ ID NO: 7987 - DNA, 329 bp, Setaria italica
  Peptide Sequence Number=SeqID_73961
gagacgaacgaccagttgaaaccggtgaccttgttacggccaatctttgcggtaggaagcccgacatccgttgggcagtcaaagctctgccacaacggttctccactagatggggttttttgcacgagggcaaagttcccggtgttgttgagaacagcactgatactagtatctgtgctattggcaacttcagtgaaccatagtctggattcagtgctggtgtttttgtttaaggcaaagatgacgaggttgccatctcctgagatcctgagctgcgttgtgttgagggtgcggaactacaagacgaattaggacttagtacccggtta

SEQ ID NO: 7988 - DNA, 1768 bp, Setaria italica
  Peptide Sequence Number=SeqID_73962
ggcggcgcaggcacgaccggacgcgacccggctgggcatcatgaatctagccgccttctgctcccttgccacgcccaagcccgcggccctccccggccatgagatgccattaaatccctcctccgctttctgctcctcgctgctctgccgctcgctccgcgcgtccctccggaggatctccccgatggcctccgccgccgcccccacctccgcgcccgccatcgccgccgagaacggcgccgcgaaggcgacggagcagcggcccgtccaggtggcgaagcgattggaaaagtttaagacaacaattttcactcagatgagcatgctggccatcaagcatggcgcaataaacctcggccagggctttccgaattttgatggcccagactttgtgaaagaggctgctattcaagctatcaatgctgggaagaatcagtatgccagagggtttggtgtgccagagctgaactcagctattgctgaaaggttcctgaaggacagtggattgcaagttgacccagagaaagaagtcactgttacatctggatgcactgaagcgatagctgcaacaatactgggtctgatcaaccctggtgacgaggtgatattgttcgctccattctacgactcatatgaggccacactatcaatggccggtgccaatgtaaaggcccttaccctccgagctccagatttcgcagttccgcttgaagagctaaaggctgcagtctccaagaacaccaaagcaataatgataaacacaccacataatccaactgggaaaatgttcacgagggaggaacttgaatttattgccaccctctgcaaggaaaatgatgttttgctgttttctgatgaggtctatgacaagttggcatttgaggctgatcatatatcaatggcttctattcctggcatgtatgagaggactgtgaccatgaactctctggggaagacattctctctaacaggatggaagattgggtgggcaattgcaccgccacacctgacatggggtctaaggcaagcacactcattcctcacatttgccacctgcactccaatgcaagcagcagctgcagcagctctaagagcaccagatagttactatgaggaactgaagagggactatggtgcaaagaaagctatactattagaaggactaaaagccgcgggttttattgtttacccatcaagtgggacatacttcatcatggtcgatcacaccccgttcggttttcacaatgacatagagttctgcgagtacttaattcgtgaagttggcgttgccgccataccaccaagcgtgttttacctgaaccctgaggaggggaagaacctggtgaggttcaccttctgcaaggacgaagatacgctgagggcagcggttgagcggatgaagacgaagctgaggaagaaatgaagggcgtgggaaattccatgtggctggtgattgctgaataatctgctaggtttgaactgcgcctggatgcatgaatgctgaataatctgctagatttgaactgcgcctggatgcttgtactaccctttttctagcaatagttatcctgtcagtgatttcataccttgtgtctttacactcttgtccgtgcaaggagatggtgatggatcaggatagctgccggtacacttttttgtaggctactgagcaatttgccggccgctatgtgttcacccttttcaacctatcctatcgccagaccaacccttaccttgatcaaagcaaatctttgcaacagtgactttg

SEQ ID NO: 7989 - DNA, 242 bp, Setaria italica
  Peptide Sequence Number=SeqID_73963
attccgtcgcctccgatacccggccggtcgggagcacgccgcgccgcctctcgctctctgtctctcctccgcccgtctcgccggacatctctccacgatgggtgactacacaatccagatcagcaccaagctcattgatcagcttgctcgcgatgatgagaaggtcaaacgcaaagccaggaagcccaagcccaagaagaaggccactgtggaacggcatgaagaaccccaggacagcgcaa

SEQ ID NO: 7990 - DNA, 427 bp, Setaria italica
  Peptide Sequence Number=SeqID_73964
tttgttcctcttatcctcgtcgcttacttgccacattttcgctctagaaacaaaaggaaaacgctgatagaccacggattcatggtgactgcaaaccataccattgtgcgtttactgtgcttctatgttcttgctaacggagtatttagtgaagaattccttttaaatgatccttttacttgcatcttgctcgcgattgtcaacaaacttgcaaggcaatgccaacaatatgctattggtgcaggacatctctccacgatgggtgactacacaatccagatcagcaccaagctcattgatcagcttgctcgcgatgatgagaaggtcaaacgcaaagccaggaagcccaagcccaagaagaaggccactgtggaacggcatgaagaaccccaggacagcgcaccaaaggaattcccaagcgaaccct

SEQ ID NO: 7991 - DNA, 1888 bp, Setaria italica
  Peptide Sequence Number=SeqID_73965
tgctgggtggccgcgtgtggtacatgcgccccgaggcccctgctcctgccgccgccgccgcctcgccgccgtcgttgggaagcgatgatcgagcagttcgtcaacttcgtcatccggccgcctcgtgcagagtacaacccagatcagtatttatgggagccagagtttactcttgccgggaggaagtacaaaaggctagatttggagctcacaaatgaaagaagtcagaccttaaaatgcagccactatgttcctgctgtcatcccagaagacactccccttccatgtgttatctactgtcatggaaatagtggatgcagagcagatgcaaatgaagccgctgtaatacttcttccctcaaacatcaccctttttactcttgactttgcgggatcagggctgtcaagtggagagtatgtgagccttggttggcatgagaagcaggatctcaaatgtgcagtgtcctttctgcgtaataataagcaagtttcttgtataggccttagggggcgctcaatgggcgctgttacaagcctgctgtatggagcagaagacccctcaatcgccggcatggttttggatagtgctttctccaacttatatgacttaatgatggagcttgtagaagtatacaaaatacgagttcctaagttcacggttaagatggctgttcagtacatgcgacgtgtcattcagagaagagctaaatttgacataatggatcttaatgttgtccagtttgcaccgaagacgtttattcctgcattattcggacatgcatcgaatgatatgtttattcagccacatcacactgaacgtatccacgaagcatatgcgggggataaaaatttaatcaaatttgagggtgatcacaattccccaaggccccaattttattatgattctgtttcaatattcttctataatgttcttcacccacctcaatttccttcaacatgctccaataaatttgacaagtattacaaccttggtgctttcaagggtggtcctggtacaaatgagagcttattgtatgagatcatcaatggtctacgggcagcaggcactgatgctggcagttcatccgctgctacaactaatttcacaaatgctacaaaatcagtagttgagttgctgacagagagggtaaatcagctatcggttaaaaatgataatgacttggatttccttttggatgaaaatcataacctcactgagatggacggcaacacagctgagtgtcctttagaggataaagcaaacagacaaactgaggaatgctgctcatacactagctcaaacagagagagctggggaagatgttcttccttgggtgcagctagtgatggatcatcatcaggcgaacgtactgggatacccaatcataagcatgagagcatgacactaagggctttagcgacaccactgagacggatacgaaggaagcctctcacaatcccgaaggagaagaagaatcggtccctatggaagaggctaaagaaagagaggcaagagatgggggagaacttatcccagcgtctccggctgtgtctccaaggccaggcccgacataagagaactaaatcatcttgacaactgtgaatacacatttaactcagacaaatctgctaggaactcgctgatgattcaccaacagagctgcaccgccatttggagtttctgacattcagcgccaaatcatgctgtgtacattggttggtcattacttagaatcttctgtcaggtcatcgattgttccagccccaatgtgtgttacctaccaaacattccatattcgttcgttattattttttttaataaaatcctgtaaattccatggctgtagaattgctccatgtgacttgtgattggggaaggggcatcaagg

SEQ ID NO: 7992 - DNA, 697 bp, Setaria italica
  Peptide Sequence Number=SeqID_73966
ctggtcggatatggggagaggcgagctgctgctctcctccgcatcgtcgcgtccacccacgcaaggagctccattgagcacgcgccgccgatagctcgcgcagctccccccgctcttccccgcgttgctgtgcccaccaaatgtttggagcgagggatttggaggggagagtgagggaatgccccatgatttggagcgcgagagcggggaagggtgagggaggcgacgcgtcggagctgcagcagatccggcgatgaaacgaagacggtctcactgtgtttcgtagcgtttcatcggaccaggtaaccgcgtcatgggcgtttctctctcttatcagcaaattgatgatgtgttctacaatttaatattcatgaaacttcccatgaaatcccattaagactggccttaaaaaatagcagcccttttacttagggaagcactgatcatggagtttaagcaggaaaaacactgcgaaatgtaaatttttcagttctacttctaaatgacgaatactgtttagacaaactcaacttgtatttgatatgtatggtatagatgctatgcgaccttcacctatatgacatgaataatgaatgcagttgttccatggaatatcatagagaatattgaaaagaaacaggcatacatctctttttgaaaaatgcaacaggataggttaccctaatatagtaaaaag

SEQ ID NO: 7993 - DNA, 1168 bp, Setaria italica
  Peptide Sequence Number=SeqID_73967
gttctagactatatttagcttagatcgaccgccttcgtcatggcagacccaatccagcatacacatgagcagtgcgaggcccattgccattgacaagaatgcctttaggtggcatatgatgaatgaggagcaggggctgcagctggcgtttgagcaagatgtccatgaatgagaggtgcggcatgcaagtggggcttcgcaagtgctggagaaggagcaggggcgctattgtgtctcctgggattattaggagagtgatgaacggaaggcaatggactaatggatggtggtggcactggacgaggtgtggttgcaggtgaagcataatggtggttactagctactggctcagcagctggggctacaggagctttattctttgacttgttggtgtatccatatggagaagatggggatggagatctatatttgggctgttggacaggagaatgtacaggagcaggagatggagcaaaatgcttcttttcctcatgactattgtgatggtggtggtggtggtggtggtgagggttatcttgataaggcataggtgctggactaggtgcattagtaccacccccactatgccaaacacagtgtgattcagtcccaagtttcctgaggacgaattagcaaatgtttgggccaactgcttcatccttggaacggatggctggtgattcccaacttcaagaataatggaggcctgaacaattgttggaggagcaaccgttgagccttttgaatttgtcaatttgatggagaggttctcgacattttctcgaacagcttgcaggcagtggagccaacgtggttgctccatggagtcatggacttcgattgctcgcaagcctctcgtcgagcatggcctcatcctgcctgcaagccgcagcacacaaaagacagaccaaacttttgaatcacgagtttaacgacacaccatatagaaccatgaatcgagagaggcgaggtccgcgggcgccgccgccgctctctcgtgctggtcggatatggggagaggcgagctgctgctctcctccgcatcgtcgcgtccacccacgcaaggagctccattgagcacgcgccgccggtgtaattctacgtagttttaacgtactactacctattattagttaaccttatttgttaatttcgttagtttagttta

SEQ ID NO: 7994 - DNA, 245 bp, Setaria italica
  Peptide Sequence Number=SeqID_73968
ttcgtcgaggcaacacggtcagcatcggcgccggccaacgtcgacgtcaccataattctacggcgcccctcgtaccgataccattcacctgcggcaacgagacgtcaccgcagccgccgaaatgccctggaacaccagcaccgccgccgtcgccgccgcagcccaacccccggcggcggcccggcgccgtcgtgcccggattacttccgctacatccacgaggacctgcggccgtggcgcggcgc

SEQ ID NO: 7995 - DNA, 644 bp, Setaria italica
  Peptide Sequence Number=SeqID_73969
atttgctcaacagcaagccaagaaggaaaatggcaccttatcaaatggtgacaacaacagaatggacgatgatgtaattgatgatgatgaagttgctcagagaagaagaatcaagatccaaaaaaaaatgtcatgaaggaagctaataatcctgcagtggcatatcaacttcatccactcaaaattattgtccatgtatatgatactgaagattctgagtctgagggcctggataataatgtcttgtgcaacctatttccagatgacactggtttagagctgcctcaccagatggctaagatatatgctggggagcctccaaacttcactgacaagaattcaagaccatacaagtgggcacagcatctagctggtatcgattttttgccagaagtccctccatctgctggggatgattctatcagagcattgagcagctctgatttgtcatctgggcttgctctataccgtcagcagaaccgtgcacagactattttgcagagaatccgctcgcggaaagttacacagatggctcttatgtggcaacttgattatttgacaaagctgaagtggcctcgaatagaccataaaatacaccatgggcatcgcgcaccccattgtgtagtttgcatagttggacaatg

SEQ ID NO: 7996 - DNA, 460 bp, Setaria italica
  Peptide Sequence Number=SeqID_73970
ccccggatgctcgccatcaagagggacggcgtccccaagtcagagctccgggagctcgtcacccagatgtcgctcctcctcgtcacgctccgccaagttaacagggagatactgatggaggaggacaaggtgaaggcggagacggaggccgcgaaggcgccggtggactccacgacgctgcagctgcacaacctgttgtacgagaagaaccactacgtgaaggccattaggacgtgcctagacttccagacgaagtacccggggatagagctcgtgccagaggaggagttccagcgtgcggcaccggcggacattcgcgacaagacactcgctgctgacgcgtcacatgacctcatgctcaagcgcctcaactttgagctcgtccagcggaaagagttgtgcaagctacatgagaaattggcactccaaaggagcagcttgctggagacaattgctaatc

SEQ ID NO: 7997 - DNA, 2098 bp, Setaria italica
  Peptide Sequence Number=SeqID_73971
tccacgacgctgcagctgcacaacctgttgtacgagaagaaccactacgtgcttatattgtaaggtcctatttaggtacgttgtcctagttacttccagacgaagtacccggggatagagctcgtgccagaggaggagttccagcgtgcggcaccggcggacattcgcgacaagacactcgctgctgacgcgtcacatgacctcatgctcaagcgcctcaactttgagctcgtccagcggaaagagttgtgcaagctacatgagaaattggcactccaaaggagcagcttgctggagacaattgctaatcagaaaaagtttctttcaagccttccatcacatttgaaatcactgaagaaagcatcattgccagtgcagcagcagctaggcatgcaacataccaagaaactaaagcagcaccatgctgctgagttgcttccaaccccactttatatagcatacactcagttgttagggcagaaagaagcatttggagagaatattgaagttgagatcatgggaagcacaaaggatgcccagatatttgctcaacagcaagccaagaaggaaaatgcaggcaccttatcaaatggtgacaacaacagaatggacgatgatgtaattgatgatgatgaagttgctcagagaagaagatcaagatccaaaaaaaatgtcatgaaggaagctaataatcctgcagtggcatatcaacttcatccactcaaaattattgtccatgtatatgatactgaagattctggtaccaaacgtcgtaaactcatcaccttgcggtttgaatacttggcaaagctgaatgttgtttgtgttggaattgaagagtctgagggcctggataataatgtcttgtgcaacctatttccagatgacactggtttagagctgcctcaccagatggctaagatatatgctggggagcctccaaacttcactgacaagaattcaagaccatacaagtgggcacagcatctagctggtatcgattttttgccagaagtccctccatctgctggggatgattctatcagagcattgagcagctctgatttgtcatctgggcttgctctataccgtcagcagaaccgtgcacagactattttgcagagaatccgctcgcggaaagttacacagatggctcttatgtgagtcactgctctacaatatttgccgcttgggacatcaatgacaaaaatctggatgttagttcaggatagaatgtaattattgacaattttgggataaggattgcttttgcttcttgatgacatggcaatactttaatagctgcctcaccagatggctaagatatatgctggggagcctccaaacttcactgacaagaattcaagaccatacaagtgggcacagcatctagctggtatcgattttttgccagaagtccctccatctgctggggatgattctatcagagcattgagcagctctgatttgtcatctgggcttgctctataccgtcagcagaaccgtgcacagactattttgcagagaatccgctcgcggaaagttacacagatggctcttatgtggcaacttgattatttgacaaagctgaagtggcctcgaatagaccataaaaatacaccatgggcatcgcgcaccccattgtgtagtttgcatagttggacaatgacaggttcttttcctgagccattgtctcgttctagtttgatggtaagtggggctgcaagcagtgttgacagtgatctagagagaagatctgtgcaaactgggaagaaactgagagtatcagggaggatggggagctcccggttgttgttcatgctgagaacgagccaagaggttctgcaattttgccctctgagatgtcacctgaggttccgagccattctagaggcttatccctgatatcaaagagtgcaacaccatctaagctaagcatctcacacagttttggtagaaatgaggatgatctagatctcttgatgtatagtgacagtgagttggaggacccgcccttcattcatgaagaaactgaaaaaggtaacctagttatagataactcctgggaggattatgcttccaaggagttcaccatggt

SEQ ID NO: 7998 - DNA, 474 bp, Setaria italica
  Peptide Sequence Number=SeqID_73972
cgagcagatagagaggagagagaacaagagagagagagagagaaagagaggaggcgctcggcggaggcgttcctcgcgattggacacggcgcgagcaccccgagggcgcgcgatccccgaggcacggggcacggcctcgctgtcgccggggcggccgtttcgagccccgtttccccccggctcggctcggatttttcgggatccggccaagaaatcccgcggttggtgagggggaggatagggagggaagaggggaagggggaggggatgggcgtcggtgcggagcccaaggaggaggcggcggccgccggggctgcggcggcggaggagggggcggcggcaaggaggagaaggcggccgcggtgtcctgctcgatctgcctcgacgcggtgctcgccgccggcgggagagagccaccgccaggctgcagtgcggccacgagttccacctagactgtattggatcagcatttaa

SEQ ID NO: 7999 - DNA, 485 bp, Setaria italica
  Peptide Sequence Number=SeqID_73973
ggctgaagcggcggatcgaggaggtggtcgtggcgcaggccgcggtgcaccggtgcgcggcgtccgtggacttcggcgtggggggcagcccgctgctccccccgaccgtaaacaccccgtcgctgcacgcgcacttcgaggccgtcgccgcggagacggtgggcgcgggcaacgtccgcggcgccatggagccgtgcatggggagcgaggacttcgccgccttctccgaggccgtgcccgcgtcccacttctacttcgtcgggatagggaacgaggaggtcgggtccgtgcacgccgcgcactcgccgcacttcctcatcgacgacgacgcgctcccctacggcgccgcgatgcacgccaacctcgccacggggtacctgcggcgccgcgcggcgtccagcggccccgaggactcccacgacgagctgtagccctctagtctgtactgcgcggcctgtcgcgacctcggagcggccacggcgccg

SEQ ID NO: 8000 - DNA, 304 bp, Setaria italica
  Peptide Sequence Number=SeqID_73974
agaggatgtcgttgtagtcggagacggtgagcgccgcgtcgtcgcgctgcaggaggtcgagcaccttcacccgctcctccacgggaagctccatgatccgcttcgcgcagtcccgggcgcagatacgcggcctcttgctcctcccgtcgccgtccactccgtcggagagcgaattgaggacctgcggcggtacctgctgctctccgtggagggtgccgttgccgttgtactgcagagcgcggaggaggtcgacgtcgtggtcccgggccagcgctttgcagtggcacgccaatgaggaagccgc

SEQ ID NO: 8001 - DNA, 400 bp, Setaria italica
  Peptide Sequence Number=SeqID_73975
cttgacctcctcgagcacctttgtcgagcaccatggtcttcacgatatccctgaccttgtcgatggtgtacccggccttagggtcatccctcaaaatgccgtggtggatcatctgcacggttgctgcgccgagcttctcgacctgcgcttggcaacggcggcgcacggcggacacggcgtcggtgtcgagccggccgtcgtggtaccaggtgccgccggtgatctcgtcagagggctggaaatcggtggccatgaagatcttcctgctgcggtggcgcacgtcgctgacctccttgaggagcccatgccccacgagggtgcgcaccaccttggtggcgacgttggggcttatcgtcagctgcttgcgcacgtcgagcatccacaatgcccttgcttcccg

SEQ ID NO: 8002 - DNA, 1030 bp, Setaria italica
  Peptide Sequence Number=SeqID_73976
tccatgaaatttgtgcctttattgtgtttttcctgaaatgtgaaatatacatcgtacacaagatctcaaagtcgacgaagcaaagataaaaatgagaagcagaactacagcttctctgcatacccactacattcagatcaggtgttgccaacaagatgatttatttgaccttttagctcccatggactcaagaaaattatgtccatgtttgtcattttgtatgtttgttcttactcgcgcttcttgttcttggcatagtagccctctatcgtagagaaccaattccactggaaacaaagcgctgcaaaccgcatgagtccagcaccaatcacctctaggaatgccattaccggtgaactctgcggggataaaccagcagttgctacggccaacattgcaccctcaaagttgcaggggacaataaacttcgcagatttgatgccatccagagccttcttcgcaacatcattggccttcattccaccagatgaacccgctatgatgttcgtcaattctggcctcctcttatgctcctcttccaaacccggagtctcagtgtcaggagggaaaatcaacgagacatgaatgttgtcggtgatgacttcatgctgcagcgcctctcccaatccacgaagtgcaaatttgctcgctgaatacgcagtgtacccatagataccaacctggccagcctgcgaggacatgatcgcgattgacccagggaggcgcgtctcgcgggtgcgcgccttcatggcggggagcgcggccttgatgaggtggaaggtgcccatgaggttgatgtccaccatccacttgatctcctccatgtcctgcctctcgagctcctgcggcacgaacacgccgtggttgcagaccagcacgtcgacgggcccggcctcccggagcgcgcgctccaagagggccgcgtcccgcacgtcggcggcgtggacgccgacgtcgccgcgaccggagtcgcgctggatggcggcgcgcgcctcctcgaggcgggcgaggttgcgggccaggatggaga

SEQ ID NO: 8003 - DNA, 971 bp, Setaria italica
  Peptide Sequence Number=SeqID_73977
acctgcttcttgtcttccccattttcgcaagtcaagagatagataaatagccacatcccattgcactgatcgggggcgctcgtagtgacttagggggtcgaagaccaagaagtggcttatttataccaagcattcctcttatggctagatccaatctcctggtccctgcagaaaggaaaaagaatttcacgttcttcctttcaggaagggaggattagggaagtcctattgattactgctttctccagaccgccgggaaaagcatgaaaaaaaggctcgaatggtacgatccctccgtcaccccagaatgaaaggggtgatctcgtagttcttggtctgtgaagatgcgttgttaggtgctccattttcccattgaggacgaacctcaacctgtgctcgagagatagctctccatacactgataagggatgtatggattctcgagaagagaggagccgcggtggccccccccggaccgcccggatcccacgagtgaatagaaagttagatctacatgggatctcacctgaatcgccccatctatcctcctgaggagaagtttgtttggtttcaaactccgattcaaacaggaggagtacgccatgctaatgtgccttggatgatccacatcttcgggtcaggcgctgatgagcacattgaactatccatgtggctgagagccctcacagcccaggcacaacgacgcaattatcaggggcgcgctctaccactgagctaatagcccgtcgcgcgggcctcccaaagggaggcctgctacgccaaaagcgagaaaaactccatccctttccttttgacatccccatgccgccacacggggggacatggggacgtcaaaaaggggatcctatcactatcaactaatttgttccgacctaggataataagctcatgagcttggtcttacttcaccctaaacgaaagaagacttccatatccaagtttagctcaga

SEQ ID NO: 8004 - DNA, 518 bp, Setaria italica
  Peptide Sequence Number=SeqID_73978
tgtcttttcagatttttctttttaattttcaatatctattcttttttttattattccttttttttactattttttatttatattttttttctatctccgtcgcgcggggcctcccaaagggaggcctgctacgccaaaagcgagaaaaactccatccctttccttttgacatccccatgccgccacacggggggacatggggacgtcaaaaagggggatcctatcactatcaactaatttgttccgacctaggataataagctcatgagcttggtcttacttcaccctaaacgaaagaagacttccatatccaagtttagctcagacgtagctgccttctttttgggcgtgaagcagtgtcaaaccaaaatacccaataagcataagcattagctctccctgaaaaggaggtgatccagccgcaccttccagtacggctaccttgttacgacttcactccagtcgcaagcctagccttaggcatccccctccttacggttaagggtaatgacttcaaa

SEQ ID NO: 8005 - DNA, 302 bp, Setaria italica
  Peptide Sequence Number=SeqID_73979
tgccgttacaagcttgtcagggtttggttttcccttgcaagccggcggcgcgcggcaggggcgcggcctccatccccacgcccacccttacgttccggctgctccggcccgcccccgggccgccgcgggaggtggtaacgccgggagctgggccgccgtcgctgggcaaccaccgccctcgcaagctcaggtgggatttgttaaatttctgaaatgacagaaagttggatacaaaactggaagcacacttcagctcctgaatcagtttctagttcagtttctagacatgaagcatcaacaga

SEQ ID NO: 8006 - DNA, 1251 bp, Setaria italica
  Peptide Sequence Number=SeqID_73980
tctcggcgcgcttccccgcctcgagttcctcgacctctccatgaacgcgctcacggggcccgtcccggcggccctcgcgggggcgtcgggcctccgcttcctcaacctctccaacaacgcgctctccggcaccatccccgacgagctcaggggcctcagggcgctccaggagctgcagatttccggcaacaacctcaccggcgcgctccccgggtggctcgccgggctccccgcgcttcgcgtgctgtccgcctacgagaactcgctctccggcccgatccccccccggggctcggcctatcgtcggagctccaggtgctcaacctccactccaacgccctcgaggggagcatccccggcagcctcttccagctcggcaacctgcaggtcctcatcctcaccctcaaccgcctcaacggcaccatccctgacgccatcggccgctgccgcggcctctccaacgtccgcatcggcgacaaccgcctctccggcgccatcccgccgtcgattggcgacgccaccagcctcacctacttcgaggccaacaccaacgacctctccggcgggatcccggcgcagttcgcgcgctgcgccaacctcacgctgctcaatttggcctacaaccgcctcgccggcgaggtgccggacgttctcggcgagctcaggaacctgcaggagctcatcgtgtccggtaacggcctcggcggcgagttcccgaaagcaatcctgcggtgccggaacctgagcaagctggacttgagctacaactctttccatggtgacttgccggaggacatctgcaacggatcaaggatgcagttccttctgctagatcacaatgggttctccggcggcattccaccgggaattgggagctgcacccgtctgcttgcgctgcagctcagcagcaacaacctgggtggtggcataccagctgagataggcaaggtgaagagtctgcagattgcactgaaccttagcttcaatcaccttgtcgggacgctgccccgcgagctcgggcggctcgataagctcgtcacgctggacttgtcgagcaatgagatatcaggccagatcccaggtgatatgagagggatgctgagcttgattgaggtcaatttgtcaaacaacaggctcagtggcgccatacctgctttcggaccgttccagaagagtgcagcctccagcttctccggcaatgccaagctgtgcggcgatccactggatgtggactgtgcatcgatttatggt

SEQ ID NO: 8007 - DNA, 881 bp, Setaria italica
  Peptide Sequence Number=SeqID_73981
ttgttcctatcaatcttccaatcgtcactgcaatttttaatagtaatcgtgctgagaggatttcacataatccccgttggcttcgataaagactaagacaagcaggtatgtgccaccagaggtcgttggtgtccgtgtcccactgctgcagcttacgaatttccaaataaatgattggcctgagctatctgcaaaagcctttgcagtgatggttttgatgcttcctccagacagtgcacgaaaatggcgtccacatgaactggagctcgttgaagtcgttgctgaccaggtggcagttgcattgtcccatgctgccattttggaagagtccatgcgagcccgtgatctgctcatggagcagaatattgctctggatgcagcacgtcgagaggcggagatggctatttgtgctcggaatgattttcttgcagtcatgaatcatgaaatgcggactcctatgcgggcaataatttctttgtcatccctcctcttagaaacaaaacttactgcagaacagcgcctgatgattgagactatctaaaaagtagcgatcttctagaaactctttcaaatgatgttttagatatctccaagcttgaggatgggagtcttgagctggaaattgcaccttttaatctgcatgccacctttacagatgtggttgatttaattaagccagtagcagccttcaaaaagcaatcagtaatggttcacttggctccagagttgcctacctgggcaattggtgatcaaaagaggttgatgcaaataatactaaatgttgctgggaactctgttaagtttacaaaggagggtcacatttcaattacagcttctgttgcgaggccagattctttgagggacccatatgctcccgactt

SEQ ID NO: 8008 - DNA, 571 bp, Setaria italica
  Peptide Sequence Number=SeqID_73982
agagtgaggttcagcaatgaagtccaacagctttgacacgagatattcctttctaatgtcaaagctgttggacttcattgctgaacctcactctgcagctgattctgggctgtctgatgaccagggatcaaattctaggaaacgcaagagaggaggtaaaagtgcaagtaagactcctgaaggcacacctagtagttcgaggaagaaatttggcgatgactccacttcagataaaaggaggaagaaagcccttaagtatgatactgatgaagatgaggatggtgatgaatccatgaagtctgacagtgaggcagacgaacaagaagatgactatgactctgggaaagaaaaggcaaggaagttctcagaagtaaaagaatcttcaggcaaaaagaagacagacagagcaagtggccataaaacaggtccttcaaagacaatcagtaaaagtccagtaaaaaagccatcatccaagatttctgaggatgtcacaatggatgcagatgccaaggaagataccagtgccaggacagaagaaggcgaggatacaaagatgactgaggctgaggca

SEQ ID NO: 8009 - DNA, 322 bp, Setaria italica
  Peptide Sequence Number=SeqID_73983
ttttctttttgttttgtttatttgttgtgaggctgaggcgaggtgagcggtggtgtgtgatggcagaggctgaggatgcaaaggaaggtgatggtgatgcagctgcagcaaagcaggtggattctgaggatgtcacaatggatgcagatgccaaggaagataccagtgccaggacagaagaaggcgaggatacaaagatgactgaggctgaggcaggaaatgcggaggtcaaaggataaagaagagaaggaagataagtgttgacaacacaaatgtggataaggtggatgaatcgaaggagcaagagaaagagggttctgca

SEQ ID NO: 8010 - DNA, 209 bp, Setaria italica
  Peptide Sequence Number=SeqID_73984
gaaaggcaagcttcctgattttaaagtgcacatactccagttctctggatttgtttggcatgagagtgatgaaaagcagagggccaaggcaaaggaaaagcttgacaaatgtgtgaaagacatgctgttggacctctgttggatccttgctattcctcaccatcctcatcttcatcagtatcatacttaagggctttcttcctcctttt

SEQ ID NO: 8011 - DNA, 356 bp, Setaria italica
  Peptide Sequence Number=SeqID_73985
gataattgcattgcactgcatatgattattgttctgcttgtgacatgatcaagaaatgtatttcactttaatataaatcaggcataggttatttattaacttgtcctaaaaatgttgacattgtaattcatctaggtaaaaaggtgacaaagggtaaaggagaatcagccggagtggatcttcccagcaaggatgaattgaggaagaccattactgctatcctcaaaaaagttgacttcaacacggtgagtatcttttaatgtagaggacagaaaaagtgttatacgatcgtctaatcaaacctagttgccatggcactgatcaggccctgatcagaggattaagtcgggcaataa

SEQ ID NO: 8012 - DNA, 1815 bp, Setaria italica
  Peptide Sequence Number=SeqID_73986
agagaataaggagactccgaagaacaagaaagcaaggagtgccagggatagaaaccagggaaaggataagaaagatgaagctaacgcgaaaattctccctgtccctgtctcgctctcgctctctctctcgcgaggggaggaggaggaggagaacggggaaggcgaggcggcaggcgggcgacgcgactccacttccgcgagcacaccagcggaccgttgcttctcgcccccccaccagctccaggtagagcaataagggtcggcttggttgcctgaggccgacccagcacctgcaatggaggagaaggccgtcgcaaatggcgcagcagctgctgatgttactgctcctgatagcacggatacagccaacaaggtagaagctggcaagagcaaggagcctgcagtagcgaataaggatgctgaagaacagaacaaaggctcagaaaatggcaccgagggtgcgtcggatggagatgtcaagatggcagaggctgaggatgcaaaggaaggtgatggtgatgcagctgcagcaaagcaggtggattctgaggatgtcacaatggatgcagatgccaaggaagataccagtgccaggacagaagaaggcgaggatacaaagatgactgaggctgaggcaggaaatgcggaggtcaaagataaagaagagaaggaagataatgttgacaacacaaatgtggataaggtggatgaatcgaaggagcaagagaaagagggttctgcagagcaagaggaaaaagaagtaaaagaaacagaagagaataagcaacaggaagatgcaaaggaagagaaagatggtgctaatgggaagcaacaggaagaggaaggagaagaaaaggactctgctgataagaaagatgaagctgataaggtggaagagaataaggagactccgaagaacaagaaagcaaggagtgccagggatagaaaccagggaaaggataagaaacaggatgggtccaaatccagggaagccaaaagtttgctggagaccccgagcccatatggtattgatcgccctcaacgtgagaggaaaacagtggagaggttggttgaggtgattgagaaggaacccaacagaaatttcgttgttgagaagggacgtgggactcctctgaaggatataccaactgtggcacacagaatagggaggaagaaacctggtgatcttaaatttcttcataatattctttttggcaggaaaggcaagcttcctgattttaaagtgcacatactccagttctctggatttgtttggcatgagagtgatgaaaagcagagggccaaggcaaaggaaaagcttgacaaatgtgtgaaagacatgctgttggacctctgttggatccttgctattcctgttccaaaatcgaacattagaaaggaagatctcgtgtcaaagctgttggacttcattgctgaacctcactctgcagctgattctgggctgtctgatgaccagggatcaaattctaggaaacgcaagagaggaggtaaaagtgcaagtaagactcctgaaggcacacctagtagttcgaggaagaaatttggcgatgactccacttcagataaaaggaggaagaaagcccttaagtatgatactgatgaagatgaggatggtgatgaatccatgaagtctgacagtgaggcagacgaacaagaagatgactatgactctgggaaagaaaaggcaaggaagttctcagaagtaaaagaatcttcaggcaaaaagaagacagacagagcaagtggccataaaaaaacaaggtaccttacaaaagaacaaattactaagttaaa

SEQ ID NO: 8013 - DNA, 1555 bp, Setaria italica
  Peptide Sequence Number=SeqID_73987
tccatgatcatgttgacccagagcaattggacagcagtaagaggagcactccctgtcaggcaagctgaagagaagtttacaacaagagcaaccacgtttactgtcagctgaaactgcacaaacttctgaatgttgatgtacactgaccgcccccatttcgcaacagtgacaatagtggagaagttgtcatcaagaataaatagaacaatacaagacaactactaactttaaggaaccaaacctaacaaagttaaaccaaagaaaccaaggtaccaccaaaagtaacaagttatattagaaaggaagatctcgtgtcaaagctgttggacttcattgctgaacctcactctgcagctgattctgggctgtctgatgaccagggatcaaattctaggaaacgcaagagaggaggtaaaagtgcaagtaagactcctgaaggcacacctagtagttcgaggaagaaatttggcgatgactccacttcagataaaaggaggaagaaagcccttaagtatgatactgatgaagatgaggatggtgatgaatccatgaagtctgacagtgaggcagacgaacaagaagatgactatgactctgggaaagaaaaggcaaggaagttctcagaagtaaaagaatcttcaggcaaaaagaagacagacagagcaagtggccataaaacaggtccttcaaagacaatcagtaaaagtccagtaaaaaagccatcatccaagatttctgaggaaaaagaaagccccaatgacagtgcaaaggtcttttctaggaagaagaaaactacagtaaaggatgaaaaggatatcaaagaaacaaagtcatcaggtaaaaaggtgacaaagggtaaaggagaatcagccggagtggatcttcccagcaaggatgaattgaggaagaccattactgctatcctcaaaaaagttgacttcaacacggcaactttcagtgacattcttaagaagcttgacaaccactacaaaatggatctgactccaaagaaagaagccatcaaagttatgatccaagatgagctaaccaagatgtcggaggaggcaggtgaggatgaggacgcgagtgaagatgccgagaagaaacagcagcagcctcaagtgaaggaggtcgaggcatgaagattcctggaacccccagtagctgtagtacctgctgttaattatcctgtacttaacatgtatgccttgccttgtacaggcatcctatgttaattatagccgccaacttgagaacccagcctttgattgtgtatgttaaagacatgatgtgtagggagccctgagcactccccacaccttgtagctgactgataggagaggtactcctaggtaacttttgtgtctctagatttgcaaatggtgtctgaaactctgcatttgctgtggcagagcatgtactgaaatagttcgcgataggtttaaataacacatggacgggcgtgttaggttgtaattgccattgttgctgtgagttcttttttatcaaaggtttttttttgtaaaaaaacttatttttgtttgttttaaaaaaa

SEQ ID NO: 8014 - DNA, 315 bp, Setaria italica
  Peptide Sequence Number=SeqID_73988
cgtttcaagcccaacccgcccgtatatatgcactcgactaccactgctcttctcctgcgccggatcaggcaagatcatggaagaagcgatccccaagccatcagagaagagggtcgcccttgtcaccggcgggaacaggggcatggggttcgagatatgccggcagctggcgtccagcgggctcgccgtcgtcctgacggcgcgggacgagaaggaggggcgccgaggcggtcgacaggcttcgcgggctcgggctgccggacgtcgtgttccaccagctggagatcacggagcccgccagcgccgctcgcctgg

SEQ ID NO: 8015 - DNA, 237 bp, Setaria italica
  Peptide Sequence Number=SeqID_73989
cgagtggatctataagcatacatgagtgagtggccatcccgaaagaaccacaagtcgcatggacatagagatccatctgcaggagaaagtagcagcagcagatcagtttaaacattttttgagcaaaaccttcacgtgatcaatatcctatggtaagctgactttagaaggctcaagctttgtactcatggacatgcatccacttggttgacgaccattttatttccattaatcacg

SEQ ID NO: 8016 - DNA, 322 bp, Setaria italica
  misc_feature (302)..(302): n is a, c, g, or t
  Peptide Sequence Number=SeqID_73990
tagaaacttaagaaacaactaggaagtcaacgtgggcgcatgaaacacacagataaaatccaagagagcacaggtgatgatgaatcgattgcctctgctcaatctcgaagtggcggtttccctatgctgaattggtggctgataaaccagggagtgagcgctgccattgtggtaatagcttgtggggctatgttcctcaacaacagatgaaatattgcgtcaagcttcaatgctatcatggtcctatcctttctgttgctctgttcgctttagcttatcagccaccgaacaattatttttcnctcacaacaatcagccgttt

SEQ ID NO: 8017 - DNA, 410 bp, Setaria italica
  Peptide Sequence Number=SeqID_73991
gagcaggaacagctaagagtacattactacgagctgtacaaaggtagaaagcgacaggagcggcttttcccccaccttttgttttctagactgaaaaatagaagagtaataaagttaggggaaacaactaagcaggagaaaagctacatcgaagtcatcaaaagtaatcgactgatgtgccactggtctactgcaaataggtaacttcttacaacactttccaacccccacataccaaaaaatgaaaaagattgatatttcacagcagggctgtacacacccaacaagaataaaagtacctgcccttgaggaaagcatgaatgagcgcaaaactaacctaggattattagcattataatggcaaaaataactttcgcaacctactgtcagaaagttaacgctgataggac

SEQ ID NO: 8018 - DNA, 629 bp, Setaria italica
  Peptide Sequence Number=SeqID_73992
cgagagtagaacaaatgctcttgtaaactttataagcaaaagaaatatcatacatatgtaagagatattcctatgtaagtttaaaagttcactgctaaaagactttggacatgttgatggattgttgtaccagcataggaccggatccaaactcctccattttttgattttatatttatcagtgccatcaagttatcgtttacatgtagaataccagtgtctcttacacaaacaaaagctatatgtacctcaaatagaatctcaaattggcaacagcggtttcctctcatcagttgcgctaagatggcttgcatcgtcagcagcaccagcagtcatatttacaaaagaagactcggatctatgattttggtgcatttccaagctccactgttcctgctgttttttcatctttgaccttggctagtggagagaaaaaactggtgcattgaaataaatacaattgagatgcctagaagaaagttaacagtcaaaggttgtcccaaaaaatgcagccgaagctaaaccagtaaaaattgtggcaactgttgaagaagtactcatcaacagttgccacaatttttacaaatgagaaacatcgttgccttcgagggcattcgagggcaacgatg

SEQ ID NO: 8019 - DNA, 1638 bp, Setaria italica
  Peptide Sequence Number=SeqID_73993
ttttttttttttgaagatttaactgaaggataaagtaatcatgcaggtactattgtaatggtaacaacgatcatcgatacaagtagtatagcattttgccccggaaaataggggaaagaataattgtatgtaatacacattacattagttgtgtataataaggcactaactactgccatatgttggcccctaagctgagggtgtaaaaaacacaagaaaacagaggaacaaggtggcctgaactgcatatgtatgatatttcttttgcttataaagtttacaagagcatttgttctactctcggcaaaaaagaatctcttctatacctacctcaaatagaatctcaaattggcaacagcggtttcctctcatcagttgcgctaagatggcttgcatcgtcagcagcaccagcagtcatatttacaaaagaagactcggatctatgattttgtgcatctcccagctccactgttcctgctgttttttcatctttgaccttggctagtggagagaaaaactggtgcattgaaataaatacaattgagatgcctagaagaaagttaacagtcaaaggttgtcccaaaaatgcagccgaagctaaaccagtaaaaattgtggcaactgttgatgagtacttcttcaaaatagtatctgcatacttgaagaagaaagaggagagaatgccttgtgccgcattgttacaaatgagaaacatcgttgccctcgaatgccctcgaaggatatcaaaactctctggaccttgaaatatgacagtccctaagatgccaaggaagttgaaaattgcaccataaccatataagaacaaattctgaaggtagatgcttgtatcaaactggctttttagagcatactcattgtagacagatgcaaatgatgggacagtaacaaaaattagtgtatatgcatatgcaatagcggtgactggaagaccaaaagcattggtgcccgcaggtatggagcgaagttgattgacactgattccaataagtaatagggcaagggcttcccactgaattatagagaattttcttctcataataacttttaggagaacagcaatgaccagcaccttcaggttgcttagcatcttcacagttgcagggttgaagtataactgcatgataaactttaggtagttgttgatggcatataggagagcaggaacagctaagagtacattactacgagctgcctgtacaaaggtagaaagcgacaggagcggcttttcccccaccttttgttttctagactggattattagcattataatggcaaaaataactttcgcaacctctgtcagaaagttaacgctgataggactgaactgaaacttcccatcaaccttagacatgaagactaggataggctggaggccgaccaagatgcagtccccagacacgagaaggacattaagggcatggtacttggatgatatcttgctacggtgcttgtcatatgccatcgacacactcctggggctcggaaccgccaccttagagcgacagacgctgcattccagcacgccattcctctgcatctcctccaaccgatcaggatcagcagccccaccctgtagctgaggcctctgaacaatcccacaagctcactgaaggtgcg

SEQ ID NO: 8020 - DNA, 372 bp, Setaria italica
  Peptide Sequence Number=SeqID_73994
tcacgcatgtctgcgagcatgttttggcttcagcagcgatagccagctgttggcatctccctgcggtcatggttgtggcagcgtgacaacggtagctccaaggttctttctagagttgaggtgtgtgttgtgaggtctccaatcggcttcgattgtagattgtgctttgattgtaattgcttcttctgtatcaataaatgtccggcaaatttcttgccgctggtttttcaaaaagataatgccacaacaggcaatgagccccgtatatgcaagccctgtcaatttttgtcagtgtgatggttctggattgctacctcaaattaagtttttagtgtataatttcagaaatgaaaataactgcattctagacag

SEQ ID NO: 8021 - DNA, 638 bp, Setaria italica
  misc_feature (620)..(638): n is a, c, g, or t
  Peptide Sequence Number=SeqID_73995
ctcgaagcccgcaccgtcctcgaaaagcactccccgcacatcggccgcacccgcgtcgcagagtgcctcgtcggagaccacaccggcaccatcctcgtcaccgcgcgcaacgaccaggttgaccttgtgaagccgaatactacagtgatcttccgcaacgccaagattgacatgttcaaggggaccatgaggctggcagtggacaagtggggacggatcgaggtgactgatgctgctgatttcaaggtgaaggaagacaacaacatgtcgctggtggagtacgagctggtggacgtggcagaggaagaggattgagtagagtcatatgaccctctgttgaatgaagtcgggctgtggacatagatttgagtaaggcggccgtagtggtaggctcctttttagttatcctggtgattgggacttgttagctttaagatatggttgaagaagcaggttaattatgtacagcagcagcagcaagcacagcagcagcagcaggtggtctgtctggctgttgctttctgtcgcgcgaggcctggtctatcttaatgctattctctcattcggtgtttatgaatcaatttccatgttgacatactaaagttaaaaaaaaacgaacnnnnnnnnnnnnnnnnnnn

SEQ ID NO: 8022 - DNA, 349 bp, Setaria italica
  Peptide Sequence Number=SeqID_73996
tattttcttgaagacccaacttagtagtgactcaaagcttaggtggttttgtacacctcttacagatcatctcaacattatctggagcatgaagaatctgaaatgccctcgcagcggtggttgggagatgcaaacgctctctgcttgccatcattcctttgagatttataggtgtctgcagacttcagcatcatcgatcggttacagcattgagcggcatagtagcaataccagtttctcaaataggctttagtttctacatcatttttgaggaaactgcgccgatcaagtcacaagggagctgatgtaaatgtatttgtcacttatagctgcatcatattctttggga

SEQ ID NO: 8023 - DNA, 245 bp, Setaria italica
  Peptide Sequence Number=SeqID_73997
aatttccggcaaccctcggggttcaaggagcaattggtcagagcatttgcctcagccccctagcaggaagcgctgctcgcctcagttttgtgtagtcaaacgcaggcaagatgaggcatggacaaaacgaacaaaggaacaaaagaaatagaaggcatggataaagatggctatgcatgttagttccatctattgtagtaatactattggcagttggtcagtataccctactagcttgaagctgg

SEQ ID NO: 8024 - DNA, 316 bp, Setaria italica
  misc_feature (292)..(316): n is a, c, g, or t
  Peptide Sequence Number=SeqID_73998
tcaggaagcgctgctcgggggctgaggcaaatgctctgaccaattgctccttgaacccctagcaggaagcgctgctcgcctcagttttgtgtagtcaaacgcaggcaagatgaggcatggacaaacgcaggcaagatgaggcatggataaagatggctatgcatgttagttccatctattgtagtaatactattggcagttggtcagtataccctactagcttgaagctggattttgccctgtatatcctttaataatggtggggcaggaagaccatccaccctttggactnnnnnnnnnnnnnnnnnnnnnnnnn

SEQ ID NO: 8025 - DNA, 277 bp, Setaria italica
  Peptide Sequence Number=SeqID_73999
cctcccctagagaggtgtgggtattatcaggctatcagcggctcaatttccggcaaccctcggggttcaaggagcaattggtcagagcatttgcctcagccccctagcaggaagcgctgctcgcctcagttttgtgtagtcaaacgcaggcaagatgaggcaataggaacaaaacgacaaggacaaagaatagaaggcatggataaagatggctatgcatgttagttccatctattgtagtaatactattggcagttggtcagtataccctacctag

SEQ ID NO: 8026 - DNA, 353 bp, Setaria italica
  misc_feature (309)..(309): n is a, c, g, or t
  Peptide Sequence Number=SeqID_74000
tactaaggtaagtcgtcttgtcttcgggggctgaggcaaatgctctgaccaattgctccttgaacccctagcaggaagcgctgctcgcctcagttttgtgtagtcaaacgcaggcaagatgaggcatggacaaacgcaggcaagatgaggcatggataaagatggctatgtatgttagttccatctattgtagtaatactattaggcagttggtcagtataccctacctagcttgaagctggattttgccctgtataatcccttaataatggtggggcaggaagaccataccaaaaaaaaaaaaaaaanaaaaaaaaaaaactaaaagaagaactagaccaaaggacaacaac

SEQ ID NO: 8027 - DNA, 527 bp, Setaria italica
  Peptide Sequence Number=SeqID_74001
caacattaaattatccagcatgggatatggacttcgctataaatatggcctctttaagcagctcataacaaaggatggtcaagaggagattgctgagaattggctagagatgggatacccttgggagatagtaagaaatgatgtctcctatcctgtgaaattctatggtaaagtggttgaaggcactgatggtaggaagcactggattggaggagaaaatatcaaggctgtggctcatgatgtccctattcctggctacaagctagaactactaataatctacgtctttggtcaacaacagtaccagcacaagatttcgacttggaagctttcaatgctggagatcataccaaggcctatgaagctcatctaaacgctgaaaagatatgccacgtattgtatccaggggatgaatcaccggaggggaagtcctcccagttgagagaatcaccagctctactctcaaagcgagcaataatatcctgtagcgaggctgaacataatgtatactgctgcttcaagcggag

SEQ ID NO: 8028 - DNA, 1365 bp, Setaria italica
  Peptide Sequence Number=SeqID_74002
tactacaaactagggaaggaacttacccctaccaaaagttagacaagtagacaagatgaatgacactcatccaacactatgcattcccgagttaatgaggatactgattgattttaagggattaagctgggatgaggcatggagcattactgaaagaaccgtggcatacacaaatcatacagtgcttcctgaagctctagagaagtggagcttggacataatgcaaaaacttctacctagacatgttgagatcatagaaacaattgatcaggagctgataaacaacatagtcacgaagtatggaaccgcagacactgcactattaaaaagaagctgaaagaaatgaggattctggataatgttgaccttccagcttctattgcccaactatttgttaaacctaaagagaaaaaggaatctcctattaaatcaaagaagaaattacttgttaaatctttggatactattgctgaggttgaggaggaaactgagttggaagaagaggagacagaagttctatctgagacagaggaggaaaatgtcgaatctaaagaagttgaagcagaagaagattccgaggatgagttagatccgtttgtaaaatctgatcctaagttaccaagagttgtccgaatggcaaacctctgtgttgttggtggacattcagtaaatggtgtagctgaaattcacagtgaaattagtagaaaacaaggaatagtgttcaacagcttttatgagatgtggccaactaaattccagaataaaacaaatggagtgactcccaggcgttggatccggttttgtaatcctgaattaagtacaataatttcaaagtggactgggtctgatgactgggtgcttaacaccgacaagcttgcagaactgaagaagtttgctgataacgaagatctgcattcggaatggcgtgctgctaaatgggctaacaagatgaaggtcgtctctcttataagggataagacaggatatattgtcagtccagatgcaatgtttgatgtgcaggtgaaaaggatacatgaatataagaggcagctgctaaatatccttggaatcgtctaccgctacaagaagatgaaagaaatgagtgcagaagaaagaatcaagagctttgttccaagggtatgcatatttggtgggaaagcatttgcaacatatatacaggcaaaaaggattgttaaaatttattacagatgttgcagctactgtgaaccatgattcagacattggagatctgttgaaggttgtatttgttcctgattataatgttagtgttgctgaggcactcattcctgccagtgaattgtcccagcacatcagtactgctggaatggaagctagtgggaccat

SEQ ID NO: 8029 - DNA, 2048 bp, Setaria italica
  Peptide Sequence Number=SeqID_74003
gcggtcgagggcgggcgcagcggcgggtcgcggcgcggagcgtggcgagcgatcgggacgtgcaggggcccgtgtcgctcgaggaagggcttccaagtgtgctaaattccattgactcatctgccattgcatcaaacatcaagcaccatgcagagttcaaacccttgttctctccagagcacttttcgcccctgaaggcttaccatgcaactgctaaaagtgtccttgatgcacttctgataaactggaacgcaacatatgattattacgacaaaatgaacgtaaagcaggcatattacctgtccatggagttttttacagggaagagctctcacaaatgctattggcaacctagagctaactggtgaatatgcagaagcattaaaacaacttggacaaaaccttgaggatgttgctagccaggaaccagatgctgcccttggcaacggtggtttgggccgcctggcttcttgttttttggattctttggcaacattaaattatccagcatggggatatggacttcgctataaatatggcctctttaagcagctcataacaaaggatggtcaagaggagattgctgagaattggctagagatgggatacccttgggagatagtaagaaatgatgtctcctatcctgtgaaattctatggtaaagtggttgaaggcactgatggtaggaagcactggattggaggagaaaatatcaaggctgtggctcatgatgtccctattcctggctacaagactagaactactaataatctacgtctttggtcaacaacagtaccagcacaagatttcgacttggaagctttcaatgctggagatcataccaaggcctatgaaggctcatctaaacgctgaaaagatatgccacgtattgtatccaggggatgaatcaccggaggggaaagtcctccgcttgaagcagcagtatacattatgttcagcctcgctacaggatattattgctcgctttgagagtagagctggtgattctctcaactgggaggacttccccctccaaagttgcagtgcagatgaatgacactcatccaacactatgcattcccgagttaatgaggatactgattgattttaagggattaagctgggatgaggcatggagcattactgaaagaaccgtggcatacacaaatcatacagtgcttcctgaagctctagagaagtggagcttggacataatgcaaaaacttctacctagacatgttgagatcatagaaacaattgatcaggagctgataaacaacatagtcacgaagtatggaaccgcagacactgcactattaaaagaagaagctgaaaagaaatgaggattctggataatgttgaccttccagcttctattgcccaactatttgttaaaacctaaaagaagaaaaaaggaatactacctaattaaatcaaagaagaaattacttgttaaatctttggatactattgctgaggttgaggaggaaactgagttggaagaagaggagacagaagttctatctgagacagaggaggaaaatgtcgaatctaaagaagttgaagcagaagaagattccgaggatgagttagatccgtttgtaaaatctgatcctaagttaccaagagttgtccgaatggcaaacctctgtgttgttggtggacattcagtaaatggtgtagctgaaattcacagtgaaattgtgaaacaggatgtgttcaacagcttttatgagatgtggccaactaaattccagaataaaacaaatggagtgactcccaggcgttggatccggttttgtaatcctgaattaagtacaataatttcaaagtggaactgggtctgatgactgggtgcttaacaccgacaagcttgcagaactgaagaagtttgctgataacgaagatctgcattcggaatggcgtgctgctaaatgggctaacaagatgaaggtcgtctctcttaataaagggaataaagaacaaggaaataaataaattaagtaacaaagtaaaccaaagaaaataaagaaacaaaaataaagttt

SEQ ID NO: 8030 - DNA, 2443 bp, Setaria italica
  Peptide Sequence Number=SeqID_74004
cagcttaatcccttaaaatcaatcagtatcctcattaactcgggaatgcatagtgttggatgagtgtcattcatctgcactgcaacctttgggaggggaaagtcctccggcttggaagcagcagtatacattatgttcagcctcgctacaggatattattgctcgctttgagagtagagctggtgattctctcaactgggaggacttcccctccaaagttgcagtgcagatgaatgacactcatccaacactatgcattcccgagttaatgaggatactgattgattttaagggattaagctgggatgaggcatggagcattactgaaagaaccgtggcatacacaaatcatacagtgcttcctgaagctctagagaagtggagcttggacataatgcaaaaacttctacctagacatgttgagatcatagaaacaattgatcaggagctgataaacaacatagtcacgaagtatggaaccgcagacactgcactattaaaaaagaagctgaaagaaatgaggattctggataatgttgaccttccagcttctattgcccaactatttgttaaacctaaagagaaaaaggaatctcctattaaatcaaagaagaaattacttgttaaatctttggatactattgctgaggttgaggaggaaactgagttggaagaagaggagacagaagttctatctgagacagaggaggaaaatgtcgaatctaaagaagttgaagcagaagaagattccgaggatgagttagatccgtttgtaaaatctgatcctaagttaccaagagttgtccgaatggcaaacctctgtgttgttggtggacattcagtaaatggtgtagctgaaattcacagtgaaattgtgaaacaggatgtgttcaacagcttttatgagatgtggccaactaaattccagaataaaacaaatggagtgactcccaggcgttggatccggttttgtaatcctgaattaagtacaataatttcaaagtggactgggtctgatgactgggtgcttaacaccgacaagcttgcagaactgaagaagtttgctgataacgaagatctgcattcggaatggcgtgctgctaaatgggctaacaagatgaaggtcgtctctcttataagggataagacaggatatattgtcagtccagatgcaatgtttgatgtgcaggtgaaaaggatacatgaatataagaggcagctgctaaatatccttggaatcgtctaccgctacaagaagatgaaagaaatgagtgcagaagaaagaatcaagagctttgttccaagggtatgcatatttggtgggaaagcatttgcaacatatatacaggcaaaaaggattgttaaatttattacagatgttgcagctactgtgaaccatgattcagacattggagatctgttgaaggttgtatttgttcctgattataatgttagtgttgctgaggcactcattcctgccagtgaattgtcccagcacatcagtactgctggaatggaagctagtgggaccagtaacatgaagtttgcaatgaatggctgcattctaattggaactttagatggtgcaaatgtggaaatcagggaggaggttggagaggaaaactttttcctttttggtgcagaggcacatgaaattgtgggtttgcggaaagagagagctgaaggaaagtttgtgcctgacccaagatttgaagaggttaagggatttatccgcagtggtgtctttgggacttataactatgatgagttgatgggttctttggaaggaaatgaaggttatggacgagcagattatttccttgttggaaaggatttccccagttatattgaatgccaagaaaaagttgatgaagcttaccgagatcagaaattatggacaaagatgtctatcctcaacacagctggctcatccaagttcagcagcgatcggacaattcatgagtatgccaaggatatctggaacatcagacctgtcatcctcccctagagaggtgtgggtattatcaggctatcagcggctcaatttccggcaacccctcgggggttcaaggagcaattggtcagagcatttgcctcagccccctagcaggaagcgctgctcgcctcagttttgtgtagtcaaacgcaggcaagatgaggcatggacaaacgcaggcaagatgaggcatggataaagatggctatgcatgttagttccatctattgtagtaatactattggcagttggtcagtataccctacctagcttgaagctggattttgccctgtatatcctttaataatggtggggcaggaagaccatccaccctttggctcactgctgttctggtgacgtgtattgtattgttaatgactccattgcctcaatggaagacttacctagactagaaggactacccctaattactagacaaaaaaaaaa

SEQ ID NO: 8031 - DNA, 997 bp, Setaria italica
  Peptide Sequence Number=SeqID_74005
tagtaaattaccgtaaattctttcttcctcgctggtcgggaggggggaggcggcgccctgagcagcaaaggaaccgccttttgcacctgttcttggggtcttatccgacgaaatggcccagcatcaaggggttcctaaatttggaagctgggaggacgagggtgatcacctttacacacagtattttgaaaatgctcgtaagggtaaatctcctggtcataagggagatccggaaacgccctcgaaggatccaccatcagctaaagcttctcccctgaggactgggtcagatccagtggtgcgaaagcccaaggatgaaagacgtgcaagcagagaagatgatcttcgtcgtcacgaggccactgctcgaaagccatatgctgagtcacctaatcataaacacggtgatcatactaactatgatagtgcagcaagaaaaactggcatggaacgatcgcctttgcatcctcatcaccaagcaagagttgtaaacaaaggaggggtttcatctccttcatgggaacgcaggggttcatcagaaggaaaccgaggagctgcgcccaccacacctggaaggtccaagatgagatcaagtgggcgtggagatgaaacgcctgagagaggatcagctgtgcccaagtttggagaatgggatgagaaggatccctctacaggtgaaggtttcaccgacatatttaacaaggtgagggaggagaaacagtctggcgatgctcctgttatcaccagcgatgcaggttataaccgctccaatcaaggccgcaaatatgaatcatcgggttgctcgtgcttcagttggttcagaaactgatgaagccgtcatcgaaggttggatgaatctgtgctgattgtatcattgtcacattagtggtgcccccatcgtgttatccctgttgtaatattgtgtagtagcgcgacgtgcctgaacatgactttgcgaacttgaggttcaatagtttgagctgttttgacaaaaaaa

SEQ ID NO: 8032 - DNA, 1807 bp, Setaria italica
  Peptide Sequence Number=SeqID_74006
aagttaaaataaacaccaattaaatgtttgatatgtgggttactgtttgatatgttcccataagtgtcagttttagcacaactcaaaatatctaagaattagaaaactgtattagttaactagactttgatgtgtaaccacttcacagctttaggtgttagaatagcagatgtgaaacatcttgttgtttcgttgcatgacatttctaaattcataatcagaaccgtgaaaattctgccctacttggtgctctactgatatttaccctgctcaccacttccccaatgattggggaagcttcctgtaaatagttagttctactggtgctcatttctccaaagtaaaagataacgaaacatttgattatattgttatggaaaggttttcaactggcactctacatttagaatgctacttgactgcccactcatgcaaaataatgaacatggtgaaatacataatgcataattatgtaaaaagttaatgcactataaagtataactatgtaatggcttacaatggcctcattttactatcacttcccttaaattggttgggttgatgcttgatgtgtctcgtatgcacatgtatactactttccattttgggtactggtgttatatctgcataccttgaagcgtagtaatagcatctggctccacatgcagtgcgactcagttggtattacaggctcataaggaggcggtgaattcattgggtgagaatagtcctgcaaaattggggacagttgctactgttgtggctgtagccaatgccactgcaattgaagcaacaaaggaggtggaagccgcaatgaagatttccttgcgagcagctttgggctcaactacaaataagcttaccaaaggtcaattagatgatctcacaataatgatggagactcttcgagttaaagatgatgaactccaccagctattgcaggatattcgtgcgcgtgattctaccattaatgagattgcggataaattacaggagactgctgaggcagctgaaactgctgcttctgcagcacgttcaattgatggagagagaaggtttttgtcgtcagaatttgagcgtctgaaacaggatcatgaaaaacaagttgaagtatctttgcttcggttaaaggaatcagaggagaaagcaaagcttcttgttgaagagagagatcatttacttacagagagagattctgctcttcaagaagctcagatgtggcgctcggaactaggaaaagctagaggaaatgctgtaattctagaagcagctgttgttagagctgaggagaaagctagggtttcagcggcagatgctgatatgcgtgtaaaggaagccatgagcagactcgagtctgccataaaagaaaaggaagatctcttagccctcgtggatgcactgcagtcgcaaataaaaaggcaagagactagcacaatacaagtttgtgaagagaattcggagctctgctctaccacttcaaagcacatggaagatgataatgtggataaggcttgtgtaagcgatacagacccaatacccgttgcagagaacattgttgagttagatgatgagggtgttgatatccgtaccatcggggacactgagtggggcaattctcattatttggaagtatctgatgtaagggaagtaacaacagaacccgaagaaaacagcttggatattccagttgatacttgacgccaactggttactgagaatgacttacgagggtaaactgaactgtggccattcttgttcaccgtgatcagttgtactattagattctcatcttagttcattacaggca

SEQ ID NO: 8033 - DNA, 2360 bp, Setaria italica
  Peptide Sequence Number=SeqID_74007
ggagttccggaacgcgtaccggcgccagctgctggcgctgtcgcgccggattcggctcctcgggcccttcgccgaggagctccgggaggcgcgcgggggagccgcggagggggagcaggagcgggcgctggcgccgctggccgacgcgctggggacggcgctcgacctgctccggctcggccgcgacgggagcaggatcttcctggtccttgagagggacaatataatgaagaagtttcaaggagtaattgctcagttggagcaagctttgtgcgattttccatacagtaaattggatatatcagatgaagttagagagcaggttgagttagtgcatgcacagctcagaagagcaaaagagcgcgcagatatgcccgatgatgagttctacaatgacgtgctgtctctgtataacaagagctatgacccaagtgctgaactggacatccttaaaagattgtcagaaaagttacacctgatgaccatcactgatctcacacaagaatcacttgctttgcatgagatggtggcatctggtggtggtcaggatccaggagaacacattgagaaaatgtccatgctattgaagaaaatcaaggactttgtgcaaattcagaaccctgagatggggccgccaataggtaccaagctaatggattcaaacggggagccaagacctgcaaacattcctgatgagttccgctgtccaatttctcttgagttgatgaaagatcctgttattgtttctactggccagacatatgagcgggtgtgcattgagaagtggctagcttctgggcaccatacttgtccaaatactcagcagaggatggcaaacacgacactgacaccaaactacgttcttagaagtcttattgcccagtggtgcgaggccaacgggattgagccacccaagcgttcatcgcagcctaacaagcctacatcagcatgctcatcgagcgaacgtgctaacatcgatgctcttctgtcccagttatgctctcatgatcctgaggagcagatgtcagctgctgcagagctacgcctcctagcaaagcggaatgcaaacaaccgaatttgcattgctgaggctggtgccattccattactactgagtctcttgtcttcatctgacctgcggactcaagaacatgctgttactgcacttctaaacctctccatacacgaggataataaggcaagcatcatatcctctggtgctgtaccgagcatagttcatgttctgaagaatggcagcatgggggcacgggagaatgctgcagctacgcttttcagcctctcagtgatcgatgaatacaaagtaacaattgggggaacaggggctatccctgcccttgtagttctattaagtgagggcagccagcggggaaagaaagatgcagcagcagctctattcaacctgtgcatttatcaagggaacaagggtcgtgcaatacgagctggccttgtgccgctcatcatggggctggtgaccaacccccacgggagctcttatggatgaggcaatggcaatactctcaatactgtccagccaccctgaggggaaggcggctattggggcagcagagcctgttcctgtgcttgtggagatgatcgggagcgggtcaccgaggaatagagagaatgctgcagctgtgatgttgcatctttgtagtggtgagcagcaacttgtgcatctggcccgtgcacaagagtgcggcatcatggtcccactgcgggagctggccttgaacggcacggagagggggaagagaaaggcagtgcatctgctcgagcgaatgagcagattcctggttcagcagcaagaggaaaaggaagcccagctgctggcatcgacacaggccattcctcagatccctgaacaggtccaagagatcgacatccctgaacaattggacagtccttcatctcaatatcccacggtcgcatgatgacatgaatatcttcacgactatactaccaaaaggttgagcaagtagtgtctgagtcacttggcttccagatccatggttcagcatgctgaacaagagttctttacgctgtcggattcgcttttcaaatcggtgatgatctttctcttcccatgctcgtgtcgtgtgctgaagatcccattgcgccacctgtttctgggtatgtaaattaccagaatgttgagatgtgtacagtctagtaaagatgcagctccaaatgtcatgtagctatgatactactagtatatgtacattttcactatgatactatataaaagagaagttctagcgacggacttaatccataaaaaaaagtctagttgtattcgtattgtaattacttaaagttaacttaattttgggggttaa

SEQ ID NO: 8034 - DNA, 430 bp, Setaria italica
  Peptide Sequence Number=SeqID_74008
gataactgtgacaagtatatggttggtgtttatgatctcaaaagtgatacctttgtcccagataccatacttgatgaccgaagattgtggtcaaggattgactatggaaattactatgcttcgaaatcgttctttgattcgaagaggggtaggaggattatatggggttggaccaatgagacagatagttcgttagatgatgttgccaaaggttgggcaggaatccatgcaatccccaggactatatggttagatagcaacagtaagcaattgctgcaatggccagttgaagaggtcgagtcactacgaagtgaagaagtcagccaccaaggcttggagctcaagcagggggatctgtttgatattaagggaattgatactttacaggcagatgtggagatagattttgagcttacgtccatagatagtg

SEQ ID NO: 8035 - DNA, 2350 bp, Setaria italica
  Peptide Sequence Number=SeqID_74009
attctcatctaatctagcatccccatcctccctctctccctctccaccacctcctcctccatggccctcgtgctccgcccctgggcctttcttcttttccttgtactggtctcctatgatgaatctggtcttcagagcagaaggaatggagtcgcacaagccacgcagagggtcttcctgtatccgcagtctccaaaggtctcctcaattgtgagcaccaagtacaggactgcctaccacttccagcctcccaagaactggatcaacgatccaaatggaccaatgtactacaatggtatctatcaccaattctaccagtacaatccaaacggttcactctggggtaacatagtttggggccactcggtctcaacagatctcatcaactggatccggcttgagccagcaatagaacggacaattccgagcgacataaacggttgctggactggttcagccacaatcctgaagggcaatcggcctgccatcatatacacaggtgctgacacagagaagcgtcaagtccaaaacattgtgtttccaaagaacgtgtctgatccatacctgagggaatggatcaaaccagacaacaacccattgatccaaccgatcggacaaggattaaactcaggccagttcagagatccaacaaccggttggattggaccagatggactgtggagaatagcagttggggctgagctgaacggctacagtgcagcacttttgtacaagagtgaggattttgtgaactggactagagttgatcactcactatactcttccaatgcctctaccatgtgggaatgcccagatttctttgcagtattacctggaaacaacagtggattggacttgtccgcagctatcccgaatggcgctaagcatgttctcaaaatgagcctggataactgtgacaagtatatggttggtgtttatgatctcaaaagtgatacctttgtcccagataccatacttgatgaccgaagattgtggtcaaggattgactatggaaattactatgcttcgaaattcgtttcttttgattcgaagaggggtaggaggattatatggggttggaccaatgagacagatagttcgttagatgatgttgccaaaggttgggcaggaatccatgtaagcaaatctgcctccaactgcatcacctattttctgttgaattagtgacagttgctttaacacatctataccggtgtaactatgtgcactcgttttctttttcaaatataggcaatccccaggactatatggttagatagcaacagtaagcaattgctgcaatggccagttgaagaggtcgagtcactacgaagtgaagaagtcagccaccaaggcttggagctcaagcagggggatctgtttgatattaagggaattgatactttacaggcagatgtggagatagattttgagcttacgtccatagatagtgctgatccttttgatccttcctggcttttggacatcgagaagcattgtcgggaagcagatgcatcggttcatggtggtgtgggcccatttggacttgtggttcttgcatctgataacatggaagagcacacttctgtgcacttcagagtttacaaatcacaggagaagtacatggttcttatgtgctctgatctgagaaaatcgtccttgagaccagagctgtacacaccagcttatggaggcttcttcgaattcgacctcgagaaggaaagcacaatatctttgagaactttgattgatcgctctgcggtggagagctttggtggcggtggcaggctctgcatcatggccagggtttacccagttacactcatcaacggcggcactcggatgtatgcgttcaacaatggaactagcaccgtcaaagtgcctcagctgaaggcatggagcatgaggagagcacaagtgaatgtgaagaagggataagaaagttattatacatcatttagcaataacgaagctttctgaccactggatgaatgcatgagttgcttcaaggcatcatgctttcctacttgccagctcattcttaggtacctggaaagagggggaacaaaatacaaaacaacatatgactgacctcagattatgtaattcatttactagaaagaaaaggaaacagagattattattgagtgttggttagaagaacaaagaactccattgtttaagtgtggaaatattccatcgacaattattataacgttccagtaccggtgaagggctacatcatatgactgacctcagattatgtaattcatttactagaaagaaaggaaacagagattattattgagtgttggttagaagaacaaagaactccacacttaaacaatgg

SEQ ID NO: 8036 - DNA, 157 bp, Setaria italica
  misc_feature (149)..(149): n is a, c, g, or t
  Peptide Sequence Number=SeqID_74010
tctgctcgctcctccacggcacgagactgagcaccgacgagccaggctgcagttctgctgccgctgagcctgatccgaccgacgtcagatggatggattggaccggaagcaagcaagcagcagctacctagcctgtctttgacttcccngccactac

SEQ ID NO: 8037 - DNA, 261 bp, Setaria italica
  Peptide Sequence Number=SeqID_74011
gcgccagggccgggtgagcgatcgagcccgcgggaataaacaaacaacccccacttgggtttgggtgtacttgatcgcacggactttcgccttgcggcccttcaattatttgcgggaatcggtgggctgcctgcctggggtcggcaggccggccggccggccaggtgcgctgcaccgtaccggctccgctccgcgtggccaagttgcggtgcgcagctcaccagcctgaatgggagatcagtcacatgaggaatatgcgca

SEQ ID NO: 8038 - DNA, 461 bp, Setaria italica
  Peptide Sequence Number=SeqID_74012
ggcgcagccgcagcccgagcaggcagaggagcgcgtcgccgccagtctacttgctgcagagcagccgccgccatcgtgcactgcggccttcacggacacggcgccgttcgccgcaggatcggacggtgagctttcggcgggaccatccgactggccgacggcagggatattcgagctagcgggcggcaacgccggcgacgcgtcgttgccggagcactggaaccatggaagctggacggatccggacccggccgtctacttgccgtagcgtgtcactgatcacacaactggttcattttgtacttaaactcgtggtccaacaaatgttaagggcttcttttgatgacaccgttcgtttccaatttatgtagattggagtgaaaatgaactaatattttctctgttaatactctcaatatatgtggattggagactttattactattcttgtccaaaaaaaa

SEQ ID NO: 8039 - DNA, 218 bp, Setaria italica
  Peptide Sequence Number=SeqID_74013
gctccttcttgccgtcgccgctggcccacacgttggtgttgagcaccacgggctggccgctggagttgcccatgaactccatgtcgatctcgtcgtggtcgtcgccgtcgccggaagatagctgcagttgttcatcgggagcatcgtcagtgattcagctcaagatctcgagtaggttttggctgagacacgacgaaaaggggataggcaaggcacac

SEQ ID NO: 8040 - DNA, 483 bp, Setaria italica
  Peptide Sequence Number=SeqID_74014
tctagtattgtattggttgttaggttgttggttagttcggtccgtaggggttcgtaacctactaggttagtaacttggttgtcttcctttctttgtccgttcgtccgtttggtcccacacgttggtgttgaggacaacgggttgcccgctgctgttgcccatgaactccatgtcgatctcgtcgtgcccggggccgtcgccggaggtgaggtagaaggatgtgacggtgccggcggagttgcgggggatgagcttcatctggatgctgaactcgccgtagaggtacttctggcgggagctgaaggcgccgccggactgctggttgaggatgagcgacgtcacctgctgcccctgcgagttgtagtccgcgcgcacgttgccgtcggtcgtgaacttctcgtacagccacgagtccgccgacgcccgacgccgcgaggagcgccaccgccaccgcgacggacagaacccgccgcgctagcgcca

SEQ ID NO: 8041 - DNA, 470 bp, Setaria italica
  Peptide Sequence Number=SeqID_74015
tggtgtaggtgtggtagtcggccgaggggtcgaaccacaggtagaactggtgctccttcttgccgtcgccgttggcccacacgttggtgttgaggacaacgggttgcccgctgctgttgcccatgaactccatgtcgatctcgtcgtgcccggggccgtcgccggaggtgagctgcaagtagcagaagcatcggtctcacgaatctgaacgatttatttggctctcgaatcgaatcatcagtcgaaaccaaggtgactcacgtagaaggatgtgacggtgccggcggagttgcgggggatgagcttcatctggatgctgaactcgccgtagaggtacttctggcgggagctgaaggcgccgccggactgctggttgaggatgagcgacgtcacctgctgcccctgcgagttgtagtccgcgcgcacgttgccgtcggtcgtgaacttctcgtacagccacgagtccgccg

SEQ ID NO: 8042 - DNA, 923 bp, Setaria italica
  Peptide Sequence Number=SeqID_74016
taccaataaaaagaaaccaaaagcaatggatcagacggcgcggattgatcacttgcggctgcactcggcggggagcccctgtgggaacctccacccatcctggcagtagttgtagcgcatgtagttgcgctccgcccacctcaccgttcccaactcggcgccattgagcctcttcctcatccacccacccctgccggcattgcacgcgccgccggcgacgcaagcgttggcgtagaagctgcggtaggagacgacgaagggcgcgctgttccagtcgatggggatcttgcccttctcagtggcccagtagctgccatcccacagcgtggcgtgcagcgtcatgggcttggagctcgggtagggcaggtcggcgtagcgcttgaaggaccggatgaacacgttgtcgaccttgaagaggatgttggtggggttccagatgatggtgtaggtgtggtagtcggctgaagggtcgaaccacaggttgaactggtgctccttcttgccgtcgccgttggcccacacattggtgttgagcaccacgggctggccgctggagttgcccatgaactccatgtcgatctcgtcgcgccagtcgtcggtgccggacgaaaggtagaagcaggagacagtgccggcggagtttccccggatcagcttcatctcgaagctgaactcaccgtataggtactgctgcttggagtttaggccggcggcgccggagttccggtcaagtctgagcatcaccacctgctggcctgaagcgtcgtatcccttgcggacggtgccatccgtggtgaattgtctgagccagtacgtcgccgaaacgacttgcaagtacgcgaggacgacagcgagcagagcgagagaacgccgcgccatggtggctactctagagcttcttggaaatgagcttggaatgtata

SEQ ID NO: 8043 - DNA, 1124 bp, Setaria italica
  Peptide Sequence Number=SeqID_74017
tttttttaatcaaaaagtttacgaagtttaattccataagatttttagtcagtggccaaaaaatgattttcagaaattacataactactgctgtaccccggacaccactgtgggcttttctaagtgatatgctccaaaatgaacaagaactatccatgaaaaggaattaatctacagggacaagaatcattcgcggctgcactcgccggggaacccctccgggaaccgccagccgtcctcgcagtagttgtactgcaagcagttgcgcctggcccaggccacggtgaggcggtccgtgtcgtcgagctccctgtccatccactcgttccgaccggcggggcacgacggcttgccgtgctcgctggcgacgcaggcgttggctgtgtacccccggtaggagacgacgaacggcgccgcggaccagtcaatggggatgttacccttctcggtggcccagtagctgccgtcccacagagtggcgtgcaccgccatgggcttggcgtccgggtaggggaggtcggcgtagcgccggaacgcgcgcacggtgacgtcgtcgacgcggaagatgatgttcttgtcgttccagatgatggtgtacttgtggtagtcggcggccgggtcgaaccagaggtagaactggtgctccttcttgccgtcgccgctggcccacacgttggtgttgagcaccgttggcgcgccgctcgagttgcccatgaactccatgtcgatctcgtcgtggtcgtcgcccttgccggtctccccggacgtcaggtagaaggatgtgacggtgccggcggagttgccggggacgagcttcatctcgacgctgaactcgccgaagaggtacttctgcgtggagttgaagccggcgccggagctccggtcgaggacgagcgacgccacctgcttgcccgtagcgtcgaagtcggcccggacctcgccgtccgtggtgaactcgtcgagccaggccgactgcgccgaggccggctggaggatcgagaggacggcgacggcgagcgacgacaagagcagaaccagagaccgccgcgccatgggtgtcggtggcacgctggtccttgctcagcttctagactagcttggtcagtgggagtgaggtttcgttt

SEQ ID NO: 8044 - DNA, 1100 bp, Setaria italica
  Peptide Sequence Number=SeqID_74018
ttttttttgtctcacaacaactataaatattgctgtatgaaaaggcacgataaaaattacatgcttctttcatctggaaaattaaaactaggtgtacaaccgcccacactgttcctcagggctgctttttaatcacaagttcacaaagaagaaaaagaatgatacatccaataaaaagatgctgatcacacagctgacgatgctgatcgatcagctcagttgcggttgcactcggcggggagtccttgcgggaacctccacgcatcctggcagtagttgtagcgcatgtagttgcgctccgcccacctcacggtgccccactcggcgccgttgagcctcttgcccatccacccgtccctgccggcgtggcacgcgcccccggcgacgcaggcgttggcgtaaaagctgcggtaggagacgacgaagggcgccctgttccagtcgatggggaccttgcccttctccgtggcccagtagctgccgtcccacagcgtggcgtgcagcgtcatgggcttggagctcgggtaggcgaggtcggcgtagcgcttgaaggagcggatgaacacgttgtccaccttgaagaggatgttggtggggttccagatgatggtgtaggtgtggtagtcggccgaggggtcgaaccacaggtcgaactggtgctccttcttgccgtcgccgttggcccacacgttggtgttgagcaccaccggctggccgctggagttgcccatgaactccatgtcgatctcgtcgcgccagtcgtcggtgccggacgaaaggtagaagcaggagactgtgccggcggagtctccccggatgagcttcatctcgatgctgaactcgccgtagaggaactgctccttggagttgaacccagcggggccggagctccggtcgaggttgagcatcatcaccttctggccagacgcgtcgtaccccgtgcggacggtgccgtctgtggtgaattctctgagccaggacgccgccgaggcgacctgcaagatcgcgagggcaacgacgacggcgagcagagccggagaacgccgcgccatggtggccgccgctctagagcttcttggagatgggcttggaaagtgaag

SEQ ID NO: 8045 - DNA, 1319 bp, Setaria italica
  Peptide Sequence Number=SeqID_74019
ttttttttttttttttgctccacgaattcacctttattatctgtaatccctctctcggtaacaataacccaaagtatagataaaaaataaaaagagagagagaacgaaaccaagaacactagggtggatggcaaaatgtacatggggtgggcaagaaattgccgatagatgcaacatatgtcctgtcctgttcatcgaccagaggtgaagaacaacaaacaccaatgaggggattggaatcgagtcgtcatccctggaatcaatcaatcaagaacaatcggcggtggatgtgtagacggggatgattgggatgatgaaccggagcgagaagaatcacaaccaatcagtggcgcgagcactcggcggggaatcctttcgggaacctccagccatcctcgcagtagtcgtagtgcatgtagttcttcttggcccaggcgacggtgccccactcggcggcgttgagctgccggttcatccagcggtcggtgccggcggggcaggagagcgggcggccgtcgccgttgggggtgcaggcgtcggcgttgtagccgcggtaggagacgacgaagggggagtcggcccagtcgaccttcaccttcccctgctgcgtggcccagtagctgccgtcccagagcgtggcgtgcacggacatggggcttgccgccggggtacgggaggtcggcgtagcgcttgaagctccggatgaagaggtcgtccaccttgaagatgacgttcttgtcgttccagatgatggtgtaggtgtggtagtcggccgaggggtcgaaccacaggtagaactggtgctccttcttgccgtcgccgttggcccacacgttggtgttgaggacaacgggttgcccgctgctgttgcccatgaactccatgtcgatctcgtcgtgcccggggccgtcgccggaggtgaggtagaaggatgtgacggtgccggcggagttgcgggggatgagcttcatctggatgctgaactcgccgtagaggtacttctggcgggagctgaaggcgccgccggactgctggttgaggatgagcgacgtcacctgctgcccctgcgagttgtagtccgcgcgcacgttgccgtcggtcgtgaacttctcgtacagccacgagtccgccgacgccgacgccgcgaggagcgccaccgccaccgcgacggacagaacccgccgcgctagcgccatggatgggtgggtgctctgcgctgcttcttggaggagttggaggatgaggagaggcttagctggctggctggcgtggggctgagacacgcaacagaggataggcaaggcacacgaggggatagg

SEQ ID NO: 8046 - DNA, 1164 bp, Setaria italica
  Peptide Sequence Number=SeqID_74020
tttttttttgtacaaaagaataatcactttatccaaagtaggaaaacgacttttcctttacaagaaaactggtatactctcgcccctgcatgcctccatgcggggctgcttcttaatcacaaattcacaatcacataacaagaatcatatataattacgtatatatacccaggaaaaagagaaatcaagaacttaacactggtctcctcgccggcggtcgaatcagctcagcactcagctgcggctgcactcggcgggcagcccctgcgggaacctccacccgtcctggcagtagtcgtagcgcatgtagttgctctccgcccacttgatggtgccccactcggcgctgtcgggctgcttgttcatccaccggtcgctgccggcggggcaggcgccgccgctgacgcagggcgtcagcggagtagccccggtaggagacgacgaagggcgcgccggaccagtcgatggggaccttgcccttctgggtggcccagtagctgccgtcccacagcgtggcgtgcagcgccatgggcctggagctcgggtaggcgaggccgtcgtagcgcttgaagcagcggatcacgttgccgtcgaccttgaagatgatgttggtcgggttccagatgatggtgtaggtgtggtagtcgtcggccgggttgaaccacaggtcgaactggtgctccttcttgccgtcgccgctggcccacacgttggtgttgagcaccacgggctggccgctggagttgcccatgaactccatgtcgatctcgtcgtggtcgtcgccgtcgccggaagataggtagaagcatgagacggtgccggcggagtcgccggcgatgagcttcatctggatgctgaactcgccgtagaggtacttctccttggagttgaagccggcgccggagctccggtcgaggttgagcatcgccacctgctcgccccgacgcgtcgtagtcggtgcggacggtgccgtccgtgttgaacttctcgtagagccacgagtcggccgacgcgacagctgccgccatcagggcgagggacgcgagcagaggcaggagaagagaccgccgcgccatggagtggctactagctgccgccgctcgatctagagcttcttggaaccaagcttagtgatggataagtggagtgcggtggttgggtctg

SEQ ID NO: 8047 - DNA, 804 bp, Setaria italica
  Peptide Sequence Number=SeqID_74021
cgatgcgggttcccgggatgcggcccggggagtgctgcttcatctgcaaatccaccgaccacgtcgccaaggcctgtcccgagaaggccctctgggacaagaacaagatttgcttgcactgcagggagcgtggccatagtctgaagaactgtcctgagaaaagtgaggggaatttaaagaaattttgctataactgtggtgaatctggacattctctttccaagtgccccaagccaattgaaaatggaggtacaaagtttgcaagctgctttgtctgcaaacagcaagggcatttgagcaaggattgtcctgaaaacaagcatggcatttatccaaagggtggttgttgtaagatatgcggtgaagttacacacttggccaagcattgtccaaataaagggaaacaagatttgatgtcctccagagatgatgatgtcaacatggaagaacactatcaggaaggccctgtcgttcaccatggtggagatgaccttgaggacgacttcattgaagaagaagaaccgaaacccaccaaatcaaagaaggcaaagcaaccaggttcaaaatcggttggaaatgatgagaagaacgccaacacaaaggcaaaagctaaacagtctccaaaagttgtaaaattctttggctaaagaatggaaattttgtaggttacgatagagaagatccttctagacttttgtattgtgcggtcgtggtcgtgtaacttacaaatagaagaaatttttactagaccaaaccaacgtagacaagtttagaaaacttaatacaagtttaggtaaaaaaaaa

SEQ ID NO: 8048 - DNA, 252 bp, Setaria italica
  Peptide Sequence Number=SeqID_74022
ggctgtccgtgcggagaggtgaccggcgcggacggcaggcggtagcccacgcatcgaggcgagcttcgcctccccgtgcccgcgcggagacgcgagcggcctgtccggcggcccgcgcgtgcgtgggggagcagcagctccgcgaggccagcaggcacgacgccagtagaggctccggtagccggcagcccgcgggagcgacgcgagcggtagctccggcggcaacgtgcgtgtggcgagcggcggctccgg

SEQ ID NO: 8049 - DNA, 590 bp, Setaria italica
  Peptide Sequence Number=SeqID_74023
ttacttcatggcttctgcaagagacaatccttggggccaagattgtctcttgcagaagccatgaagtatcagttcccacaggtcaatattcactagtttctttcctctttgatactgtctcaagtcaaaaacatgtgcccacctagaaggatgcagccagtgtatatgaatctaataataaaagtagggtttccaaaagaatacattttctgaaaaattattttttttaggtttaaaaaattagttttcactaagttgttgatcaagattgcgtttaagaaactatgtcactgtccaaaacaatgcttatttgtcaatggaggtaattctcctggggatactttcttttggttcttgtttattgcaataaatgaaaaatacatcatacatgtcacttgagtcagcctaaattgttagaatctgttatcccgtactaagtttttcttgaatccttgtccattcttatacagtactgtataagaatactgtataagaatccttgtctattgccattgtactgtgcatgcttctgcttcatgattgctagttaaccccaatggatggattgtgctacctttgcccccccaccc

SEQ ID NO: 8050 - DNA, 1091 bp, Setaria italica
  Peptide Sequence Number=SeqID_74024
actttactttactcgtaacctaaaaacctgagaatttgttggttaacaaagatgtcataaagttagcagactttggtcttgcaagggaagtctcatcagtgccaccctacacagaatacgtctcaactcgctggtatcgagcaccggaagtcttgctccagtcatctgcatatgattctgcagttgatatgtgggctatgggtgccataatggctgagctgttgacactccatcctcttttccctggcaccaggtaatggttgactatgtacgctgctaaacttgacactttcaaatctgtttgctcgttttgtttggtgctttcttgttggtggcacctcaatgattgagtgcgcactaaaggttgtctgttgatatatcttgattttcagtccagacttgaatatttttgtcgcaagatttaatttcttttggttttattatctgtctagattctttgcagatcctaaccctcatttcaattaaataattatctattttgttctcttttctcttcatggttgttttctcttatcccttattaatttcaccatttagtgaagcggatgagattcacaagatatgcaatgttatcggtagtccagatgagcaatcttggccccaaggattgtctcttgcagaagccatgaagtatcagttcccacaggtcaatattcactagtttctttcctctttgatactgtatccatatacactggctgtatccttctagaaggatgcagccagtgtatatgaatctaataataaaagtagggtttccaaaagaatacattttctgaaaaaattatttttttaggtttaaaaattagttttcactaagttgttgatcaagattgcgtttaagaaactatgtcactgtccaaacaatgcttatttgtcaatggaggtaattctcctggggatactttcttttggttcttgtttattgcaataaatgaaaaatacatcatacatgtcacttgagtcagcctaaattgttagaatctgttatcccgtactaagtttttcttgaatccttgtccattcttatacagtactgtataagaatactgtataagaatccttgtcta

SEQ ID NO: 8051 - DNA, 772 bp, Setaria italica
  Peptide Sequence Number=SeqID_74025
ggttttaggtcacgatgaaaagtagcccctctgatgcatgtaagcaagagcctgaaaaatctgaaagcaccagttgcggacatcagactccgggaagtctcatcagtgccaccctacacagaatacgtctcaactcgctggtatcgagcaccggaagtcttgctccagtcatctgcatatgattctgcagttgatatgtgggctatgggtgccataatggctgagctgttgacactccatcctcttttccctggcaccagtgaagcggatgagattcacaagatatgcaatgttatcggtagtccagatgagcaatcttggccccaaggattgtctcttgcagaagccatgaagtatcagttcccacagatcaaaggcaataaactatcggaagtgatgacatcagctagtagcgaggcaatcgacctcatatcatcactgtgctcatgggatccttgcaagagaccaaaggccacagaagtcctccagcataccttctttcagggttgtacatacgttccaccacctgtccggtcgaaagcttcagcacctcctaaaactcctccatgtgttggagcaaaaggagtttcagagaacaatgttgctcgaagatactcaactggaactctatccacgatgaaatctcatagcaccacatccacaaaattaaatagtttatctaaaactggtgtccaaagaaaacttcactattggtattcgttccggttaaccgtactaagtaaagttaagtttaacgttaaggttaccttta

SEQ ID NO: 8052 - DNA, 2973 bp, Setaria italica
  misc_feature (2901)..(2973): n is a, c, g, or t
  Peptide Sequence Number=SeqID_74026
tattcgtctaggtggttcggtccccgttagtaaaaaaaacgaagaagaagaggagggtgaaagaaaggcgagcgctttcgcgtccgccggggcgaccgcgaaaacgagctgggagcggttaaaagcgggcaaaaaaggggaggggcgccgcgagcggcaggcagacaggcaggcaagcccaagcaaggcgggggcggagcgcgagaggcgacgcgacgcgaggagagcaggcagggttgctggcggtggcctgccatggttataaaaaagtaacggggcgcggcgcgggtagaaaccggaaggcccgcggctcccccatcttccctccccgtcccacacaccccacggcgccgccgccggcgcggcgagcttccttccttccccccggtccgcgcggcagggaggcaggcagggcagggcagggcacgctgcaaccacgtggggggcgcgactcgccaccaccctatgctctgtcctctcccgcagggtaagattgcaccagcggtgaatttgggagcttgaattgttcatccgagacatggaaaaagtggtctgccgggcatatctccttcaatgcaagcagttcttttcgaaagaaacacttgattggcgtgcctttgctcgtgagaacacccatctctcctctctggtgaactacacatagcggctatatgctcctctatgctcaacaataagcaggccggtgcgatcttttcctgaagttatatttcaatcacatcaaatcctgaaaagcttcttttcaagtagatggtgatcatataagtggggatattaatctttgctgcattcagcagacatctcttgctgccctagttagttgttttgtttttgagtaccatttgaggtcagggctcaatccttgctacattttgcaactccatactatggttgcaacaggcttgtagtggaacagaatcccacacactgagacaagagattgctcagctaaaacttgcgaacacacttgcgttggctgttcatatttctctggacttggttattctgaagggaaaaacttgcacaaggcagctggggtacctaacaatggatagattcaagttgataaaggaagttggtgatgggactttcgggagtgtatggcgtgctataaataaacagaatggtgaagttgttgctgttaagaaaatgaagaaaaagtattattcttttgaggaatgtatgagtctgcgtgaagtaaagtctttacggcgcatgaatcatcctaacatcgtgaagctcaaggaggttatcagggaaaatgatatactttacttcataatggaatacatggagtgtaatctctaccaacttatgaaagatagggtcaaacctttcccggagtctgatgtccgcaactggtgctttcagatttttcaggctcttgcttacatgcatcagaggggctactttcatcgtgacctaaaacctgagaatttgttggttaacaaagatgtcataaagttagcagactttggtcttgcaagggaagtctcatcagtgccaccctacacagaatacgtctcaactcgctggtatcgagcaccggaagtcttgctccagtcatctgcatatgattctgcagttgatatgtgggctatgggtgccataatggctgagctgttgacactccatcctcttttccctggcaccagtgaagcggatgagattcacaagatatgcaatgttatcggtagtccagatgagcaatcttggccccaaggattgtctcttgcagaagccatgaagtatcagttcccacagatcaaaggcaataaactatcggaagtgatgacatcagctagtagcgaggcaatcgacctcatatcatcactgtgctcatgggatccttgcaagagaccaaaggccacagaagtcctccagcataccttctttcagggttgtacatacgttccaccacctgtccggtcgaaagcttcagcacctcctaaaactcctccatgtgttggagcaaaaggagtttcagagaacaatgttgctcgaagatactcaactggaactctatccacgatgaaatctcatagcaccacatccacaaaattaaatagtttatctaaaactggtgtccaaagaaaacttcacatggatcgtccggcaccgcagaagagtacgaggccaccagagaacagcaataaactaactatgaatcgggtaccagctcggaatagcccagggaatcctgtacttaggcattcacgcagtttgcccgaaactggacggggaacaatacaaaaggtctcgtcaattacagagaaactatcccatatgtctgtgacatccagaacacgaagcactctgaagcctgctgtaccgatgttgaaggctgggcatggcaagtcggacttcctcgggaagtctgacgatatccctccagcaaagaggctgacacgaaaattggtcagctaaatgaggagatgttgagctaaaaattggtcagctgcaggaggggtatagagtatactgcacaaaaccagtgtgccgaagaggatagcagcagtgtgatggttccgtgaatgtgccatctccctagttttgttgcattcaggcgacatgcatggtagattgggttgcaaattccactgtagagggctcgagcctgctgaccttaccctcttctgggccgttgatatgctttttgcctgcctcgagcttgtcccccatgtttttatcagcatgattgtgctattaatttgaatttggtttgtcatgcgatgtttcttgcgccagtcctgtcaaactgtttgtttatatgcacattaacagtctgtaagtccttggagccctacaaggggagaacatatggtttgaatgtacagtgcacaagtttttttggtgagcacgcagtatagtatcaaaaaaaannnnnnnnnnnnnnnnnnnnnnnnnnnnnnnnnnnnnnnnnnnnnnnnnnnnnnnnnnnnnnnnnnnnnnnnn

SEQ ID NO: 8053 - DNA, 391 bp, Setaria italica
  Peptide Sequence Number=SeqID_74027
ccggggatggtgacggtgaaggaggagtggccgccgggctcacctccgccggaggaggaggtggaggacatggacgcggagggggcgccgcggccgatggaggggctgcacgaggttgggccgccgccgttcctgaccaagacgttcgacctggtggcggacccggccaccgaccaggtcgtctcgtgggggcgcgccggcaacagcttcgtcgtgtgggatcctcacgtgttcgccgccgtgctgctccccaggttcttcaagcacaacaacttctccagcttcgtccgccagctcaacacctattgacaaatgtggcgtataaaaccgaaaagatgattcagacgcacaggatgatgacgggagatggcagaacctgcatgcatctcca

SEQ ID NO: 8054 - DNA, 329 bp, Setaria italica
  Peptide Sequence Number=SeqID_74028
tgatgaatttttttttttgtaaatggtggtgacgttagatgaattttctgcacaatctggatttctagttgaactgatggaatcgtttgccaatatccgtaattttgtagtgacaaatgtggcgtataaaaccgaaaagaatgattcagacgcacaggatgatgacgggagatggcagaacctgcatgcatctccatggcaagctgttaaatttctgacacgttctttgttcaacttgttactgcgtagctagacggatcaagacatcggatgacgctacaagaaagaaactatgtgaaacctacagttttacatactttgtgaaacat

SEQ ID NO: 8055 - DNA, 837 bp, Setaria italica
  Peptide Sequence Number=SeqID_74029
ttacgtttgcagcagttctgccttcactgaatcaggcactgatgctgtttcacatgtgaaataaattgagagcgctgtaagaggggccacagcaaagagaaacattttttctcgaccaggaaagtacaagtgtaaaactgcccaacaatgggcatttttaagggcaaaaagaaagaggatgagaaactttcaagcattacgaattgtccatttgtttgttccaagtctagtcatagtacgcaaagacagatgaaggcatatgaagaaacactccaaattgtatttttgaaatctagtgaaatcagtgaacataattccaggcacaaaagatcacttacctcttccttttggagtaataacatgaataagatcatccactgtcacattatttcttcctttcttccttgcataggccctacacacaagcacataaaggagatgtaaaaaaacaaagaatgatgagcacaaggaaagatatatattcaccagttaaaaccacacctattcccaacctatggaatgtgtaatgtagcactcatttcagatgctctaatgtggcagcttggggttttgaagacttcagagttagactaatttgattagcatagaatttggacaaagttagtaaaagaacccactttcagctggaacctgtcagcaaaagattttaacatgcaataactgtacacgtaaaagagtatgtgctaagtgggttctcagaacctctaatacttgcgacaggttcatctgaaaagaactttttgcaggaaacataacgaacaaagaaacaaattgcacatgctgcatggattgttataactgcagtagccatctact

SEQ ID NO: 8056 - DNA, 850 bp, Setaria italica
  misc_feature (1)..(72): n is a, c, g, or t
  Peptide Sequence Number=SeqID_74030
nnnnnnnnnnnnnnnnnnnnnnnnnnnnnnnnnnnnnnnnnnnnnnnnnnnnnnnnnnnnnnnnnnnnnnnnctttactatgatgcacattaatattatcatttatatcaagatatttcagttttctaatcctgaaagcaagcatcagttgagcaatgacaacacaatgcagcattacacgctgaggttcctttaacaatacaatattcaaggattacaactccgtgtcttggtacacctgaaaatcgcaccaactgcctgtctgaccaaggagcatgtggacagcatcatgaagatcgccctggttcgttttcatgctcacactattgccacatgcactgttttttctgcacctttggtcccaacaagatcaacctcccaatattcgtacaatggtacatgttgctctaaccgtcacgataaatgactaccgaagtgaggtagacatgaggaaggaccggatacgttgcagcagttctgccttcactgaatcaggcactgatgctcttccttttggagtaataacatgaataagatcatccactgtcacattatttcttcctttcttccttgcataggccctgcatagcgccttcatctcatccctccagccgcactcgacgagccgctcacggaggagctccattaacttctccttctccccactctctaccaacttgatgttgatgacttcttcgagggagggctccttgtcccgatcctgctccgcgctcggcgtcggcggccgattaatcgacgccctcatgcttcaagtcgggttgatgcgccctcctcttgcttcctcgctgctgctttgtttctcgttgtcgtcgtcgtcttcctcgggttt

SEQ ID NO: 8057 - DNA, 482 bp, Setaria italica
  Peptide Sequence Number=SeqID_74031
gcccacgagtggatatgtgtgtatcttctccatctccaattgttggcaagactcctgggaatgaggctttccctctaaaatttttgccagttgatgctcaaaatggtagcagagttgcatctcctaaaggggcttttttcaagcggatggcggaaacaaattctagcaagtcaggagcaactaaaggagatctctccgccacaagaactgtgaaacaaaaaaggagggcaggtggtgttgttgcatccgctgcataacaaaaaatgggagagagcagccatggctggtgtttcattagttgctgatgcagctgaggagcttgagcgcaacactattaaccctggcatgttatgtaatgttgatgctagaacgctgacttcttcatcagacaaactttctactgttgatggcatcagcacaaaccatatggaaggaagcagactcacaagcacctgcaaagctgaagctgcagttattccaat

SEQ ID NO: 8058 - DNA, 1378 bp, Setaria italica
  Peptide Sequence Number=SeqID_74032
ccacaagaactgtgaacaaaaaaggagggcaggtgagacaataccgactagacaataacaaaaaatgggagagagcagccatggctggtgtttcattagttgctgatgcagctgaggagcttgagcgcaacactattaaccctggcatgttatgtaatgttgatgctagaacgctgacttcttcatcagacaaactttctactgttgatggcatcagcacaaaccatatgaaggaagcagactcacaagcacctgcaaagctgaagctgcagttatttccaataaatgaagctacacggaaggcattggaaaaggatgaacacaatccacatctggagctcacactaagctctaggaagaagatatcatctgtgttagaacatctgaaccgtaaatggggtaattcaaacattgcatctggagagcttattctttttccatattgtgctcaccaagaggatttagctacatatcagaggtggacaacaagagatactgttgcagtagctgacgtgtttctttctgtgaatagcccttctgttttccgtttaaggtatggttggttttctcttgttgagcttgaagcaggagtaagtgaaatatctttaacccattttgaaaactgcatgatgccggaagacatccaggtcaaatcgccctcaggagataagtcttgtgtgcaaaaggatgacgctttgctcagtagtaatattcatgagcaatatccttgtagttcaatagatcagtcagcactgttgcatattacaccatctagcacaggcaagatcactgagcttccagagcagacaccctctcagtttggcagccagaagcaagtgcgggttcctgtaactcaagcttttgaggatgatcaaggaatgaattgtgctgcaatatccgaaggagagtgggcagatacccttactgatatcagtgttgggtacttactgactgaagcatccaagggcactcatttggattgcataggaacttctagtgtcaaaaatgctttgctccttgagaatccatgcagctatgactcatttgatgctgccgttgctcttcatgtttctcgttttcaagcatcagagcagccagcccatactccccattcaaccatctggggaggagaagaaacatgtgatgagttcagttttaatttgtcagcctccaggaagcaagaaggctcaaacactccttccagcagctctcctgatactgacaatgaagttcatccattaaactcggaagggtttcaaggttttcttcaggacttgactggaggagaggctgctgctgataatccttgtaatgatgatggcaaagatagagaggagttttgtgctaaatcgccacctcgaaatgatgacactaatga

SEQ ID NO: 8059 - DNA, 441 bp, Setaria italica
  Peptide Sequence Number=SeqID_74033
cacagttaagtgggctgtctggctccggatgagccatcagtgcaattatggctctacaaactgattgaagggtccatgcagggctccatgcattcttcaagatatccaagcaaatttcaccagtctaggcaaacaaatcattaccaataaaaaaacccaaaaatattattaaaatgatcatcatttgcatccaaacaatattttactgatcacaaaataagaacagcacagagaaaattaggaatggtgaaaagaaatgctcttcacaaataaatatattttttgccagtaaaagaaataaccttgaagtgaacatttggatggaaaatctagtcaagaaccgaacttgaggaggtagcagagggtattgctctgggatagcaaaggcaagctggaagacaccaccttcataaggagtctccgagggtcccttgatgagag

SEQ ID NO: 8060 - DNA, 1219 bp, Setaria italica
  Peptide Sequence Number=SeqID_74034
gcctcttggaatttggatgatttgagtgcttctgttttagatactctgtagaacaacagccccccttgtaggccaccaccaacttctggttctcttgtaccttatgatagacggatagagggccgttttgctctagctgtcgaaaatgaagtttttcgccaacaagtttgcaaaatggagaataggacacagccgatcagtttaaaagatgcgaggtttgagtagacaaaaggaagaaatacagtaggccagttgcagatggtttcttataccaagacaaacaccaccgggcaattccctagcatcaaattcaaccaagtggtcaataaacagatacaacacaactccagacacagttgacgacaacatcagagctttgatgaaggcataccccatggcctcacatgttacatttacatcatgtcagcgttattagtttttctttggcattgcagcaagctttgtatacatttttgccattgattgaaaacctctgatgtcgccagatcgtaggagattacctgagtcacagttaagtgggctgtctggctccggatgagccatcagtgcaattatggctctacaaactgattgaagggtccatgcagggctccatgcattcttcaagatatccaagcaaatttcaccagtcttgaagtgaacatttggatggaaaattctagtcaagaaccgaacttgaggaggtagcagagggtattgctctgggatagcaaaggcaagctggaagacaccaccttcataaggagtctccgagggtcccttgatgagagcagtccacttgaatatgtttgaatcatcacatatcaactgaatatcaggatcagctgatttctctcgctgcacctccttgtactccttgaaaagcctagctcttgatgcctgcatatttcctcttctagaataacaacaaatttggtatcccaaagatgtttgctgaaaactgatggaccgcagagcacctgcggggacgaccccgccgcctggatctggcaggggggaggacggacggcgggtcacgcagtgaggcggggcggggcggggcggcgcgggtgcaggacgccgctccggattcggcgcgtgaggcgagcgggcgggcagatcgaggcggtgacgtgaaggaggagccggaggcgaggaggattcctgccgtcgctgtcgatagaaggccaggaccccaaacgacttacgtttactacaa

SEQ ID NO: 8061 - DNA, 636 bp, Setaria italica
  misc_feature (1)..(43): n is a, c, g, or t
  Peptide Sequence Number=SeqID_74035
nnnnnnnnnnnnnnnnnnnnnnnnnnnnnnnnnnnnnnnnnnngtcattctggtaaaattattatcatctaataatgccacaccctctatatttgagacattacaagaagtttgagatgaaatcaacagcagtgttgcaacctcaaatgaaatgaattagaatgcgcatcagaagcacttgcagaagagatacatacaattgccaaggagaaacttctgagcaacaccaccagaaagatgctgctttatgaaagttagacaaactatattcaaccagagcagttgttttctggttgctttatgcagggcttttgtccaacttccaagaaaaggttcttgcagtgactttccattgtagagagactctgaaccacaccaacctactggattttcctcattgcttctcagcttgggagactgccttgtttgaaacaattgtcctttgctccaatataagtactcgcctgctggccacagaacttgctagaggcaaggtaggcaaacagaaacaggggtacagatccaagcaacagatctctccctcaacttcgtgagcagcatcgagcaaaatggacaacagcattcctcagtcacaatgttgtcttcgtcgtaagaataggttagtaggaaataaca

SEQ ID NO: 8062 - DNA, 2568 bp, Setaria italica
  Peptide Sequence Number=SeqID_74036
gccgaatttcaattctaatccacccattctcaggatctcggtgtatatctgtacatgcttattgtttcactgcctgccgcagccttaaatatcctctttctggaaagaaaaaccctaccccctttctttacatcggaccgatatatagaaggggtgaaaatggaaaagaaatcctctaccaaaattaaggaggaaaaaaaaactactgctacctacaacggagctggaagaaccaatctcacccgccgaatcacataatttacagacaaaatcttccgatctcatggctgtgcttcaaaatccagccactccgatgatttccagagagaattctcagcaaattttgcttcgaactcaaatcccctgcactgttgatcgaggctcgacggtagttgcccagccaatgagctgctgttttaccggatccccatggatgaagatgattctcggcaattatgtggaggcttctttactgcgcccaaaaaaagccctccaaaccatctccacatcgttgcaggtgctctggccttcgcatggaattcaggcggcatctccacccaatgcttactagccgtcttccacaaaaattctgccgatgaagtcttgaaaccgcttcgagtagagcttcgggtccacagcagagatggagttgggatcagtctgcaatgacttgtaagcatgctcaagcttctttgtgatgtcgtaatcctggaggatgtcgattatcccgaaatagagaatgacatcgtgcacttcaccagtctggtttgggaacaggaatccaccgccagtgaagagatacgggtcgaactcgcttcttctggatgcttgctctgcccgggctggcatgtgtgaacccagtctaatcaaaggtttccggcggcaatcaggcatcatatcaaaatcatcatctgagaagcaaagctctggtgtgccaccaccttgaaatgactcgctcttcgttaaaagctttggagaagcagtaaaagtagatgatcccatttttgaggcagagatgtcatcacaaaagtgaactcctaccaagaagctataatccataatcccttccgattccaaaaaattgcagtctcgcctcagttgttcatgaagatcagtgtaccaagatcgctgcagccgaaagacaaagttgaggtccaagtctttcagagtggtggtctcatcaatctcatcatcaaacttgtctgctgttcggccataggatgaacctttcaaatcaaaacggcgatgaatccggtattccgaacagaacagattgcccatgacaataaatcggaccttctgtccattaaaaggcttcacacagtgtacaccatagaacctcgtgattaaagagttcttgtattgactgacatgttggtagtagctatttaacattcgaattagcagcttgacttctgatttcctcactgttttaatcatgaagcggtcatcttgggtaaggtaaaagaagctcccactttttccgggtgaagacagctccctcagagcatcattgccacagatggcaagcatgtaatccgctggatcaacagcgaacaacttcctcaaatgcctgaacaccatggggcagtagtccttccaccggaactccgcagatgaatgtggtggcgtaaccttcgagccctccggtgggaacttcgtccagaacttctcctttgggtcaaaatctgcctgaataagcgctcgcatcggcactgctgcagattttcccaccgaatacctgatgcccaattgcagctgcagcatgagctcgtaattcttgtgtcccttggagatagtctgcccaggtcgcttactctccggcgtggtggccgccgacgatgcccagcgtgggactccgctggctgctcgccgggtactcctctggggcagtgtccgcatgtaggttgctcctcctgcgacggcagcagcctccttgtagagcatggaagcctcgagcgcgtcgacgatgtcgcaagtgatgtccccagcttcgccctccgactcccagatgcagatccgcggcgccgccttctcccccacaccctccacggaggacctcttcctgaccgtaccagcagcccccgcgccgaccggcgggaagaaggtgccgcttatggccggcaggtcgacgcaggtccctggccatgagccgacgtagcggctgccgtcgggccacgtgaagaccccggtccccctgggcacgccgttctcccagaccccgtcgtagcggctcccattggcccagatcagcacgccgcggccggagagcaccccggcgcgccactccccgacgtactggttgccgttggcccagacgtagcggccgtggccgtcctggaggttgcgccgccactggccctcgtagaagtccccgttcgcgtagctcttggcgccgacgccgtggcggcggtccgctacccacgcgccgcggtaggtggcgccgtcgggcccgacgaacgcgccctggccctcgatccggccgccgcggaactccccctgaacgtggccccggaggccacgagaaccggcccttcccggacgccttgcccttccgccactccccct

SEQ ID NO: 8063 - DNA, 235 bp, Setaria italica
  Peptide Sequence Number=SeqID_74037
agcagctgcgcgccggccaccagagagaaggtgcagaggccatcaacacgtacggagaaggcgacgatggcgtcgccactgccgccggtgtcacaggtctccggctgcagggcgtgttgcgttccaggatgcgcttcctcgcagctccgccgccgccggtcgctcaaggcggctgctggcctcccggccgctggaaccagcatcccgcggccgcggcagcggctggaggtcgccg

SEQ ID NO: 8064 - DNA, 392 bp, Setaria italica
  Peptide Sequence Number=SeqID_74038
tctggcacttaagaccttctcattcttctaccttcctacaccagcagctacacggcgcaacaattcatgcctgctctctttcttttcagtctggcagagaagtccaacaacctgaacatgtggaggacatttctttgttagatgatctagcactgtctgtttaattacctcaagaagagatttgcgctcatcatctgcatccttctgtgcaagttgtatcatgtaatcaagtgccataagaaatcctgactccatctcatccaccctcttcccaataactccttgtgccaccagctctacagccactggctcaaatgcaccatccatctccatgtcctccatcagcgtgagcatcctcctggaggacggaggcgacctgctcgccgccgcgg

SEQ ID NO: 8065 - DNA, 654 bp, Setaria italica
  Peptide Sequence Number=SeqID_74039
aagaacttgaggagatgatccgctctaaagaggcgcacacaaatgcagtaatccttgagagttttgcagatattccagatgctgagattaaaccacctgataatgttttgtttgtttgcaaactcaatccagtaactcaagatgaagaaatatacactattttttctcgttttggaactgtgacatcagctgaaataattcgtgatttcaagactggagatagcttatgttatgcttttattgaattcgagacaaaggaggcttgtgaacgtgcatatttcaagatggacaattgtcttattgatgaccggagaatccatgttgattttagtcagagtgtttcaaagctatggggtcaattcagacaaagcaaaagaaatgcgaagaaagatgggtgtttcaagtgtggtgcccctgatcacatagccaaggattgcgaccaagatggtgaccagaaaaacaaagggcaaaactatgttctgaaagatgaaaatgcacagcgtggtggaaatcaccgtcgaagctatgatctagtctttgacgaagatgatgctgattattctgataagaaagatcacgatcaccacgaggtggaagctctgatcttcgatcatcatttctttggatcttttcttctgttggccatttttcgtg

SEQ ID NO: 8066 - DNA, 1125 bp, Setaria italica
  misc_feature (1080)..(1125): n is a, c, g, or t
  Peptide Sequence Number=SeqID_74040
tattcgtaagtattctagtagtctttcctaccttcgttggttgtattcgttgtattaggtaattaaccgttgtagtagtaactttactagttgtattgtagtaaaggtaattctaggtcgttggttaaagtacgtattgtattaggtaacagtagtcgaatcagaagaaaacagaaaggtttcaagtgtggtgcccctgatcacatagccaaggattgcgaccaagatggtgaccagaaaaacaaagggcaaaactatgttctgaaagatgaaaatgcacagcgtggtggaaatcaccgtcgaagctatgatctagtctttgacgaagatgatgctgattattctgataagaaagatcacgaaaatggccacagaagaaagatccaaagaaatgatgatcgaagatcagagcttccacctcgtggtgatcgtgataggaataaccgtgagagaacttacagtgatgagaaaggaatcaggcgtggtaaagacgatgataggaacagagggggtcggaaaaatgatgactacagatctggtgatcgaagctctagtagatatgatgatcgtgattatagcaagcgccatagcaggaacagaagcggagatgatgaagatgattacagactaagggatagatcggatggtgagcggcaccatagagatgatgggtacgaaaagagagatcgccatcggagagatgaagtcgaccacaggaaaaggagcccggaaagtagacgtagagaagatggtgggcaccgcgagagaaaccaacactctgatgatagatcctataaggagaagaggcacagagatggtagatagatttatgtgcgactgttggttttgtgatgcctgctttacactgatgtcaacatgtattccttagctcaaaattttctgtttagtcaatgtaacagttttgagtgacgttgaattttgtagcgtccatgtctcattagaccttcctatgttgtacagcatttgctggatattttgttgctgtgcggactcaaatttcctgtatagttgtacgcttattgtatcgtatgattcgctgcatagcaatgtaaaacgttnnnnnnnnnnnnnnnnnnnnnnnnnnnnnnnnnnnnnnnnnnnnnn

SEQ ID NO: 8067 - DNA, 139 bp, Setaria italica
  misc_feature (9)..(9): n is a, c, g, or t
  Peptide Sequence Number=SeqID_74041
tctctctgngataggttgggaacctcatagccttgaccgcttcattgtgcatgttgaggcagaaagcaatcctggagttgaatgcaatctgcctccacattgcaagtggctgcgcaaggccagctaattagaagtcgtc

SEQ ID NO: 8068 - DNA, 647 bp, Setaria italica
  Peptide Sequence Number=SeqID_74042
taactaatttagtctaagttggtcttgtcgtctaaaggtcctagtcttaattttagtaagttcgttctattcattccttcttcggccatgtgcttagccaattcttcctcctgttgaagcctctcacggcgcttctcagcactctccttctccttgtgagagttagggggaacctcatagccttgaccgcttcattgtgcatgttgaggcagaaagcaatcctggagttgaatgcaatctgcggctcgtttgttgagtagacatcaccagtttcctttgacaccatccagccatttgcatgatctatggtggcgtcgattgcgccatctctgatggccttggctacaatgctctcggcatcagcaacagggttctcggagtctagtcttagcttcttagcaatatcagcaagggagatccttgagtatgaaatgctgatgttgcgcagaccagttcggatgacattgtggcgcagcctcacaatgaggttgcgagtcctgtctgcactgaatgtgcttgcaaatttgtctgcgacagccctgaacagttccaggtcccccaccctgacagcctagaggcaacaatacaagtttagagtttttccgcttatttgtaacatagagttcaaacaatgacaagtttacttt

SEQ ID NO: 8069 - DNA, 1969 bp, Setaria italica
  Peptide Sequence Number=SeqID_74043
atcggcagaggcagaaaagggccagggagctccaacgcgaacatgactttgagtgctatcgtaacgaaacataccacaagacgagacagaggtaacctactcaaaatacaacacacacaagtcacaaagcccgaatgggaccaaaaggaatcatgaaataaacatagccggttcttgcgcattgttggcaaattctcaccatttccaacaattcagggtgggcgaaacgtaatgagcctaccagtacctggtgcacatggagttaatacaacataaagttacagcggacgaattcaaactttaatgtctgcatgactcgagtagacccagaggcggaggaattgcttttggaaccgatctcaaattgaacaactccacattgcaagtggctgcgcaaaggccagctaatttagaagtcgtcatcatcctcttcggccatgtgcttagccaattcttcctcctgttgaagcctctcacggcgcttctcagcactctccttctccttgtgagagttaggggggaacctcatagccttgaccgcttcattgtgcatgttgaggcagaaagcaatcctggagttgaatgcaatctgcggctcgtttgttgagtagacatcaccagtttcctttgacaccatccagccatttgcatgatctatggtggcgtcgattgcgccatctctgatggccttggctacaatgctctcggcatcagcaacagggttctcggagtctagtcttagcttcttagcaatatcagcaagggagatccttgagtatgaaatgctgatgttgcgcagaccagttcggatgacattgtggcgcagcctcacaatgaggttgcgagtcctgtctgcactgaatgtgcttgcaaatttgtctgcgacagccctgaacagttccaggtcccccaccctgacagcatttgtgagctcaaaataaggtgtcaaagctttcttcattcctttctgcatgaaaacagtcctctctggaatctctccaagaagtagcctcacaatgatagcccatttgttgcactgaatacgaaaaccacgagctgatgtgggtgccttccgagcagcttggaggaggctttctttagcatcagtgtactccaactgaattgtcctaatcttacccaagtagaacaagtatcggcagaattgttggttggaatgagcttcaaaacgaggtgcctttgatctaagtttttctgcctgatcatacaggttgtagtggaggtaattgcggaggaggagattgagcagagtttcctggccaagctcgtcacggtgcaaagttgccatcctgtgtaatgcgagcagattcccacggatttcagcaagactgttggtaagctcatacacataggagtaataaaagtacagacgagaagccaaaacatcaacagttctccggttcaagttcttcagacgagcaatgctcgaagttgcacatgctttagcctcgtcatatttcttttgatcaataaggaaaatcaggacaagcaagtagcaatatatttcaatttcagggagaccatgcttgattgaaatctgtgttgccggagccgcagcatcaacatccatctcagtatcatcttccttgggcaccagggcggtgaggcgagcgtaggcttcagaggacgcggggagcgcgaagccgaggaaggcggagacgtcccgcgcggcgaggcggcggcggagcgcgacggttaggcggacggcgcgggagatccggcggacctccttggacagggagccggcctcgatgacggacgcgatctccttcagatggtggagggtggagagcgccggcgccgcagcggcgggagttggggccgccggctggggctccgagtcgttcatctgcacgtcttccggcatcgtggcggcggcggcgaggaggaggagccgacgaggaggatgtgtggtgtggtggcggatcggtgaggcgagtgcgagtccttt

SEQ ID NO: 8070 - DNA, 533 bp, Setaria italica
  misc_feature (481)..(533): n is a, c, g, or t
  Peptide Sequence Number=SeqID_74044
actacgcttgatcagccacagttgaacacctctgcacttcttctaatgtttcacatgcatttggtttgtcctacacagggtaatttttgcactgtttcagcgggatcatacaaacttgtgtgggacaactcatattcgtcattcttcaaaaagagcctccggtacaaggtggatgctgtgccaccggttgtcgagccggccgtgcccgccttggagccctgatgaggcctatcttagtggttctggcgattcatacacgtagctttcacagtgtgagtgcaagatatgtactctgtgcacatggttacggtcactttgcccactgatgaatgcctaattctataccagaaaagaaagtgtttactgtagctacgattgagagcatccgtgtctcattggaagttatggaggtgctcaactgtgcaacatatgcatctgatttggctaccagtaattgaattaaataaaacccaaaaaaaannnnnnnnnnnnnnnnnnnnnnnnnnnnnnnnnnnnnnnnnnnnnnnnnnnnn

SEQ ID NO: 8071 - DNA, 421 bp, Setaria italica
  Peptide Sequence Number=SeqID_74045
catgggacttctccttgcaacaaggggccctcaacatggacattggatttcatgtggagtacattagcccttcaggggaaaaaactgtaagtttcttgtttaataggatttttttttggggaagttgttcactaggatttgatactcagttcataaatgaaactgagatatccaaaagacatcttcactgttcatggacgttgataggattaatcctattttttatagcactgtgtatagttttgtggttttacaaaaaatggtttgattgttatgaggggtctcttgtcattttttaccgcacagcaagtatgtgtttgcctttggtgttctatcgtatttccatcacttggagcattctcttgtttctgataagccactatggaagatctgtttgtattggtctatttggttcttactt

SEQ ID NO: 8072 - DNA, 2153 bp, Setaria italica
  Peptide Sequence Number=SeqID_74046
cttatacatggagaaacaagaaaagaaaaatctaattaggggttgattggaccaaatgaaatagttcaggggagtaaggtgagcctaaattttgttcgtggggttaaacggacaaagtgaataggtgaggggggtaaaatgaccttttccttttttatatgttgtgtccaatctatttaaccatgtttggctatgtgttatccaattgtactagtgaaagaattgcattgagagacaccttttatttctgcatagtgtgagtgggtgggtgtgtttgtgtgactactcatgtgctctggttcccttagggttaggataagttaagatacgaccaattggagatatgtttagatatggttggataggattagactggatcctgcttacgggtcagagtcatcctctttatgtaaagggaggagttgtaccaatcacaatcaagcaatgaagaatgactgcccataacagtaacagaagagcggtaaaaataaacagaacaaactttcagtgcaaagtgaaacgaggccatctattaaaaaactcagacggtggggaaaggccatcccacggtatttcactaagaagctctcagtcaaccgaccgagagaaggacccaaaccccggcttcaccctggtcacacctttaccttggctggcgaccactgccactacacctgtagggctgcaatgttaccacaggccagcgccctgccagcgagggaacttttcttggtgccaccagggtttgctggcagctccctcacttggggtgttaaatcctacattataaaagggatggctaaaagagaccatctgtttgtggaaaaaaacaaactaaatttgtaaagcattcccaatattgttccacacaaaatcattgggaactgccttataatggagtttgttttacttggaccaacattttgtttattgtaacaccccatcctacaaagccacaccgcctagaccttccaatgggcgagcccgcatacacgtaacaccctacttacactttctcgctcgcttcgtgtaaaaggtcaacccgaatgtgctatagttggaggacaaaggtttgtaagttggctccacccttgcttaactagcaaggtggtacttaaataaacatgcgcacttgcgctcatgggccattactgggccttatccgaattgggttgggtgtcacatttacctctgacctgtgttatttcctctggttttacagaactatgttgtgtctattattttattagatacctacagttcacaagatggcatgatctcttcttttttcatggctgcttctcaaaaagatctcattagttcatagtgtcaattatcgtctaatggaactgtatgtattgtagctaattcttccctaccgacggtatgaagctgaccaagtaagttttctttcctggttgcgccttttcttggttcagatattccattcatggattgacaaaatgggtccaatggataatgtttgaattggtgggatgtgccaaaagcttttcgttgaaaaccgaaaaaagtagatacatcctgagcatcattgttttcattaatagaagactgtcatgcatacccagatgctgcctatagataacattacatattagaattctgaaatgtatggtctgttattgttgaatatgtttaagttgtcgaaatagtcgagaaggatgcagtgaggttaaccttcactatgtctcgttgttgatgcctacactagttgccagtgactcccaaggatggttttaagttcccctaaagtcaaagtttctccactcaatactacgcttgatcagcccacagttgaacacctctgcacttcttctaatgtttcacatgcatttggtttgtcctacacagggtaatttttgcactgtttcagcgggatcatacaaacttgtgtgggacaactcatattcgtcattcttcaaaaagagcctccggtacaaggtggatgctgtgccaccggttgtcgagccggccgtgcccgccttggagccctgatgaggcctatcttagtgtaacgcgatgagggctgattactgttatggattagatgtgcagatgcatcggaagccccacacggtgttgtaaccaattcttttatcgcaatcgcagggttctggcgattcatacacgta

SEQ ID NO: 8073 - DNA, 1909 bp, Setaria italica
  Peptide Sequence Number=SeqID_74047
caaccatagcagcacgttcatttcacgtgcccccttctcccttccccttacccccacgccacctcccacctccgttcgccgccgccagccgaccagctctcccgccgcgccggaagatggcgacgacggagggtctcgtgcccatcacgcgggcctacctcgcgcgctactacgacaagtacccgctgcccccgctgcccgacgccgccacggacctcgccgcccggctccgcgctctctccgccgacctcgccgccgttgctcccatcacccccgatgaggagctcttgaaacaagaagcagctggcatacctgcccacaaaattgatgagaatatgtggaagaacagagaacaaatggaagaaattctgtttttgctcaatacatcccgtcgtcctgtggcacttcaacagaagtccactccagaagacactgagatagtttctaaacttgatgatattgaagctaaattgaaggacatgttgaagaagttagaacaatttcagttgaaaaatgctgacaatgttttcaatacagttatgacatatatgccccaagattttcggggtactctaatcaggcaacagagagaacgctcagagaggaataagcaagcagaggtagatgctttagctagtgctggcggaagcattcgtgatcgatatgcattgttatggaaacagcagatggaaaggagggtgcaattagcacagcttggttctgcgacaggtgtatataagactcttgttaggtatttggttggtgttccacaggttttattggattttattcgacaaataaatgatgacaatggacctatggaagagcaaagagaacgttacggcccagctctatacacccttacaaaattggtgctcgcaattcggttgtatctgcatgtctctttggcacgatatggacaaaggaaaatagacaaggatgacattgctgtgctgcagcatgctgtaattatatacaccgaggagtttgtgaagttcactgaattcattggcgaggtttttgtgaatgcaccattctttatatctgctgaggatgcaggtgctgcagatgcaaggaaaagtgatgaatacaaagaaactattattccagctggaaagactcatgaggtcatcttgagtgttgaagccataaactcatacattgcatgggacttctccttgcaacaaggggccctcaacatggacattggatttcatgtggagtacattagcccttcaggggaaaaaactctaattcttccctaccgacggtatgaagctgaccaaggtaatttttgcactgtttcagcgggatcatacaaacttgtgtgggacaactcatattcgtcattcttcaaaaagagcctccggtacaaggtggatgctgtgccaccggttgtcgagccggccgtgcccgccttggagccctgatgaggcctatcttagtgtaacgcgatgagggctgattactgttatggattagatgtgcagatgcatcggaagccccacacggtgttgtaaccaattcttttatcgcaatcgcagggttctggcgattcatacacgtagctttcacagtgtgagtgcaagatatgtactctgtgcacatggttacggtcactttgcccactgatgaatgcctaattctataccagaaaagaaaagtgtttactgtagctacgattgagagcatccgtgtctcattggaagttatggaggtgctcaactgtgcaacatatgcatctgatttggctaccagtaattgaattaaatccatgaaattggagtcaaattcataaaaccccaaaaaaacaaaaaaaacaaaaaactttaataggatttttttttggggaagttgttcactaggatttgatactcagttcataaatgaaactgagatatccaaaaag

SEQ ID NO: 8074 - DNA, 1414 bp, Setaria italica
  misc_feature (1381)..(1414): n is a, c, g, or t
  Peptide Sequence Number=SeqID_74048
ctcgcgggcccaaaaccctaagacccgcggactccttggcggcggcggcgatggcggacggcggcggagaaggggtttcgccgtcggcggcgctcaaggatcaggggaacgagcagttcaagtcggggagctacctcaaggccgccgcgctctacacgcaggccatcaagctcgaccccgacaacgccaccctctacagcaaccgggctgcagcttttctgcagctggttaagcttagcaaagcacttgctgatgctgagacaacagtcaagctgaagccagagtgggagaagggtcatttcaggaaaggttgtgttttggaggccatggagcgctatgaagaggcaatatctgcttttgagatagctttacagctaaatccacaaaatacagaagtctcgagaaaaatcaagaggctttctcagttggcaagggaaaagaagcgagctcttgatgtagagagcatgcgttcgaatgttaacgttgggaagaacttagaatcactgaaaaccgagttggctgcaaagtatggagatgtagaaacagggcagagtatcttttcatttgttgttaatgtgatagaatcagcaatcaaggcttggcatgacacaggaaaagtggatccaagggtcaattttcttctcgatgatcagaagactaatactcaaaaatatgccccagtggttaacgttgacaaggcctttgagtcaccccaaactcacagtgaatgcttcacatttttgcggcaatatgcggaggattcttttgcgaaggctgcttgtatggtggcacctaagaccatcatctcctatccacaggtctggaaagggcaaggatccagaaaatggaagcttgaccagagtgatgggttctttgtacaatttgaatcaccagctctaaggaagatatggtttgtgcccagcacaaaagaaaagggtcgaacattgtgcaggagccctgagaccttggacatcggcatccatgaggtcatccccaggatattcaaggaaggcgaccctcaaacctgagaggcaaatgaacaaggctgaacttgtgattggtacccggctcggctgaaatggcagggtgtttctgggaatggtaagaagagggcgctccaaactctgtaacaagtggaatcgatctacaaggggttttctgtgcaccgagggacccaaaaaattttgctgctcgatctgtgattgtcgctgttgtctttcctgtgtgtacaaaaaagcctgcggttgtgctgcgatttcatattttccattgattgaatccggccatttgatttgttaagaacagcgaggtacccgaagggaggttggagatgttttctatgtatcctttagaaatgaatggttaatggttagaacttttnnnnnnnnnnnnnnnnnnnnnnnnnnnnnnnnnn

SEQ ID NO: 8075 - DNA, 595 bp, Setaria italica
  Peptide Sequence Number=SeqID_74049
accgacgccgccagcggcgacgaggaggccgtgatgccagcgtacaagaggagggggcggccgcagaagcacctcaaggctgacgacaccgacgaggaggagcaagacagtgccaaggtcgagcccatggaggacagtgacggcgtcaaaccggccgtgccgggcaagggctcggctgagaacggagggaagaagcggaggcgtcggcaaccgaggaagcgaggctgcgacccggcggcggaggagaaggacgaggccgtcaagcagagcgggttccggcaccacgggagccggcggaagagcaccccgcggcgagcagccgaggcaggggtggagtgcaagtgaggctcctgattggattggattagccatgccactatgcgagctatgacggattgcattttcgtttccttttcatttttgtcatgcttcctgttgtatagatcaagcgtcaaggagttgctgattcggcatgagcatgctgtgactctgcttccatcttattgtccaggactctgcttggatcattagtggtgcctatttcttgtaggtttggactatgtggtgcttaaactttagctaaagtcacatcaaa

SEQ ID NO: 8076 - DNA, 514 bp, Setaria italica
  Peptide Sequence Number=SeqID_74050
tgtacagcatttacattggacctagcagatgtgtctagagtagacttgtttgggtggacaacagctgctccactgcgtgttaaattcagaggaccattaacatctttgtccaatttaaggtgtgatggaccagtatggggtagggcaacacctgaggagttggcaactggttttacaggagatgatcctggtggcttcaagacaactggtgatgttgaggttaatgggctagtcgcagctacagctgcaacttgtgggttcctaggaactccaacaccaaacttagaagctccattgaaaccatggaactcagccattccagttgagacagcagtttgaggtgtgctaactgttggttgcactggagcttccttgacttcttccatcttgcgcttagtgagcatgagcctatcggcgatggatgccttgggcgggcggaaccccatggcggcggggtccttggcgcggttgaggccgagatcctcgacgaccgctcgcaccgcctccccgggga

SEQ ID NO: 8077 - DNA, 811 bp, Setaria italica
  Peptide Sequence Number=SeqID_74051
cgccagtgccagaagtgtcccccatgttgccaaacaccatggactgcacgttcacagcagtgcctttcagaccagtgatctggttaatgctcctgtacttgttggccctggggctgtcccacgagttgaacacagccaacactgctagctcaagctgcttcttgggatctgagggaaatggctcccccttggcttcgacgtagacctccttgtactgagccaccagctctttgaggtcagaggcagtcaggtcattgtcgttcttcacccccttggcttccttcatggcttcaagcttctcctcgaacagtgcgtggggaatgtccatgacgacgttgccgaacatgtcgaggaagcggcggtaggagtcgttggcgaagcgctcgccgctcttggcgccgagcccggcggccacctcgtcgttgagtcccaggttgagcaccgtgtccatcataccgggcatcgacaccgcggcgccggagcggacggagagcaggagcgggcgctgcgggtcgccgaggcgggcgcccatttcctcctccacccacgccaggccgtcgatgatctcgtcccagaggccctgcggcagggagcgcccgggcctcctggtactgctggcaggcctccgtcgacaccgtgaaccccggcggcaccgacagcccgatgctcgacatctccgccaggttcgcgcccttgccgcccagcagctccttcatcgtcttgttgcctcgctcttgcccttgccgaagtggacaccctctgcgaggccacacattgagcggcgccattgctgctgttagcacgagcacac

SEQ ID NO: 8078 - DNA, 346 bp, Setaria italica
  misc_feature (333)..(333): n is a, c, g, or t
  Peptide Sequence Number=SeqID_74052
caaaacaaacacgcgcggacgcagtaacaagtccgccacggatacagcacgagcacgtctccccctcccccctcctctcttcttcgccgttcgggtttggccgttgcggagcgagacaagccaccggccccgccccgccccgccccgtcgccgcgcgcccctagggtttcgatggagcccgcttccccgtcgacagcgtctcctccggcggaggaggcggcggcgaggcggaggttgccggaggagctgaagctccggcggaggacgctggagacggtgctggagcagtgccagcgcacgctcgagatgatacgcgaggccgatctgggggancttgaggaggggg

SEQ ID NO: 8079 - DNA, 720 bp, Setaria italica
  Peptide Sequence Number=SeqID_74053
aggttgctgcactgtcctagctcccttgggatcggtccagaaaataaattctccccaaggttaaccatttccaaactatgacaccttccccagttggttggcacatttccttccagcccagccctcggcgcccatagcaccctgagcctcggcaaagctgttacactctctggaatccctccttcaaacagattgagctcatgcgaattcattgaattgaactggctagacaatacaagaaccgacaaatctgagcaattacccaactcctgtggtataggaccgctcaatctgttactcgagacatctagaacccgcagcttggtcagccttccaatctctgctggaacagaaccattcaacaaattcgagaacaaccgcagtgagaggagctgcgcgcaattccccagaccagtggggatactcccggcaagaagatttccggacaggtcaagccacttaagcttgggcaggccgccaagagctccgggcaccgatccagtgagccggttgcctgaaagatccaacctttccaagtctttgcaggtggaaagggaagatgggatctcaccgtgaagcaggttggaagcaagggtgagcactctcagccgcggcgggaagacggccggaagggcgccctggagagagttccccgaaaggttgaccacctcgagcttctccaacccccagatctcaccgggatctcgccgcggaggccgt

SEQ ID NO: 8080 - DNA, 600 bp, Setaria italica
  Peptide Sequence Number=SeqID_74054
gattgagttgacacgaaaaaagtgatgatgaaatcgatctgaataatgtacttcttgatacaatcttcgtccaatcttcagaatctaactattggatagggagatgggattcactttataatgtaccgcttccttctgcgtgaagcaggttggaagcaagggtgagcactctcagccgcggcgggaagacggccggaagggcgccctggagagagttccccgcaaggttgaccacctcgagcttctccaacccccaaatctcacaggggatctcgccgcggaggccgtggaacggaaaagagatctctttcagctcggtgaggagcccaacggtcgcgggcagctcgccagcgagctcccggccgggtacggagcgccgtgaaggggagggcacctccagagcgacgacccgggacctcgcgtcgcaggtgacctccggccaggtgcagtggtcggcgccgccggagtccgggtaccgccaagatctgcatctccgggccacaagccaggatgacgagctctccggcggcgcacggttggggcaaaccggatcgaggcggaatactatctgaagcgtcatagctaggaactatctataaa

SEQ ID NO: 8081 - DNA, 278 bp, Setaria italica
  Peptide Sequence Number=SeqID_74055
agcatatgacagggcagccattcgcttcaatggtcccgatgctgttactaattttgattctagttcctatgatggtgatgttccactgccacctgaaatcgagaaagatggtactcttggaacaatatattttagttctgtccagtgtccactagaacaaatgaacaatcctctacaaaatcttatcagtgttgatttttcttagcagtggttgatcgggacatccttgatttaaatttgaggatttcacaacctaatgtgcatgatccaaaaaagtg

SEQ ID NO: 8082 - DNA, 868 bp, Setaria italica
  Peptide Sequence Number=SeqID_74056
aaggtggcagtggaacatcaccatcataggaactagaaagatgtggttgatcgggacatccttgatttaaatttgaggatttcacaacctaatgtgcatgatccaaaaagtgatggtatcctgactggatttggatcaaatcgtgattctcctgaagcttcaagttcaattgcttctcagccaataagacctcagtggcttgtgcatccccatagcacattgggttcaccccagcagccacagttgtacgcatctcctccagggttctttgtgaacctcagggaggctccaggtatggagaactaccggaccgttgagccggcccctcaggcgttccctccttgggcatggcaaatgcagggctcccctgcgccgttgctccctgctactgcagcatcatcaggattctctaccgccgccgcagcggccaccgccggcgtgccgccgccgccgttaggccccagcccgttcgccggccgccaccaccaccagctccgcttccccccaaccgcctgacaggtcgcctccccctgcccaactggagacgggcgcctagcctgaccggtggccggtgaccgtccaatcttcactggtccgtcacagtggcggccattggttgggggatattgggagaggcagaggctccctccaccgtgtgggatgatctctctgcctctctcccgggctggtggtagctatcgtgaatcgtcgaagcttatggttcactttccaaaataaaaaaagaagcttatggttctcccaatcttcctttgagggcgcgtgagcgtgtaccagcaaaaaagaaaaactttgatggaataaataaaccatatttatgatacttctttggcaggctgagagtgcccaa

SEQ ID NO: 8083 - DNA, 1280 bp, Setaria italica
  Peptide Sequence Number=SeqID_74057
tgtcttcgcagttacaggggcgtcaccttctacaggaggaccggccgctgggagtcgcacatctgggactgcgggaagcaggtgtacctgggtggattcgatacggctcacgccgcagcaagggcatatgatcgtgctgcgatcaagttcaggggcctcgatgcagacatcaacttccatctcaaggactatgagagtgacttgaagcagatgaggaattggaccaaggaggagtttgttcacatactccgacgtcagagcactggctttgccagagggagctcaaagtaccggggtgtgactctgcacaagtgcggccggtgggaagctcggatgggtcagcttcttggaaagaaatacatctaccttgggttgtttgacagtgaaattgaagcagcaagagcatatgacagggcagccattcgcttcaatggtcccgatgctgttactaattttgattctagttcctatgatggtgatgttccactgccacctgaaatcgagaaagatgtggttgatcgggacatccttgatttaaatttgaggatttcacaacctaatgtgcatgatccaaaaagtgatggtatcctgactggatttggatcaaatcgtgattctcctgaagcttcaagttcaattgcttctcagccaataagacctcagtggcttgtgcatccccatagcacattgggttcaccccagcagccacagttgtacgcatctcctccagggttctttgtgaacctcagggaggctccagatatgtgacaatattatgctacagctttatagttttttccaccgtctaaattcttaataccagttaaatgagtaccttataacttagctttttattggtagcttaaaagttcacttgtcagatagttgcatgagaatttctgtacacgtttggtcattttgggaaccattctagacactataaaaaatatgcttgctgctggcctcttacattcttaactaaaactgcaaaccgtaggatatgtgtttcctctgtattccctgctaattaaaatcattgaaattggtaaaaaaaaagcctacaacttgaagaggtctgctagcaattttgatgtttatgtgcttattgcttaaaagatacttccaaagccataaccctcgtttgctctgattctactcgtgctacttgagacattaaggatctaaatcttatattggactcactggatctttttctgttgtagccaataagacctcagtggcttgtgcatccccatagcacattgggttcaccccagcag

SEQ ID NO: 8084 - DNA, 564 bp, Setaria italica
  Peptide Sequence Number=SeqID_74058
tcgttgttagtagtcaccaccccgccgcccgcggcgcccggccgtacttacggggtctagccctcgaacgggtcccgccgcttccacctgggcgcgctgccgtcgctgcccttgctctcgcggtcgcgcatcaaaaaggggttgtccttcaccacgcgccgccccgcaagctccggcggcggcgccggcgccttcttattggcaacctcgtccgccgcggcagcagcaggcgtcgtcgtcggttgttgctccttcttcttcttcttcttcttcttcttggccttcttggtcttcttcttcttgggagcagctggcggcggcatggtgtaggcctgctggttgttggagtccaggacgggcttcatgtcctccagggccttgctcacctcggaccacgacgccggggccagctcgtagccctccagcttgtccaggagtggcagcggcaccacggtcttgacggcgggcttctcctcttcctcttcttgttcttcgtcgtcggtttcttcttcttcctcatcctcgtcgctgctatcttcctcatcgtcatcgcctgctgctttg

SEQ ID NO: 8085 - DNA, 194 bp, Setaria italica
  Peptide Sequence Number=SeqID_74059
ggccatgtgccccgcccccgacgatgaccacgttcgctagggtgcccgacctctgcacgtaaccggcgagccggccgctctcgagccgccacacggcgcggtccgcgtccaggaacgcaggcagccccggccactccagctcccgcacccacgcctccacggacgccggcgcgctgtgcaggtcgaacacgccc

SEQ ID NO: 8086 - DNA, 531 bp, Setaria italica
  Peptide Sequence Number=SeqID_74060
caaagagcaaagatcgctaacctgaacaataccaatcaatatgccaatcatagatggctccaagtctgttctgcagatctggacgtgcgggtgggggtgaagttttggggggtcgtctgcgactccgcgtacatgcttcaaggagtgcaagcaccggaatgggcatgaacggcacctgttccagaacacagttctttctgggactgtatggaagtcaaactgttcacagcagcctaaaataaggccacggccagtcgctgactgtacacgctgatccatctgttcaacagcctgcacggcacgcaccctgcagctttggcactgcagctgagactgaaaggctgggagcttcagaaatgttttggaggctcggcgtttcacaccgcagccattggaacgagtaaaagaatggcccacttggaacggcatctcaacaggatcaggatcccggaacgattcgggtggagaggagcacgtgaagctcgtcgcatgcccaacgcgcggtacagcctgagctgagcccatccatcc

SEQ ID NO: 8087 - DNA, 1455 bp, Setaria italica
  misc_feature (1388)..(1455): n is a, c, g, or t
  Peptide Sequence Number=SeqID_74061
gggttgtgaagctttgacaagtgagctcattagcaaagttagccaaagtgacgcagaagcaagaggacgcgagccagagagagagagagagagagcaatggcgcaccaccagcaggggctgtacggccagccggccacccgcgtcgacgagtacggcaacccgatccctggcggccacggcagcattcagggtcaggccggcgggtacggtggcgcgggcaccggcagctacgacgccgggggctacggtcagcaggccgggtatggccccaccggaaccggcacgcacgacattggggctacggcggctccggtcacgcagcttacggtgctaccggaaccggcgtccatgatgccgggggcccgggagggtatggggccacaggcacaggacctcatggtactcatggagtcaccggaatccatgacgccaggggtgtaggcaacggtcgcaccggtgcgcacggagtcacggccacggggacccatggtaccggttacggtacgcacggcgccaccggggcgaccggagtgcacgacaccggggtcctgggcggaggcgcccacaccggcatgcccggagccgcgggaatggggacccatggcgcgggtcacggcgccacaggcgtcaccaccggaacccacggcgccgcaaccggcgcggcattccctcatgccgctgagcacaagacgggcggcatccttcgccgctccagcagctccagctctagctcgtcatctgaggacgacggcatgggcggtcgtaggaagaagggcctcaagcagaagatcaaggagaaaatgcccggaggccacaagggcaaccagggccaggcgacggctcccggagcatacggcgggacgactgggtatactgggccgaccggcaccggcaccaccggggggacgtacgctccgacgacccatggggcgcacgagaagaagggcgtgatggagaagatcaaggagaagcttccgggcggccacaaggaccacgaccagcagcacaccacggcgaccggcggttacgcgcctggccgcacgggaaccaccgacacgtacgggacgacgaccgaggggacacacgagaagaaggggttcatggagaaggtcaaggagaagcttcctggtcagcactgagcagcttccagcttccatgccgaaagaaagattgtgccgtgctagggacagaataaattgacgaagaataaagcggcagctctgtgtgtgtttgcattgtagtactggctaccgtaaagtgtgtgtgtttgcattgtagtggctaccgtaaagtgtgtgtgtttgcattgtacgtgtttccagtaagtgtttagtatcttgatactgtattccatcttgtgaaaaataaatcgtatccttcttttttnnnnnnnnnnnnnnnnnnnnnnnnnnnnnnnnnnnnnnnnnnnnnnnnnnnnnnnnnnnnnnnnnnnn

SEQ ID NO: 8088 - DNA, 249 bp, Setaria italica
  Peptide Sequence Number=SeqID_74062
aaggaggccgcgcccccggaggctccgcgggccaagcagccgcggagcgcttgtcgacgcggtggcggggcagcaagacggcgacgaccacggcgcggccatggccatggagacagacaaggtcgtaggagcagagcgatggaaagcgagcaagtcccggtggtgctgtgcgttacttaccttcggtttagagcgtgggaagttgcgggaagaagaagaagccgtcgcggggagcacgcgagatttcca

SEQ ID NO: 8089 - DNA, 697 bp, Setaria italica
  Peptide Sequence Number=SeqID_74063
gcatggctcttctcctcccacccgttcgccttcttccactgaccccctcgagagcaacagcgccaacctcgtcgccattatccattcgccgcacacagccaagagcccttccgctccctcccgtccgctgctgcgccagtcggacctcgcaccccgccgcctctgctagggaggctgccgcttcctgggccagcgagttcgccggcgttgtgccatggaaggccgcagtctccggcgcgctcgcccttgccgtctgcttcacttgctttgttggttcggccaacgccaggactggggtaaacaaaccagaattgcttcctaaagaatttactaccgtcattgatgtcgctggttttctttcctctggtcaggaaaaccgtttgcgccaagagatagaagacctggagaaggatacagggtacaaactgcgagttcttgcacaaaattatcctgatacacctggattggccatcaaagattattggcaggttgatgagcgaactattgtttttgttgctgatccaacctttggtaacataataaatttcaacattggcccattagttgatttagatatccctcggagcttttggagtcaggtttcagggaagtatgggaacatgttctactggaaagaaaagggagaggatgcatcaattgaagctgctgtgacggcaatatcacgctgtctaagaga

SEQ ID NO: 8090 - DNA, 435 bp, Setaria italica
  Peptide Sequence Number=SeqID_74064
tttttttttttttagttgacatcttttcattctttttatttatttagtgatttgaagtcatctttgtcattgcgccataactttaactttattatttacaaaaagtaatctgtaaatagtacctccggttaaaacatgctccggatgttgcaacaagtaactaattgcagattgaattattcgtcatctaattctggccagagggagtactatatcttgttcagatgactttccatgcttctttgggcgataagctcttgcttcctatagtacttccgaacaattatttgtcccgctggggtctcttagacagcgtgatattgccgtcacagcagcttcaattgatgcatcctctcccttttctttccagtagaacatgttcccatacttccctgaaacctgactccaaaagctccgagggatatctaaaatcaa

SEQ ID NO: 8091 - DNA, 971 bp, Setaria italica
  Peptide Sequence Number=SeqID_74065
ttccttttccttttgtggatttgttaccatagctgatgcatatggtcacgtacagttagttggcatcacatgcctgggtgagtgctttgtggtggagatgaagggttggaaggaacctacacctcttcagcttgacatagatagcaagagtattaaggatgtggagcctcctgcaactggaatgatcagcaaggagcttattgctggtccagacccacccatacttccatcttcgtcaagcctgaagtcattgacccctgactctattgaaggaaaatccacgcttcatcactatattaaggtcttccacgagtactatgtggaatacggacacaaggtcttcattgagctcaaggagcatgcagactatgtgaagacagaacttgaagacaaacagaaacgcttagaagcagtgaagaaatcacttctatccatagaaaccaaagaccaagacattaacaagaggatagatcgggccttcaaggtgtacgaactgttggagaagcggatagatagcttcaagatgcttcctgctgcaaataagaaaccattatctcaggcagagcaggagttcaaggcacaactagatagatttgcagatgtggagctggatgctttgcgttcttctattgctgccctgagcgcgaggatgaagcggtttgctcagcagcccgaaggtggtacagctggcacaggagtgatactgtggcaggctccgaaggcgggacgaagccatatttctgaatcccagatgtcgctgctgaaatcttcgctcgagaagctctcgatcctcaacgaagaaaacaatctgaagttgcggctaattgatcatgaactcaagaacaaggagcaataggtgatatgctgctgtccgaaggcaaaaaatgtagttgttgggcacaagactaacaatcttatggttggcaggtcttggcccatatgtgaatttcatagagacagtttgctatcac

SEQ ID NO: 8092 - DNA, 657 bp, Setaria italica
  misc_feature (589)..(589): n is a, c, g, or t
  misc_feature (606)..(606): n is a, c, g, or t
  Peptide Sequence Number=SeqID_74066
actacaagtagtagaagtaagtctaccctaagttccaacagccaacaaatggaggcaatgacgaagactagtgctagaggtgccaagggcaaggtggcaatggtctactccaagtacgtcaagccccagggcaactctgctgtaagtgttacacaccagctcaagccctctcctgtaggtgcagcagcaagcgcctcctacgtcgacgacatcgacgagagggcgtcggctttcattctggccgtccgggagcgcttcaagaatgaacataatatgtaggaggtgaagatgagtagaaactacaaagtccagaagaggttattatttacagcaatgtcttctggattgccatggatctaggtacaagtagggcagtagctcctgcagtccatggcctcatcttttcttcttttcctgttctgaactagttttacaagaaactggatggaaggaggactcagtgtagcagtttcatcttctgagcccttgttccgatatgtacggtactttgttgggctatcaagagcttcttaaggcctgaacccaatattaagcataatctgttaaccaaaaaaaaaaaaaaaaaaanaaaaaaaaaaaaaaaanaaaaaaaaaaaaaaaactaaagagaacaacgacaacaagggagtaggacaa

SEQ ID NO: 8093 - DNA, 523 bp, Setaria italica
  misc_feature (497)..(523): n is a, c, g, or t
  Peptide Sequence Number=SeqID_74067
gaccgtcgcgggcgccgctcctcgcgcccgccctcgccttcgccgccgggcggtggccggcgcgggtggccgtggccgcgatgttcggggtcaactccggcctgggatacctcctcatgctcgccgtcatgtcgttcaacgccggcgtgttcatcgccgtcgtcgtggggcttgcgctcgggtacctcgcgttccgcagcagcgacggggaggatctcgtcgttgtcgacaacccctgcgcctgcgcgtgaaggctctaccggatggggtcgccggcttgctgccccaggtttcgcttcgcggagacggagttgttgtataacacaggtatcataataaaaaatcatgtacaaattcagttgtgtgattggaggatttgcagtgttcatgtgctgtttgggggaattgtagagtaaagaatgagaaaaattgccttgtttcttctaacaaattgatgaattgattcctttctgaacgaagatttgggggggtaactnnnnnnnnnnnnnnnnnnnnnnnnnnn

SEQ ID NO: 8094 - DNA, 290 bp, Setaria italica
  Peptide Sequence Number=SeqID_74068
gtcctccaccacgccatcctcgactgtcgaagagtttgggcagccagcgatgaccatgggcgccgacgacaagcgcccaccgccgccgacgccgccagcgggcgaggagggcgccgtagtggcggacaaggccctgcacgcgctggggttcgagttcacccgcatcagcgcgggcgaggtcgccggacggctccccgtcaccggcacgtgctgccagccgttcggggtgctgaacggtggcgtgtcggcgctggtggcggagtccgcggcgagcgtcggcgcgtacatgg

SEQ ID NO: 8095 - DNA, 245 bp, Setaria italica
  Peptide Sequence Number=SeqID_74069
ctgcgtgcaggactactacgtctggcccatcacgccattatcaccggtacaggagattcaaggccgctgtagccaagtactgatgcatgcaattctaagggcagtacgtgtccatggggcaggagcaggaccccggtaggccactgccatttctataccagcatgccatattaagagccatgcactgttcttggagcaggttttcagtatcccacgtacagccagtcctttgtaattgtccttgt

SEQ ID NO: 8096 - DNA, 1642 bp, Setaria italica
  misc_feature (61)..(61): n is a, c, g, or t
  Peptide Sequence Number=SeqID_74070
caaaacgtcccaatgaaagctccagtagttgaatcgacagagccatcatcaaatgagtacngtgacatgaaggaggtggggcttcagattgctgaaccccatgctgacaacgctgggccagcatctggtgttgttcagccagacgatcctgatgatgtacttgtggcaggcactgatgattcttccggtagcactaaaagtagcgaacaacaactagatgctgtacaggacaagagttcacgtgagaggggttcattggtacggcttcgtcacatttcttcggacaaccttggaggttatgataaacaggaagagatgagcaaggtgggttcatcttcagctgatggcattactgacatgatgaagctgcaggagaggctctcagatagcctagaagataaggagaaggccctcttaggtgagtacacttcactccttgaggagtataaggacgcgaagcgaaggctcgtggaaatggagaaaaagaatcaggaatgcctgaatgagatccggtcactccgtgaagagattgcgagctctgcaggggaaggaggcagcgagggttcatgcaagaggagctctagtagctgctctcgccggggtcacaggaggaccccgagctactcgtctgtccatcagaggagaccgagcgtttcttccatctcaaggctgataaggatgggctcgaccatccaagaaagcggtgagccagcgggtgctgagcagcaagggggaattaacctggaggacctgaggctgccggccgttgccgaggcggagaatgcgtctcctctggaggagaggttcaggagggacatcgacacgctcttggatgagaacctcgagttctggatgaagttcagctcgtcgttgcagcgggtgcaggagttccagagcaagcacgagggcctgcagctgaagctgttgaacaacaaggaggagggcaagcaggacggggcgacggagaagcagctgagggcgttgaagacggagctgcaggtgtggtcggagcagaacgcgatgttgcgaggggagctgcagtgcaggttcacgtcactgtgcgacatccaggaggagattacggcagcgctggacatggaggcagaccagttcacatcctaccaggccgccaagttccagggggaggtcctcaacatgcagcaggagaacaacagggtgtcggacgagctacaggccgggctggaccacgtcaaggggctccaggcggaggtggagcaggcgctggggaagctgcacatcaggagcgtcagcctgccggcgcagatggccggggccgacgactccgaccccggtggctccggcgctggctccggctccggctccgcccatggcggcggcggtggcaacctcctcgggcgccccccgtccaacaagtccaaggtgccgctgcagtccttcctcttcccggccaagaacaagaagacgtctctgctggcccgcgtcacgccggtgctccagaagccgcaggcggagatgaagtttctggccaagttgccaaggtagcaagcatgccccacatctttggtctttggtggtcagttgccaaccaatgtaatttcctctacgttcgaggtcaacggatccattcatgtgcatgcccgcgttgtcgtgtgtgaaatct

SEQ ID NO: 8097 - DNA, 943 bp, Setaria italica
  Peptide Sequence Number=SeqID_74071
ctgcaggtctgccactgccgccctgctcgggtagaggggctggaccggagggaggccttgctcggcgtcgccctctccgccgccgcgccggcgctcttcgcccccgccggctgctctggcggccgaggccaccgagttgcaggagggcttcaccacgtacgaggatgaggccaacaagttcagcattgtggttccacaaggctggctgatcggcgccggcgagtccagcggcatcaagtccgtcacggcgttctaccccgagcaggccgccgactccaacgtcagcgtcgcgatcaccggcatcgggccggacttcaccagcctcaagtccttcggcgatgtcgacgccttcgccgagggcctggtgaacggcctggacaggagctggcagaggccgccggggctcgccgcgaagctcatcgattccaaggcggcaaacggtctgtactacgtggagtacacgctgcagaaccccggcgagcggcggcggcacatcctctcggcaatcgggatggcgttcaacggctggtacaaccgcctctacacggtgacaggccagtacatcgaagacgaggagtcggagaagttcaggcctcagattgagaaggcggttcgatcgttcaagctgacatgagagtgtttagcactgtgtagcattcagagatgcacggtatgcaggtggacgcctgtaaattgaccaactcgtcttccacattattaagttttttacagcaagtctcacattcagctaaaggggtatgtcttagggaaagtacattgctacacctcaccaatctcataagtagtctcatgcaatgccacatatgatttttgctggtgtggaggagggagggtgatgagagagaaaaagtgacgagagaaaaagagaccgttgtttcgcgaaacaaccgccttataagctagattttagaactacaagatg

SEQ ID NO: 8098 - DNA, 319 bp, Setaria italica
  Peptide Sequence Number=SeqID_74072
tttcttttggttttcttacccgtttacgtttgtaacccggtcggtcgctcccggcgtcggcgtggcgggcgctcccaccggcgcgcgtgctgatgacggtgtcggaccaggaccgtctgggcccgttccagcgcgcgtacgtggacgcgctccgggccagcgggtggggcgggcgggcgcggctctacgtcacgcccggcgagggccactgctacttcctcaacaacatcgcctcgcccaaggccgccgcgcacatggccacgctcgccgccttcatcaacggtagctgagtagctgaccggccggctcccgtcggcgg

SEQ ID NO: 8099 - DNA, 276 bp, Setaria italica
  Peptide Sequence Number=SeqID_74073
tcggttagttggagaggtgatccactgggtgttggcctcggatccggaacgcggagtccctgcggcgctcggatcggtccctccatccaagggcgcgggcgcgaggtgggggatcgggatcggcagtgatggggaaggccgcggcggtgggcacggcggtggtggtgtgcgcggccgtgggtgtggccgtcgtgctggcgcgcaggcggcgccggcgcgatgccgagctgctggggtccgcggacgcggacaggaagaggcgggcggcggccgtga

SEQ ID NO: 8100 - DNA, 450 bp, Setaria italica
  Peptide Sequence Number=SeqID_74074
tggtggtggtcgtcgtcggcgcgggtatggatgaactcacggagctgcaggagagaggaggcggcgaggtgcgcggcggcggggcaggtcgcggggagtactggcgtggggaggggtgccgggatggaggtgatcctcgccgccgccgcggtcgtcgccatgggcacggggaaccgcgtcctctacaagctcgcgctcgtgccgctccgggagtaccccttcttcctggcgcagttcgccacgttcggatatgtagttatctatttctcgatcctgtatcttcggtatcaagcgggcattgtcaacgatgagatgctgtctctaccgcaaaaaccttttctagctgtagggctcttagaggcttttggagcagcagcagggatggcggctggagctgttctttctggggcttcaataccaatactgtcacagagctatcttgtctggcag

SEQ ID NO: 8101 - DNA, 252 bp, Setaria italica
  Peptide Sequence Number=SeqID_74075
atccaaatacaaaagtaacagtaatgaagagcttgctgttgcagctggggcagcatggcagatcaatgaaatagtgaaagctgaagaacttagaggttcctttctgcaatcttcttatttggaaattgcattttcctctctgaaggtcatttcgcaagtctttgtcgagcagtgcctatatttggactctttagaccttgcacctgtgttggcctatttgagtctggctacatataatgcccttccagatgt

SEQ ID NO: 8102 - DNA, 581 bp, Setaria italica
  misc_feature (366)..(366): n is a, c, g, or t
  Peptide Sequence Number=SeqID_74076
tgacattgtgcatgttgaaatgcagaggttagtaccatgtccatgatgcctattttcatgctgtgctatgagttgtactaaccatttagtgctatgcagtggcgatgagctgtctcaagttgcctacatacttttaaagacaatcaaggagctgagacgacaatacttcttacggtatttcttttgtctgaaggatctgaaaaaaatgtgtcttttagatgaattaatgattcactggtgacattatcatgaaatatggtatgcatttgtgatcttattttaataggttagtcatctgaatattatcaatgtggttatgtactgtaatttgttgcaattatattctgaagccccaatcaaaaaatntttgtacttgctctttcaatgattgtttaaagtgacctttgtttgctcattcaattttgccttttatataatccagttccaactgactttgcaacattgtttgtaccgtgacctctagctctagcttgaaaaccagatgtcttgggatggcaatgaaaaaatagtttacaaatatataccacttaaattgtagcatattctaatgtgaactttta

SEQ ID NO: 8103 - DNA, 1202 bp, Setaria italica
  Peptide Sequence Number=SeqID_74077
cccgattcaagtcagcggtttagggttcgagatctccagcatcgcagcaggcatggcggcaagcatgtttagtactgtcaaggttagcaatgtgtccctgaaagcagcacagcgtgatataaaggaattcttttctttttctggtgacattgtgcatgttgaaatgcaaagtggcgatgagctgtctcaagttgcctacattacttttaaagacaatcaaggagctgagacggcaatgcttctcacgggggccacgatagttgatatggctgtcattgtcacgcctgccactgattatgagctaccagcttatgttttagctgatctagagcccaaagacacaaaaccttctgccctccaaaaggccgaggacattgttgggaccatgctggcgaaaggatttatccttggtagggatgcactggacaaagcaaaagctctggatgagaagcatcagctcacatcaactgctactgctagagtatcttccttcgacaagagaatcggtctaagtgagaagatcagtgttggtacttcagctgtcaatgataaagtgaaggaaatggatcagaagtaccaagtctctgagaagacaaagtcagcactggcagctgctgaacagagcgtctcgactgctggatccgccatcatgaagaacagatatgtcctcaccggggcagcatgggtaactggtgccttcagcaaggtgaccagtgcagccaacgatgttggtgcaaaggctaaggagaaaatagcagctgagcaggagcacaagattgttgagggtgggtctgcagcacaaccagacatcccagaaggcccagcaacacacagggaactggacggtgaatttgcaaagatacatgtgtctgaaacccctgacgatatccccatctccactgtggcgactgtccctgctgttatcgatgaggagcccagcaaggcgtctccacccgctgatgctcctaaaaagccggaacctgctcagggattgatactatgatatgattcggggccccatacatgtgtgtaaatagacatgatatggttattgaactcatttctagtgttgtggttgaaacctctttgaaggttgaaagttattgggacctaaaagagtttgcaatttgttactcgacacttttatcaatatatcattatcatcctgcagtgggaacatgaaacatagtggttgtgttgtt

SEQ ID NO: 8104 - DNA, 386 bp, Setaria italica
  Peptide Sequence Number=SeqID_74078
tccgtgcaggtggatgggccatccggtgtcgacgatgtgtccctgcacgggttcggtgacaccggcgccagctgctgggagttccaggagcacttcgacagcatcgatcagatgagcaccaccggcttctgcgacctgctctccatgagcgagtacttcgggctcaactaggctcgacacgggttggtggtgatcgttggtgaagggattgcgttcttttttaaacttttgtttagaggtttcggtgaaaggcttgtttgtgattgtaaattattgtcgtgtagtacgtatggaggaatttaaaagcagataaagtcaagagctacggcgattgttgctaccgtgtaaaatatggtcgtgtttgttgcggtttgctttggagagta

SEQ ID NO: 8105 - DNA, 781 bp, Setaria italica
  misc_feature (11)..(11): n is a, c, g, or t
  Peptide Sequence Number=SeqID_74079
gagaggcttgntttccatatctgctgtcgaacaattactcagtgctgatgcgcctccacctgcaggacatggtccacttggggctgaagctagtgctttagctaactgtgtttcaaattatcagttacctcagtttccttttcgagactgcataacagcatacaatgcacaagtcccgtcattggcctccagcagctatacatccggaaatgtccaaaatggctcctcaaaggcaacttcagtgccaccagcaaatatatctgtggatgacacctgcagtttcaacacaacaaattccaagggcagtcaatcgaacaatactgagggaacgaaggttgccaagaaaagagctagagccagcgagagcacccggcctagaccaaaagaccgacaactgatacaagatcgagtcaaagaactacgagagattgtccctaatggtgcaaagtgcagcattgatgctttattggagcgaacaattaaacatatgctgtttctacaaagtgtaaccaagtatgcagagaaaattaagcaagctgatgaaccaaagttgatcgacaaagagagtggtgtcatcctgaaagacaaccaagatgccggcaaaaataggtggtgccacatgggcctatgaggttgctgggaaactatggtttgccctataatcgttgaggatctttcgccacctggtcagatgcttgttgagatgctttgtgaggaaaggggactctttctggagatagccgacaacatacgtggttttggtctgacgatcttgaaaggg

SEQ ID NO: 8106 - DNA, 450 bp, Setaria italica
  misc_feature (373)..(373): n is a, c, g, or t
  Peptide Sequence Number=SeqID_74080
cgtgatggatcaatggaagtgctggtggtcggcccacggccagaacggcggcggctcgtcgacgccgcacaggaggttgccgaagctggcggtttccgcaccctggacgccgccgccgctgtgctgctccagcttgggcaccgacgtggtgtgcaggagctggtcgatgtcgacgccggaggggcggccggcagaagggtagaacgggatcatgccgccgccgccgccgccgccgctgctggggtgctgatgatccggcggcggagggtccatcgggccctcggacggtggcgtgcgcgagatgtcgaggttgatctcggagctgttctcgctgcggttgctgcaggacgcctccgtctccttgttgaggttnatcagctccgaccctgcctccctgcccttcaacgccagtatctcggcctggagcttcttgttgtgggagaggagggc

SEQ ID NO: 8107 - DNA, 551 bp, Setaria italica
  Peptide Sequence Number=SeqID_74081
tggggtgcgagttccacacgttggagtggcccatctccgcctgctccttcctcctcctcttcctgccgtcccggcggcggagggtccatcgggccctcggacggtggcgtgcgcgagatgtcgaggttgatctcggagctgttctcgctgcggttgctgcaggacgcctccgtctccttgttgaggttgatcagctccgaccctgcctccctgcccttcaacgccagtatctcggcctggagcttcttgttgtgggagaggagggcgtcgttgtcggccttgacggcgtcgagctggcgcttgagcgcgtcgtagtccttctccagctgcttcgtcttccaccgcgcgcggcggttctggaaccagatggccacctgccgcggctgcaggcccagcgcgcgcgccagctgcagcttccgctccggctccagcttgttcgccacctcgaagctccgctccagcgtccgcacctgctccacgttcagccgtccgtctaccttgtcttcctacgtcttctagttccgttccgttcttttccgttctttcccgtt

SEQ ID NO: 8108 - DNA, 562 bp, Setaria italica
  Peptide Sequence Number=SeqID_74082
gtgttgatggggctctcgtcggcggcggccgccggcgccggtggcctggagatgtcgaggttgatctcggagctgttctcgctgcggttgctgcaggacgcctccgtctccttgacgttgaggttgatgagctccgacgccgcctcctgccttcctcctcctccgccgccattcccgccgcctcccttgagcgccatgatctcggcgtggagcttcttgttgtgggcgaggagggcgtcgttctcggcacgggcggcgtcgagctggcggcggagcgcgtcgtagtccttctcgagctgcttcgtcttccacctcgcgcgccggttctggaaccagatggccacctgccgcggctgcaggcccagcgcgcgcgccagctgcagcttccgctccggctccagcttgttccccacctcgaagctcctctccagcgtccgcacctgctccacgttcagccgccgcttcttctccccatccgtcgacccgtcgtccgacagctcgtcctcgtttacgccgccgccgccgttcgtctcgtcgccgcccccgacgtccgcgccgtaca

SEQ ID NO: 8109 - DNA, 300 bp, Setaria italica
  Peptide Sequence Number=SeqID_74083
aaagccagagccacacctccgccgccgcctacctgacccgctctcgccgctgtctccagcctcctcgactactatcgccgccgtagcgggctgccatggccaccaccgctcgcgctctccacctcccgacacctcctaaaccctctaacccctcctcccaccacctccaccgcctccccgtcagctcccacttccgcccccgcccccaacgccgcggccccggccgccgcctcgcaacctcgtcctccgacctcacctccttccccgacccggcccccaccccgaacggcgtctacacgg

SEQ ID NO: 8110 - DNA, 552 bp, Setaria italica
  Peptide Sequence Number=SeqID_74084
acgacacacaacacgcccgcctcggcgcgttccgggcttcccggctcgccggcgtcgaagtccgggcgcggcgccacgtgccgggacgccggaggcagcccgcggtacatggcggacacggcctcgtccgtggcgcgcacccggtggcagagcgcgccgaggcagcggcagggcgagcacgcggcggcgcaagggcaggtggccgagccgaggcccagcgtcgggcgcagcgggtccaggaagcaggcgcggccgcagctgcaggcgctggaaagcttcagcttcaagagctcggaagcgagccgcgtggaggactcggagctcagcgacgaggtcaccagagactactacctcgaccggctctggtgattccgccatggcatcaccagctggttgaggaggaggagattttaacattttggtacatattagcattaggattattaggatcaagaaggcttagatcatggcgagaattgactactaatctagaaggatcatgtagctcgatcgaatatcatcagatcgaacgaataaagaaaactatggaaa

SEQ ID NO: 8111 - DNA, 693 bp, Setaria italica
  misc_feature (48)..(48): n is a, c, g, or t
  Peptide Sequence Number=SeqID_74085
ttgtgtaatttgttgccccgttttattttctctattttgttatgggcngtttttgtccttggcctatcattgtaaactcatggaggaaaagttaggttaatggtgattggataccttttagttcttaaactaagactttgcaacttttttagcttaatggggctgtttaggggaacacccttttttcatgtgtgttaaaccactatttattaattttggacagaacctacatattcagactcttgctgtattaccgaatcactaattcttaatagaacaacatacctcactttctgtacagcttctataattcttttgtatacctcaggactctaggccagctcattatctcggagaagttgtttgttggtgttaatgaatttgtggataatacttttgaacttttggtgttctgctttcaaatttgcaataactaattgctgctctgtggctctacggatattgtcatatggagctataacctttttgattaattgctcggtacttatagttgtatttctgtaccgtcctgtttgctcaaacataaccatcgtttgatggtttctgcaggtcctggagagaaggagccggcaagttggacccacggcaaagagaatttgtctgcggaggacactgacaggtccttggtaggctgtagacctgtataaagcagttactctcatctggaggtgt

SEQ ID NO: 8112 - DNA, 954 bp, Setaria italica
  Peptide Sequence Number=SeqID_74086
cgaggtctggcgcgacatcatgtgcttcggcgggccctccgccgcgccggcggaggcggcgccgccctcgccggcacagcggcagcagacgctcggggagatcacgctggaggagttcctcgtgcgcgccggcgtggtgagcgaggacatgacggcgccaccgccggtaccacctgtgccggtggcggcggcgccaccccgaccacctccgccgcagccgccaatgctgtttccccatagcaatgtgtttgctccattgatgcctccactgcctttcgggactggattggtgtcaggggctgtcggtcagggagatggtgccgcgcccccggcggtatcgccggtgagaccggttacgtccaacgggttcggcaagatggaaggaggggacttgtcctctctgtcgccatcaccggtgccttacgttttcaacggtggtctgaggggaaggaaagctccagctatggagaaggtggttgagaggaggcagcggcggatgatcaagaaccgggagtccgccgcgaggtcgcgccagaggaagcaggcatatatgatggagttggaagctgagatagcaaaacttaaagagattaatgaagagttacagaaaaagcaggtcgaaatgctggagaaacaaaaggatgaggtcctggagagaaggagccggcaagttggacccacggcaaagagaatttgtctgcggaggacactgacaggtccttggtaggctgtagacctgtataaagcagttactctcatctggaggtgtgtatatagtaggtgcacatgaactcacaatcgccagagtttccggtgttgacatagccgttaattcagagctccagtctcgtaggcggatagattgcctgtgaatttcactgcataggttttggcccttcgcaaaacatgttccagtgtgtagagttccagtgtatgtagtctggtcagtttgtt

SEQ ID NO: 8113 - DNA, 358 bp, Setaria italica
  Peptide Sequence Number=SeqID_74087
gcgctgaggacacccgtggccccgagcacgcgcatgaggcggcggaaggcaggggatcttggacgggtggagcttgaccgtcgccacaatctgggcgagggtggcggcgccgccgtggctgtggatggcgtcggcgatgcggaggtccagcgcggatttgagcgccatggacttgatgtaggcgaaggtgctgttccagagctcgacctgagcgtcgagcaaaacttggttagcgctgctcgtggtggtgagcgccatgtacactgctcctgctgttttagtttctggtgagtggatgatggatcaaaggttcatatccttctgagctttgggcagcacggcagagaacttattacct

SEQ ID NO: 8114 - DNA, 428 bp, Setaria italica
  Peptide Sequence Number=SeqID_74088
caggtaacacaaggggctcgccgccgacgagcctccccgtccaactcacagagagggggaacgggagcaaccaaggccgccagcggcgatggctgcctcgcctcctcgtcctcttctccacctcctcctaaccctagccctggctctcaccgtggccgccgcaggcaagatctcggccgaccgcaccccgatctcgcgcgacatctaccactccagtgactcccttcttcgtgaaatcaaggatttggttgctcggcattccaataaactgagtatggacactataagaacaagtaacaaaggctattctgcggagctgtttgtagttacttttaatcccgtgaaagagagtgtggataatggatcaaaggttcatatccttctgagctttgggcagcacggcagagaacttattacctcttgaagtt

SEQ ID NO: 8115 - DNA, 367 bp, Setaria italica
  Peptide Sequence Number=SeqID_74089
cgtggcagagtttggctcagagtgtcagaccatgtcgctgatgagcaggacgtggttggtccggtgcctctccacgaacatcttggacgcccccgccaccgtcttcctccacgtccgctccagcgcggcgaggatgaggccgatgccagcggcgtcgtcgagccgcgcggcccctccccggcgggcctggcccttccgcgcggatgctgccgtggttgtcggcaggagcagccccgccctccagtccgccgacccgccgatgctccgccgcctcttgggcgccgccagctccgcggcccccgcggacgccgacgcttcggagtcccgcgcggaaagccccgaggccacgcgccgggacgagcgcttg

SEQ ID NO: 8116 - DNA, 1140 bp, Setaria italica
  Peptide Sequence Number=SeqID_74090
gaggaggcgtcagggcggagggcggcctcggaggccggggacggggacgggttccaggtggtgtatgggaagaagaagaagaaggtgggcgatggggaggaaggcgttgaaagagcggaggccttcggggcctccagctcagtgaagatggccaaggacaaggcggctgcgccggggatgaaggcgaaggtgcccttccacatccgcaccatcccgcggccgcagggggtgtaccgcattgtggtggacaactcgaccaagccttttgagcatgctttgcttgagcggagcgaggatggcacccgacccgtgcacccattggaaaaactcccaattgaacaactaatcaacagaaatgttcctgatagtgagcctgtaaagccacctgctttagatgataccccttttacatttgttgaagacctgaaaaccttggaggtgctagccacaaagctgaagagtgcaactgagtttgctgttgatctggaacacaaccattataggacatttcagggtctgacatgcttgatgcagatttcaacaagaacagaggactttattgtggacactcttaagcttcgtagatatcttggtgattacttgagagaatttttcagagatccaaccaagagaaaggtaatgcatggcgcaggtcgtgatataatatggcttcaacgagacttcagcatatatgtgtgcaacctttttgacacaggccaggcttcaaaggtcttacagatggaccgcaacagcctggagcatcttttgcaccatttctgtggagtgaccgcaaataaagagtaccaggctgcagattggaggttgagaccccttcctgatgaaatgatcaaatatgctagagaagatacacactatctgttatatatatatgacctgatgagattgagactagtgaaggagtcatcagctgacagtgatatgcttttagaggtttgcaagcgcagcaatgaaatttgcttgcaactatatgagaaggagcagctgactgattcatcgtatctacatttacatggattgaaagaaaatgagctggatgcaagacagctgtcagttctttctagtctatatcgatggagagatggcattccccgtgctgaggatgagagcactggctatata

SEQ ID NO: 8117 - DNA, 1869 bp, Setaria italica
  misc_feature (1)..(45): n is a, c, g, or t
  Peptide Sequence Number=SeqID_74091
nnnnnnnnnnnnnnnnnnnnnnnnnnnnnnnnnnnnnnnnnnnnnttttttttttttttttttttttcccactaaagtgcaagcagtccctttacataaaaagaagaaagaattactccatatatacacatgggcaactgaatagtcataaagagcataaatacaagggcggtaaaacccagtgtcctgtcttggtgacagaatctcgttcagaagcatctaaaaagaacaggaaacactaacacataacatatacacaatctggcagaattctccctacagtcgaaagaactgttacctgctttccgaccactaaagaacaaagtaaggaagaaaattcatctataggccataatgaagaacctctccccacaaactcaccaaaaagatactttattaattattaccgggctcgtatccctcccttttctttttggagttgctttgagtaagctgcggccttagcatctagggtagtctgcttcttccgcctcgactgtccaagagctgatgggtcaaacaacggccccgaccatgtttgcgaggtccccttctcaatggggactactgtactgaaggaagcatcctggtgctcaaacataggctccatgtgacgacaggatcccagcggattacccatcgctccgtcctgatgtggtggaggaaacttttcacttttgctctttgcgtttgcatgggttatcatccgtcgcctctgatctaagtttgcttggatctctgcattagcttctggtgctggtccagccctgtgagatcgatcccgtggtcgagtcctttttgcttctcctttggcctttgcagcagctcgtagccttctagcttcctcatctctcaacttggcatccatctccttgcttggtggatatgttggcaaacttgaagggtcacaagcataaggctcggttgaaaaaaaatcactgtgcaatgcagccgtcgcagtttgacgctcagctggatcaattgcaagcaaagtttcaaccaatggcagagccgaagcaggaaaatctttaaatgtctccctgatgcaacgtttatagggctgttggggtttgaatattgttgcatgtggcagtttagacttcttccaatactcctctgaaggggagccacatagcttgaaaatcttgtgcaactgttccacctcggtgcgcccaggcattatgggcttcccatacaaaagctctgccagaatgcacccagcactccacaaatcaatgcctacaccataatcagtggcaccaagtaacagttccggtggccgataccacagcgtgaccacgcggctcgtcattggccgcttatgccgtggatcaaagaacgtcgccaacccaaaatccgcaatcttaagaatcccattattatccaacaacaagtttgaccctttaatatcccggtgcaatacattattgtcatgacaatgctcaagccccgataacagctgctgcatgtaacattttatctgaggcaacgtgaacttgacatcagggctcgctgcgagcccagcaaggtcatgctccatgtactcgaagacaaggtacaggctacatgacatcctggaggtgaccaagccctccaatttgatcacattggggtggtcaagcctcctcaggatcagtatctccctggccatgaacttgacgctctctggctccaggttgtcgaaccggaccttcttaagagccacgatgcggccggagacggtgtccctcgcccggtacacgttgctgtacgtgcccgatcctatcttattgagcttctcgaaggtgtcggcgcggcgcggcgcccacccgcggagggcctccccggcgacggcgacgagccacggaggccagcccgcggcgagctgct

SEQ ID NO: 8118 - DNA, 424 bp, Setaria italica
  Peptide Sequence Number=SeqID_74092
tgcagaccttccttctccgcctctcccggccttcgtcgccgccgcgctccgctcccgcagctcgccacgcacccgctcccgtcgctccatttcttccgggtgctgcactacagctccgaccttcctcgcccaccctcagaacctccttagctgctacgtctcgctcctccactcctttgcccgctccagggacgctgtcccagacgctgtcggccaagcgcggcagcttgtcgccgagctgcgcgagcgcggggatgccgttcttcagcacctcaccccggcgtcgtcggcgtcgctgatccgtagcctcgcggcactcggcctctccgatgagctgctatgggcgtggcaggccatgcgcctcgccggcgtcgagccgtccaggctcacctacaactgcctgctggatggcctggttaacgcc

SEQ ID NO: 8119 - DNA, 678 bp, Setaria italica
  Peptide Sequence Number=SeqID_74093
ttttatgggagagtgcattgaaaataccagagtaatcagtgattacatcaaaaccaaagcggtcccataactcttctgctaattcagcaaccaccttctctggatcatgtgcagcaatccagaggcttgttgacacttgcagatcccgttgaacagagtgtatagggacacattttatagcattcaagcaggcaagcctaacatgcacttctttagcatatacaccaccaagagcctgtgctaattcatggcttcttaaacccaggcataactcattcagcataggcccaactgaaggatgataggcagggacagtgctcaacacatgataaagaactgataacatcctaggacgaggaagtggtagtattggatccagatgcatagatagtatgtgaagcacatcatcatgaagacatgtctttttagaggacagaaggatcctttccattatcggaaagataaaagtaaatgaatctgctggaagaggtcctgctttgcatgcaattgtcagcccatttactatttgttcaaagagaccagatgatggcttcttcttgctatcttcttccacgatcacaggcataagatccaaaaccatttcaaaatcaccgatagatattacacggattgcagcagcaaattcttctaggtcgtccctaatttgtcttaaagtta

SEQ ID NO: 8120 - DNA, 443 bp, Setaria italica
  Peptide Sequence Number=SeqID_74094
ttgtctgccaatctgtcatttgctctgcttgttgcttctccacatcatttttaaattttctcaagcatcttcttcagctcagtaagcttgtttatggccttccgtgtgtaatcaagtagtgcctttgactccttatgcactttgtctctcttctcctccacctctgctcgcctcagcgacaagtctgcactcgccaccacaaagctgcatgaccaaaattttagaaactaggaccaaaaaaaaggcaaaaaaagaataatcgtaatagttcttacagcacccaaagaccaaaacgtcactgatatctattcaccagcttcctcagagttgatgacagtttttctccaataagttgatgaaaaagttacaaatcagattcaatacatacataaggtgttatactcagaaatttctagtatatacaacagaggatagtaattttt

SEQ ID NO: 8121 - DNA, 895 bp, Setaria italica
  Peptide Sequence Number=SeqID_74095
tttttttttttcgctatcaagaaactgttcgctatcatcaagacactgtccaaaaatcaaaattcaaattaacacacccacacatacccacacacacaacaggccaagctgtctggagagtgtgtcttttgtcgatgagatcataactgcaacagaaattaatttctatggtgaaatttgtctagttaggaaagcaaaggatattacacgattatacaaccaagttaacttacaagaaagttaatttaccattacgctttcaatcaatgccaacatgaaagatacaccaaacaaaactatgcacattataggccagttgtggttagagcagattgcaacacatcttctaggtacttctcggcagctgcatactgcctctttttgtcctctatagctagtgcagctagagctttatctggaggtaaatcctggtaacttcttaatgtgtcggctatgggttttgtcttcctctcgagatccttcttatgctcagccatttccatcaacacaccatgattgatctccggcgtgtaacccactcggttaagcattgccttataatttgagacttggaggatatactggcgttccttggagtccatcattacaagctttgtctgccaatctgtcatttgctctgcttgttgcttctccacatcatttttaaatttctcaagcatcttcttcagctcagtaagcttgtttatggccttccgtgtgtaatcaagtagtgcctttgactccttatgcactttgtctctcttctcctccacctctgctcgcctcagcgacaagtctgcactcgccaccacaaagctgctcatctcggtgtcacgaatggcgaggaggttgccgacggcggcgacggcgcgcgccgccgctgctgcgggtggcg

SEQ ID NO: 8122 - DNA, 741 bp, Setaria italica
  Peptide Sequence Number=SeqID_74096
tagtgcatccatttgataatcatttctctcatccagtaagatgtcatgttaagctgacaaatgcagcctttttcaaggtaatatggcacagttgttctgataaaccataaagaacaagtacagttggaagcagaacataattgctaagcatgctaggtaccttgaagattatcaatatctaccctccataatgaggatagtaaatacagaccaactgcacgacagtcttttccggtattactcggtgtggtcatgaacaaggagtgccatgagaggaatggcatcagaccaaaacggccattctaacaaggctcattgttggaaataactccctctatttagtgttcacacattagtttttccctatggtggactcacatacaagcacaaggcaacacaagtagtttttggtcgatgtggccacactagttctcatcgttttctcacatatatatagctgacacagggctgcacacctgcccatgatatccttctatttaggatttttcctagtattttgacaccataagaatatgttttacttcaagcttagtggtacttgccattttaaaaatatttgatttgtttcagtatgaaaataagcttgagctaataactttattataatcatctcaggcttttacaatcctttcttaagatcattctgaaaattgttggcttaaagttgaaaacagcataacaagatcaatgtgatataattcaagtcttatccacccacaa

SEQ ID NO: 8123 - DNA, 720 bp, Setaria italica
  Peptide Sequence Number=SeqID_74097
aaaaaaaatggaatgcatgttaatcactggatttggcctcaacctaaatcatctgttacaaaattcgcgatgcacatggcaaatattgatcccggaaggctgaatcattttagcatttttaacaaacatgtcacaggcatgcttccttctgttgatgctaactgtaaggaaccaaatattacaaattagacctgttaaggagtttgtcgaagggttgctagcagcaggtatgttgagcgtagggatgcagcggtgcacgcaactgttgttgaaaagcacgaacaccaatagcatggcaacatccagtgcgcccctcttccagatgtttaccatcttaagtactgtcgtctatgtccacctatttttcatatcaacacgttgcaaccatctacctgaggcctgactcctgagaagcaataacacaggatcgtaaatagtgattaaagtggagcatgtccaaaaaaatgatcaataaagagatcggtcagaaatcacttgcatttagattagatacaattgtagaatggaagaaagagaggaaacagaagaactggcagccaacaaccggatcacaaactatctaaaccaaaactacaaacccggcaataatgtatagtatggcattacccggattcacgggcaatcgagccagaacctgatgtgccactcgatgttggaagataagtttgtgaatccgagtgtgccattgccaaaaaagcc

SEQ ID NO: 8124 - DNA, 651 bp, Setaria italica
  Peptide Sequence Number=SeqID_74098
gaaacaaattatctccataagcattaattttcatatggacaatcatgcacaaatcattgtatataaaaaaacaattgtcttctcaagccaacaatgaacaagtcaacttccattggtagccatcagaacctgccactggagtggtcggagatgaagtttgtgcacagcaatacagctgccccaacttccaattaaatgtgcaatgctcaaacacctgttaaggagtttgtcgaagggttgctagcagcaggtatgttgagcgtagggatgcagcggtgcacgcaactgttgttgaaaagcacgaacaccaatagcatggcaacatccagtgcgcccctcttccagatgtttaccatcttaagtactgtcgtctatgtccacctatttttcatatcaacacgttgcaaccatctacctgaggcctgactcccggattcacgggcaatcgagccagaacctgatgtgccactcgatgttggaagataagtttgtgaatccgagtgtgccattgccaaaaaaagccatcttccaagtcattgtcatcagcacaggaggacattagcatagatctagagaaatcaccatctgcagatgcccttccagatcctcaaagtcctaaccgtccaaaaagcagcttcatcagttgatcca

SEQ ID NO: 8125 - DNA, 485 bp, Setaria italica
  Peptide Sequence Number=SeqID_74099
gtcccccgccacacccggactctcgaacaaaagggcagagcccgtccgctgttcgccacgcgcgcttcgtctctaccggcgtcgggcgatcgatggacggcgacggcgcctctcggggccagccgatgctggagaagcggccgagccaccgggagcgtcacttcacggcgggggaggtggtgcgcgacgtcatcatgggggtgtccgacggcctcaccgtgcccttcgccctcgccgcggggctctccggcgccagcgcaccctcctcgctcgtcctcaccgccggcctcgccgaggtcgccgccggcgccatctccatgggactcggagggtaccttgcagcccagagcgaggcagatcattacaagcgggagatgaagagggagcaggaggagatcatcaccgtcccggacactgaggctgctgagattggagagatcatgtcgcagtatgggctcgagccacacgagtatggccctgtcata

SEQ ID NO: 8126 - DNA, 248 bp, Setaria italica
  Peptide Sequence Number=SeqID_74100
tttttttttctagtgggaaaatggttgaatttatgcatatgccagctgccaagtcatcgaacgtgcgtattctctgtacctaaactattacattgatcatcatgatcggcacaaacttcgtcatgacaacaaaaaatgcagtctacctttacaacaatctccacatcagaatcagttcatcctatgtgtctacctgcccctggagttgttcctagagctgccgctgtcactcctgggtgagtaccccg

SEQ ID NO: 8127 - DNA, 380 bp, Setaria italica
  Peptide Sequence Number=SeqID_74101
gcggaccgtggtgcttgccatcgctggtgagccgatgaggcgtgtctcccccgatcgttagcctgccggccgtctagcgcggagccccgtgcccccgtcccattcgtcggccaatccgggcaggcaagccagcgtgcgcgatgcggcagaggtggggcagctgcttctcgggcggcgacgtccgcgtgggcgcgccggccctcgaggagccggagccggaggtcttctccttcgccgaacccctcccgccgtggcccccaggtgggggattcgcgcgggggaggatgtccatcggcggaggggagctggagctcgccgcggccacgtcgttccagaagatctgcaccctgtcgccgcggcggtggggcggggcgcagcag

SEQ ID NO: 8128 - DNA, 598 bp, Setaria italica
  Peptide Sequence Number=SeqID_74102
gaactccgcctctgccctctggttctcgctgtctcgagagctttcggcacgcaagtatggcggcggtggcggccccgacgagggcagaggtgctgtccctcttccggtccctcctccgcaccgcgaagcagttctccgactacaacatccgggagtacacgcgccgccgcgcggcggacgccttccgcgataaccgcgccctcgccgacccgccggccgcggcggcggcgttcgcggaggggaagaagcagctcgaggtcgcgaggcggcaggcggtggtgtactcgctctacgcccccaaggccaagagcgtgatggagttgaaggtgcagtgatggaaagagggagagaggtgtgctgcgcccttttcttcctcgtcgtttcccctttccggattcgtgccttttctgtgatgctgcaactagaactgctctgttatcacgttttctagatgattatcatgatatagctgttttctgtgcaataaattactaaattactctgctatgatctcttatgtttggcattctattgtctgcaaagcaatctgcttcgaggggatttgtcaattgtgtttgttgtactcttgcaaccaaaa

SEQ ID NO: 8129 - DNA, 469 bp, Setaria italica
  Peptide Sequence Number=SeqID_74103
gtccgttacagcagttttgtttcattaatttgtttgttccttagtttggttactaactaagtactaagttacaaataaccggttccaggagccctctgcttctgccgtgccatcagatggcaacaagaccttcccaaatgcagctgcgtctcagttcacagacaggttaggtcttgttgaacaaccaacgtccagtagttcaagcacccaaactgttcagccttcttcatttggccaggctggcgtgatcagcaatgaagtctcgaccagtgccaaagtcatggttagagccaccccatcgaaagtcaaccctgggactgcatcaggggtggttagcaaccccaacgggggccaggtcaccaacatggcccccaaggcccatcaatcgtcattgtcatcagaccagtcagttacctagtctattccttagttttaacttaatttcttaggttatttcgttctttagttt

SEQ ID NO: 8130 - DNA, 4667 bp, Setaria italica
  misc_feature (4600)..(4600): n is a, c, g, or t
  misc_feature (4607)..(4667): n is a, c, g, or t
  Peptide Sequence Number=SeqID_74104
ttcaagccctcctagctcacctccacatgtttcacatgacgagatggatgtatctggcgattcgcctgcattaccgacttctgctgatggtgaacgaacagtgctgtcagacaatgaccatgcagcgttaactgtagatgcagccagtacaagcagagttgctgcctcaggagtgtcccacttggaggatgatgaatggtcaagtgaaaacaatgatgataggcgaaaacaggatgaatacgatgaagatgatgagagctaccaagaagatgaaatcaatgaagctgatggtgagaatctagacttggatgatgagttcttagaggagcagaatacatccttagaactggaaccagttatacttggatttgatgagggtgtgcaggttgaaattccctcaaatagtgaacttgaactaacttctatgaggagcactgaaaggacagttgaagtacatttaagctcaggtgttgcagagcaagagactgtcagtggttcagttgttcattctgaccccgttactgaagcagaaaaagcattgcaggcattgactcttgattgtgtaaatgccctgacagaagacagtaatggagagcgagccagtagcttagtgacacctgcttcaagttcccagttatctcaggcatctttagcagctactattacgtcatcaacttcagcagtagttgagcagaatgaagtacctgttagcctccagtttggtttgtttacagggcctcctctaataccaactccggttccagccatccagattggttccatacagatgccaatccatctccacaatcagattaacccatccctggctcatatgcacccttcaacaacccctttatatcagtttggccagttgaggtatgtccgccctattgcttcaagtgctcgacccctgccatctcaggccatctcccctgcacattcttctgttccagctcagcatccatcgaatcaaaatgcttccagtgttctacctgagttaatggatcgagatacacaccagaacatcccaacccaggcaatctcatctaactctatcaatagatcagcagcacctacagccaagcttccacttgcaatgggcaattcaaattctcagtatctcaacgcccctgcaaacatccaggcagctgctgtggagggatttcatggtcaggtggacaaacagcctgttgggggtacgactcccagtgagagggatcaagatctctctttgaagaggaattgcagacctgcctccaacagcatagaatcttctcagtttggtttggaggggagagccttgaatggtccaaaggctccaggtgctgtctctgcaggaagggggaggagatatggatacgctgttaaagacccaaacatgagatcaactggttcagttgttgaaccttctcataaagattcaagaggaggattccagagaagggctcgtaggaatgtaagaagaactgagtttagagttcgggagaacgtcgagaagaaccaaaatgaagcttccgagtcatttgcccatggtgagcaggacgagaggccatactccaatggaacagcaagggattttccagtgagaaatgccaacagaagggaacttgatataaataagtcatccaggataaatgaagcaagtgatcagagtgcctcatttagaagtacacataaggctccttatgaaagatcacatggtgggaacaagaagtccagaacaggtgctatccctgaaggagatactaccttgttgcaagctggagctgtacgtgttgttaagcagcaaggtattgaggtccctgttgatgcagatggcttcattgaagtaaggtccaagagacagatcatgagtgtcaggagagagcaaagggagaaggaaaatagatccaaaatgaggatgacaaaggctccccgcaaacagcatacttctctacagagttcggtcgctcctagtgtgaataaacggacagctactttgagtggagaagttgcaaagaaagttccttcggattctgccatcacagtagaaggaagaattgctgattatgctgaatcattggttgcattgaagggggatacagcttctatgagccccatagggccaccttcaaccaacacagaaactcatacaaactgctatgctaatcagcctatccaaatccaggcatcctctgacctggtcacctccagtccttctgcaaagcttgtgagtggcttatctgaagataacaataaagggacatccattaatactccatttaacatggtttcctgggataattcacaaataaaccagcaggttatgccattaactcaaactcaacttgaagaagctatgagaccagctaaatttgaacaacaggctggttccagcttttccttggagtccaacaatgctttgtctccaacagtaaccacagaaaaggcattcccttcatctgctagtcctattaactctcttcttgctggtgagaagatccaatttggggcagtaacctcgccaaccatgctacccccagtcagccgaactgtttcaagtggtcttggagctccaggttcatctaggcctgatatgaagattgatcgaggcttgcctggtgataacagtggtcctgataaggcttcttctaaggaattatgtcccaatacagaggatgtggaagcagaggctgaagcagctgcttctgctgtggccgtggcagctattagtactgatgaagggtctccagctgatgcaactacagcatctgctccagacaagaagagctttagcagcaaggatctcggtgggttaacatcaggaggggcaatagcaggccaggctggtcaatcatccacggaagagccgctcacagttgctcttcctgcagacttatcagttgatactccagctatgtccctgtggcctcctctagccagtccacaagcatcagggccaatgctttctcagtttcctggtgcacagccatcccatttttcctgctttgatatgaatacaatgttaggagggcacatttttgcattcgggccgagtgatgaatctgctggatctcagggtcagcaccctcaaagaagcaacccattgccatcagcaccactgggagcttggccgcaatgtcattctggggtagattccttctatcgtcccccaactgggtttgctggtcctttcattactccaggaggaatcccaggtgtgcaaggtcctccacatatggtggtttataaccactttgccccagtagggcagtttggtcaaatgggccttggtttcatgggagccacttatatccctggtgacaaacaacctgattggaagcagagccaaggaccacctattgttggtgtaagccaaagtgatccaaacaaccaaaatattgtgtctggtcaagtcaaccctcccagtgttcctactccagtgcagcatctacgcccaacttctatcatgccaatcccatctccactgaccatgttcgacattgctcctttccaggcatctacagacatacagatgcaaacgtgttggccacatatgcctgtaccgcctctacattctgttccattatcagtgccacttcagcagcatccagtagagggtacagccgtacagcagtttgttcataatgtgccagtggacaacaagacaagtacaaataaccggttccaggagccctctgcttctgccgtgccatcagatggcaacaagaccttcccaaatgcagctgcgtctcagttcacagacaggttaggtcttgttgaacaaccaacgtccagtagttcaagcacccaaactgttcagccttcttcatttggccaggctggcgtgatcagcaatgaagtctcgaccagtgccaaagtcatggttagagccaccccatcgaaagtcaacccctgggactgcatcaggggtggttagcaaccccaacgggggccaggtcaccaacatggcccccaaggcccatcaatcgtcattgtcatcagaccagcagtaccagcatccagttaacaatcaggatcgcagggcccgcatgacccagaagactggtcctggcaatgagtggcagcggcgatcaggataccaggggaggaatcaaggttctggttccgacaggagctcaggcactggtaggatgaagcagatctacgttgcgaagccctcagctgcaagtggccatgcccaatcaggctagagcagttgcagcccttcaccaagcctgcttcacgcaggtagagctcaaagcgcccttggaatgagatacatgcgaaacttattttcgctcagtatctgtcttttctgcgttatttggtgattatgccctgtgctggttgtgtatgtttttggttcgttctcacatagaagaaaaagagtgctgttgcagtgccgaaaacgtttgaggcgataccatgccatacctggataaattttgcagccgatggaatcggctgcccgtataagtcactggtgtgtgatgtcaggataactattgtttattattatttgttggccggctaagtggcctggacagcctcggacaaggaaatgtacatgtgttgatagtccaattcgatgttacttgtcacaataaaaaaaaaaaanaaaaaannnnnnnnnnnnnnnnnnnnnnnnnnnnnnnnnnnnnnnnnnnnnnnnnnnnnnnnnnnnn

SEQ ID NO: 8131 - DNA, 1301 bp, Setaria italica
  Peptide Sequence Number=SeqID_74105
tgcccgcgtggttcaggcgcaaggcgcgcacgccgcggggcgggcacgccaagagcgtcgcgcaggtgctgtcgcggcggctcgtcgtgccggaggcggcgggcggggacggggactcgcccgaggggcggaacggggaaggggaggtggaggaggagcaactgctctaccgcgtccccatctttgaccccgccctcgccgagttctgctcgccgccgcctctcgaggacgcagcggccgtcgcgtcgtcctgcaacgaggatggcaccgtcgaggacccggcgaatccgcatccagcagcacctgcgccgccgccggtgcagttcttccccgacggccatgccagcttcgagcccaccgacgccgagctgagggagttcgccgctgacatggaagccctcctcgggcgcggcctggacgatggcaacgaggactcgtcgttctacatggagacgctgggcctcctcgatccggtggacgacgacgccggcgtcgcgcgagtcaagttggagatcgacggcggcggcgccttcgacgcaagcggcacgccggcgtgcggcgtccagctggaggcggaggcgtccgacgagatgctggacatcgacttcgactacggctcgcctcaggagacaccggacgacaaggccgcgagcagcgacacgagcgccgcagccacggacgcccagttcttgcagacgagcctatcgctcaccctcaactacgaggcgatcatccagagctggggtagctcgccgtggaccggcagcggcgagcggccgcacgtcaagctcgacggcagctggccccacgattacacgagcatgtgggtggtgggaggaatggtcgggcacgtcggggaggagctcggcacgccgaggctggggatgatggacggcggccgggaggcccgagtgtcgcggtacagggagaagcggcggacgcggctcttcgccaagaagatccggtacgaggtgcgcaagctcaacgccgagaagcggccgcggatgaagggccgcttcgtcaagcgagctaccgccgggggcagcgtcgccgtcgccggcctcgcataaagcttagccgtgcgctccggaatgcactgcacgcacgcacggtgtatgcgcagcgcttgtacggtgtagcgcgtgcccggccgcgtggctgcgcacagatgggaggtgcatgcgcggccgcccgccgccggccggccggcgcgccgctcgtccgtcgtcataaatgacgccaagaacaaacaactcgtcgaagctgctttagttcattcaaatttaaatcaaagtttcgtg

SEQ ID NO: 8132 - DNA, 715 bp, Setaria italica
  misc_feature (656)..(715): n is a, c, g, or t
  Peptide Sequence Number=SeqID_74106
tacggtaaggtaaggtaacggtacttaaggttgggggtaaggtcgttttgtaacgtccgtcggtcttggtagtattatgggcggcggctggcgggaggcgcgggttttcgcggtaccgggagaagcggcggacgaggctgttcgccaagaagatacggtacgaggtgcggaagctgaacgcggagaagcggccgcggatgaagggccggttcgtcaagcggccggctgccggaggagccggacctgccgccgccgccgcgccgtgcgccgtcacctagctgacgatgagccggtcaggccgcgcccgtgttgccgtgcgcgtcgaggtcgttgcacttgcagactgcagtgcgcaggtcctgcgaggcatcagtggctcggcatgaaattacgggctcatcagaatttgtcgaagctcctttagttagttggttcttcacaagttgcgttcctctcctcaatcattccggcatccgtgatcgaggatcgggacaaaatactgctgtacatgtgtacattggtcggggaaagtgcgttcagtaccggttcctaaccccactttagtaccgattgtacaatcggtattgctacttcagtattaaaggtagggaccttaactttaagtaaccgggtaacaaaataaaaccggtaaactnnnnnnnnnnnnnnnnnnnnnnnnnnnnnnnnnnnnnnnnnnnnnnnnnnnnnnnnnnnn

SEQ ID NO: 8133 - DNA, 1731 bp, Setaria italica
  Peptide Sequence Number=SeqID_74107
gctgcatgcgccggcgggcgcggtggcactgccccgctgacgacgccttcctgtgccaggcctgcgacgcctccgtccactcggccaacccgctcgcgcgccgccaccaccgcgtccgcctcccctcggcgtcctgctcctcccctccccgcgaccccgacgcgcccgcgtggctccacggcctcaagcgccggccgcggacgccgcggtccaaaccaggggtgagcaagcacgagaccacgcccgcctcgatcgccgccgccgtgtcggcggcggtgcccgacctcgaggcggaggagtctgcaggctccggcatcgtgggcgacaacgactaccacgggttggaggaggacgatgaggaccttctgtaccgcgtcccggtgttcgaccccatgctcgcggagctctacaaccccgtggccgacgagggggagcagaagccggcggcctgcctgatctcgtctctcgcggagacgtcgccggagttcgcctccggcttggcggaggcggacgggctctccgggtacgacgtcccggacatggagctcgctagcttcgcggcggacatggagagcctcctcatgggagtcgacgaggggtttgacgatctgggattcttggacgaggagaagcctcaggtgaacgtggacttgggcagcatgaacctcgagaccatggcggcgccggcgccggaacgagatgacaagaagaggaagcggccagagatgatactcaagctcaactacgacggagtcatcgcctcgtgggcccgtgacggcggatcgccgtggttccacggcgagcgtcctcacctcgatcctcacgagtcatggtcggacttcccggcggggagcaggggactcctcggcggcaccgtgacggcggtgaccggcggcgagcgggaggcgcgggtgtcgcggtaccgggagaagcggcggacgcggctgttcgccaagaagatccggtacgaggtgcgcaagctcaacgccgagaagcggccgcgtatgaagggccggttcgtgaagcgcagctcgctgccgccgctgccgaggccgccgccgccgccttcgcagcagcagcagccgcgggcgatgatgccgcacgtgggcatggtgctcgcgccaccactgggcgcgcacgggcgcttccgtttttgaggccacacgtgcacaagcgtagcatgtgcatgatgcatcggtgcatctgcacgtatatacacacatgatgatctacaagtaaacactatcacgtagcatgttctttatactctacttttaattggggatgacgatgaacgtacctagtgttagttttgagcagaatcgcctgtccttccgtacatgcgagttagggctccccaagatgcctacttacgattacgactgaaatgtttgtaatcttgtgcagaatctaatgcgcaaagtagctaaggatcagtatgtatagctaggttgggtgtttctcttctgtttgtaaagaaggatgtactaattacaagggtgtagattttgatgctcgatctcatcgaccggaacattggagtactagtagctacatgtgtaaaggtctggaactctgaactgaagctgtataagatccaagtgaagatatgctatgtggtttgattagggttcttaataacttatgcatgtttttcttcctgttttgggtcttgggttggccatgatcgtggcaaaatgctccgtgaaaaagtttgtagtttgatcgaag

SEQ ID NO: 8134 - DNA, 375 bp, Setaria italica
  Peptide Sequence Number=SeqID_74108
gggaggaactccgagctggtcgaatcccgcggcggagatggagagctacctcaaggagaacttcgggggcgtgcaggccaagcactcgtcggaggaggcgctggggagatggcgcaaggtcgtcggcgtcgtcaagaaccccaagcgccgcttccgcttcacggccaacctcgacaagcgcagcgaggtcaccgccatgaagcgcaagaaccatgagaagctgcgtgttgccgtgcttgtttcaaaggctgcacttcagttcgttcacagcattactccatcgggtgagtacaaggtccctgccgatgtcaaggaggcgggtttcggcatctgtgccgaggagctgagctcgatagtcgagggtcatgacctcaa

SEQ ID NO: 8135 - DNA, 511 bp, Setaria italica
  Peptide Sequence Number=SeqID_74109
ttgtttctatttgttctattcttggggttcttacttatttactaaaggttcgtattattatttcagggatgctgcaactcttatggtgaattatgttgatgaaattcgagcacaaggttttgagttggagtacctgaatattggaggtggtttgggaatagattaccaccacaccgatgcagtcttgcctacaccaatggatctcatcaacactgtgcgagaattagttctctctcgagatcttactcttatcattgaacctggaagatccttgattgctaatacttgttgctttgtcaataaagtaactggtgttaaatccaacggtacaaagaatttcattgttgttgatggcagcatggcagaacttatcagacctagtctgtatggagcataccagcatatcgaactggtctctcctccctctcctggtgctgaagtagcaacctttgatattttagttaggaaccaagtttagtagaagtactagacaagaatttaacctacggaa

SEQ ID NO: 8136 - DNA, 1642 bp, Setaria italica
  Peptide Sequence Number=SeqID_74110
gccatgcccgcctgccctcccgtgcgcgcctccgtctccgcgactccccatcccaccgccgcagccgacagccgcggcggcggcggccccgaagcactgcttccgccgcggcgccgacgggtacctgtactgcgagggggtgcgggtggaggacgcgatggcggcggcggcgcggagcccgttctacctctacagcaagccgcaggtcctccgcaacttcgaagcctaccgcgaggcgctcggggggctccgctccgtcgtggggtacgccgtcaaggccaacaacaacctccccgtgctgcgcctcctgcgcgagctcggctgcggcgccgtcctcgtcagcggcaacgagctccgcctcgccctccaggcggggttcgaccctgcaaggtgtatatttaatggaaatgggaagacgttggaagatcttaaattagctgctgagagtggagtatttgtaaatgtggacagcgaatttgatttggagaatattgtcagagctgcaaaggctacaggaaagaaagtgcctgttttgcttagaataaacccagatgtggatccccaggtacatccatatgttgctactggaaataaaacttccaaattcgggatccgcaatgagaaattacaatggtttttggattctatcaagtcatactcgaatgatatcaaattggttggtgttcattgtcatctggggtctactattacaaaggtcgatatattcagggatgctgcaactcttatggtgaattatgttgatgaaattcgagcacaaggttttgagttggagtacctgaatattggaggtggtttgggaatagattaccaccacaccgatgcagtcttgcctacaccaatggatctcatcaacactgtgcgagaattagttctctctcgagatcttactcttatcattgaacctggaagatccttgattgctaatacttgttgctttgtcaataaagtaactggtgttaaatccaacggtacaaagaatttcattgttgttgatggcagcatggcagaacttatcagacctagtctgtatggagcataccagcatatcgaactggtctctcctccctctcctggtgctgaagtagcaacctttgatattgttggaccagtttgtgagtctgcagatttcctcggaaaagatagggagcttccaacacctgatgagggagttggacttgtggttcatgatgcaggtgcctactgcatgagcatggcttccacctacaacctgaagttgagaccgccggagtactgggtggaagaggatggttctatcgttaagatcaggcatgaagagaagcttgatgactacatgaagttctttgatggtcttcctgcttagacatttatctgcaaccgcggcaagccggcaagcacgttttctttgggataattagagtttctttgccaatctcattttacttttttttgttggtcgtagaatctagtggaatgtgactggatagttaatttggtttgttggtgtatcctcgagattttctgtgatgtgcaagtcttaggcatttgaactaaactgcattttggtggcagatgttaccgcgataaaaaaaggctcggtgaataaaaagggtgtaagttggtgctccttcgaaaaaaaaaa

SEQ ID NO: 8137 - DNA, 974 bp, Setaria italica
  Peptide Sequence Number=SeqID_74111
atgagttgtaagttgtaaccactcccacagactccactacatcctctgcgctactgctgcacaacatccagaatagctagctagcctgatcgatcgagcttgggtgcttggcaatggccgcaaagggaggtgagctgaagctgctgggcgtgtgggacagcccctacgtgaacagggtgcagatcatgctcaacctcaagggcatcagctacgagtacatcgaggaggatctcctcaacaagagcaagctcctcctcaattccaaccccgtgcacaagaaagttcccgtgctcatccacgacggcaagccgatcgccgagtcgcaggtcatcgtgcagtacctcgacgaggtcttctccggcaccggcccttccgtcctccccgccgacccgtacaagcgcgccaccgcccgcttctgggccgcctttgtcgacgataaggtgggttctccgtggcacacgatcctcttcgcgcgggaggccgagaagaaggctgacgcggcggcgcggatcatcacggcgctggggacgctggagggcgcgttcaaggactgctcccgtgggggtgactacttcggcggcgacggcatcgggttcgtggacgtcgtgctgggcagttacctcgggtggttcaaggtgttcgagaagatggtcggcgtcagggtcctggacgcggcgaggacgccgctcctggccgcgtggggcgagcggttcgccgcggcggatgcggcgaaggacgtcctgccttctgacgttgacaaggtgatcgagttcctgcaaacgttcctggattagtagttagtttggtgggtgctcctccggtgttgttgctgaacgccgattgaattgttgttgtttggtactttggtatggttattttcactgggctattaatgggctttaagacgtgatttgaatccacgatatatatgatggaataagaaggtctgatttgagcagggctctatgaaaaaa

SEQ ID NO: 8138 - DNA, 396 bp, Setaria italica
  Peptide Sequence Number=SeqID_74112
gtgcggggagaggcgcgcggcgagggcggccagcgaggcctccgagagccggcggccgagggagagcgacgcgtcgagcacctggcggccgagcgtgagccgcgctgcgcccgggtggtaccgcgccgtggtggcccaccacgccgccacggagggcgccgacggcgcggtcacgggcgccgagagggagaggaggaagtcggccacgacggcgcgctgcgccggggtgaagcgcccgtaccagagcaggttcacggagtagtttccggtgagcagctggccgtggtggttggtgagcgccacgggcgcctggctgacgaggaacagctgcctcggcgtggcccgcgcccgggcgccggcgaccgcggcgaggaggatgaggaggagggcgaggca

SEQ ID NO: 8139 - DNA, 568 bp, Setaria italica
  Peptide Sequence Number=SeqID_74113
ggggttggtcatttgggttggcattgttgctggtggttagcggcgacgcggcggcaggaggggcacattgtgagcgtggcggcgggggaggaggcgggctgcgcggcggtcgagggcgcggccttgagcgccctgaggtcggcgagctccttctcgaggcgcttgttctcgtcggcgaggcgctcgcaccatcgcttgaggtactcgcagtcgacctccgtctgcttgagctttgtccgggcgcggcggttctggaaccacacctccacctgccgcggccggaggcccagccggttggccagggcgaccttctgcttggggttgagcgtgctgtgcgtcttgaagcactcctcgagcacggcggcctggtccttggagaggcggagcttcttcctccccccggcgccgtccgcgccgtcctcctcgtcactgcggacgccaccggagccggtgcgctcgagctccctcttgttgtccccgccgccgctggtgccgctggagagcgccgcggcgctgtcgggcgacgtggacgcccgcatcgccccgctgtcgggatccacagccgccg

SEQ ID NO: 8140 - DNA, 396 bp, Setaria italica
  Peptide Sequence Number=SeqID_74114
tcgctgcagacattgtaacccgtgatgagcatctgaatgaggaagcaggctccctaaatgatgggaacatccaaaactcagaagaggatatggtcaaagagatacatgacaaagacagtggagctggcactagctcaaatttgactgaaaaacttggaaaccttgacacaaatgaaaatccaaatggtggcgaagttgatggttttgccactagtgatgcaagcacactgaatgggaaaactgaggttgttaacagggaggagaggttgcgatcatatgaaggcatgcatgttgaatctcatgaagccctgattgaagagttggagaggtcactttcgtttagtagtgatgatgaatacttttcagatgaagcagaaaacattgggcttagtgacg

SEQ ID NO: 8141 - DNA, 831 bp, Setaria italica
  Peptide Sequence Number=SeqID_74115
aaaattccgcattatttacagacatcctaaacatggtctgtggttgtgtcgataacacctcctcagacagtactgttctccaagtcttgaaagtgcttctcaatgctgttgcttcaaataggtttagagttcatggagaaccattgcttggagtcattagagtatgctataacattgctctcaatagcaagagccctgtgaaccaggctacctcaaaggctatgttgacccagatgatcagcattgtattcaggagaatggaatccgagcaggtttctgtatcacctgcaagctctgcggttaaagagacaccgccatctagcacaaaggactctgaaaatggggaaatatctactgatagccaagatgaggaaaaagttactcttggagatgcattgtccatgaatcgggcttcagaagcacctccgacatctgttgaagagcttcagaatcttgcaggaggagcagatattaaggggttggaggctgttctggacaaggctgttgaacttgaagatgggaagaaagtgtcacgtggaatcgacctggacactgtgaatataatacagcgtgatgcgctgttgctctttcggactctttgcaagatgagcatgaaagaagaaagcgatgaggttgctacaaagacaaggctgctgtcacttgaactgttacaggggctgctagaaggagtcagtgatgcgttcacaaaaaatttccacttcattgattcggtcaaagcatatctttcatacgctcttctccgagcatccgtctcttcatctccagttgtttttcagtatgcttgtggaatattttcagtcctgttgctcc

SEQ ID NO: 8142 - DNA, 212 bp, Setaria italica
  Peptide Sequence Number=SeqID_74116
acaaggcagcctggcctggcaccttggagcacaccgccggcgacttccccccagcgagagcgcgctcgaaacaacactcctgcgcctgcgcgagcataagccgctccagcatcgatgaggcctgcgagctcatatccacagtcgtcccctcctcctcttccatcatctccccgaccgcacggaacgcccccgcggcgcgctggaactccccg

SEQ ID NO: 8143 - DNA, 426 bp, Setaria italica
  Peptide Sequence Number=SeqID_74117
ctcccgtcccgcctcagggacgactagggtttagccaccgccgcccaccagctggccccgccgccgccgttccaggggaggggggccgtcgccctccttttgtctcccgcgcccgtcacctgctgggtcccgtcgcccgccacgaaatccccaagctgcacagtacccgaggccgtcggaggttactgggtgggagctgcccgccccggacgactcgctcgctgcctgcggggaactggccgattccgaggtttgaacctgctttaaaagtatacagtatggctgcggttggtgcagcaaccaaggagatggaggcattgcatgttggacaaaatgatgaaataaaagagaatctgattaaacaggacaaagttgcaagtagcactagtgcagttcttgcatctaagtcctcaccaccagaggatg

SEQ ID NO: 8144 - DNA, 329 bp, Setaria italica
  Peptide Sequence Number=SeqID_74118
cttgaccgccacacgccaccacgcgagcgagctcgtcacttgatctcccctcattcccttcgccacgacgttccctcgccagctgcaccactaccgccggcgccggcagctcgctagctaaggcagatactagctagcctacaaccatcgatggcgccgcggctgctggcgtgctttggccggaggggcggcgcgacggcgtcggcgccggacgagcaggaggaccagcagcagcagcagcaggtagccccggggccggtgctgttggagctgttcgcgtcgcaggggtgcggggcgtcgcccgaggccgacgccgtggcggcgcggct

SEQ ID NO: 8145 - DNA, 180 bp, Setaria italica
  Peptide Sequence Number=SeqID_74119
ggcacgctctaccgcctcaaggtctgcataatgtactgtccgtacagatccctgcacaaaacaccgcagattgtcagtaccaatccagagtttcagactccaatctgatatgactacacattttttcatgccatcttccaaaaaaggaccagtacttacatggagtactggatggcttcg

SEQ ID NO: 8146 - DNA, 460 bp, Setaria italica
  Peptide Sequence Number=SeqID_74120
gcaggtggcggcagtagctctggaacacgctggcgcacacgttgagccggaactgcatcaggaagaggaagtcgagctccagcgcgccgagctccgccgcgccgagcccgcccaccgccgcgaagtaggagttgctgtagttgcggtcctccacgaacttggacgccacgaggatggccgcggtgagcaggcgctgcgcgttggcgcgcacgacgcggacgccggcgtccccgcgccggagccggtcaaggtacgcgtacgccaccacgtacaccgccggcgagacctgcgcgtaccgggagaagcgctccaggaacgcgcgcaggctcatgtccagctccgttccgccgtcgaacgcccgcacccgcctcctcgtcgccgccgagtcgtcgtcgtcacccgatgccgccacctcgcggtcgctcccgggcgccaaggcccgctcgttgcgggcgatgtc

SEQ ID NO: 8147 - DNA, 261 bp, Setaria italica
  Peptide Sequence Number=SeqID_74121
ttgatcgccagtgtgtcgccgttgtacacctcgatcgtcggccccgggaactgcccgttcaccgtgatgatcttctgggaactgcacagcctcttcactggcgtctcctggacaacgaactcgtagaagcgctcctcggcgagggcgccccggaggaggaagcagcagagcaggagaaaagcggaggagcagaggagcttcacgagaccggacctcgccatcgcgccggcaatggctggcttggtttgctctggtggtttg

SEQ ID NO: 8148 - DNA, 487 bp, Setaria italica
  Peptide Sequence Number=SeqID_74122
gtctcgaacggcttggtgtacatggcgtcggcggcgaccacggtcatcttgtggccggcgaggctgacgaagagctcggtgttcatggccgcgttgatgatgcgcagcaggctcgtctcgccggcaaccacagggatgatgctcgtctcttggctagagcagggaagtaagtctccgggctggccgttgatgaggagggcatcggagacgttgggcggcgcgccggtgatcatggactgccggagcacggcgatggggtccctcctccaccactccgcgaggatgacgggaaactcgctgtggggcttggggaacgggtaggggaggcccctcctggggtggatgatgagcgcgccgtgcacggtggcgcggagccaggagctatgggcgtgccaccacagcgtgccctcctggtcctggatggtgaaccggtacgtgtagctgccgccggggcggatggggcactgcgtcacgaactcgggcccgt

SEQ ID NO: 8149 - DNA, 2008 bp, Setaria italica
  Peptide Sequence Number=SeqID_74123
ttttttttttttgcagaatgtcattgaaacttacatagatttacaggggaaaagttcaaaacaagctggaaaatcaactcccctagaatttaagatcacaaatagccccccaaaaagtaacaattaacatatacaacataaaacaggccagcttccaagcaattcctcaacaccgtatcttctgctgatcattagcacatgggaagatcaactgggggcggctccagtgactgcagctcgccatagccatcctccacgaggaacgccattgccagaccccagttgatgtgcacgtccagatggcaatgcatgagccacaccccggggttgtcggcgacgaactggatgaccgtccagccgttcaccggcaccgccacggtgttccgctgcggcgggtcgacgtagttgaacttctcgacgtccttcttggggtcgaagttgccgaacccctcggcgaggatgaagaaatcgtagccgtggatgtgaatggggtggttctccggcgtgacgatgctggtgtcctgcaggacgagctgcacgacggagccgaacctgagcgggtacagcttggtcgccggcaccggttgccacagcgcctggctgacgttcttggccgtgtagtcgaactgcaccggcgggtaggccgggaagtcggtggtgaacacgccggggaccttgtagtagtgcgcgtggaggagcgagtccttcttggggaagacgaaggagacattgttcatgctggccgtgaagcgggtgttgttgttgggcccggcgcacagctcgcccggcttgcagttgaacaggccgaggccgacggtgaagaagaggtactcgtcgacgttctcgtggaccttgaccctgtcggggctcttgatcccggcggcgaaggcggtggcggcggcggtgtcgttgaaggccgggagcgccgggaacgccggctggatcttggggccgaagtcggaggcgcagccgcagtcgtactcgatgacggccgtggtggtggtgttgtcgaaggccacgttctggccggagacgtaggcgcgcgcggcgacgtagtaccgggtgggcgcctggtccatggtgacgaggacgtcggtggtctggcccggcgcgatcatgagcaccgaggtggtgaagggcttggtgtaggacgcgtccgcggcgaccaccgtcatcttgtgctgcgcgatggtgacgaagagctcgtggttgagggccgcgttgatgaaccgcagcagcgccgtctcgccgggcttcaccgggatggcggtggtctctttctcggagcacttcaagaagtcaccgggctggccgttgatggtgaacgcgtcggagacgttgggtgcgccgcccgtcctctgcgcctcccggatgacatcgacagggttcgcgttccaccactcaccgaggatgacagggacttcgcgcgagggcttttcgaaggggtaggtcttgttctccctggggcggatgatgagcgcgccgtagacggtggccctgagccaggagctgtgcgcgtgccaccacagcgtgccctcctgcccctcgatggtgaaccggtacttgtaactgccgccgggcttgatggggcactgcgtcacgaactccggcccgtccgcccaccccgtcctcagctgccggatgccgtgccagtggatggtgacgtcgtactgcgcccggttgacgacgttgatgacgagcgtgtcgccctccctcacctccagcgtcggccccgggaactgcccgttcaccgtgatgatgttgtgcgtcttgcacagcctcttcaccggcgtctcttggacaacgaactcatggtggtgcacttcggcaccggcgagcagcgaaagcgcgaggcacgagaggaggatgagcatccgggacggcggcgatgccatggcgccgagcgaatgttgccgcaacgtcgaggacgtcgtcttccgcgcaccgatggatgagagccgggtgcggctatagctggtggctttcggctgaaggcttacgagttgat

SEQ ID NO: 8150 - DNA, 682 bp, Setaria italica
  Peptide Sequence Number=SeqID_74124
ctgtggcttccatttaacagggaaacaaaatgtgtaacgaatctgaagtagccgatcctatcaaagtaatgcagatctcaaacagtaaccatcaaatgccatgccttctaaatcaaatagatgttactaagaatgttacaacatgaggaccaagctgaggaaaactgatgtggtcctcgacagcatggttaaaatgtctaacaagaaattgaggcatgctgccttgcatggatagacaattcattccttcacctctcaaaaagcataaccatctcacagtgcgaggtgtgaggaaacagatccacggccatcgccctcttgggtataaaaggctcagagttgggcatggacttcgtccgctgcctagcaagaccagcagcactcatagatcgccaccctcgattgcctttgttcttttcttgtttctcagatgttggggtgcacagctcaatcgcattggcaactaggctatctggattgcaggaaatgtacactaggcgtcgaatgagtggatgagtcctcaatgccttgatcacagtagggtgaaggccaacacgtggggggtccacaattgcaacaacgtttttgaacttgcatgcactagaatcaagcacatttttgtttggaatagaactatcctggcatgtcttgccactgccaggctccaaactatcagataatg

SEQ ID NO: 8151 - DNA, 2047 bp, Setaria italica
  Peptide Sequence Number=SeqID_74125
aaggaaatagtacactaggcgtcgaatgagtggatgagtcctcaatgccttgatcacctataatgatgctcaggatgtgagtataataaacataattatataacacaaatacaatcactatccaaatttatcagctagtagttgctaggtattaacacgaaaatatttgagaaataacaagacctattattagatttattaaggaataatttcaaggcatatggaggaatacactaagatagccaggcctttgaatgtgcagtggaaaaaacatgtagatttttcagtaattaacatcacaatcctttcagcaaaaggtttttttttttgaaattgactttcagcaaaaggttgaaatttactttcgaatgagtggatgagtcctcaatgccttgatcacagtagggtgaaggccaacacgtggggggtccacaattgcaacaacgtttttgaacttgcatgcactagaatcaagcacatttttgtttggaatagaactatcctggcatgtcttgccactgccaggctccaaactatcagataatgttgtatcagtgcactcatcattgatcaatgatgcttccccacatttttgttcaccagcagcctcattgtgttcattatgactggaatcaacctctttgttaaccctatccattgaatcttcctttatttcctcatcaccagcacaagtgggaagatcaactgacatgtctccaggctgctcactttcaccattgttgtttgtctctgttgaactgtccatattttcaccattgctttctaggcaatcaactgtatcttcattttctcttgtatcattgattatggaattactttcagaagctgcaatgtgttgctgtggtgaaccaagatattctgtgagaagggacccgatcacatcttcggccttcccacagacaaatcggcaattttttatgtcgttaataagagcatttctgtgagcatctgaaactgccgattcattcatttcaatcccaacaaccattccaacacgatgtgctaaggtcagaccaatagttccagtcccacaacatacgtcaaaaagtaacgtgtccgaattgaggttagcccaatcaccagcaaggctatacaatctttctgcagcaagagtattaacctggaaaaaagctgtcggtgatatggagaactttaaattgctgatgtgatcatggattcttgttttatcttctgctccgccacccaattgatctccctttggcaccaatagtgggatcagcgggcaatcagcaggtgcagcatttgatattcctttatgatcttgaactacaatagttgttagtggcaaggaaggtgagcacattgctgctccttctatcagggcagcggacagcttgtcaaactcttctttcattagagcctcatcgacatctgttgagcacacctgcacaataagcatgacttctgatatttttgattccgcattctgtaaaacaacagcttccgctggataccttccctcacgaactgtgagttggcgccaaaacccacaattatcaactcggctccacaaaggcaagcttgatgactgcagaaaatcttggaagatctgagcatatttacaggaaatttctgagacatttgggcagttcacaggttcctcaacagcagtcacgccttccctgaaattcccaagcataaatcctactgtctttttgccctccaaggaatatcctacagagaactcgcacttgttacggtatccatcaacaatgggggactccaaaatgccttcaagcttgcaaggaagaccaccaatttcctttgatttaaaaatccaattaggaaggggaatggcaggcgggcaagcttttctagcattgcgagtaagtctcttcagtatctgcgccattgaatgttttttgtgttctagctgatcattgtaagacatatgggcaaggggagtaacagcatcacgggcactttttttattgatgcaaccgcttcagctgcagatgcttccccagcggtagcagcagcattactaccattttctgttgcagtt

SEQ ID NO: 8152 - DNA, 662 bp, Setaria italica
  Peptide Sequence Number=SeqID_74126
aggagctggggcagcgtcggcgacacgcttcggcgacagctccgggatgaggccctccagcatccgcatcatctgtgccttgtagctcttcagctcgcggcagctactctcgtgcttccactcgaactggatcttccccgcggtgacgctgcccgggctaccaacgtcgatggccacgctctatgcgaattggttgtgccagtacaggtagctcagcatcggcgcccacagcgtgaacgacttgtactcggcggtgcagccagtgatgcagttcacctccagatcctctagctccggagcgtcaacggtgatgtccccgaacggcgagccgatggagttgccgtgtgcgttgacgtcgacctgatcgtcaaggctcttaaggagaggtagaagacgaatgtcgacacgcgcttgctcgattttggaattgaagatgctcacttgctcaggttctcgagcagcgggcaccacgtgccaggtgggaacggcgcctcgacggtgacggcgttgagcgtcagggagcgcagggacgggaggcacggccactcgcggagcacaacttcctcgaggcggagatcccgcagggaggcggcgcctggccccgtgattgccggcgagaggtggccgaaagcacaagatcgcccccacctcctctcctccct

SEQ ID NO: 8153 - DNA, 598 bp, Setaria italica
  Peptide Sequence Number=SeqID_74127
gctgcgtgcactccgagctccacggccgcctcctcccgctgctgcgccgcgccgcggcgtccggcgccggcgcccgactcgacctccaggacgtgctcgagcggttcgcgttcgacaacatctgccgcgtagcgttcgaccacgacccgcgccaacttccggacgacggcgatgacggcacggcggcggacggcagcttcgccgacgcgttccgcgacgccgcgaatctcagcgctggccggttccggtacgctgtcccggggttctggaagatcaagaaggcgctgaacgtggggtccgagcggcggctgcgagagtccatcgcgatggtgcacgacttcgccgatggcataatccagtcgcgccgggaggagatgctgagggacggtttcgagaagcacgacctcctttcgcggttcatggcgagccaggacgcgacctactccgagtccgaggtgcccctccgcgacgtcgtgatcagcttcctcctcgcggggcgggagaccacgtcctcggcgctcacctggttcttctggctgctctcctcgcgccccgacgtgcggcgccgcatccgcgacgaggtcgccgcggtgcgcgc

SEQ ID NO: 8154 - DNA, 1176 bp, Setaria italica
  Peptide Sequence Number=SeqID_74128
agaccgccggccgacaatggcaaacaacatcagaccccaaaaatctagatccggtattctaccactctctgaatatcctcactagtcagaacctattcataaacatacaacaacaaaatcaccatacaaatcaaatcatagtacacagattcagaagcaggcaagaccctgcaacagtcagatactcagatatctctcttctcttgggcaagatgttgctcctccattcagcacctctagctccaataacaaaattgtctcaactccatcgctgactaaaaactaaggaaaaaaagccgcagtcatcctcctcaaagtacaacagctgccttgtctgaagtaacatgctggaggacagtagcaatcaaaggctcataatggtccgcaccagcgccacaccaggctgttcctttcatgaatagaaaaattggtggttcacaaatttctcctctaggacggtgtgggaggaagaaaacacaattatcctcatcaaccattgcatctgctccatgagcttgcaccacataaacttctctcttgaactcggttgccaggcactcaatggcaatatcatcaccaaatgcagctgcacggccatccctgttctcatcaattgttagtaagccctcctccgtatactgcagggtgataatgtcgtgctcatcctctgcggaaccagaaatggacatgtacttggcccaactgtctccattgtttacagcgatacatctctccttgtagatagtttcagccgcaatttccctctggatgccaagatcgacgagctcctggatggcggcgtcgagcgcgtcgcgctgggccttgggcgcgagcaccttgatctcctgcacgacgtggacgccccacccggccttgagatccggcgcgtagaggtgcctcacggccgcgtcaacggcgcccctgtcgtcctcccccgcggcgtcgtagacctctgcaaaccggcgcacagcgcggtgcctgagctcgcgcgcgtcggccttggctgctgcggccgtccgtgcagcggtgaagaggcagttgccatcggcgtcgacctccccaccgtggtcgaggcggaagaccacgggcgccgcaccctcctcgccgccaggcgaggagggcttccacgccacgccccgcctcccagactccggtggaggcggcggcgctgctggt

SEQ ID NO: 8155 - DNA, 461 bp, Setaria italica
  Peptide Sequence Number=SeqID_74129
aagccatctttgacataaggtgtgctcccagagtaagctgcttgaagaccctcaagagtgcactcatatattgggacagcactgaatctatatcgatggtatgttgatggaggatcaccagctgaagtttctgtgagcttagagtttacccaaaaaacctgaactcggcagtgcaatcatacagtgaatagccacgccaacaaatcatgtcaatgatatagtatgtttgatcaggctcatgaaaaatgcaatcgagtatggagtaggagcttgctgggccagatatgtctctctttgatccatttggtagagcagaagggaaccggtgaaggattgatccgttgcgcgccctgctaattgtcatgccattggaagactactcacactgaggtttcccagaaggcctggcaaaaacatgccagtcgctggcaaggtggggcggggcgtcgaccatccactcc

SEQ ID NO: 8156 - DNA, 267 bp, Setaria italica
  Peptide Sequence Number=SeqID_74130
ctccggtggtcagagccaacgcgctaccggcgagcggccgtgccggcataggcgacggtgacggcgactgcgacgatgacggcgccgggagcgagtcgagctcggacctgttcgagatcaagagcctgatgatcgaggactgccgctacgagccgagcgaggcgagcatccagtggagcgtggtgacggcgagcgccacggacgcgtcggagccgcgcggcgaccgcgtccccggcagatgggtcggcggcaggggtcctgtggccg

SEQ ID NO: 8157 - DNA, 901 bp, Setaria italica
  misc_feature (877)..(877): n is a, c, g, or t
  Peptide Sequence Number=SeqID_74131
tgaagattcaaaccctcatgtcatacaccgtgacttcaaggccagcaagtatattgttagaggaagatttcactcccaaggttactgattttggtttggcaagggaagcatccaatgcaactcaacccatttctaccaggctaatgggtacttttgctccagaatatgcaatgacggggcatcttcttgtcaagagcgatgtctacagttatggggttgtcttgctggagcttttgtcaggaaggaaacccgtaagcatctctgagtccaaggatcctgagaaccttgtgacttgggcccgtcctctgctaagccataaggagggcttggagaagttaattgatccttctctggatggaaagttcaactttgacaatgtagctaaagtggcatccattgcttccatgtgtgtgcacaccgatccgtcacagagaccattcatgggagaagtggtccaggcgctgaagcttatctacaatgatccagatgaggcttgcaatgattcctatagtccaaggaattcatctgatcaagacggtgactatgaagggggcctggcctttgagagtggcagctggggggatcgggggcctctgggtgtctagactatcggaactccttaccaaatttgttacaatggactacagttctggccgactagaaggaccgcgtgagcctcaaacgacattgtcaacgggctcccatgtccagtcaccagtgctacagaatagatcaggccccttgcggatgaagaaaaagctcgcctccttctaccgttctagaggcagcatcagcgagcatgggcacctgccgcaccattgattgatgaataagctagtgttagggctgttagcttcggtttgacttttgggggttnaggctggggaggttgtcatcacct

SEQ ID NO: 8158 - DNA, 482 bp, Setaria italica
  Peptide Sequence Number=SeqID_74132
taaaactagcaagactgcaagtaccaaactgtagtgaactagtgatagtctgatagacataggaaggggagagggagagggatggggagggatcaggcagctgcagcggtgatggctcctgagaagctgaagctgttcatgggagtgctggccctgcagttcctgctcgcggggttccacattgtcaccagggcggcactcaacatgggcatcagcaagatcgtgttcatcgtctaccggaacatcatctccctcgccttgctcgccccgttcgcctacttcctcgagaagaaagacaggccaccactcaccttctctttgctggtggttaattttctgctagcgctgtgtgggataactgcaaaccaaggcttctatctcctgggtctgtatcacctgtcaccaacctacgcctctgcgatacagaacaccgtccctgcgatcaccttcgccatggccgctgtcctcaggcttgagcaggt

SEQ ID NO: 8159 - DNA, 901 bp, Setaria italica
  Peptide Sequence Number=SeqID_74133
attgctactggctccgaaacaaatttgtggaagcttagcgattggatgcatacctcatttgtttcggagccagtagcaatgtagccatcagatatagaaaggccaacaaagttctttgtatttgtatgccctgtaaatgtttggattggactgtcaattatccttcctgggctcatcgacaagtcccagagcctcaatgagttgtcagtagacgcagatactattgttgatgcgtctagatacttaacatagcttactgtttttgtgtgcccaaccagtgtacaataaggagctcgtatgttacggagatcatagcagtaaattttgtgatctgctgagccaatggcaatggagcgagcagtatcaggttggaattgtacagagcacacatttgcccttgttctaatagtgccaatactcccagcctgattcatatcccacagcttcacagatccatcatcactcccactgaccaattttgttgggtccacaattgagaagtccaccgaccacactcgcctctcatgctccctcatgtcaacgaaaacttgactcctagtaacatcccaaacctgcactataccctcaaaatcactagatgctatatggctcttcatataactgttccagcaaatacaacttaattttgatctattggacatctctaccacaggatagtgaatgtcacgatgctcatttacaatcatattatactcaaacacttttatcttcttatttacaccagctgttgcaaaaaactctttatcccggtcaaaccctacggagcatactaagttcgatgagttcagcagatcacactgtttcagttctgcctgtactttcaacttactgaatgacaagtacttgcacaactcatcaagttaaagatctaagttaaaag

SEQ ID NO: 8160 - DNA, 2293 bp, Setaria italica
  Peptide Sequence Number=SeqID_74134
ccccacaatatgtcgtgacatattactattgcaccacacattaaagttacacaacagcgtccggaattacggtcgtaggtcgttagcaattgaggccgagccggcggcggctaggcagaaaagcatgcacgaagccagccaccggagcacaagcgaaaggcccggtgaatgttttcctaaaaccctactgaaatcagaggcaagatacaccataacaagaggagaaaaacagaagggagagaagttacatcactttggtcagtcgctcgcaccgtgtcatctgtcattgtttgtgagtggtggttgatccgatcatccgaatgaaggtaacccgtatttccagccgttggaggaccgccggcgagggggcggttgctgctgcggcgcgaagctgagtccgaacatctccctgagccctggctcctggagccctagcagcttggcgactagggaggcgctctccctgacgtgctccaggtccttggtctccgtccagaggcggcgagcaacctgcagcttcctcttcttggagtccagggaaatgccccacttgctgtacaggtggtccctttcgactgccgtgagccgtttctgcatctgcctcgcaagcatttcccgctcgcgttgcagcttcttagcacttgcagccggggaagagttcaggctgcctactaccacattgctaggggtgcctccccgagagtaagtatctctgaggaatgatagcctccgaagctccacttccatgtagattgagtcagcctgatctcccttgaatagcaagaaaaagtatgtcctgtggactaaggaaatactgcatgcatgccaaagctcgatgatttcctgctgtttcttctcgaattccaatggccagcgagacggtgattgtgaagcatcagcaatcgggtccaatccaatgctctttatggtgccctctccaaattccccatttgcattctgatcaccatactgtttctgataatgaacctgagccatttccttcaattcagcaacaaattcacctataccagtgaactctgcatcgcatgcaccatttgtcttggctgaaactatagatcctgctcttgaaagagtttcgctttctgcatcatagttcagcacagatccgcttgtatgatccctttcaggccttcctgggaaaccaaccaaacttctatgcaccggggtgccatcatctgcttccatgccatcaaacatagtagaagctgtaagtgatctgcagctcctgcttctaccaagtaatctggagcctgatgagttacgtgtcgaagatcctagatctctgccaacactggcaaaaggccttctgatattctccaaatgctgctccaacgtgataggagattcaccaaggagccttgaacgccttgaattcaccgatgtatttgaaccattaccacgcaaactagaattcacgtttgaaccttgtggactactgctttcgccagctgacatatccaactgttcatttcctcctgttccactggtctcaatgcaccgcacttccttgtaaagatctgaatcgtcttgagatacctgagaactatcatccctaatgatgcctgggggcattccaattgatggaggactccgggctgaacgctttcccgagcccgaatgctttgggtggtccccaacagtctgcagcagattctgcaacctagactgagccaaatcacgctgtgacttgagttcttttatttctttctccatctttctgatttgattgtccttttcctttactaatgcttcaagactggaatttgaagctggttgccgcaactcactctccaatctagcaacttccttttgcaaatgcttaactagcgctttatcagacatgaccacattgacttgggcatttgtaactacttcctttgcacagctcccaaataatagggtatttcttgattgctcaatatggctagtggctgggctcagtgtacagatgatggcagttcttgcattacctcccaaagatggctgtaatatacgtgtgagcttcgaatctctatatggtatgtgtgcattactccccatgcttagtttcctaatgacagtgccaagggcaagcaaacttctgttaatatggcaaccttcttttagccttgtgccagcagacaacgcctgagatgcacgctcacttcctgctagatcaacaaagtttgcactagcaacaagtgtagttgacttatcctttccaaggaactcccgggcagtactttcaactgtcactctcagtatctggtgagatctggagcttttttcattt

SEQ ID NO: 8161 - DNA, 684 bp, Setaria italica
  misc_feature (653)..(684): n is a, c, g, or t
  Peptide Sequence Number=SeqID_74135
agaaaatgaagatattggtgatgatggtgaggagatggaaaacgatgaacctttgtctggtgagtactgaaaaattttggaacagttgctacctgccatgctccatgtcactgtattataatgtttttcaagaaatcagctccaaattctctggtaatgtctttggtttccagaaatcaaaacttatgaagatgacgggactagaatcacagtgaccaccagcgaaattacttgtgaagacgatgatattggaccgagaaatgttggccctgtgtcgagctacaccaacaagaattctagttcaatggccaagaagaactccagcttaggcgtgaagaagaagccacagaagagaacgttcaagaacaagagcaaggcgaaaaagggcgacaagaagcggggcgcggtaaagggtaaaaggaagggcagaggacggaagtagcgttttctgtctgtagagaaaaatcgtatggctgactgggttgtgggtgacctcatataatttgatgtgcacttgtctgttggtcatccatacggggctggtatgctaaactgtgagttgtgctgcatatcggttatcaatgtcagggtccatccatgatagaactgttttgatcctagttgagataattttcgtgacagtttttggccannnnnnnnnnnnnnnnnnnnnnnnnnnnnnnn

SEQ ID NO: 8162 - DNA, 1445 bp, Setaria italica
  Peptide Sequence Number=SeqID_74136
ttcttctaagttttttttttttttttgttaaaaacggtcagttttcaagtctttcagttgaagaacacgtccatcacacatctgcaagacagcctcaccagagaatctggtattactacaacaaccgtttgaaacattaaacacaattaagcccgagcaacatgagctgctggggcaaccgagtgaattaactgcgttcattcgaaatgaaaagcaagtctacaagctagacagctaggccatatctgcagacaccgacgattctggcgcttgcttccctcccgggtctcaccagagcttgctgctaggctcttgccctcttgttgctgcaatctgggcacttgtagtgcttgatatgctcagctcgagcaggtgtgatcttgacacacttcccatggtaccaccgttcgcaactgtcgcagcagatccagaactcgtccttgccgtcatttgttccacaggacccacataaggtgttatcacgttcttcctcttcttcgtattcttcgccactctcatcatcatcatcatccttggggggtgccgacccttttgttgccttcgaatgagactcgggtcttgatggcattttcgaacttggtttgttgcttttactggtactattggggcccttctccttggtttgtttcttggcaaccccagtcactacttcaaatattgtgggcaagttatttatcatgttgaagagtcgcctcctggcctctttgtcaaacccaaaccgggccgcaaagtagaatgcaacagctagtaaccaggaatcgctgtgaacggcaactagtgccaaccaatccttctcattcatgccgtccctcgcaaagtttattcccaatgctggttcagggatctccggaggaacttcctccgccggcaaagttacttcccatgtttcattggggtaaccataaaggcataaattttccttttcggggtcgcagagctggtagaacttctccacatcggtggtgagggccttgatcatgcccgcgcggcggccgcggaagtcgcggaagacctcctccgcggtgcgggcggagtagtgcgcgccggcgccggggtccatttagggttccggcgaggaggaggcggcggcggagacgaggggaggaggggtgtgtgaaggcgaggaggtgggaggaggagaggaagaagagaatcgaggcgcgcaagaggagaaaacaagagaaagagattgctctatatggtagagtgctgtcatcggatgatgttgaattagaaaatgaagatattggtgatgatggtgaggagatggaaaacgatgaacctttgtctgaaatcaaaaacttatgaagatgacgggactagaatcacagtgaccaccagcgaaattacttgtgaagacgatgatattggaccgagaaatgtggccctgtgtcgagctacaccaacaagaattctagttcaat

SEQ ID NO: 8163 - DNA, 943 bp, Setaria italica
  misc_feature (745)..(745): n is a, c, g, or t
  Peptide Sequence Number=SeqID_74137
gagagagagagagagagagagagagagagaggcgagctgtgtagccatggcatgggaggaggaggccgtggaagaggaggaatacggggaggagatggcggcgtcggagtcggaggcggaggacgttgtggtggggcagatgccgacggtgatggtgccgaagcacatcaagaagcgttccctcaagaacaaggcgctctccgtcaccctcgacaagaaagctctcagggatttcgttactgggttccacaagaggaagaagaagagaagaaaggaagcacagaaggttttgcaggagaaggagaggaagaagagaatcgaggcgcgcaagaggagaaaacaagagaaagagattgctctatatggtagagtgctgtcatcggatgatgttgaattagaaaatgaagatattggtgatgatggtgaggagatggaaaacgatgaacctttgtctgaaatcaaaacttatgaagatgacgggactagaatcacagtgaccaccagcgaaattacttgtgaagacgatgatattggaccgagaaatgttggccctgtgtcgagctacaccaacaagaattctagttcaatggccaagaagaactccagcttaggcgtgaagaagaagccacagaagagaacgttcaagaacaagagcaaggcgaaaaagggcgacaagaagccgggcgcaagttggtaagggttactagaagggcagaggacggaagtagcgttttctgtctgtagngaaaaatcgtatggctgactgggttgtgggtgacctcatataatttgatgtgcacttgtctgttggtcatccatacggggctggtatgctaaactgtgagttgtgctgcatatcggttatcaatgtcaagggtccaataccaatagaataagaaactagttttagaatacctaagttagaagaataaatttacgtaga

SEQ ID NO: 8164 - DNA, 263 bp, Setaria italica
  Peptide Sequence Number=SeqID_74138
cgaaagccttttgcggcggcgggcggccatgatcggcgggcaggcggcggacagccagccgccgtcggcgtcggcgtcctgctcctcctcgtcctcgtcgtcgccgtcgggcccggcggccgggggcgggctccgcatccaccgcagcaagaggcggcccgacatcctcaacatgctcatgactgcagcgtgtctcagttcatcatcatctgatactggaaaaggacaaagtaagttgtcgagcaacaaagtaacacatggta

SEQ ID NO: 8165 - DNA, 507 bp, Setaria italica
  Peptide Sequence Number=SeqID_74139
tccaacaggtttcttgcatcagctgccgttaaggaactcaagtcaccaagtgcctcttgaacaggcgataggtcgagtgctcggatgatgtccttgttgatgacgatttcaaagcggccttctgtaggcggaggcggaggttggacttgtggggcatcgtcttgttccatggagagggagaggtcgaagttgcccgaggggttgaacgcaacgcgcgcggcgaacttggccgccctctctgccctcgccggcgtcgcttggagctggacgggcggcctccccgtgacggagcagcgggaggccgggtggagcaacggcgagcagctgctgttgtgccgcatcggagcaaggcggtgaggcaatacgagcaggtggtgagcgttggcggtggccatggcgggcgaacgggcggccgccggcgagcggaggatgtgctgcggcctgcggcggcgcgacgcaacggtcgggaactgcggggtcgcgcggttcacgcctgttctatccggt

SEQ ID NO: 8166 - DNA, 223 bp, Setaria italica
  Peptide Sequence Number=SeqID_74140
gcgcagcctaggcacagctctgctgaactgcgaagcctggaaatcatggcgagagcttgcaaccacgcgctgaggctgctgccgaatccggccacgacgccgctcccaggcagccgaagccgcggcgcccgatgcagaaacctcgccgttcacgcgcagctctcgactgaagacgacgagccattgaagaaagtgcaaatcacgcaggtgcatagcgtagcgt

SEQ ID NO: 8167 - DNA, 250 bp, Setaria italica
  Peptide Sequence Number=SeqID_74141
ttaatttacagggtgcacttttcttttggctcagagaccaataaggtagctaacgtgaccaaattgccccccattaattcttaagaatgcatgcagctcggctatcaattgctgccgttgcttaggagggctacagacgtccatttgtgctttggaaacggaacgtgcttagtaaaactgaacagctaagagaaaaatggacaccctataatccgaaacggaaggagtactagtagttacaaaatactac

SEQ ID NO: 8168 - DNA, 568 bp, Setaria italica
  Peptide Sequence Number=SeqID_74142
gcgcttgagcaggtactggtccttcttgctggacttggccttcatggcggaggcccccggcacgatcttctccatgagcctggcggcggccccgcccggcgccgcccctccggcggccggattgcggcgaggcctggtcctgtacaagtgcactcaaccagcttacctcaacacctcgttgtgctcgatcagccgctgctttcttctcggcttcaagcaccttctccggatccaccccgaaggcctcggcgtaggtgtcgtcgcgcggggcgaacactgtgcggcggtacgccatgaacagcccggccatctccatccccggcacggtgcgcgcggcggcttcggccacgtcctgctgagtcacggccgcgtccagcaggtagtccagcgccttccgcggcacgaatcgatcccgcgcggcctggatctggtcggggtggtagtcggcgtcggagtcgaatcccgggacgtcaaccaggaagaatctgccgtcgccggggtgggggcggaacgcgccaggttcccggcacggggcagagcaacgcgagcgcgctgcggcgggcgacct

SEQ ID NO: 8169 - DNA, 603 bp, Setaria italica
  Peptide Sequence Number=SeqID_74143
ggagtggtagcacattgctgtcacaatggtttctttgcgaaggcaaaaggacgtcatatttgggcctaacagcaccaataatggaatgcgcgattgtgtgcgagctaagtccagtacacaatttctctgcaaagacctacagaaagcgagctgatctctagatattatgtccgcgaccatgaaacaataaatttgggtttccatggacaggtaacaggttgcaacggcacgttttcactcttccagcaatgtttcccagaactaggcacgctgatatattctacaaaaggtggaaaatcaacttttttgtaatatttgaagagtctacaacaggttgaaaaaacaaatttctggtaatatttgaagagtcacgagctcgagagtgtttgctgtgggcaaaacatggaattctcgttctcacctacagattagcgtagcgattaaatgcagcaacccatttgttgactacgatttctcaccagagcgttgctatctgacgagatcctactggcttcttgcatgaaatctcagagaagctttggttgcatttttcgtgagcatcggtatttttcgtggctgaacaaggctcgttccaacatctgt

SEQ ID NO: 8170 - DNA, 421 bp, Setaria italica
  Peptide Sequence Number=SeqID_74144
ttctaacataatttgtagagagaagcatgaatcatcacagacagtcttctcttgcttttggtgtgataagtccatcatctgctgctcgaaaggattaaatacattcaaaggctccaccttcaaaggaaagccttttttcagatcctgactagagcacttgttaagtgttgtagcaccaaaacctttttggtccttaccagattgtgaaaaactggaatcaaacagctgtggagttacagctgaaggtttattggggacatctaatatttcatcagcactttcaacttttgaaataacgttagggtatgttaaattattggctcccataacatctgttaatagtcttcttttcatctctggaacttaggtaaagacaatttaggaataccctaggacaagtagaagactacttacaatagta

SEQ ID NO: 8171 - DNA, 866 bp, Setaria italica
  Peptide Sequence Number=SeqID_74145
cgccggccgcggcggtgtggtccgtggtgcggcggttcgaccagccgcaggcgtacaagcggttcgtgcgcagctgcgcgctcctggcgggcgacggcggcgtgggaacgctccgggaggtgcgcgtcgtgtcgggcctccccgcggcgtccagccgcgagcgcctcgagatcctggacgacgagagccacgtcctcagcttccgcgtcgtcggcggcgagcaccggctccagaactacctctccgtgaccaccgtccacccgtcgccggccgcgcccgacgccgccaccgtcgtcgtggagtcctacatggtggacgtgccgccgggcaacacccccgaggacacccgcgtgttcgtggacaccatcgtcaggtgcaacctccagtcgctggccaccaccgccgagaagctcgccgccgtgtcgacgtgaggagggacatccatctccgtgggcgatccgatcgatagatggtttttccgggggcgggaaagggttgcgtgtttcttcggcgcgtgagcttttcttcttcttcttcttgtttctttgtcacttcacatttgacccctcatctttttccatattttttctcgttgttgcgagagacacacaaccctccctcccgtcccttgtccaaagattcaagagatgacaaatcgatagagatttaagttccggcacacgctcgaatttctctgtacatatatatgttcatggtagtagatatggtctggaaagcacaaagcgcacaagattgtatgtccttttgcaagttttgatctgaatgtaccaaatgcatagtatgtgcgtgtcccgtgagtacagaaaatgagaaaactgatcatgcttccattgtcaaaaaaaaaa

SEQ ID NO: 8172 - DNA, 588 bp, Setaria italica
  Peptide Sequence Number=SeqID_74146
cctccaccttcttggcgtagaatgaggcgagagcagctaggtagaagcaatggacccatctaggcgaggtgctgtggaaagccactttccagagctgcacatgcttcaccatgaacttgtatgagctctccatgttgttgagtggccagccggcgtgatccttgcacagatccttgacgaagaccctgtactcgtcgccgaactcgatccggaaggcgtccttgatggcctccgcggaggctcggtggccgccgccggtgtcgctcatgaggatgaggacgttcttggcgcggttggccccgagctggacgagctcgacggtgccctcctcctcctcccagaagggctcgtcgtcgtcctcgggcccgcagagcgaggataccgaggcggacgatgacgcgccgtccccgcgtgcccggcccgcggaggagagctcccccgcgtaggtgaggctcttgcgcagcttgcgcctcatccgctgctggttgtggtacgccgcgacggtctccagcaccgtctaccggatcgaccgcccccgcggcgacgccatggacgccgccatcgcggggcgtgcaggagccgcggcgc

SEQ ID NO: 8173 - DNA, 1838 bp, Setaria italica
  Peptide Sequence Number=SeqID_74147
aagaagacctcaacctaacgacgggggaagctactacctccgcgggccgggcacgcggggacggcgcgtcatcgtccgcctcggtatcctcgctctgcgggcccgaggacgacgacgagcccttctgggaggaggaggagggcaccgtcgagctcgtccagctcggggccaaccgcgccaagaacgtcctcatcctcatgagcgacaccggcggcggccaccgagcctccgcggaggccatcaaggacgccttccggatcgagttcggcgacgagtacagggtcttcgtcaaggatctgtgcaaggatcacgccggctggccactcaacaacatggagagctcatacaagttcatggtgaagcatgtgcagctctggaaagtggctttccacagcacctcgcctagatgggtccattgcttctacctagctgctctcgcctcattctacgccaagaaggtggaggctggactgaagaagtacaagccagacatcataattagtgtccacccccttatgcaacacattcctctgtgggtgctcaaatggcaaggcctgcaaaacagagttgtctttgtaactgtcatcacagacctcaacacttgccaccctacatggttccatgccaatgtgaatagatgttactgcccctcagaagaagttgccaagagggcagcattggatgacctacaaccttctcaaatccgcgtgttcggtcttccgattcgaccatcattctgccgtgcagttcttgttaaggatgaattgagaaaggaacttgaattggatcctgagcttcctgcagtgctgctcatgggaggtggagagggcatgggtcctgtcaagaagactgcaaaagcccttggagaatcattgtttggcagagaacatggaaaaccaattgggcaacttattgtcatttgcggtcggaacaaaacactgagctcctccttgcaggcacttgaatggaaaataccagtaaaggttagaggatttgagacccaaatggagaagtggatgggtgcttgtgattgtattataacaaaggctggaccaggtaccattgctgaagccttgataaggggtcttcctataatccttaatgatttcatacctggacaggaagttggcaatgtcccttatgttgtggacaatggtgcaggcgtgttctccaaaagccccaaggagactgctagtcttgttgcccgttggtttggtccagactcagaggaattgaaaaggatgtcagaaaatgcactgaaattggctcagccggaagctgtctttgacattgtcagagacatccatgagctctctcgggagcaaggcgtgatttcacagatatctagttccttgacgtcatccttctttataccatcacctgaaaccacacctctccaacttatctgaaaccttggagctgtgcatagctagaattgcaatctctgaccttgtggacttggcattctcccctacagcatgacctggaaatggaacttcagggagcctctctcatcagctgttggtacggggattccacaacttttcagttcatgccctctcatggtagttatgggtgggctggtttgactaactggttgttgtttggattgttggcttcatgttaattctgtgaaaaccattcattcatatcatgtttccacccttcatcatcagtgggggattggtggtggtggcttgtaaaatacactcaattttgtgcatggaaaagtcagacccttgtcatgtgctaaccatgtaataagttcatgtaagtggaagatgtgtataatatgatgggagattggttgagtggaaattttgtttgacggaaaaaaa

SEQ ID NO: 8174 - DNA, 439 bp, Setaria italica
  Peptide Sequence Number=SeqID_74148
caccgaccgaatccgattgtcttggggctccaggcgggggatgggcgaccactaccagacgctggggctccggcgcgacgccaccaaggcggaggtcaaggccgccttccgccgcagcgcgctccgtgaccaccccgaccgccacgccagctctaccgactcggccgcccgcgcggacgccgcccgccggttccgccaggcgtccgacgcctaccacgtcctatccgacgaccgacgccgcgccgagtacgacctccgccttcgcggctccgcgtcctcctacgctcgcacctcctcctccggctgggcttcctcctcctcggctccgtacgggtacggctacgggtacggccacggaggtggttcgtggcgccggacgcctccgggagccggtgccggcgctgcggcgggatcgattgattgggaattcctgctgaag

SEQ ID NO: 8175 - DNA, 455 bp, Setaria italica
  Peptide Sequence Number=SeqID_74149
cagcacctgccattcgtaatgcccaactcacaggtgctatgccctgccgctgtattgcattgcattggacttgctggagccttccttacacgcattgactgtaagacctcgctctttctcctacaagactgctagatcagcttcctccttacgtgcccttgcagatgtgggaagcccctgtgagctactagggctagcaacagatatttgagtaactagtcttgctgattccatatgcttctgaaactcagtttcctccattgatagcgagcgagcattaacatctaatataaacatctttgctgaaatgaggtttgtcagataatattcgacttctgaaactagctttgtttcccttccaattcttatctatattactatcaaggccaatcctcctcagctgcactcaaatctaaagtttgttcagctctttagaagggaaactagctttgttt

SEQ ID NO: 8176 - DNA, 477 bp, Setaria italica
  Peptide Sequence Number=SeqID_74150
tccttacacgcattgactgtaagacctcgctctttctcctacaagactgcaaccaatggaaacgaggttgcgcgtatgtttactccactgtacatgtgcaagagtaatgtggatatggtggactgctcatgatcgataccatcatctttacttctatagtcagcatcttcatatcacttcatgaatcatctactgaactaaggagctgatcctcatctatggataactttgttaaagctttagacagcagtgtatatctgctgacaacttgcctatacaggtcatgcaaatgcttgacttcctctggactcaaactttcagtttctgagtccatgaaagggaacttggagcctgtaatgtatcaattcgaacattatgcttatggaacaatatcaagcaaaactgaattgaaaccccaaaattgattcggacacacaacaaccatttaaagggaaacctgaacactatgcagtctat

SEQ ID NO: 8177 - DNA, 893 bp, Setaria italica
  Peptide Sequence Number=SeqID_74151
cgctggcacggggcggcaagccggcggcgcggcggcggagcacccggcgatgacgaaccggtcgaggtgggcgacgaacggctggtagcggtagtcggcgcggtggcggccgtcgtcggtggcccagtcagaggcgtcccagatggagccgtacacccacatggggcggtcggggaacgtgagctcggcgcggcgctcgtagcggcggacgggcacgtcgtcgacgaagaaggtgatggcgtcggggttccagaggatggcgtaggtgtggtaccccgccgtggggtcgaaccagaggtggaaccgcatctcgcggcccacgatgcggccgtcgccgctgccgcggacgtacacgttggtctgcagcgtgtagggctcgcccgggatggtgcccaggaactccatgtcgatctcgtcgtggaaacccgggtgcgcctcgttgttcgacaggtagaaggcggtgttggtgccggcggtgtagccggcggggagcttgatgcgggtggagaagtaaccgttcctgtaggcgtgcttcgacttgaagccactcccgcaggtcctgtcgagccagatggtgagggcggagtggtcgccggagagcgtctggtgctgcggcccccacttgttggagtacccgcggttgaacgggatgggcctgaacctcgagctcgggtagtaccccggcgaaggctgcgcgtcggcgccggaggtggccgagatcgccaccaccagcaccagcagcaatgccggcacgacggccgcggcgcgccgtgacatgctactgctgccgcagctaggaggagctgcggccattgctagttgtagcttcagctccgagctcctctggtagtggcagctagctgcggctgggagtgagggaaagaggaacgctg

SEQ ID NO: 8178 - DNA, 735 bp, Setaria italica
  Peptide Sequence Number=SeqID_74152
cggattttgatccgcggcccttattgaaacaatggaacgttttaggccgctatgaaccaatcaagcggaatgtatatcacattaagagacgcactgaagattatggtatttttggttcctgtaagccttcttctggttcatcagttgtgtgtggcaaagactgccattgtgggatgctgttctcttgttgttcatcaaactgtgaatgtgataacacatgtgccaacaaaccattccagcacagacctctgaagcaaaccaaattgattacgacagagaaatgtggatttggattggtagctgaggatgaaataaagaaaggagaatttgttgtagaatatgtgggtgaagttattgatgacagagcatgtgagaaaagattatggcaaatgaaaaggctgagtgacactaacttctacctttgtgaggtcagtagcaatatggtcattgatgctactgacaagggaaacatgtcccgttttataaaccatagttgtgaaccaaacacagagatgcagaaatggactgttgatggagagaccagagttggaatcttcgcccttcgtgacataaagaaaggggaggagctgacctatgactataaatttgtccagtttggagcagatcaggattgtcattgtggatcttcaaactgccgaaaaatgcttggagcaacgaagtcactcaactcaattgttttcgaagtggccatttttcagtgaggtcacagaatca

SEQ ID NO: 8179 - DNA, 1154 bp, Setaria italica
  Peptide Sequence Number=SeqID_74153
tacctaaactactagtagtattgtctagtaaattggtacttgttaactattgttcccgttttataaaccatagttgtgaaccaaacacagagatgcagaaatggactgttgatggagagaccagagttggaatcttcgcccttcgtgacataaagaaaggggaggagctgacctatgactataaatttgtccagtttggagcagatcaggattgtcattgtggatcttcaaactgccgaaaaatgcttggagcaacgaagtcactcaactcaattgtttttcgaagtggccatttttcagtgaggtcacagaatcagtatgtcaagaagaaaaaaaggaaaacaaagtctgagaattgcattgggcagtttcttcgtttgtggcatcgacggcaaaaaatgtatgttggatgttggataattgacttcgatcaagaaactaaaatacatactctgcagtttactgacgaacatgttgaaaagtttaatttgaaagaagaagagtggcacttcttaccggttgattcatcagatgatgaaaaatgagcattgaagttaactgtcacaatctattggactgtgagggttcgctgcgctgccagcctgatttcggctcatttgccatcaacggcagcaaggcagaactggcgggcagttttctcccatttggagtctgctgcaaccctgatgcttgagacaagcttgtgcgcggtctggcgccacaagctgtaactgccgattcccattgccaaactgaaccatacccttcgattgcattgttcgttgcgcatcttgtgatgctcggaaacagaataaaacctttggtgagtgcagtgtaccagcgttgttgtgttgtgatgcggaagcgtagttgatatgtgggttagtgtcaacagatatgttggttattgcctgttgtcgcggcacactctgacgaaacatgagggatgatcgaagtgatctgtctccctggttgctggctgatcgatgcatgcctgactgagataagccaaaattggctgctgcgtaagagccagtagtgctggtcttgtttagtcgagttgttaggcgatgttttcgtgttttctctattgcggaatgttttaaacattgatggtgttgctaatgtaatgcatgcattgtgtcttgtttagg

SEQ ID NO: 8180 - DNA, 382 bp, Setaria italica
  Peptide Sequence Number=SeqID_74154
ggggtggaatgcctggacggatcggggaggtggaggggatgaggaaaggccgagacgtaccaggaaagagattggggcggtgtaggagatggaggaggagggagagggttggtggttccattcaagggcctctgatgcagcgagactcctctgatggggcttggccgggagaagcgggggcacctggcggtggagggaggaagggagggatggagccatggaggggatagagagttgatgaggcagagagaagaacgaagatggcagccacgtcagtgccacgtgggatttagaaggtgtttgtggcagttttggacataggtgatacgctttaaaaagtttggtaaagaaagtttaattttcttatgtatagaactttctt

SEQ ID NO: 8181 - DNA, 292 bp, Setaria italica
  Peptide Sequence Number=SeqID_74155
atctgctcggtgctcggacacacctcagagacagcggagcggctctccccctcgatccttccgcttccttctagaaccttccgcgcccctccgtcgcagcacagcgcttcctcctcctcctcccgccccgagatggcgaccatggagaacgtgatcgtgctcgtcaaccgcatccagcgcgcctgcaccgtcctcggcgaccacggcggcggggacggcgccgcctccctccccaccctgtgggaagcgctcccgtccgtcgccgtcgtcggtggccagagttcggggaaat

SEQ ID NO: 8182 - DNA, 541 bp, Setaria italica
  Peptide Sequence Number=SeqID_74156
taatttactaatttaaaaggtaattactaattctaagtctacttgttctagggtttccctttccacttaaggcgcaaacaggagtaagccttttctggctagcagcaatgagaactagtcttgggtacactttctgttgcagcttgcgaaatccaagagcatgtgaacatatgggatactgactggtgctcccaagacctgctataggcctgttcacaatgagcccacaatgaggcttgcaagttgtagtttggaagtagctcattctttcctgcttcttgaatagttaaattaacaagagccaaacctgtaggttcgcatcaagtgcaagaacttgttaaattaggctaataaaaatgcaaatgcctcaaaaggagcaaattaccaattattattaaataagataacagcacaatctaatgcatatttttacaatctaataatctcaaatgtcatcgggcatataataaaattttagaaaaaactccaaccagttagtcaagattaagatcattttcctaacttaaaaaaatcaggcaat

SEQ ID NO: 8183 - DNA, 1273 bp, Setaria italica
  Peptide Sequence Number=SeqID_74157
tttttttttttttttttgcacaagaagctatcaccaacttctgatttgcatattatggtatcaaataagcagtctcatcaactacaaaatttccaagaactgactaagcttcccgtcatacttaacaaatcagagacaacatccgcgtcaaagaaccaaaaaactcattgctccaggtgacaaggacatctaacaactcgtcgaaacagccatgcaaccaagtatttgcccacccctattctgcattctgcaatgggtcaaaaaacaaaggtgctggaacacccgagttaagattcctgggcatgtggacgccagtttcccctgcaaagctcctccataagatggacgaacttttgcggctgttgccaccatgttggttttgaagcagctggtctgtcgtatgggtcctcttctgagtcttccttctgcatgaacctctcagagaagttgtgccatttttgcatcgcacgcttcagtcgggcagtcctcttaccagtgacgagatatctggtgtagtccctggcaagacggtaaagctcctcccctctgattatatggatgtacacaagtatgaaagaaacagtggctaagataacttggactatttcgtccaatgtttctttgaacgattcatcttctgggccaccagaaccaccactgcctccacgtcgatttccattccctccacctccacctgacgcttgttctctcagcttagccatctgctctttcagcaagtcttgtatggggcgaggcttttttgcatcagccatagctttcttcaaagattccattaaaggatcatcagcactgtcagggtttccctttccacttaaggcgcaaacaggagtaagccttttctggctagcagcaatgagaactagtcttgggtacactttctgttgcagcttgcgaaatccaagagcatgtgaacatatgggatactgactggtgctcccaagacctgctataggcctgttcacaatgagcccacaatgaggcttgcaagttgtagtttggaagtagctcattctttcctgcttcttgaatagttaaattaacaagagccaaaccaacaagaggaatcagtcccaagcgccgattactctctacaccaatccgattccagaagaggagacgcggaggggaacgaggaggaagacgggcggaggcggaggattccttcctcctccgaggtggctcgcctcctggcgtggcggatggatgacgtcgaaacttgttaaaattaggctaataaaaatgcaaatagacc

SEQ ID NO: 8184 - DNA, 1149 bp, Setaria italica
  misc_feature (1143)..(1143): n is a, c, g, or t
  Peptide Sequence Number=SeqID_74158
caacgggatgcccgagggcgccgcgctcgacgccggcaccacgctgttcgtgccgctccactgcgcctgcttcggcggcgccgacgccggcgtgcccgcggtgtacctgacctacgtggtggccgagggggacaccgtgccggccatcgcgcggaggttccggaccacgggcaacgacctcatgagcgtcaacgacatggccaccgccgacgtcgccaccggggacatcatcgtcgtgccgctgcccgcgtgcgcttcgtcattcccggcctacacgtcggacgccggcctgtccgtggcgaacgggacctacgcgatcaccgccaaccgctgcgtccagtgcagctgcggcccgggcaacctggacctgttctgcgtgccggcgccgttggcggactcgacgtgctccagcatgcagtgcagcaacagcagcatgatgctcggcaacttcacgctccagatgaccagcgccggttgcagcgtcacctcctgcagctacggcggatacgtgaacgggaccatcctcaccacgttaaccacgtcgctgaagcctcagtgcccaggtccgcaccagttccctccgctgatgccgccgccgacgacgtccttcttcgagacgtacctcggcccgtcgccgacgccgatgccgtctgaaggaggcattggcccgcagatggctggcatggcgccgacaagcagcccgccggcgagttccggtcgtcctgcctcagcagacaggcgcgtcggggatgttcttgcgctggtcgctctctgcctcgtcgccaacttgctgtggtagcatacgcctgtgatgagcctgtgtgtgagaatcatgttgagcagcacagcgtgtccggaagggcattcttgtacaggagcagtcggctagctctttctgggctattgtgccaaattttgttgtttctcattcgattggtcgttcctgtaataaaatgtaaaaaaatgatgaactcacgctagcatatttgtctagaacgattgtattgttgttcctgtcagtgaagatgaaaatgatcggaaactgtattacagcatagaaaacgaaaacgggcacatcaggattttaccatttctgtgaaatgaataattaagtgccacttgaacaaaaaaaaaaaaaaaaanaaaaaa

SEQ ID NO: 8185 - DNA, 902 bp, Setaria italica
  Peptide Sequence Number=SeqID_74159
acgacattgctgacggggtccgtgaagcatctcctcatatctcaggaacatcaccgtctccggggtcgccttgctggcattccagtacccaaggacatggtcccagatggggccgctcagacagctgccgtcgcaggctgcctccaacaggtcggataattcaaggtcttgttgaatcctcctggagaactgccacatagaaaccaacatgtccttcgggtcccatatgtagacgattttacagtcggggttcttttttattggaggccggcaggacggagtggtgcatgtgcgtggccatgagccgcggcgacggcagcgcgtccatgaccttgctccccagcccggcggcgaagagcttctccatgaaggggacgcagtcgtgcgggttgacgcggaggagcgggtgcccggggtcgccggccggtgggtgaacgccgcgcgccatggtggcgaaggccagggccttgagccacgtggtgccgcacttgggcgggctggcgaggacgacgtcgccgccgcgcggcgcgaagccccgctggatggcgacgatccccggcacccatgactccagcacccacgtgccctggtagcggcgcaggaacagctttgggttgctcgggaggtcggagatgacggcgctcgcgtactcctccggcgctgaggcgtcggcgtcctgctgcccggcatcaccgtcgccgacgacgacgtccttgagtggcaccggcgcaggtagtccagagagtacagtagccgggccggtgcaggcagtaacattagccatgctagctagccagcctagcttcctgcgaacctccttagctagggtttgtatgcatgaatgccgaacgattttcacttgtacggttttcactctcttcttccaaatgcctggattttcc

SEQ ID NO: 8186 - DNA, 578 bp, Setaria italica
  Peptide Sequence Number=SeqID_74160
cagccgagccgcaggaaggggacccgccgagggcgccaagatgcagcggtcctcgtcgctggccggcgcggcgccacgcggcggcggcggccagtcgtcgccgtggccggcgggcctgaggctggacgcgtccagcgcgtcgctcaaggatagcgagtgcgggtccaccagctccgtgctcaccgcggccaccgtctacagccggacgcggtcgctcgtcgggttcgaggtgcgacgtggcctgtactgagtccttgtctctgctggcgtatgccatggatgttggatgggtggcttcagttcttccgatgacccaggattcctcgtcgggagcttcaagcaaatgttttgtgaccatctcgcattagtatcatcgatgtgccaacagagcaacatggccggttcagagcagtacatagtcgcattccaaactgtatatttttgtagctcacttgtgatgttttgcgaggtattgggtggtataagcggataccacgatacagaatgtaataaggtttgatcgcaaaccctcgtggaatatacaatattgtttagctgtgaacgaagcaggagtttac

SEQ ID NO: 8187 - DNA, 259 bp, Setaria italica
  Peptide Sequence Number=SeqID_74161
cccgaacccaacacgccgccatccgaccacccgcgcggccgcgcccacgccagcggcggcaccctagcaccaccggagatggagccggagccggaggccgcggccgcagccggggccctcgcgtcggaagccgcggcgcctgagcaccacccgtcgcagctcgatgttttcaagaacagaattcgactattacgtaataggacgggcaattttgatgcttgggtatcattaatcagtgttgcagagggaacatcagcag

SEQ ID NO: 8188 - DNA, 1734 bp, Setaria italica
  Peptide Sequence Number=SeqID_74162
tttagggtgggggactggaagccgccgctctgcaaccgcaaccgcaaccccctgaggcggctggaagggcgtatctactccggagtgcgtgcggttggtttctagcgaggacttggtgcaatggctttcgctagtagaattggaaatgcgctcaggagaacttcggtgccctctagctcgccgctgcttcaggcagtaagatgcatgtcctcttccaagctttttgttggaggactttcatatgccacagatgaaaccactctgaggaataaaatagtaaaatgtggagatgtacttgaagcccgagtcatcatggatcgggaatccggcaggtcaaggggatttggatttgtaacttatacatccagtgaagaagcctcagctgcaattactgccatggatggcaaggaacttcaaggccgacctgtaaaggtgaaccatgccaatgaccgtgctggtggaatacgtggaggtggtggatttggctccggtggtgcttatggtggtggaggtggatatgctactggtgggtatggcggtggcggtggatataattctgggggatatggtggtaacagtggtggatatagttctggagggtatggtggtaacagcggtggatacggtggagatggtggcggcagtggcggctatggtagcaactccaacaatgcttctggtggcggatatgctggcaagagtggttacaatgatggagctaccagtggcggttatgctagcaacttcaacagtgcttctggtggtggatacggcaatgtaggaagctacggtaccactggcaatcctggtggaaatgccgatgggtacagttctccaaacacctatggtgcaggcaactacaacgatgcttctggtggaggatatgctggcaacagtggttacaatgatggagctaccagtggcggttatgctagcaacttcaacagtgcttccggtggtggatacggcagtggaggaaactacggtaccactggcaatcctggtggaaacaccggtgggtacagttctccaaacacctatggtgcaggcaataacaacagtggagctcccagtggtggaagcttcggtggttttggtggcagtttcagcaatggaggtttcactgctgctgctgctgctgctggtcccaacagtggtagtaactttgctggaaatgcgactagtgtcggcttcagtggccacaacagtgctggaggattttctggtggcggggcaacaggatttggggctaacaagccgcagtacaatggccaagacgacctgctgggcgacagctacttcgctgacaaggaagcggcagagaatagatgagagtgctgcacccattcatgattcatctgatgcacgttgctgcagatcctttgtttatccaagctgcatcggatcgaccgtgataaatagagcaaataaaaactttgtctgagcttattagggtatagtagagcgtacgctgctttagtttttgcgttctgtttccagacaagttatgtggtgctttttcaattttcgcactggttggcgttacatgctctttttaaaagaaattggtagttgcatctcttacatactgttgattccttgatagcaaggccgattgcccgaagctaccattgttagggaattccgtaacatgtggaagcacagagacggcgaggccttaaacaacggtaccctaatccagttgtgaagttgtaaatacagttgtttaaccgg

SEQ ID NO: 8189 - DNA, 256 bp, Setaria italica
  Peptide Sequence Number=SeqID_74163
aagatcgacaaggaagaggcagatgaacaaccaaagaagaagatcaggatgggaatgcccgcaacacagtgttaattggtctgatatctggatttggacccactacactatcaaaaagtgacacacactttgcatagtttggttcctcgtcaaactttaagttgaccacatactctacaaactccctgaagggttgcgggcagaagcaacagagagattctggagaggtggccattttcttcttgcagacaaggaa

SEQ ID NO: 8190 - DNA, 461 bp, Setaria italica
  Peptide Sequence Number=SeqID_74164
gatatgcttggacccagtctgtgggatgtctggaataataactctcacacaatgtcattgtagaccgcccactcgtaaggaggggcatggttacatcctttactggtcctatgctcaaacttcaacgccacctcaactgcacctggaccagtaggtgacatgcgatggccaacatagacttggccatcttttccctaagtaagctttctgtcgactctatactttggtgaattgcccacctggaccatgtcggggaccggagggctgccctcgtcatctgctatcagcttgtcggcgctacgcgccgcgctgtccgggtcgtccatcccacgctccccctgtctccgtcgccgccgccttcccacgctacgacctccgcccgcctgatctcctcccgctccctctcctccgccctcgcggcggccctcgtcgccctccgcctcgtctctgccggcggtgcg

SEQ ID NO: 8191 - DNA, 561 bp, Setaria italica
  misc_feature (536)..(536): n is a, c, g, or t
  Peptide Sequence Number=SeqID_74165
aaatttttctggtttgacatccccatgaacatacccttttgaatgcattttctcaagtatggagatagcttcaatagcgatacaagcaaccatctcgactgacattgtgtgagagttattattccagacatcccacagactgggtcgaagcatatccatgaccataacatagtagtccccttggcgtcctttgtagtggactcgaggaaccccatgaatgccaccaacggcattgtagaccgcccactcgtaaggaggggcatggttacatcctttactggtcctatgctcaaacttcaacgccacctcaactgcacctggaccagtaggtgacatgcgatggccaacatagacttggccaaaacctcctttcccaagctttctgtcgactctatactttggtgaattgcccacctggaccatgtcggggaccggagggctgccctcgtcatctgctatcagcttgtcggcgctacgcgccgcgctgtccgggtcgtccatcccacgctccccctcgtcaaaccagaaaaaaaggngggaaattattactcttataagaaa

SEQ ID NO: 8192 - DNA, 912 bp, Setaria italica
  Peptide Sequence Number=SeqID_74166
tttttttttttttgagagctcaagtggcagactcttaccaagttaccagggtcctttcttgtcgcaccagatttttcagttacccggcagtaatcatgtagcaaagcatgagaaattagaaagatatcaccggccaaaatggcaaaaggcaaacatggtaactatacctcatgataagagtatggcaggaaccttttgaggacctgacacaactacaccggggattcaatcatactggtcaggtgtacatatctggcaaagcctaatagtccactaaattaacgattaacacgaactaaaaaacaattgactactgtacacgctattctataatcaggaacgatgagcagacgccttctcaacacaacagccagggtagcattgagtcgccttcagaattagcacgtaggagctgctacactgagctacctagaccagaagatgacgctgacaggactccgcacaaagtggctccaaaccacatgaaagattgctaggatacagtacgcccatagcatactgatgctaggtagagattcttggaccatttctccttaacatgttgactagggaatgcagatgtcctcaatgtctcttgggtttcatcagtaggccgcctccttggcacacttaaaacaaatgcagcctgatcccaagttgcagcagtcgcggttatccggtaaccattgtcccacctcttatgaattccctcactgggatacaagaagtccagttcaacaacctgatcagaaaatcctgcattacgagacatgacaactgcccacctacttccagcagttgccatggaagtaacatagaaaccatctcgccacttcttgtttatccatttgtaggggaaagtatcactaactttgtaggactgctgtgtatacgctgtgcctttagacatca

SEQ ID NO: 8193 - DNA, 1620 bp, Setaria italica
  Peptide Sequence Number=SeqID_74167
tttgttctttaggttatttacttagtttacgttcccttatttagttgttaatacttgtattgtcttaggttagagattcttggaccatttctccttaacatgttgactagggaatgcagatgtcctcaatgtctcttgggtttcatcagtaggccgcctccttggcacacttaaaacaaatgcagcctgatcccaagttgcagcagtcgcggttatccggtaaccattgtcccacctcttatgaattccctcactgggatacaagaagtccagttcaacaacctgatcagaaaatcctgcattacgagacatgacaactgcccacctacttccagcagttgccatggaagtaacatagaaaccatctcgccacttcttgtttatccatttgtaggggaaagtatcactaactttgtaggactgctgtgtatacgctgtgcctttagacatcactactagggagctgccattgtttgctccagcaagtgcagttatatagtagttcctctcccattggtccattatccattctttgtgaaggaaatgtggcgtaagctcataaacttgagaagtgaaaccagtaccagcatccatgattagagcccagagattggagcaagatgttatgcaactgatatagaggccatcttcattccctttttcaatatgctgtacaagccttgaatctgcaacgttgtaatggtacctttgtttcataggccgcctggcattataaacacttatccactgtgttgcgggcattcccatcctgatcttcttctttggttgttcatctgcctcttcctctatcaataagcggcctcgcttctggccaacttgatgtataagcttctgagcaccatcagtgttaattggtctgatatctggatttggacccactacactatcaaaaagtgacacacactttgcatagtttggttcctcgtcaaactttaagttgaccacatactctacaaactccctgaagggttgcgggcagaagcaacagagagattctggagaggtggccattttcttcttgcagacaaggaagcctttgttttcaccctgataaccttgccaaggtagacgtcctcgtagaagaaagactagtgtatatgctagagattctaaatcatccctcctgctacctattcttccaagatgtgcatgaacactagcatagcgaactgttcccctgaaaacatcaggtcgctgatcgtaatcaacatggagtcctgtcgaactgtccttccacttagtagctaatccaagatcgacaaggaagagcttcttttcttcaggtgtcccaggagtccctagcaagaaattttctggtttgacatccccatgaacatacccttttgaatgcattttctcaagtatggagatagcttcaatagcgatacaagcaaccatctcgactgacattgtgtgagagttattattccagacatcccacagactgggtccaagcatatccatgaccataacatagtagtccccttggcgtcctttgtagtggactcgaggaaccccatgacaagaactagggtaccaaagacaataataccaattagtaaccaattaaactaattaagttaagttaccccttaggta

SEQ ID NO: 8194 - DNA, 810 bp, Setaria italica
  Peptide Sequence Number=SeqID_74168
catctcgaagctcctcaccattgaactgggtgtgctcaggctttctcccgaccggatgagccagattttcgaggacctcaagtcgcttggcctgggcgtgacggacacgggcctcctctacggcatccgcgcactctcctgcatcagtagggagacgtggctgcgaaaggtgtccctgtacaagagcttcggggtgtctgagggtgagctgctgaaggcgttcaagacacagcccacgatgcttctcttctccgatgagagcattaagaagaagctccgcttcttgctggatgagctgaagcttgaactaagtgaagtaatgaggctacctgtggtaataagttatagcgtggagaagtgcatcataccaaggtgcgcagtgctgagggtgttgatgagggaggggaagattgagcccaacatcaatttacttcagcattgattggtagtgccaagattttctccaaaaggtatgtattgaggtatgctcacgatgtgccggatgttgtcaaggcatatgagggtaagattgcatttgaaggattcagggatcgggatgttttagttccactgaagccttcaggctaatctcagtagggttaaatcaaatggtcaggcagcatgtttccaatgccattgagatcaaggcatgctatatcaatggcactgtttcgttgtgcgatgttatttctggctatttttaactcaaccatcttcataatcttcatagcatctgccattttgtagcctctggcctaacaaatctagaaacattgatcttatgttatcgaaaagtaaaaaaaaaaaaaa

SEQ ID NO: 8195 - DNA, 1661 bp, Setaria italica
  Peptide Sequence Number=SeqID_74169
atcatccacactaccacacgttaagcataatggcaagtacgatgagtggtcgattttcacatggaaagaagatagtatctttattactgtataggtatcactatcatgatgagattattcatgactcgtctaagagcaatggtatatctgtttcttgtaacagaaatggtatgagaagttccagaacaacagaaaccgaaaccaagttgttactatgttagatccgtcagaggtgtagaccaaagaatgatggatcgcaccgcataatatttacactactagaatacagaaacttattgccgtgacgaccgaccaattgatagtattcacatccccattgtgcagccatatgaaactatcagttaagctatctccttttagttttgccaacaataaaaggttggatctcttgccgggaaaatgctctgttgaaaagaacccgagtttggatggcagagataacaggcatccatgcaagcacagcaattggggagaagagcagaaatcccattccatagtcgtaagcatgagctatgacctgaataggctcccaaatcgcatagtactctatttttggtctcaaaacttgaacaataaggagaagaccccaaccagttggtatgaatgcgaggcaacagatgatcaaatccatgatggatagttggcagagacaatagagaagaattaaggaagtaacgaccgccaggaatatcaaaagttttatgaccctgaagatgagttggtgctttgagctcagccgacggctagcacaattaacaagcttaactaaaccaataacggcaattatcacaacccaggaaagtaaatagacaaggaagttcttgttgtcttgagagatattcaggtgatagacaagtccgtattgatatataaagaagcgtagcgagagcaacacttcaagaattctagaactcaacactgagtgacgtagatgtgcattctcagcattccaccatgactcccagctcttttctggttgcactcctatgcccccttgattcctcatccacctgttccagtcagcccagtcatcaacaattttttgccaagcaaaaccagctgggttaaaaaggaaaggagtaaacagccaagtcactgccataaaccatgttgaatatgtgatcattacgtgcaccacactgctcacataagacctcctaaagatgtggtagactatcaaaaggaagaccaactcaaatcctttgacaaagtgacttctggaatacaactgatagttttctgtgaagcttgcgtggaaaactacaaatttacgccctgtgggccggtatttagcacccccatggagaatagtacggccatagtagtgtgcttttgttccaagagagaatgtgaagaaaactgaagcgaactgcaattgcatgaggataaaatcactcagagctgaacggaaacccttctccaaaccaagctccatcaccataggcaatcctgtaagcagtcccagctggagaaaagactgagatgcaagagccgtttctaaggactttatattctgagtctgagcatcatgtaacagagcccctctgcaggccactgagaaccaagtataactgcccatagaagaaaacataaaccccaacaactgatattaggctattgaagtaaaatcccacggtacg

SEQ ID NO: 8196 - DNA, 739 bp, Setaria italica
  Peptide Sequence Number=SeqID_74170
tggccgccggagaggacgacgaggtccttgacgccgaggcccttggcggcgaacatctggacgaggcgggtgaagttggcggtgggcggggggagctggttggtctcgttggcgatggagacgcggccgtcgcggcggccgagggcgacgggccaggaggggcccctggcaaggacgacggcgtcgcgggccatgagggcgaggatgtcggcgcaggagacggtgccggggcacgcctgctcgagacggtccttgacacgctgcacggagccgaagccgcggagggtcaggttgggcgtcgcgtccttctccgccgtgttggccggcgtcgagtccagcaggacggaaccgtcgcaacccctgacgaagcagtcgtggaagtggaggcggagcagcggcccggcgagcgtcggcgccgccctgaggatctccaccatctcgtccttgacgatctcctccacgcgcgggcacgtgctgctgtagaagtccatctgcagcccagcagccatggcgctggaggcagccgccgagaggaagagagcagcgacgcccatggtgaccatcgccgccatcgacgccatggaatggaatggatggatgtccttgtgctgttgggctgctagagccaggtggattgttggatggactagtggttgtgggacgccaggggtccggtggtcactgcttatatagcttctacgtacacttgcattgcagcattagcaatattgcccgtgcc

SEQ ID NO: 8197 - DNA, 586 bp, Setaria italica
  Peptide Sequence Number=SeqID_74171
cagccagtctggcgtccatggcgggtgcccgcgcggttgccgtggccactccagccgcgccgccacgagccgccgatcccagcacaaacctggcgccgcggcgctgcagcctctaccgggtgagctgccggcaaaacccccgggtggccgcgccggtcggtctcgcggccacgaggagccgcggcacccgaggtcccgcgcgcctctccagccgcgaccccgccgaggccgaaacggacgcgggcgcggggcgaatccccaaggatgactccagctacctgtggacattgggcctcggatccgttggtggcgccgcggttataaagtacggaagcatcctgctccctgacatcacaaggccaaacattgtgctagctctgctgatggtgtccctgcctgtcgtagctgcagttttgattttgctcaaggcgagctcatcggaggactgatacgagtactccttgtcggaacttgagaccatttagtatgacttctttaagatttcgatggccatcttgtaagatcgaaaatttgcaagtctggctgaattgttttttttaaagaaagttgctgtggctgtcttggc

SEQ ID NO: 8198 - DNA, 350 bp, Setaria italica
  misc_feature (313)..(313): n is a, c, g, or t
  misc_feature (326)..(326): n is a, c, g, or t
  Peptide Sequence Number=SeqID_74172
ttaggtggatcgaaccagatgggatgtctgcatcggacattggtgcgagtgagcagaatttttgttttccttttttttgggagttagtgcattggtgctgtgtgtgcggttcatggtgccaatccttggccaacaacgcatttgctgagtctgcctgtattcaggttccggttttggttatttatgcttggtttcaaaattctttaccgtgctgtgcaattcgttgattactgttgtatatagaacagtgtccttttatatatagaatatatatggcttttgcaactttatctgtctaaaaaaaaaaaaaaanaaaaaaaaaaaanaaaaaaaaaaactaaaagagacac

SEQ ID NO: 8199 - DNA, 484 bp, Setaria italica
  misc_feature (479)..(479): n is a, c, g, or t
  Peptide Sequence Number=SeqID_74173
aagaatgcccatgcacattttatgttgggtttgatgtatcaaaggcttggtcaggcacagaaggctatagcatcatatgaaaagtcgactgagatattgttacaagatgaagaagaagtgcggaggcctgatttactctcatcagtgaggatacaccatgcacagtgcattttgcaagcaagcatgggtgatagttttgatgaagagcttgaaactggtgaggtagatgagatccttgttaagttgaagagttcagtagagtcagatcacaggcaagcagctgtttggaatatactaggcttagttcttcttcggggtggtcaaatacagagtgctatctcagttctatcttctctcgcggctgttgctccagactacttggactcccttgcgaatcttggtgttgcatatgttcaaagtggggatctggagctgtctgcaaagtgctttcaagagcttcttctaaaagatcaaaaccncccag

SEQ ID NO: 8200 - DNA, 555 bp, Setaria italica
  Peptide Sequence Number=SeqID_74174
ctttatggttggacacactatatcaatcgaattgttgttttttcccattaaaaacaactaaacaagtcaagaaagctgttttccctccaaaaatgaagtttaaaaatcacaggtatttcatgagtagtagttgcttttgacttctgtctcatgcactgttccatttgaggggcagggggtaatgtcagtgcaggtccttaccttcatcagaaagaagccttagctgttgcaaaagactgcttacttgcagcagtgaaggctgatcctaaagctgcatcagtttgggttaatcttgcaaatgcatattatatggctggtgagcataggaattcaaagaagtgcttggagcaggcagcaaaattggaacccaatcatatgcctgctcggtatgctattgcagttcaccgtatcagagatgctgtcaggtcacagtgtactgacgatcaacttctctgggctgcaaatgaaatggcaacagttctgaaagaaggtgacccttcagcaagttgaatgacccccaaatacgacaatagggactaggacttaggacaaata

SEQ ID NO: 8201 - DNA, 966 bp, Setaria italica
  Peptide Sequence Number=SeqID_74175
ttcttgcaggtacccgaacacttactgccgtactcttctatgcttgtcatttcctgccatatcataaatacatggttttccctatgttgctctatccaaaatgatgacaccaggcagttagataacatatgctttatggttggacacactatatcaatcgaattgttgttttttcccattaaaaacaactaaacaagtcaagaaagctgttttccctccaaaaatgaagtttaaaaatcacaggtatttcatgagtagtagttgcttttgacttctgtctcatgcactgttccatttgaggaggtagtaagttacatatgttcctagtggggatctggagctgtctgcaaagtgctttcaagagcttcttctaaaagatcaaaaccacccagctgctctggtgaactatgcagctcttcttctctgtaaatatggatctttgtctgcagggggtaatgtcagtgcaggtccttaccttcatcagaaagaagccttagctgttgcaaaagactgcttacttgcagcagtgaaggctgatcctaaagctgcatcagtttgggttaatcttgcaaatgcatattatatggctggtgagcataggaattcaaagaagtgcttggagcaggcagcaaaattggaacccaatcatatgcctgctcggtatgctattgcagttcaccgtatcagagatgctgtcaggtcacagtgtactgacgatcaacttctctgggctgcaaatgaaatggcaacagttctgaaagaaggtgacccttcagcagttgatgccccaatcgcatgggctggcttggcaatggctcacagggcacaacatgaaattgcagccgcctatgataccgaacacaacaatcttaacgacgcagaagaacgggctctttatactctaaaacaaggacaaaaagaggacccggatgatgctgttcaatggcatcaacttggcttgtacaa

SEQ ID NO: 8202 - DNA, 1154 bp, Setaria italica
  Peptide Sequence Number=SeqID_74176
ttctaactttcttcttgggtcttgtctaaattgtaaattggtctaaatggcaacagttctgaaagaaggtgacccttcagcagttgatgccccaatcgcatgggctggcttggcaatggctcacagggcacaacatgaaattgcagccgcctatgataccgaacacaacaatcttaacgacgcagaagaacgggctctttatactctaaaacaggcaatccaagaggacccggatgatgctgttcaatggcatcaacttggcttgtacaatatttgcatgacccggtttagcaggtctgtaaattttcttaaagctgctttggcccgttccccggattgcagctatgcttggtccaatcttggtattgcattgcagctatcagatgatccgtcctctgaaactgtatataagcgggcactggtactatcatcaactcagcagctacacgcaatcttctctaaccttggaattctttatcggcagcataggaactatgaatttgcaagaaagatgttatcaaggtcgttggaactgtgtcctggatatgcaccggccaacaacaacctggggcttgtatttgtcgcagagggtcgttgggaggatgctagaagctgttttgagaaagctctgcaatctgatcccctgcttgatgcggccaaatcaaacctgttgaaagtccttgcgttgtctaagaaacagtagaaccagagaagccaaaaaatgatcttccactggagcttcaggagttcataaacatggaaacgcagtcatcaaatatctgatctgaaatgtctcgagggccagccaacacagatatgatgcttagtggctctgaattgctcacagggctagccggctagggagacagcagttggtctgaccgaggtggggctcttcgtctgccaatcaacaggtgcattgggccacaggctcagcatcagtccaggaagggcccagattttgaagtttgtgtcttgtgtctagtaaaatttcgctgtaacaagcatgtatgcgaacgatttgccactgcccgctgtatataactccgagtaagttgagcatgcatgctaaatatccatattgttccgtacagcaacttttggctctgctcgtgaaagaaactcaatgggtgcaattttgggattgaatgaaa

SEQ ID NO: 8203 - DNA, 288 bp, Setaria italica
  Peptide Sequence Number=SeqID_74177
ggggggggggggttggcagagagctaccagaaactggggttgccgccgccgtcgggccacatgaggtccgcgaaggcgcggacggcctcgggcttgggagcgtccaccatggcgagactctcctggccgtcgagaccctgggactcaccgaggtagcctgggaacggcttctccggtccgtagttgttgcacggcttggcgtcgacgggcagggcgaagagcggtttgacggcgccgtcgaagagcgcggcgcggagctccggcgctagggccgggtagcgcgcgtcg

SEQ ID NO: 8204 - DNA, 366 bp, Setaria italica
  Peptide Sequence Number=SeqID_74178
gggggggggggggtaccggggtacttgtcgctccgaggagagagcccacgacggggagcagagttcgccgacctgaagacgagcggagaggaggaacgaggttccggtcggccggatcgggaaatcgagggcgtcaggtcgcagaagaaggcggcggaatcccgttttcctttgtagaacccgccggcgatggaccaagcagcttgcggttagggttatagggtgaaaagagcgttgagggggaacagggacgagcggaggtggggatcgaagggatagggcctgggaggaccggggcgatggagggggcggcgctagcgaaccctagtcgacatgccgtcgaggaggcgctcggggacggaggtg

SEQ ID NO: 8205 - DNA, 1672 bp, Setaria italica
  Peptide Sequence Number=SeqID_74179
cgtcgaccccgagcgcccgtcgcacgtcgacttctcccgctccaagggcctccccgaaggagagagagagtactatgaaaaacagtttgccacgttgaggtcctttgaggaagttgactcaatagaagaatccaatgaaattgatgaggaagaggagcttgcggagcaaaaccagagtgaatttgccatgaagatatcaaattacgcaaacattattctcttagcgttgaaggtatacgccacaattaaaagtggatcaatcgctatagctgcctcaacactggattcactgcttgatctcatggctggtggtatcctttggttcacacatctgtcaatgaagagcatcaatgtctacaagtaccccattggcaaactgagggtacagcctgtaggcattatcatctttgctgctgtcatggccactttaggcttccaagtatttattcaagctgttgaaaagctgatagtgaatgaggctccagctaaactgaaccaagtacaactcttgtggctatattcaatcatgatctttgcaacagtggtgaaattagctctctggctctattgccgaacatctggtaacaagatcgtccgtgcttacgctaaggatcactattttgatgttgtcacaaatgtagtgggtttggctgctgctgtccttggcgatagattctactggtggattgatccagttggtgcaattgcccttgcagtctacacaattacaaattggtctggaacggtgtgggaaaatgcagtttcactggtaggtgaatcagctcctccagaaatgcttcagaagttgacatatctagctatcagacatcatcctcaaattaagcgtgtcgatacagttcgggcatacacctttggggtgctttactttgttgaggttgacatcgagctccctgaggacttgccactaaaggaggcacacgccatcggagaatcactccagatcaagatcgaggagctccccgaagtcgagcgagcattcgttcacctcgatttcgagtgcgaccacaagccggagcactcgattctcagcaagctgcccagcaaccagccttgacccgaagggatcccacgtggtggttggcaaatagattgtcgcgcaggatctgctacagtgctcggtgtcttgtgctgcatgtgacaaaaaactagagtctaaatcagttttgtggtcgtaagatgtagatcaggcgcgtctaagactacgagggacgtagcaggtgcacaaggccgagattgttctgagtgagtgtggaaccctctgttttgcacggtcgtgttcagtgttctgatcgaaagtaggcactttgctgttgacatgtgatcggctgtgtgctatatgatgctgtttagggaagggcggagagcaagatagcaggtcctttgctttaaacaaatttcatttcttattgtccaaaaaaaaaaaagaaaaataaattaaccaaataaatttagaatttaagtagtacaactcgtgcattttgtttctaattttttcataagcacctgctacttctttatgatcaagtctgacaaagtgacatgtttttgagttaatacagggggagagagagtactatgaaaaaacagtttgccacgttgaggtcctttgaggaagttgactcaatagaagaatccaatgaaattgatgagg

SEQ ID NO: 8206 - DNA, 265 bp, Setaria italica
  Peptide Sequence Number=SeqID_74180
agaagggtgttgtcgttgtcgttttgcctccatattcggcatcattacagagaaaagactttcaagctcagaaatatcaatctccggagccctagatgcttcatcagacttctgtgtttcagcccataaacttccctgtgtcgctcttgacactttcacccagtgcaatggcttcagcggagttctcttagatggctggttggcacgtaaacttctaggacttttggagcgggctgtgctacggtcctttacggtttcctttttt

SEQ ID NO: 8207 - DNA, 318 bp, Setaria italica
  Peptide Sequence Number=SeqID_74181
gggctacaaatgaagcaaatgtgaaatagtggtatcaattaatagtctcgtctcgtgatcagtataaggaggcaaagtagcagcatgtactgatagagcaataggagattgcccattgttgaaggaagactgcccatgtactgctaaattggaactatgggttaaccagaaatatacatggtagtaatttctggtttggatcagcaatacatgggttaaccagaaaatagtttgcatagaagcccagcaaataactactgctgctgcccattgttgaaggaagacagcacatgtactgctaatgtggaactatggttt

SEQ ID NO: 8208 - DNA, 143 bp, Setaria italica
  Peptide Sequence Number=SeqID_74182
actgcgcttgcaaggaaacgaatagcaagttaacagccgatcgatcaatcgatgacacgtgttttcgaggggattgtcgatgctgacgtcaacattttgactgcttggcccggcaatttgaatacttgcatctctgtcatcaa

SEQ ID NO: 8209 - DNA, 623 bp, Setaria italica
  Peptide Sequence Number=SeqID_74183
atgccctagcgccgtctcctccgccccgagctccgtcggctgcctccggcctccagcgcccgccgtggccggccgcgctccccgcatctgagcgggcgggcgggtggggccggtgtggtcggcgcgccccgcgtcctcgggctagtcgccgtctgcggctccgtcgccggtgccattgtacttgtcttcgtcccctgtgataatcaccatcactagttatgcgttcttcagaaaataaaacggtgtgctccaactcagggagatcatcaaaaaggaggaaagagacctcttcggagttggttcctgtatcaaacaggccaagtcgacgtaatgcttcccgccaatgtaaacatgattctcctctgaagaggtcaccaaggaaagttaggaatgctactttggcaaaaagcataaagaataaatatcattgtagtcctctgaaacgtcggaggggttcagattctgttgctgggaaagttgtaacaggattagttgcgaggaggaggaagaaaagaaagcggcaaaatactgatgaagcaactcgcttggaacgaagagcgagatattttctaatcaaggtaaaataattggagcagaacttactagatgcttactctggagat

SEQ ID NO: 8210 - DNA, 236 bp, Setaria italica
  Peptide Sequence Number=SeqID_74184
ggtcgtggttgatacagttacatgcccggacaaacaaaaatagattatggatcagatatgcaactcccaacatatgatggcaacatattcataaaacagcaaaacatagaacttctatatagatgtagcacccaaatggaacacatgacagcatgttagggcaacatgagtaacgatgagtgacatctttgtaccgggcatgtaactgtatcaaccacaattgtataagacagata

SEQ ID NO: 8211 - DNA, 707 bp, Setaria italica
  Peptide Sequence Number=SeqID_74185
ttttcctttttatttttctttttcgtttaagttttaggttacttacggttattgtccccgacaccctcaccgtgtgtcactaggagtaggttttcattaggatatttgtcagcaagagccttgatgacacttgcatatctgcttcttgcctccatgatggactcttcccactttggtacctccgggtagatcggctccgcggaatggtcaatggtcccggccggaaagacggcctcaagctctggcaagtcgggaaaccactttttgacgccgggagccaccttgccaacaataccgcccattgcatgagtattcatcatctcggacaatccatactcaatagacaccttgaggcgtgaggtgtcgaggggcacgtttgcggcgtcctcgatggcgagcagcgcggcgtcgtcggggacggcgcatagcgcggcgactgcccgctcggcggtctgtcggcatcgcaggaatggggagacgagtacccggtggacggcccacccgccggcggtggcggcggccctgatgcgcttgccgacggtccaggcgcggaggaggccggcgtcggtgagcggcgggtcccaggggcgcggcttgttggcgggccagatgggctcggcctggtcgaggcgatcgccgtggcgcatgacgacgacgcgctgcatcctcttcccccactccctctgcgtgatccggatggcgagcag

SEQ ID NO: 8212 - DNA, 458 bp, Setaria italica
  Peptide Sequence Number=SeqID_74186
cggcgtgcaactaaaaccgggacagctccagtcctgctcattgctcagccaacaaaccagctctccggcactggggcgtactgtatgcctgtggtgccgctcttggtcaggaccttgaagctgtctgcggtgaagccttcacccccctgctcatcaccaggcttcatggctacctgcctttcgagaaccgagtatgcacagtactccacgtcgtagatctccagccccatctcgaagtaggacacggatgccccgacaccctcaccgtgtgtcactaggagtaggttttcattaggatatttgtcagcaagagccttgatgacacttgcatatctgcttcttgcctccatgatggactcttcccactttggtacctccgggtagatcggctccgcggaatggtcaatggtcccggccggaaagacggcctcaagctctggcaagtcgggaaaccactt

SEQ ID NO: 8213 - DNA, 293 bp, Setaria italica
  Peptide Sequence Number=SeqID_74187
gcaggagacgggggagcggggggcgggaggggaaggaccacttggtgaggcggaactccggggcggagaagaagttgcggatgggctcgttggccgggccagagtcgccgaggccgtgcagccacagcacgaagctccggttgcgccccgccatgtgggaggaggggacgagctgggcgggaaggccgggcggcggcgtgcggcggcggagtgaggcgacgaggagcgaggctgcggcgatggccgcggcgagggtgaagaggaagcggaccaggctactcatggatcgtggg

SEQ ID NO: 8214 - DNA, 310 bp, Setaria italica
  Peptide Sequence Number=SeqID_74188
ctcactcgatccagttagtatgtcaatcaaaatttgcaggagacatgctgttgctttgccttataagtgtaagtgtatgcggcaactataaactattttcttgtctatacatacttaccgggaacaagtgtccaatgaataatacattaatacgttgctacggctcaagtatgctcatcatatcaaactagagtaagacatgcacaatcacaagaaaaaaagctaggaagtgactgtggaaatataaatagaaaaaatgaatcgtttattgcttgctttgggaaaattaatacaatgccaatccataaag

SEQ ID NO: 8215 - DNA, 1703 bp, Setaria italica
  Peptide Sequence Number=SeqID_74189
gttcaggatcaatcaccaagtcacctcagaaagttgcccgctgaacactgggggtattttacatatggaaggatcccaaccaatcggcagacatgatgaagcaatcatcttcccattacatcagcttgctgatgctactaaaaacttcagtcaggattgtcttttgggaagaggagggtttggttgtgtgtacaaggctactcttagtgatgggcaggttgttgcagtcaaacaacttgatctaaatgggcttcaggggaacagagaattccttgtggaggttctcatgctcaacctcctgcatcaccctaatctagtcaatttgtttgggtactgcgttgatggtgatcagcgcttgcttgtctatgagtatatgccattgggatctctagaagaccatctgcatgatcttgcacctgatcaagaacctttagattggaaaacacgtatgaagatagctgcgagtgcagctgctggtttggaatacctgcatgatgaagcacatcctccagtcatttaccgagatattaaaccatcaaacattcttcttggtgaagggtatcatgcaaagctctctgactttggacttgctaagcttggcccggtcggtgataagacacatgtgacaacccgtgtcatggggacacatggttattgtgctcctgaatatttcttaactgggcagctaacaattaagtccgacatctatagttttggtgtcgtgttccttgagctaattacagggcgaagaccaaatgacagcaatcggcctcctgaggaacaagatttagttgcatgggctcgtccattgttcaaagatcaaaggaaattttccaggatggctgatcctttgttgcatggccgcttcccaaggagggggtttataccaggccttggctattgcagcaatgtgtttgcaggagaaagctaaacatcggcctcccattagggaagttgctactgctctctcttatttagcctcgcaaacatatgataggaacaacaccactgctcgtcgtaaccgtgctgggccttcgacatcaagggttttggatgatcaaatgaaccaggacaccacattggctagccagcaagaagttcagatgtcaattcattgccagacaaatcaagtcgtaccggaagtgaaggaaacttcctggagtggttcacatcgtccaggaaggggcagagttgctccaaatggcattgatagggagcgtgcacttgcagatgccaatgtatgggctgaggcttggaggcgccaagagaaggcaagcaaaatgtggtagcaatcagaacctgactgcagcctctgtatgagtttagatatgtcatggcaaacatggttacttcgcatacatttcgaaagaaaactatggactacagaaagggttaggtagaagaggataaggaataatgtgcagtggaagtgtagaacctcaccagagtgagcgcttcgaagatttccccgtaagcacagtagagtatctactgtatctatgcaatgtctgtcttactgcgtacatggatgtagttctctttagacagacattgcatagatacagttgctggggaactgtgtacatgtaacaaccccgtaatagacacagtagagtatgcaacctttctgtagttcagcggttttggtatacataatgtagtatccccgtatatgtatgaaatgcatatgctgtgatacatac

SEQ ID NO: 8216 - DNA, 1062 bp, Setaria italica
  Peptide Sequence Number=SeqID_74190
ctggtctattctcatggatattcatggaacatctcaaaacagggatggggctgttcaggcactcaggagaatgcagcgcattgggataagacttaatgtctctgcatatactgtagctattaaggcatgtgttgaaaacaaagatttgaagttggcactgcacttgtttgatgaaatgaaagcacaccaactgaagcattcttcaggtgacgtacaaaactcttctgacagcacatagcaattatggatcattacaggaagtccagcagtgcttagcaatctatcaggaaatgaggaaagcagggtatcaagcaaatgactactatctcaaggaattaatagtagaatggtgtgaaggggttttgtctagtgggagtgataatcgagatttttacaatttggatctacaacctaagaggaaagaatcgttcaacctttttcttgagaaggttgtaacagtcttgcaaaaagatgttgatcataaccaaattgtcgatgttcgtggcctttcaaaggttgaagctcgaattgttgttctctctgttcttcggaagatcaaagagcaatacctcctaggaagagcagtccaggatgacgtggttatcatcacgggtcatgacaagacatcaagaactgaagttgaaactagtgcagtcgatgttgagcatgcaatagttactgttttgacagatgacctgggtcttgaagttttgattggacctggaagctggcctcctgtttcagcaaaacccaaagccccgactaaatctataagtaatctagagcaagtatcaaacaaagttacaaggagaccacagggagtgataaaaatccctgtcaactcgctgaatcattggttgaagaagaaagctgtgagggttgtacagtgacatttccttgaaatacttttttggccatttatatgaccaaatttagcagttactctaggattggatgtacatatgagaacaggcatcctggtgttccaggcacacacaacacagtttgtaatttgtaaaaaggactttttggcagccaatggagtcttgcccagtacaattt

SEQ ID NO: 8217 - DNA, 832 bp, Setaria italica
  Peptide Sequence Number=SeqID_74191
gatatctctatctcctgaacagactgcttccaacatcaaagaggatatgcaagcgggcggtgttcgtcttaacctagtaacatggtcatcattaatcaatgcttatgcaaattctggtctggttgatcgcgcaatagagatccttgaagaaatgataagggatggctgtcaacctactgccccatgcttcaatattatccttactgcatgtgtcaagtcatgtcaatacgatagagctttccgcttgttctatagttggaagaagtctggtatcaagatatctctatctcctgaacagaaaagtcttgatggtgcttttacattctgtaaagagtatccaagtgatggcggtaccatattggtggttccattcaggccaacagttacaacctataacatcttgatgaaggcctgcggtactaatgctgaacgtgcaaagtctgtaatgaacgaaatgaggcggaatggcctttgtcctgaccttattagctggtctattctcatggatattcatggaacatctcaaaacagggatggggctgttcaggcactcaggagaatgcagcgcattgggataagacttaatgtctctgcatatactgtagctattaaggcatgtgttgaaaacaaagatttgaagttggcactgcacttgtttgatagaaatagaaagcacaccaactgaacgccctaatttggtgagtatacttaaaatttatggtaacgtaaactttgattgtttgtctttaattgacgatgaaaaataatgctttgatttaacatttttttattgatgacctgtttcgcagttggcagcatctgaggttcaagc

SEQ ID NO: 8218 - DNA, 1714 bp, Setaria italica
  Peptide Sequence Number=SeqID_74192
taaccgtaacgtaacgtaacttagtacttacctttctccttctcgccgctcccctccgcggcctccgccgagccgctcttcgtcgaggccaagctccgccagcagatgcgggccgaggaccgcccgccgcggggagccgtgcccaggatcgcctacctcgtctccggctccgccggggacggcgccgcgctgcgaaggacgctcagggcgctctaccacccggccaacacctacgtcgtgcacctcgacctagaggcccccgccgccgagcgcgccgagctcgccgcagccatccggtccgaccccgtctacgccaggttccgcaacgtcaaggtcgtcacacgcgcgaacctcgtcacctaccggggcccgaccatggtggccaacacgctgcacgcggcggccattttgctgcgggaggggggcgattgggactggttcatcaacctctccgcatccgactacccgctcgtcacccaggacgatctgttacatgtgctctctgagttgccaaggcagcttaacttcatcgagcacacaagtgacatcggatggaaggagtaccagagggcaaaaccagtgatcatcgaccctgggctatacagcctgcagaagtctgacgttttctggattacagagaaaaggagtgtcccaactgcattcaagctctttactggctcagcatggatgatgcttactcatcagtttattgaatactgcatatggggatgggacaatctaccaaggacagtcctgatgtattatgccaattttctttcttcaccagagggttacttccacacagtcatctgcaatgtcccggagttccgcaacaccacagtcaaccatgatctacatttcatttcttgggacaacccaccaaagcaacatcctcattatctcacactcgatgattttgatggtatggttaacagtaatgctccctttgcacggaagtttggaagagaagatcccgtgctggacaagattgatcaggaactattgggccgccaacctgatggatttgtgcctggtggatggacagatttgttgaatacaactgagaaaggaggacccttcactgttgaacatgtccaagatctccgcccagggcctggtgttgacagattaaagaaactcgtcacaggcttgctcacccaagaaggttttgatgacaagcattgcttgtgaaactcccagtaagatgattccagggcagtagatttacacggtcaagtttgagggcattgagccaattgctagtaatgtctactagcgaacaagcagcacataactcatgtccgcgtggatgcaacgataagataggtgctcttatagacaaccgcttgagttgagttacggtacagcaggagatcatggatgtagcaggcggagaatatacagaactagtagcttattaggttatggtagaggattatatcagaccccaaccatcaataatcttggaaattttgacatctctgcgctgcgtgttgtgcaaggtggtccattgcttgtccggaagccatggcaccgggtatttatcaactggtagcgcgtgagactttgttgtattgaccagcagatatttctgggcaaactgatacatttgattgcatacatgtattcttttatttcttctcctttttgatgagtatagcaaattggttgtgctaaggaatgtttctcttggtccttgtcttaaaaaaaaaaa

SEQ ID NO: 8219 - DNA, 2092 bp, Setaria italica
  Peptide Sequence Number=SeqID_74193
gtcctagaaaaggacagcaagcacaatatgatctgtccagtctaagataataaagttttgtacttacacaatcaattggggaaggaaagaggttttttttttttgtgcaaaatgggaagtctatattatcaaaacaaagagttgagaaccacttcaagagttaaagattcgacttctttacaatgatgtctcactttctaccatcgctacaaagatcaaagtctcgaagtccggttacactcagctttctttcatatactctgcccttcaaaaaccatcaatgcccgaatgccctcactctgtcaggcaccatctcattgcatgaccatgcaccataaaccacttatgaaggccccacagtatatgcatgagatctttagagcttcatatgtgctgatcaaatttgttggtgcaagataattacgatttatcagataatcactcagaatattcatctccactatattgctccatatcttctccccgagaatgctttggatgctcatcaagatcatcatcaacaggagatcttcggcgcttcgaattctcatgcatgccagaagattctccacgctccatggtaccaccatgagctgttctgctcacagtaattcgggaaggtacaggaaaatgctcaatttcatccccagatctcccctccttagctttcttcttctgcaaaactagcttagtaggaagaggcaaatatcttgcaccctcctcctcatcaaacgtgacgaggtatgttgtaggatcatctttatcatctcctcttacgtcccagtgatattctcttagccaagaatactgtatatcatcttcatcatccaagtctctggcaagctcatggggtgctggggccatgtatgccaaaaacttctcttgttttgtagggtctgaaccattgacactaaaacttttcatcacagcccgggattcacattcatctcgtgcagttctctcaagcttgttgtactgctcagaatcagcagtcggatctccatcaaaattcgccataacaaacggatcatcgtacctatcaaaatcaggtagcagaggcataacccactcaacttgcatcccacgtttagtctggtgaacaggtcgtgatttggctgttctgaaggattcttcgatggctttgatctgtttctctctatcattaaggttgtccaggaaagcattgcgacccatccttgattctcgtatttcctttgcttgcttctcagtaagggacgttttagctgcatcagtactcagtggagatatatattgtgtcttgaccagccaagaaacacctttgtcagtgggcctctcctttttccttataccttcttgtttaataggggtgaggacctcatcatctcgcaatagctcttcatcttcaggagccaaaggctgctgaacagcaggggggttgtatacactcatgtcaagtaggtcgagaggtatcccaagatcctcagggacaatcattttaggcatgtaatttttctccaatgaagttatcctgtatttggtatatcggtccttatccctattcaggggcagccatttcagctgagcacttggatctggaagctcattcctaaacttgtgcttgcacaggaacgttgttggttttttgagccgattctcaaacctctcagcattgggcgctgatgctgggcgagacccagttgccactgcccgagagccacccggtgggtggtggtgacggctctgcgatggctgctgatgcgcagggcgcgtctgctgcgtcttctgtagaacggtggcctgcgactcgcgcatcatctgctgctgcttccggtcctccacccgctgcttctcgaactcgcgcttcttacgcgcacgacgctcctcctcggtctctgccctcggcagcgctgccttaggctgctgctcctttcggggcggcggggcctgggcaggcggcggctgggccggaggcggagggggcgggggcggagccacaggggggaggggacggaggcgggggtggcaccgaagggggaggaggtggcgggttgctgttcccaccgtagggcggcggcgggggctggtagtacatctgctgcgggggcagtgg

SEQ ID NO: 8220 - DNA, 373 bp, Setaria italica
  Peptide Sequence Number=SeqID_74194
acgcattggactatcaatcttcacccggtgacagcatatgacagatgccgacacaatctcatgcacattgtgtttctcatttatgatagttttgagattgactgcagcaactacaacagggggggcttctagggatgtacttgtcgtcaaaacagatatgtcctttgggcaatcaactgcgacttcaaacttacaccagctgacccgctgagtagatggccgtgtaacaaatttggaaactgacagccatgaaggccccttgatcttccttttgatgagaaacaattcaagagcactattgtttgtcccaagcagcgcatggaaatgttcacctctgaggtcagctggaaggacgggatccttgtatggataa

SEQ ID NO: 8221 - DNA, 611 bp, Setaria italica
  Peptide Sequence Number=SeqID_74195
gttctggagcaggaaaagaaaaataagaaaaatacatagcacattgcagcacgtgcccgaaacagtcatcatgatcttgttaaactacaactctttgcatccatcagggcacagtaaatatcagaggcttcaggtttgcatttatatacatatgccattgtcattacttaaaaagatggatgtataatacatgttactttataggattaggtttaggtgtacgatgcacttagcctggaagtactgaaactcaagcacattagcttagacttcttggaccattatgtgtagtattcaattaaccttctaagttataaatatatgtatgcggaatgcttttgatttgttagcttcattggacaaattgtaattaatagtttcagtgtgtccatcatttcttgtttctctttatcagattggtcttccagcatccactactgcggctagctttggaaaagtgaactcaaacaaactatcagattataaaatggaggatcttgctgctgctctattgaattctttcacttacaacattgggcagatagcctactttgtggctaatctttcaggcctgaagagaattttcttccgaggtgcttacgtctgtggcc

SEQ ID NO: 8222 - DNA, 2216 bp, Setaria italica
  misc_feature (2175)..(2216): n is a, c, g, or t
  Peptide Sequence Number=SeqID_74196
acgtcgcagggactctgatcaagctggtgtacacggcgagctgcggcggaggaggcagcggcgatggcgacggcgacggcgacggcgcggagctgcggttcgccaagttcgagaggcgccggctccaggagtgcttcgacttcgtccgggcgaaggggctcctcggctgcaacgggacaaggtcaagcaaagaaaacatgccgctgaaggctacaggcggtggagcatataaatttgctgatgatttccgggagaaactaggtgtttgtctggacaagcttgatgaaatggatagcgttgtttctggagcaaactttttgttgcagaatatccctggcgcagccttcacacacatgaatggacagaggaatccagtagatgtttccccaaacaacttgtttccttacctacttgtcaacattggctcaggagttagcatactgaaggtcactggaaatagaaagtttgaaagggtaactgggacacacatcggtggcggtaccatgtttggtttagcgaaacttttaacaggctgtaagagttatgatgaattcttgcaattaagccagaaaggggacaactttgtccttgatctaattgtcaaggatatatgtggagagcttgtctgccagaagcaaggactttcgatgtcaactcttgcttctagctttgggaaagttattacttccaaaaaaaagctgacagattataagcctgaagaccttgcatccacattgttgagcgccttcacttacaacattgcacagattgctttccttgttgcatcactcctgggcctccgaagggtcttcttcggtggatcatatatacgtggacacaaaagcacaatggaaaacatttcttttgcaattgatttctggtcacagagccaaatgcaagcagtattcttgcgacatgaagggtatttgggagcgcttggtgccttaatgagttatggggatctcagtggtgaaaatcttacccttgaggaatcaaaggagaaggagcctcatcatgaggcaacagcacctgttgatggtatatcagcagatgaagagaatgatagcaatatatttccttaccttcttgttaatatcggatcaggtgtcagcatgatagaggtaattggtaaggggaagtttgaaagaattataggatcccatctaggtggtggtactattcttggtcttgccaggcttttgactggctgttcaagttatgaagaattcttggagttgagccagaggggcaataatttgtccgttgatttgactgttggagacatatatggggaagagggttatccgaagattggtcttccagcatccactactgcggctagctttggaaaagtgaactcaaacaaactatcagattataaaatggaggatcttgctgctgctctattgaattctttcacttacaacattgggcagatagcctactttgtggctaatctttcaggcctgaagagaattttcttccgaggtgcttacgtctgtggccatgaaaagactatggacaagatctctcgttccctaaaatattggtccaaaggtgaagtcgagacaacatttctatgtcacgaagggttcttgggaacactgggtgcattttggagttatgagaacatgggaattgatagcttggcagcacatgaagttattagggaggtcttgcttggtgcaccatacactggccaattcccatctttacctgtcactgaacaacaggagaatggagaaaataatacacttgaaggggaggtggaaagcttacggcatgagaatgctgcgctgaaggctgaggttgagcgattacaaagggagaatgtggaattgagagctaagctgggagctgcaaccttgtgaagcaataaaatgccagcctccgcttgttgtaacctgatacagttcaggaaatggctcaaaatgtagctcgtataggaagactacagtctggcaaaaaagaaatgccaattagcattactcctctagtgagtctgttgtataattttattcttaatctttacaagagcatctgtatttgctcccttcatgtaacccttttcctgtgtgtaaatgttgtataagtagttatcaaaactagtaaatatcataaatgcccgttagcaaaatgaaacccggcaacttgagattaatttttttcttaaannnnnnnnnnnnnnnnnnnnnnnnnnnnnnnnnnnnnnnnnn

SEQ ID NO: 8223 - DNA, 243 bp, Setaria italica
  Peptide Sequence Number=SeqID_74197
ggatataggccttaaatccaggtgacatggattgcttcaaggctacagccagcgcagcaatctgtatgactatgaggattttaaagcttcctgtgcggcgacgagaccactgatatgagccatgtcgcaaagcaacatggcaccgcacttgtctgcaatagccctgagcctggcgtaatcccagtcccgcgggtaagcgctcccgccgcaaataatgagcttggggcggaaatccattggtct

SEQ ID NO: 8224 - DNA, 459 bp, Setaria italica
  Peptide Sequence Number=SeqID_74198
cggaaatccatggccttctcctccagcctgtcgtagtccacgtatccggtgtcggagctcaccttgtacggcaggctctcgaagtagatggacgtggcggagatcttcttgccgcccgccgtgtagtacccatgtgtgaggtggccgcccgacggcaggtcgagtcccatgatcctgtcgtggggctggagcagccccgtgtaggcggcgaagttggccggcgaccccgagtagggctgcacgttgacgccccagcgtgccgggtcgaggtggaaagcagcgagcgcgcgggcacggcagagctcctcgacctcgtcgatgacctcgttgccgccgtagtagcgcgccccgggcatgccctccgagtacttgttagtgagcggtgagcccagcgcctccatgacggcgagcgaggtgaagttcccggaggtctacgacctcatcgagcgcgagaagcgg

SEQ ID NO: 8225 - DNA, 1763 bp, Setaria italica
  Peptide Sequence Number=SeqID_74199
cttagtttttgttttttttttttttttttaggtcgaccaacgagggaagtttcatcactgggaactcttggaagaacaaggcgagcgattatcacccacgtcatgcatgctctccaccattattattctctaatcatacacagcaattccaacaaaacggaccaagtcgagtagcacaccaacagaaagggtggctctaggtagagcagttagctctagtcacccgaaattcagatacacctttcagggtagcactaatgttccgcagcagtaaaaggggttttgcaccgatgtcgtaatctaatccttgtacttcatgtccgacaccctgaagccaggcatctcaaacgaagtggcaaacttctcaacctccgcccttaggtcttcgatgtcctggttgttcaccaagcccttcttgaagtccttgagaatcttgccatgcccctcctggacctttaagcagatggtcacagcctggtgaaggtactcggcaatttgcacaaagtccttctcaaccaaacccctcgaggtcattgcaggtgtaccaatgcgcacgccgccaggtgataatgcactgctgtcgccaaagacagcatttttgttcagtgtaatactgcataggtcgcagagcagctcaactttattaccagtcaaaccaagaggacggagatcccagagaacaaggtggttctctgttccgtcagtaaccaacttgtagcccttactcatcaaatggtttccaagggcaactgcatttgccttgacctgctggatataggccttaaatccaggtgacatggattgcttcaaggctacagccagcgcagcaatctggtgattgtgaggacccccctggagtgaagggaatactgcgaagttgatcttgtcctcatagtcatacagagaaccctcaggctggccttttttgggaggcttcgggcccttcctgtagaagatcataccagaccttggccctcgaagactcttgtgggtggtagtggtaatcacatctgcatactcaaaaggatttaaagcttcctgtgcggcgacgagaccactgatatgagccatgtcgcaaagcaacatggcaccgcacttgtctgcaatagccctgagcctggcgtaatcccagtcccgcgggtaagcgctcccgccgcaaataatgagcttggggcggaaatccatggccttctcctccagcctgtcgtagtccacgtatccggtgtcggagctcaccttgtacggcaggctctcgaagtagatggacgtggcggagatcttcttgccgcccgccgtgtagtacccatgtgtgaggtggccgcccgacggcaggtcgagtcccatgatcctgtcgtggggctggagcagccccgtgtaggcggcgaagttggccggcgaccccgagtagggctgcacgttgacgccccagcgtgccgggtcgaggtggaaagcagcgagcgcgcgggcacggcagagctcctcgacctcgtcgatgacctcgttgccgccgtagtagcgcgccccgggcatgccctccgagtacttgttagtgagcggtgagcccagcgcctccatgacggcgagcgaggtgaagttctcggaggcgatgagctcgatgccggcgcgctgccgccgcttctcgcgctcgatgaggtcgtagacctccgggtcggcctcagagagcggggtcagcccccaatccgccacggcgtccatcgcggccgcggcgatgggggcggaggcggtgaagaccgcggcggcgg

SEQ ID NO: 8226 - DNA, 2051 bp, Setaria italica
  Peptide Sequence Number=SeqID_74200
gtgaaaacgtattttaccactgctgcaggaacattttgagtccccttgcaaagaaaaagtcatacatatacatacttcataaaagggaggcatcttctagcatatgacatcaccaactccagacctggtatttggctaggttgcaaagaaaccggtatatgcatactaacttgaatcccccccgcatgcgggctggttataacaatatcacttaatcaaaacaatgtatcacctaagtcaagctagtaaaatacacaagtaatgacgagatcaaggggagcagaaaccactgaattattattggcaaacacctgattgacattcccatatgattccaagtgaaacaatccctagaaggaaaacctgaaaaactgaggaaggcgaccaaaccagggatgcagggggcgcttatgagcctatcctgctgacggggtagacaaaatccagaatgcatcatcatcctcacgagcatggcggtccggcgccatggcacccacgccgcagcgatgaaagaccttagtactggagggccttgcctagccacacagagaaggcatctactccttgtacttcatgctctcgagcgtgaacccaggcatgtcgaaggagtcagcaaacttctccacctcagccttgaggttctcgatgtccttgttgttcactaggcccttgttgaagtccttgaggagcttgccgtactccttctggatgctcaggcagatggtcaccgcccggtggaggaactcgccgatctgctcaaagtctttctccaccagacccctcgaggtcattgcgggggcaccaatgcggacaccacccggagccaatgcactgctgtcaccgaagacagcattcttgttcaatgtgatgtggcaaaggtcacagagcttttcaaccttgtttccagtcaagccaagagggcggagatcccagaggacaaggtggttctcagttccatcagtcaccatcttgtagcccttgctcatgagatagtttccaatggcaacagcattcgccttcacttgctttgcataggccttgaagccaggtgtcatagtttgctgcagagcaacggcaagtgccgcaatctggtgattgtgagggccaccttgcagagatgggaacaccgcaaagttaatcttgtcttcatagtcatacagagcaccctcaggctggcccttcttgggggggcttagggcctttcctgtagaaaatcatgccagcccttggcccacgtagagacttgtgtgtggtagtggtaaccacatcacaatactcaaaaggatttgcggcttcctgtgcggcgacaagcccgctgatgtgcgccatgtcgcagagcagcagcgccccgaccttgtcggcgacggccctgagcctggcgtagtcccaatccctcgggtacgcgctgccaccgcagatgatgagcttggggcggaagtcgagcgccttctcctcgagcttctcgtagtcgatgtacccggtggcggcgctcaccttgtacggcaggctctcgaagtagatcgaggtggcggagatcttcttgccgccggcggtgtagtacccgtgggtgaggtgtccgccggaggggagatcgaggcccatgatccggtcgtgcgggttgagcagcgcggtgtaggcggcgaagttggcgggggagcccgagtagggctgcacgttgacgccccaggcggccgggtcgaggcggaaggcggcgagcgcgcgggagcggcagaggttctcgatctcgtcgatgacgtcgttgccgccgtagtagcgggcgccgggcatgccctcggagtacttgttggtgagcggggagccgagcgcctccatgacggcgaaggaggtgaaattctcggaggcgatgagctcgatgccccgccgctgccgccgcttctcgcgctccaggaggtcgtagatctccgggtccgcgccggcgagcggggtcaggccccatgtggcgacgggatccatggcggctgcggaaggggaggcgggagtggcgacggcgaggaagggacgagggcggaggcggaggggatgatggggtg

SEQ ID NO: 8227 - DNA, 1956 bp, Setaria italica
  Peptide Sequence Number=SeqID_74201
gcgcgtcaaatattttccacattgttttgttatacctcacttcattaccagtgttctcttttacgtcatcttttgggttaagctctgtgcaagcctccagggcaaagatttccagaaacttttgtatgaagcaattcacccatgaactaccaaaaagaatttagcaagacgagagcaagggaaggcagagaccaccaaattattattggcaaacacctgactcacattcccatgtgattcccagcgaaccaactcctagaaacagaaaacccggaaaaacgaggaaggtgaccaaaccagagatgcaggtggcgcttatgagcctatcctgcttaaggggtagacaaaatccataaggaatcgtcatcatcacgaggcgtggcagcacggtgccatggcaccctgcgccgtggcgaagaatgacatcagtacaggagggccttgcctagccacacaggaggcattactccttgtacttcatgctctcaagcgtgaacccaggcatgtcgaaggagtcagcaaacttctccacctcagccttgaggttctcgatgtccttgttgttcaccaggcccttgttgaagtccttgaggagcttgccatgctccttctggatgttcaggcagatggtcaccgcccggtggaggaactcgccaatctgctcaaagtctttctccaccagacccctcgaggtcattgccgggggcacccaatgcggacaccacccggagacaatgcactgctgtcaccaaagacagcattcttgttcaatgtaatgtggcaaaggtcacagagcttttcaaccttgtttccagttaagccaagagggcggagatcccagagaacaaggtggttctcagttccatccgtcaccatcttgtagcccttgctcatgagatagtttccaatggcaacagcattcgctttcacttgctttgcataggccttgaagcctggtgtcatagtttgctgcagagcaacagcaagtgcagcaatctggtggttgtgaggaccaccttgtagagatgggaacaccgcaaagttgatcttgtcttcatagtcatacacagcaccctcaggctggcccttcttgggggggcttagggcctttcctgtagaagatcatgccagcccttggcccacggagagacttgtgtgtggtagtggtaaccacatcacaatactcaaaaggattcgcagcttcctgcgcggcaacgagcccactgatgtgcgccatgtcgcagagcagcagcgccccgaccttgtcagcgacggctctgagcctggcgtagtcccagtccctcgggtacggcgctgccaccgcagatgatgagcttggggcggaagtcgagggccttctcctcgagcttctcgtagtcgatgtagccggtggtggcgctcaccttgtacggcagactctcgaagtagatcgaggtggcggagatcttcttcccgccggaggtgtagtacccgtgggtgaggtgtccgccggaggggaggtcgaggcccatgatccggtcgtgcgggttgagcagggcagtgtaggcggcgaagttggcgggggagcccgagtagggctgcacgttgacgccccaggaggccgggtcgaggcggaaggcggcgagcgcgcgggagcggcagaggttctcgatctcgtcgatgacgtcgttgccgccgtagtagcgggcgccgggcatgccctcggagtacttgttggtgagcgcggagccgagcgcctccatgacggcgaaggaggtgaagttctcagaggcgatgagctcgatgccgcgacgctggcgccgcttctcgcgctcgaggaggtcgtagatctccgggtcggcgccggcgagcggggtcagaccccatgtggcgacggggtccatggcggcggcgggggagggagagacgggtacggtggcggcgaggagggaacgagggcggaggccgaggaaggta

SEQ ID NO: 8228 - DNA, 448 bp, Setaria italica
  Peptide Sequence Number=SeqID_74202
gacgcagaggttcttgcgggaggagaggccgagcgcgaggagggagcgggaggcggcggggggcaggtgggcgaagaggaggcggagctcggcgagggtcttctccatctcgtgcacggtgcgcgtgcagtagatgaggcggagcgggcgggacgggttggcgagggagtaggaggtgatgagggagatcagcgccgccgtcttgccggtgcccgtgggcatctcgagcagcgcgtgcccgcgcgcgtcgagggcgcgcttgagctcccccatgtacgcgtgctgctctgggtagatcgccgcgtacgggaagtgaaccggcatgccatccaggtcgaaccgcatcgtggcggcgaggagagggccgcgcgcgtgggcagcagggattgggagggtcggtctcgccggagcggttgccctcgccgccgccgccgcgggaggagagcac

SEQ ID NO: 8229 - DNA, 312 bp, Setaria italica
  Peptide Sequence Number=SeqID_74203
actccattcaccatgactatctccatgagagaacaggtacctcttggtagcaaaataaattggaagagctacagcaaccccctctggtatgttatgtaaagcaatagcaacagccaagttcagacccacatgaagacccttcacagacccaagaaatacagccattccctctggaaaattgtgcaagctaattccaacagcagtgataataccactgaataacacttgccggcgatgttttctcatcatatctttacccgagcctaccatcatcagcctgctttcctcaagtcataccaagagaagtaacta

SEQ ID NO: 8230 - DNA, 642 bp, Setaria italica
  Peptide Sequence Number=SeqID_74204
gtgatgctacaagcttatctcctttggtaggctgatctccaagaagtacaagcttgcagacatgcaggccatgcccacaaagactgctttgacagctcgcttctggccacaatagtcaaatgcaagaggcagcatttcatgcagagtgaggaaagccataacaccaccaacagatccaagtaaaccttcaagaatgtcaggattcaagctgcttggaaacaagtaagctacagcaattactcctactggctcggccaaaccggatcctgctgccatataaaatgccttccatttgctcttggtagcaaaataaattggaagagctacagcaacccccttcacagacccaagaaatacagccattccctctggaaaattgtgcaagctaattccaacagcagtgataataccactgaataacacttgccggcgatgttttctcatcatatctttacccgagccaccatcatcagcctgctttcctcaagtcatacaaagagaactttttctcacttggatcagcttctggtgaaaagtctggctctggaataaatttgacgataaaaccaaagaaaagaactcctgcaaaaaaccagaggttgcccttcaagaagccaatagaattcatcgcattgtgtgcca

SEQ ID NO: 8231 - DNA, 307 bp, Setaria italica
  misc_feature (279)..(279): n is a, c, g, or t
  misc_feature (282)..(307): n is a, c, g, or t
  Peptide Sequence Number=SeqID_74205
gaatttgatctacgagaagaaaatgcgctacaagaagaaaatgtggtgaacacggattctgaagattgatgtatcatgagaagtcatgttggtatgcaaaatatcctgtaggctgtagattttgacaatattgattatttggatgctgtagactatttatattaaatggcaggttactttaaattgttgcatatactcatgtgagtacaactgggcctacatgtactttacaatgtggtatctgattttatgaaggaaataaagtatcatgacaccagngtnnnnnnnnnnnnnnnnnnnnnnnnnn

SEQ ID NO: 8232 - DNA, 590 bp, Setaria italica
  Peptide Sequence Number=SeqID_74206
ggggcggcgccatgctccggcgtaaggctgcatggttggagagtagtggctacatggccgatgaggtcagggagcttgttggggctctccagctgaggaagctgctgcaggaagtgctcctggggaaggaggtggtggtagtccagctccaccttgcaagggtagctgctctgggccctgtggtacatcacagcgctctgctggtgatgcgccacctgcctcggcgagcccagctccggcgccatgaacccggcgtggtcgttgaaccagtaaggcgagtcccctgccattctctggacagtggcgagcctcttcctgaacaccctgcagaccacccagccttcctcatgtgggattcctgtttcgtgggtctccaagcgatactcgtgcatgatccagtctgatttctgtccattgggcgcccggcccttgtagaaaaccagtgtcttcctcatccctacgaggcagttcttcacgtagatcggcttgtcccttccggtggccttccagaaaccggccgtcgttgccctgttggtgcgagtgcccgtagggtatttcttgtccttatgactgaagaagtaccactcgtt

SEQ ID NO: 8233 - DNA, 625 bp, Setaria italica
  Peptide Sequence Number=SeqID_74207
ttttttagttaaaaactgttaggcccagggcctgtttaatggattgatcaaatggatgctacaaaatttgagtatcctctttgctacacgcatggaacactttttttttacaagggaacagcgctcttgtgaaatcaaatgattgtacaaagatctctgtgttacactgatgctcacccaatggtgtcgttacaccaacactacacgcattctgcaccattttgacacgatgtttacacatttttttaatggaccacttgtatgataccgttagcttggtaagcgaatggaacggtggatgaatgagcacaacaatggattcacaacgaatcagcgaagctgaagtgccatgcttcagcaaatcaggcaggaagctgttagcttactcagctgatctcatcagtctccgcaacagagtgaatggtgcacatcgatctgaaggtctgaactgctgccttgacttctctccaggtgatggattctgataacatcaccctgctcttctgttgcaatgagcacctgctgtcacctgagaatccatttctttgcaccagaaacatctcactcaacaccgctccaagtgtttcagatgtcagagttgaaaggccaccatgatcttatggtt

SEQ ID NO: 8234 - DNA, 335 bp, Setaria italica
  misc_feature (274)..(335): n is a, c, g, or t
  Peptide Sequence Number=SeqID_74208
attggccggggcgccgatcgaggacgacctgcgactgcgaggcttgctctgacctgaagaaaaccggacccgattcttgcctgctgggaatggaaacatcaaagtggtttcgccatttccgcctctcctctgctatgtgctcctcctttttacttatattagattccctagatctagcgagatgatcgatgaagaactccgtcgtgtactagctttttatttgacgcatctttgcatactgtttctgtggtcgtaccatgtatatccctaagtnnnnnnnnnnnnnnnnnnnnnnnnnnnnnnnnnnnnnnnnnnnnnnnnnnnnnnnnnnnnnn

SEQ ID NO: 8235 - DNA, 467 bp, Setaria italica
  Peptide Sequence Number=SeqID_74209
caaggcggggtcggagccgcagctgcaggcgcggagggagatggtggaggccctgcggatcctggaggccgagctcggggacaagccctacctcgccggcgaggcgttcgggttcgtcgacctcgccatcgtcccgttcgcggcgtggttcctcggctacgggcgcctcggggagttcagcgtcgaggaggtgtgcccgaggctggcggcgtggggggagcggtgcggcgagagggagagcgttgccaggagcctgcacccgccggagaaggtgtacgagttcatcggctatctcaaggacaagtacggtgacaagtagtagagcgacgacggatccgtcacgatgcaagtcgatggtttctttcttgatttggtgttgtggttggttattgttcatcgatttggttagagtccgcgaagacgggacggcagcaccaaatgtccaagctagtttgcctctactctcc

SEQ ID NO: 8236 - DNA, 269 bp, Setaria italica
  Peptide Sequence Number=SeqID_74210
tttttaggttctgatgttatcaagatgtttgccccctttggaaagattgcagcagaggatttcttgtggcacacacgtggcccaaagcaaggtgaaccccggggctatgcctttgttcaatacaccaccaaggaggtaagagtagtatttttttcctgtggcaaataacaattggttatcgtgttctcagttctcacctttgccacctgaagtaagcatgcaggaagctcagttagcaaaggaaaagatgaatggcaagttagtctgtg

SEQ ID NO: 8237 - DNA, 467 bp, Setaria italica
  Peptide Sequence Number=SeqID_74211
tcctgactgaatcagaagatagctggttttaaagcttagaacttaactaaatttctaaccagcttgagttgcaggacgttaaaggtcttgagggagataagctggagaataggctctatgttgggaatctggacttcaggatatcagagtgggttacttatttctttgtgtatctagttgcatgttcgtttcatggttcaccctcacccttgcgttctgcaaaccaacatttgtagcgttgttttttaggtctgatgttatcaagatgtttgccccctttggaaagattgcagcagaggatttcttgtggcacacacgtggcccaaagcaaggtgaaccccggggctatgcctttgtcaatacaccaccaaggagtaagcatgcaggaagctcagttagcaaaggaaaagatgaatggcaagttagtctgtggacgtccaatggtgttcactggctagtgagaaagc

SEQ ID NO: 8238 - DNA, 754 bp, Setaria italica
  Peptide Sequence Number=SeqID_74212
tttgtagggtagtattaagtcttggtagtaattaggtcttcttattgttggaatctggacttcaggatatcagagtctgatgttatcaagatgtttgccccctttggaaagattgcagcagaggatttcttgtggcacacacgtggcccaaagcaaggtgaaccccggggctatgcctttgttcaatacaccaccaaggaggaagctcagttagcaaaggaaaagatgaatggcaagttagtctgtggacgtccaatggtggttcacctggctagtgagaaaagctctctagactctggtccttcacaaagagcactcaaagacaagaaactgacagggggttcagcaagcagatcagtacaaactgatcgcgctgcaaaggtatctgccataaaaagcaagttaaaatctcttgaggaagaagggtgcagcacaaaaaaaccaagactcacaccaaatgacttgacaggcactagggaacactctcataagaagttttgaactgagttttcgagttcttcagaatgtttgggagtttgcatcctctcacgctggtgacacttctaaagctgctgccattctatatggttttagctttaggaagctagccacaccatatgtgtaacattccactgttttggatatatgtacaacagcttgtaccaattacctgtttctgaatcaatttgtcgttttgatatgggaatcagtgtggcaatatattgcgttggcattgacaatttaaaaaaaaaaa

SEQ ID NO: 8239 - DNA, 670 bp, Setaria italica
  Peptide Sequence Number=SeqID_74213
ccctcgtgccttcctttcctgccggcgacgactgggcgagcggctgcggcggcgccctgcgcccgtcttcgccggcccttcgccggcgacgagcacccaccaggttattgttcttcgacgtgcaagatcaatccacccgaggtgctgctgcagattgttttccaaaaattttggtgttcagctgaacccccatgccccacgttacgtcagccttgtgatttggcgtgctttgttaaacggtcaatcacctctgaattggaaatcttggctgcaagaaccaatggacgttaaaggtcttgagggagataagctggagaataggctctatgttgggaatctggacttcaggatatcagagtctgatgttatcaagatgtttgccccctttggaaagattgcagcagaggatttcttgtggcacacacgtggcccaaagcaaggtgaaccccggggctatgcctttgttcaatacaccaccaaggaggaagctcagttagcaaaggaaaagatgaatggcaagttagtctgtggacgtccaatggtggttcacctggctagtgagaaaagctctctagactctggtccttcacaaagagcactcaaagacaagaaactgacagggggttcagcaagcagattctagttactaaacttgtattcgtcgtcttgt

SEQ ID NO: 8240 - DNA, 643 bp, Setaria italica
  Peptide Sequence Number=SeqID_74214
gaccgccggagtaaatgttgtattgttttacataaccatgttctcatataattttatatcagctgatgacatgattgaatactcttccttattaccaaattgaatggtcacaaaaattcgaatagcattttccagatgcggagtggactagagctgaatggggctccccttacaacatagtgctgcatgaagatatgcataaacgaaccaaaatctttgccgtcataaattcatcatgtaatggaatttgtattctttcaacccccaatgcttagagagttcgacagagaatgggtagtttcagtccccgcagacaataaaatgctgccttgtagtacaaaaacgagcctttcaacatctttcggtggtagggctgattttgagccatcttgcatgtttgccaggtacatagtgaagtgtgcaccaatggctggactgatcaaatatgcacctaatgtattgatccaatcaggcagaggaccgaatacatgactttctggtgttattaaagcatgatcccttttgaaaacgctacgtgtgaagccaggtaaatctgaaataacatttcaccttgtagtagtagactagtaatgagtaaatgatcctctccagaacattggagctgctggatcgtgaatccatg

SEQ ID NO: 8241 - DNA, 1126 bp, Setaria italica
  Peptide Sequence Number=SeqID_74215
tggttgaaagtccattatatggatattaaagtcataaggcatcgaagttggtagcagcttcctcagttgaaatacctctcctggggtttcaagaaggggttgcttatctgttgaaccaacaattagatcagggtgggaatcctcggtggcactgtacctcctctcaaatattacaagagtggttgattcatctgagatcatagaatgttctaggtttgcaggaagatacgcataggaatccacctgcacttatcatcaacagatagtaatccgcatcagggcagaattagcatacaaggaacaagttcctaagataatcgatattatgaaaacaatattttaaaagcataagaatgcaaatttatgaaaactgctgaatttgaacactttacgatctctcataaatgtttcttgaagagctggtagattgcataagccttgcatctgaacattggtaggattcagtacacaacttatatgtcatgcatttttctcgctgccggagtaatgttgtattgttttacataaccatgttctcatataattttatatcagctgatgacatgattgaatactcttccttattaccaaattgaatggtcacaaaaattcgaatagcattttccagatgcggagtggactagagctgaatggggctccccttacaacatagtgctgcatgaagatatgcataaacgaaccaaaatctttgccgtcataaattcatcatgtaatggaatttgtattctttcaacccccaatgcttagagagttctgtacaaaagtagagtgcatagatatacagaattattttgtttaaagatttagaaagaagaaaaaaaggacacatactacatgtctacatctgataaagccttaccgacagagaatgggtagtttcagtccccgcagacaataaaatgctgccttgtagtacaaaaacgagcctttcaacatctttcggtggtagggctgattttgagccatcttgcatgtttgccaggtacatagtgaagtgtgcaccaatggctggactgatcaaatatgcacctaatgtattgatccaatcaggcagaggaccgaatacatgactttctggtgttattaaagcatgatcccttttgaa

SEQ ID NO: 8242 - DNA, 1366 bp, Setaria italica
  misc_feature (1)..(38): n is a, c, g, or t
  Peptide Sequence Number=SeqID_74216
nnnnnnnnnnnnnnnnnnnnnnnnnnnnnnnnnnnnnnagtttaaccacaactaaaattcataggattggccataaaagagatttcagaagtgccaacagcatatccaacttgtcaagtactcaagtgctgtccacaacacggtacaggaagtttcacaattcaaaatgtatcggcagtcataaacatcaaaagtgcacatttgaatttccacgccatttgattcggagacttctcaggtacaatctacaataagatccttttttctccttcctgtaaccttcctgtaaccatctcctagggaatttcttcatagctggcacagctccacattttgatttattgctttattggtatccatcgagaatgatttctttgatcatatcaatgggttcctattgacatctttgtacagcaagtatctggtcctggttttaccaaagcgcggcataccactgaggaacaaacggtgccatccaaatggtatcacctgcttgaacagggtaccagctatcccccaatcggtatattccttgcccctctagaagcagaagcccatgttgattatagtggacctccttcacattgagatattcgcctggttgaaagtccattatatggatattaaagtcataaggcatcgaagttggtagcagcttcctcagttgaaatacctctcctggggtttcaagaaggggttgcttatctgttgaaccaacaattagatcagggtgggaatcctcggtggcactgtacctcctctcaaatattacaagagtggttgattcatctgagatcatagaatgttctaggtttgcaggaagatacgcataggaatccaccgacagagaatgggtagtttcagtccccgcagacaataaaatgctgccttgtagtacaaaaacgagcctttcaacatctttcggtggtagggctgattttgagccatcttgcatgtttgccaggtacatagtgaagtgtgcaccaatggctggactgatcaaatatgcacctaatgtattgatccaatcaggcagaggaccgaatacatgactttctggtgttattaaagcatgatcccttttgaaaacgctacgtgtgaagccaggtaaatcttggaggtgcgcgggcgcgagggtggggtgggtagccttccagtagagcggcggccccccggagcacccgctcgacggctccgccgagcagaaaccctcgccggcatctccgtatccagccgccgctccgcatcgcagcgacgccgcgaggacgaagaggaagagggagcggattggggtgctcgccatttgccgcggagtgattcgcaaatttttggagagcagcggaggcggagaagagatggaaggaag

SEQ ID NO: 8243 - DNA, 320 bp, Setaria italica
  misc_feature (280)..(280): n is a, c, g, or t
  misc_feature (292)..(292): n is a, c, g, or t
  misc_feature (310)..(320): n is a, c, g, or t
  Peptide Sequence Number=SeqID_74217
atcacgccgcggcggcggcggcggcaggggcgcggcggtacgggaagaggaagcccaagaccaagaggtccttcatgtccaagatgtacaggtgcctgttcccaagggtccgagagtgtgagtgagagagtgagtgaggccgcatgtcggtaattactagtagtggtataatccaacgacaattaccacacaatcgtatacgtgttcttcggcagggactgtactatgctagcatttcttgaaaagatttgttcgttcttttaaaaaaaaaaaaaaaaanaaaaaaaaaaanaaaaaaaaactaagaagnnnnnnnnnnn

SEQ ID NO: 8244 - DNA, 570 bp, Setaria italica
  Peptide Sequence Number=SeqID_74218
tgaacaacaaaagacggcctcagagcttgtattgtgagagcatgacctcaaagagccttgcagtacaagctctgagggtgatgaacaacaaaaagcggcctggtgatgtcaagttatttgggaagattctcagtcatcaatcatccttgcaaaagtcctgtcccaccatgtaatggtaacaagagcaagcctccctcgccaaagattgacatatcatctgtgagatcgttgaacaatccacgggatcgtgtggtttgttcttccaggccaggcatcactcatttaggtctggaggaaagaacagctaagagctatggtcatttggatggaagcacaacacagcctgagccgctgctcatgatggcgaagtgccagagcttagccggtgtaccgttttgcacctctaaagatggcacggttggtgtgttttcggactatcaacagccttccattcagccgcatcaatcagatccaaaacggctggagagattttactaggctgctggaaacctgagatgaattccaccccattgcgctttcttgtagggttctagtaaaaccttcttcctt

SEQ ID NO: 8245 - DNA, 278 bp, Setaria italica
  Peptide Sequence Number=SeqID_74219
tgatgcttcccagatggaagagtgttcaaaccaagctcttgataataaactaaggaaagcatcagtgccactacccaaaggggctttgtttgtttgatgaagtacctcgacagaatgtaaacaaagcccatctgggaaggcatcagtgccactacccaaaggggctttgttgttgatgaagtacctcgacagaatgtaaacttggatctgtacttccgggtgcgctgccattgtccttgctctaggcgaggagcttgatggcactattgttttgcata

SEQ ID NO: 8246 - DNA, 541 bp, Setaria italica
  Peptide Sequence Number=SeqID_74220
acaacgcagagcagatagcagagcgtgcctcctgtttctccgtcgttcagcttcctccctccagaaatctcctcgcggtaggttggtctccaacgccgccggccggccaccgccatgggcatcgtcgacgtcgtctccgagtactgctccttacccaggacccgccgccacctcaagaagcggaagcagttccaggtaaccaacctttcttccatccatccccaacctccactccactccatctcctcttcgatccggaagagcagaaccatcgatttttgtatgtaatatgtatatgcatatatcctgacgggaccttctccggccagacggtggagatgaaggtgctgatcgactgcgacggctgcgagcgcaaggtccggaaagccctggagggcatgaagggcgtgagctccgtggacgtggcggcgcggcagcacaaggtgacggtgacgggctacgtcgacgccggcaaggtcatgcgccgggtcgcctacaagacgggcaagcgcgtggagccgtggccgtacgtgccctagac

SEQ ID NO: 8247 - DNA, 410 bp, Setaria italica
  Peptide Sequence Number=SeqID_74221
gggcctacgacaaaccgccagggtacgtccgcaacgtcgttgccgaccccaccgccgcgccgctggcgagggcgtcgtcgacggaggtcaggtacgccgccgcgttcagcgacgagaacccaaacacctgcgccgtcatgtgatgtatgtgatcggcggaggaggtgcctggctggccgggcggccggaggtgcatcatggagtaggagtaatcgctccagatttcttctctagctagttgtagttgttggagcttttaattttttggttttctttcttctctaccattagctagagcttttaattttttggttttctttcttctctaccgttagctagctcatctggtttgatgcctgtaaaagatgtttttgtagtagatttgtgcaaaagactgcaaaatcagtggt

SEQ ID NO: 8248 - DNA, 2588 bp, Setaria italica
  Peptide Sequence Number=SeqID_74222
cgcctgcccccgtgcctgcacctgcgttttgcacttctccagttgatacaccatcatctgcaccaccatattgtacctcagcacctgaagataaatcatgtgaacagacgggtacggtcaccaaccctactaaagatgtccctgaagctgctgataaagctgtcaacaatgagttctccattaatttagatcagctgggggatgatcctattaattcccttgcaaacatgcttgctgaccttcttcagcatgatgattcttgctctggggattcaaaaggtccaaccagtacaagtaagctgctgctactgaaggaaagcatttccaaggagatcgaaaaaactgaattagagattgatttgttggaaggtgaacttaaatctgtgaatactgaggctggaacagctgttgaaggttctcccacaggtgtcacttatgcagaaaatctttcaccttctagtgggacatcaaaggtccctgaaagtgctgagatctctcaagcatctcatgtgatgaaagaaccaggggagctcatcccttctcccaagccacctgtggtgcaggatgctgatgtcaaaggtgctgatatgatggaaatcgagccagctccagttcgtaatgctaaaacactttcctcagaagagagtgctgtatctcctggagttgcagagggtccggtctgtgctgctgctgatcttagcccattgaaagcttctgaacgagctggctctcaaaatgatatgcacaatgataggttggaaacttcttcatgccatgttaatgctgattccatcaaaacagaaatcagtgatgacataccagtgacgcaatgctcagaccatgatcataagtatagcttattcggttcagttacatctgccaataataatatagccaaagtaatgaatgaatcgctatttaaatcattgcctgctgatacaccccaccttgatttattggcatcaagtcatcttctgagccaaaggaagaatgaccatcatattagagagaggcttggggtatgtaaaaataggctgagattgaaggagcagattcttaccttaaagttcaaggcatatcgtcacttgtggaaagaggatctgcgactactttctgcaaagaaacaacgcccaaagtctaacaagcgcattgatcagagcaaccggacatcacatattggatctcagaggcaacgctcttccaaccgctcacgattggccatgcctgctggtaatttaagtacattctcgactccagaaatgtcagatgttgcaagcaagttattttcagaatttcagattaagcgctgcagaaactacttgaaaatgcctgccctgattatagatgaaagagagaaggaacgctcgaggtttgtcagcaagaatggcttcgttgatgaccctgttttagtagagaaggagcgggtaatgataaatccatggacacaagaagaaaaggaaatatttatggagatgtttgctaaatttggtaaggatttctccaagatctccagtttccttatgcacaaaactactgccgactgtgttgagttctactacaagcatcataaatcagacagtttccgagaagtcaagaaacttttggaccttcgtcaacaacaacctgctagcaattttctgggagcaaaatctgggaagaaatggaatcccgaggcgaatgctgcttctcttgatatgctaggggtagcatcagtagtagctgcccatggccttgaatatgcaaacagagtggagaaaatctctgcgaaatccctcatccggactgcatatgggtccaatgtttcctttgcggccaaaaaatcttctgacatggaatgcattgacaatgtacctttgcatgagagagaatctgtagctgctgatgtgttagcagggatatgtagcactctctctcctgagggaatgggctcgtgcattactagttctgctgatcctggtcagaagattagcatgacaagaatggagcatggcttagcccctgaaattgacagaagcattgatgaggaagatacactctcagatcaagagtgtgaagttgatccagttgattggaatgatgatgagaagtcagttttcatcgaggctatgaataactatggaaaggattttgctcggatttcatcatgcgtgaagagcaagtcgtatgaacagtgcaaagtattcttcagcaaggctcggaaatcacttggtttggatttgatccatcaaggagcagctgatgttagtatgccaactagtgatacaaatggagggcggagtgatactgatgaggcctgcgctgctgaaatggattcagcaatctgtagcacacagtcatgttcagaaattgagaaggatgtatgtcctactgaaaaagccattggaggtataatcactaagcagccagaacttaatatatcaaatgggtttgatgttgtagatggtaaaactgaggaagatgagaagaaagctgataaaaaattgcagtattgttgatcatggaaggttcaatgaaggttcactccatctagcatgtcgtactattgacattaattgcccagaaaagcacagagaaaactgcaaggaaaa

SEQ ID NO: 8249 - DNA, 2379 bp, Setaria italica
  misc_feature (2320)..(2379): n is a, c, g, or t
  Peptide Sequence Number=SeqID_74223
tatttgttttgtattggtctattagtctttctaattaacttattgtccctaatttttgtattgtactagttggtctaactagtagttctagtctagttgtcttttaggggtcctaaaagtactattgtagtctaagttacccagtctctgatgttagtatgccaactagtgatacaaatggagggcggagtgatactgatgaggcctgcgctgctgaaatggattcagcaatctgtagcacacagtcatgttcagaaattgagaaggatgtatgtcctactgaaaaagccattggaggtataatcactaagcagccagaacttaatatatcaaatgggtttgatgttgtagatggtaaaactgaggaagatgagaagaaagctgataaaaattgcagtattgttgatcatggaaggttcaatgaagatactcatcaagtagcatgtggtactattgacattaattgcccagaaagcacagagaaactgcaaggaaaagatgatgtcgttgaccaagtaaatatgcaaaacaatagtgccatcagctcctcgcctgagcaagcaatggcagcgcacccggaagtcagatccagtttacattctgtcgaggtacttcatcaaacaaacaaagcccctttgggtagtggcactgatgcttcccagatggaagagtgttcaaaccaagctcttgataataaactaaggaaagctggaaattctggtgcctcagcttgcatagcttcagatatctctactaaggacaatgttcactttgcaaacatgactggtgcttccaccattagtcctgcatttcctccaagctataagcactctgtgccagcagatatgcctccaacaaaaccaaagccactggttactccccttaccccaaaagatttaatgcctgtgcagttcagttctgcggttcctgatcctaccgtgatttgttttgatggcatagcttcaataactatgcccaattttgatgacagtggcaacagagtcagcagtgctttaggggccaaagacatgagcaagtacccagcttttaaagacccaactggtaatcagcatgacgcattgtttcgtaatgttgatggttacacgaatcatctgacaactaaattaccatttttttctgaaagaactgcaagtggcactgtgagtacttctcagactgatcggttcactctaacaaaattccagaatggcaggtccagcagcttgggccttccaaacacttctgatgggattcaatgggccagaaaacacgaagaagtactgcaaggctctttgaggtcatgctctcacaatacaagctctgagggtgatgaacaacaaaagcggcctggtgatgtcaagttatttgggaagattctcagtcatcaatcatccttgcaaagtcctgtcccaccatgtaatggtaacaagagcaagcctccctcgccaaagattgacatatcatctgtgagatcgttgaacaatccacgggatcgtgtggtttgttcttccaggccaggcatcactcatttaggtctggaggaaagaacagctaagagctatggtcatttggatggaagcacaacacagcctgagccgctgctcatgatggcgaagtgccagagcttagccggtgtaccgttttactcggctaaaaatggcacggttggtgtgttttcggactatcaacagccttccattcagccgcatcaatcagatccaaaacggctggagaggttttctgaccctcagaagcgcaatggggtggaattcatctcaggtttccagcagcctagtaaaatctcacgttttgggggtgctggtatccttgttagtggtgtctcagaccctgtggctgctctcaaggcgcagtatggtcccggttctaaggttatgggcagtgacgtggatccttggaaggacataggcagcaggtagcattggtagtggtagcagctttagtgcatgttttgttgcccctttgtatcatatttagtttttgtaacttaatgaaatgaaacaagggaaagtgaatggctttcctgtccatactatttgtaggctttcagtagctgttgggttatgttatgtacttggcattaacatctctaccttttctgcagctccataccctttgctagcttgacctgtcaacagtggcacagcgctgtaggttcgctagaagtgctgtccgcaggctgactatatatgtttgtcggtagggttttattttgtcagtttatgcagaaacctcacagatcattgtaatatggtaatgcctaattcggtatgctagtctgatggagttttggttgaaaggnnnnnnnnnnnnnnnnnnnnnnnnnnnnnnnnnnnnnnnnnnnnnnnnnnnnnnnnnnnn

SEQ ID NO: 8250 - DNA, 998 bp, Setaria italica
  misc_feature (937)..(998): n is a, c, g, or t
  Peptide Sequence Number=SeqID_74224
cactcacaacgcagagcagatagcagagcgtgcctcctgtttctccgtcgttcagcttcctccctccagaaatctcctcgcggtaggttggtctccaacgccgccggccggccaccgccatgggcatcgtcgacgtcgtctccgagtactgctccttacccaggacccgccgccacctcaagaagcggaagcagttccagacggtggagatgaaggtgctgatcgactgcgacggctgcgagcgcaaggtccggaaagccctggagggcatgaagggcgtgagctccgtggacgtggcggcgcggcagcacaaggtgacggtgacgggctacgtcgacgccggcaaggtcatgcgccgggtcgcctacaagacgggcaagcgcgtggagccgtggccgtacgtgccctacgacgtggtggcgcacccctacgcccccggggcctacgacaagaaggcgccgccagggtacgtccgcaacgtcgtctccgaccccaccgccgcgccgctggcgagggcgtcgtcgacggaggtcaggtacaccggcgcgttcagcgacgagaacccaaacgcctgcgccgtcatgtgatgtatgcgatcggcggaggtggtggccggccggccggccggccggcggtgcatcatggagtaggaggggtaatcgctccagatttcttctctagcttgtaggtgtagttgctggagcttttattttttttggtttctttcttctctaccattagctagctcatctggttcgatgcctgtaaaagatgatgtttttgtagtaggtttgtgcaaaagaactgcaaaatcagtggtgaaaaaaattttattcgagtttgtaggattttttgagagcctggatctgagctcggcggcggagacatgcatgataatgacagatgcgatgcattcttccggtggttgcaggaactnnnnnnnnnnnnnnnnnnnnnnnnnnnnnnnnnnnnnnnnnnnnnnnnnnnnnnnnnnnnnn

SEQ ID NO: 8251 - DNA, 2462 bp, Setaria italica
  Peptide Sequence Number=SeqID_74225
cggcgcgctccccgacgcgctgcccccgcgcctccgggcgctcgacctctccggcaacgcgatctcaagcggcatccccgcctcgctcgcgtcctgcgagtccctcgtgtcgctcaacctctcccgcaaccaactcaccggccccgtccccgacggcatctggtcgctgccgtcgcttaggtcggtggacttctccgggaacctcctctccggtagcgtgcccggtgggttcccgcggagcagttcgctgcgtgtggtggacctcagccgcaatctcctcgaaggggagataccggcggacgtcggcgaggcagggctgcttaagttgcttgacttcgggcacaactcgctcaccggcgggctgccggagtcgctgcgtgggctatccgggctaagttctctcggcgccggtggcaatgccctatcaggggagctcccggcgtggattggggagatggcggcgctggagaggctggatttgtctggcaaccatttcgtcggcgacatccccgaccgccatttcggcctgcaggaacctaaataaacgttgacctcagccggaacaagctcaccggggagctcccgtggtgggtgttcgggctggcactgcagcgcgcctccctcgccggcaatgcactatcagggtgggtcaaggttcccagtgatgctgccgcggccctggaaggactggacctgtcgagcaatgcgttcaccggtgcgatcccgcctgagattgccacccttgcaagattgcagcacctgaacttgtccttgaattccttgtcggggcaacttcctgcaagcattggacggatgctgctgcttgaggtgttggatgtgagtgcaaacaagttggacggggttgtaccactggagattggaggtgcggttgcgctccgggagctgctgatgggaggaattcacttactggaggcattccggtgcagattggcacatgcaattccctgattactttggatctatcacacaacaaacttacagggccaattcctatgtccatgggtaacctgaccagtcttcaaacggttgatctctcggagaacatgctgaatgggaccctgccgacagaactctctgaccttgccagcctccgtctcttcaatgtctctcacaatttgctatcggggagcctccccatcagccgtttttttgacagcatcccttattctttcatctccgacaatgccggcctttgcagctcacaaaagaacagttcctgcaacggcgtcatgccaaagccaattgttttcaaccctaactcctcatcagaccccttgtcagatgttgccccaagttacccaaataaccagcaccagaagaagatgatattgagcatttccacactcatcgcgattgtgggcggagcagtcattgtcatcggtgtggtcaccatcacagtgctcaatcgccgtgctcgtgcaacagcacctcgctctgcgcttcccactgcattgtcagatgattaccatagccaatcagccgaatctacaaacaatgagaccaagtctagcaagcttgtcatgttcggcagaggcagctcggatttcagcacagatgggcatgcattgctgaataaggattgtgaacttgggcgtggaggctttggtactgtttacaaggcagtgctcagagatggccaaccagtggccattaagaagctaacagtttcaagtttggtcaagtcagaggatgacttcaagcagcatgtcaagcttctaggcaaggtgcgacaccataacattgttaccctcagaggcttctactggacttcatcactgcaactccttatatatgaattcatgcctgctgggagcttgcatcagcacctgcacgagtgctcagaagagagctcgctttcatggatggagaggtttgacataatcatcggtgtggcccgcgcacttgtttacttgcaccgccatggtataatccacttcaacctgaagtccagtaatgtcctcctagacacaaatggtgagccgagggttggagactacggtcttgtgaacctgctgccgatgctggaccgctacgtgctgagcagcaagatccagagtgcgctggggtacatggccccggagttcacctgcagaactgccaatgtcacagagaagtgtgatgtgtacagctttggagtgctgatccttgagattttgacaggcaggaggcccatcgaatacctggaagacgacatcattgtgctttccgatctggtcagaggtgcagttgaagaagacaggctggaggactgcatggatccgcggctgtcaggtgagttctcgatggatgaggccacgctgatcatcaagctggggctggtttgcacgtcgcaggtgccttcccagcggccggacatgtctgaggtggtcagtatgcttgagatggtgaggagcccgcagggtaccccagaggatgatctggtttgagatctatttactagg

SEQ ID NO: 8252 - DNA, 395 bp, Setaria italica
  Peptide Sequence Number=SeqID_74226
caccgccacctccttcttcatatcgggcaggacgcgacgtgcctgcttgcggaggtcgacgagctccttgcacgagtgcttgaacagcccgagcagctcgtcgacggcggggaagacgggcggggccgccccgagcacgagcgggggcggcggcggcgcgggcgcggcgtcatcctccccgcggtactccgggagcagctcgtccaccaggcccccgaacagcgcatcgaacgagaagtcccccttgaagtcctcgaggtcgagggtgagggggagcgcggaggcggggtcggcggccgtcggcatggcggccggcggggcgggcggagatctgggcgggggttccttcctcttctgttctccgaggcgggcgtcggaatggaatgccggcggtg

SEQ ID NO: 8253 - DNA, 261 bp, Setaria italica
  misc_feature (1)..(7): n is a, c, g, or t
  Peptide Sequence Number=SeqID_74227
nnnnnnntttttttttttgggctcaaatttacacttttcttattagcaaacttgaaaacagaggcgtataccaagtgatgagtcacacttacaaattggcaagtcgtaagtacatgatgaggagatgcgaacgctacaaagccagttggcacgtaaactagcacagcaccacagaaaaggcaaaaacacgctggagccgacctcatcaggctcaagctgtccctgcaggttgcttgttggcgccgtaggcatcgtacggag

SEQ ID NO: 8254 - DNA, 408 bp, Setaria italica
  Peptide Sequence Number=SeqID_74228
cccctacgctcattgttgatagatcgatcaatcatctcatcttggaataaactgaccacgaaggaacttaccacaagcagaccctgtaatgttttgccgatattccccacaccagcgatctagacttttttatttattgtgatcaggaagcggcattgcttgtcctatacaaaagcagaattagttgcaatcaagactctacaataataattttaatcacataatttcttgtcctaggtatttgaaaagtgtggcatttgtaaaaatcattgaggatgggaacgggattatatttgctacctatccttttcctttattctctttttggtaattggccatcctagttctagggcttgaatggatggatgggcaggttaaacaaatttacactgggccattgacttgttg

SEQ ID NO: 8255 - DNA, 1075 bp, Setaria italica
  Peptide Sequence Number=SeqID_74229
ctttcttctctgcttgttgcttaatcatccccactgacccaacagcttcctttccctccttcacatcatttactgtaggtgcttctttgcattccaagtcaatgttccagtcaccatgcaaggcaaaccgctattgagcctctgagataacctttgtccttatcagcatcaccctttttctatccagattccagagaaacaacccaatcttctccgggtaaggtactaatctctcctctatatgtttagcagactcctctgatctcatcatctgttcctcatcagaacacgttactaacgcaatttccttcagaagtttctcactggtctttgcccctagctcattgttgatagatcgatcaatcatctcatcttggaataaactgaccacgaaggaacttaccacaagcagaccctgtaatgttttgccgatattccccacaccactgatctgtgttttttatttattgtgatcaggaagcggcattgcttgtcaaattggcaagtcgtaagtacatgatgaggagatgcgaacgctacaaagccagttggcacgtaaactagcacagcaccacagaaaaggcaaaaacacgctggagccgacctcatcaggctcaagctgtccctgcaggttgcttgttggcgccgtaggcatcgtacggaggttgagccgggtaagccacgggagcctggtttggctgccccatcgcgacgcccagcgtgggcgtccggttcctctgctggagggcgtcgacgtaggccgtgatggcgcaggcgatggcgatgacggcctggatggacgccgacgcgaagaccccgtcccggagctcgttgcagacgaagtccaagccgccgccgccgccgttttgcccgggctgccgcctgaccgcggtgaatccccccgtccctcccgcgttccgcgacgcgccgtacaggaagctcaccgccgccgacagcacccacagccacgagactgccgcgcacgcgttcctggcgcagccgcgccgcctctcgggcgggagcgcggcagcgccgaagcggccgaagcagccgctggcggcggtgacgagcgcca

SEQ ID NO: 8256 - DNA, 1275 bp, Setaria italica
  Peptide Sequence Number=SeqID_74230
tttttttttttttttttttagttatgaaaaaaacaagcataatgcttggctcatcataagttagtaaggttaacataatgagtttcagcagttctgatgctagtggccaagtacagagttgcagacagggtatctgaatgtgctaaggatgaaacacaattgctggtgctgcccatatatagaacaaacagagaatctcctatagtttgtcagcaaagattcaaagcattggaacaaacgaacatcatccttgatagcaagcatcaggagggcattttcccttgcaagccgatgcatatgcattcgcaaggccaggaagaacatccttatgagcttgtatatacctggagtagaacaacttgtcactaattgtaatgattgagtagaagctcagatctttccgcatcaatcctttctcctggagcaccttcatcacgtaattcctgggcgccagccggcgctccttggcttgttactattaggatcgtgggcctgccctggatgtacttggcatcgactccgaccatcttggttaagaactcgtacacacgctgaaccttctccctggaacacctcaacagctgcggggacatccgcaccattctggcaacctcagcatcggagcacccgagcgtcttgccaatcatcttgagcttagaggccatcgtctctgggccgaggcccgccacgctgttcaccgcctgcctgaacataagggagttgcgaggcacgccaagctcgtcggcgcgcacgaggacggccctggtgacgtccgggttgcaggtgagcagcctcgggttggccacgcacatacggtcaatgtcctgaacagatagcccgcgctcctgcagcagccggatgttggtcttgaccaccttgtcgaggtcggaggagacgaggtagtagttacgcttgacgatgcggaggaacttgtcgggcgagaacaaaggcatccagaagccgagcttctcgtcgatgttgaagatgcggaagaagcagggggccgcgcggacgaagctgcggatctgcgcggtggagaagccatggctgcggaagccatccaagcgggcccgcaggttcttgtcgacgctgctgttgaggatgcgcgggtctttggccacgaggagcgcgatgtccgccttggagagaccgagcgccgggccggtgaggaaagcgagcgaggccgcaggtgtggcgggggatttccagtgggagaagcatttggcggcctttgcggcttcctcccgggtgaggccgcaggtggtgacgaggtag

SEQ ID NO: 8257 - DNA, 279 bp, Setaria italica
  misc_feature (21)..(21): n is a, c, g, or t
  misc_feature (236)..(279): n is a, c, g, or t
  Peptide Sequence Number=SeqID_74231
cggcgacgttgccgtggatgnggcccctggtggcggtggcggctgctagttcgcattcggcgtcgacacagggtactgaatgtcctgcggaaatgtgtgcgcttacgctgccggcaagagatcgaggtgagaagtgggtgaggagaaggttggtggacctcacatgaggtccacatgtcatatctaagtcagcatgctatgcttgcaatttaatatggagatggagatttggatannnnnnnnnnnnnnnnnnnnnnnnnnnnnnnnnnnnnnnnnnnn

SEQ ID NO: 8258 - DNA, 321 bp, Setaria italica
  Peptide Sequence Number=SeqID_74232
ggcgcgggaggtagcggcgcagcgctcgagtcggggggggggggtggcagggaggggaggagtctgggtgcggcagcatgggggaggaggcgagtcggggttaggggagaaacgatttctacttttagggtcagaatgtgtcgcgggctaatgattcggacactggaaacttgaggaaagactgtttccaattctaggtggagccaaacaggccgaccgtggaaactaattccaattccgcccgattccaacgaaacaaacaggtcctgctatcttgctctccgcccgtccgtagcttcagtcggatcgcacacagccgat

SEQ ID NO: 8259 - DNA, 543 bp, Setaria italica
  Peptide Sequence Number=SeqID_74233
tgccttaagttgcggcttgcgcttgtcgggataaccttcttcatctcatgctgggtccattcttcttcagcttcatcaattgcctggagtatacgtgattaatctcattattacaacctaaaaacaggagaatattctctgttatgcaggtagcaatagacaactgacctttttgaagtacattggggcgttgcttgaaacatcacaagggacagggatacactcaatcatgcaatgtctcctttgtctggccaggcttatgacagtctccataaacactacatccttgtcctgctgcgcgaacatcttcagcaggcacttcttgaagttgcgaatctccccacaaacattctgatcaacggttcttgttgcagactcatgctgcaaccattaacaaaattgttgataatttagattttagagactgattttctgttcacaagagatgcaaataaaaacagaaagttccaagaaagatggcctattcaaaggcacagacaagttgcagctagtatgtacttaagaaagcttaatttcctagaa

SEQ ID NO: 8260 - DNA, 540 bp, Setaria italica
  Peptide Sequence Number=SeqID_74234
atcccctctctctaaaccctagcgcctccacgacccgagcaatccctaggtcttcgcgcgaggtgttggcggcggcggcgaggggattttttttgacccggatggcggaggagaaggtgggccggatcttcgtgggcggtctgtcgtgggacaccacggagggcacgctcacgcgcaccttcggccagtacggcaaggtcatcgacgcacagtattgatctttgaatgtctgctggccttacttgggcgagactgctgtgcttcaatcatggatgaattttgcatcagtgatgctcagagctgtactgctaggttacttgcagcaggtctggaaatggatgtttgccccttcttttctttgattagggcactcgatccaatttgttcagctcttccttcagttgtgttgtgaaacagaaatcagaacagcataatcccatatgcagtctgggttttgagtaaagagaatgtgaagctgatatgagatataggaagatgattgtcgttgtggcgtttttaatgctgcagataaatgcattt

SEQ ID NO: 8261 - DNA, 324 bp, Setaria italica
  Peptide Sequence Number=SeqID_74235
ctaggtcttcgcgcgaggtgttggcggcggcggcgaggggatttttttttgtacccggatggcggaggagaaggtgggccggatcttcgtgggcggtctgtcgtgggacaccacggagggcacgctcacgcgcaccttcggccagtacggcaaggtcatcgacgcacaggttgtagtggaaagggacacaggccgctccaggggatttggatttgtcacattttcagaacctcgagctgtggatgctgccattcggggaatgcataatggagaactggatggtcgaaatatctctgtgaacaaagctcaacctaggaacgctga

SEQ ID NO: 8262 - DNA, 397 bp, Setaria italica
  Peptide Sequence Number=SeqID_74236
ggagaaggtgggccggatcttcgtgggcggtctgtcgtgggacaccacggagggcacgctcacgcgcaccttcggccagtacggcaaggtcatcgacgcacaggtatagcgacgactccgccctgccgtgatgcttgtgatttgcggggattggaggctgtttagttgggatcccctgttttggtgtggtttgatggataaattgttaggctgtatctgtaggtgaacgaagaagcgcaccctagaattagaataattgttgagattgttactgtggtatactggtttatggatctgtttcccttctgggtaatagtctgatgcattagttgcagatataattttgtgggtattatagtttagcaatcaaacaatttcattaagatacaggaagcac

SEQ ID NO: 8263 - DNA, 1650 bp, Setaria italica
  Peptide Sequence Number=SeqID_74237
gatgatggctatggctatggtggcggtggcggcggtggtggtggtggaggtggtggttactcatctggtgccagaggtggatatcgcagtggaggtgatgtagttccagctgcgagtgatgattgcttcaaatgtggccgccctggacattgggctcgtgaatgtccttattcagatggaggtggtagaactggaaggtactctcccgcttcaagatacggtggtggcactgggggacgtggtgatcgctttggaggatcagatcgttttgctcggtatgatgatgatcgatatgatggtgggcgctacatggacagcagggatacatattatggtgctgggcgtgatcgttatgctagtgatcggtatgcaccagcagcagatcgctattccggtgacaggtatggtggtggtgcagatcgttatgcatcaagtggctttgccagggaaagaagctatgaaagagatggtgggcggtccagcggaggttactaccgtgatgattctaggagcagtggtggatatggcagaggtggttcacgtgtagggggtggtgctgctgggcctgctcgctttggtggcagttaccgtgatagacccgccccctatgaccgtcctagcaggggagctggagctcgtgcttatgatgatcgctattgaaggttaccttgcagcggaacagtgacatctagtgtgtttcaactatgagtcagtgtttgcatttgctcttcaaccaatcaaccctgtgttattcagcagtgcagtttgttttattagtctgaaccgttcagtacttgaattattactatgttggcagtgtgatcctggttccttcattatgcttgtgtaattactttgcagtttgcacccaataactatagtcctgttgaactctgttgcagtattgatctttgaatgtctgctggccttacttgggcgagactgctgtgcttcaatcatggatgaattttgcatcagtgatgctcagagctgtactgctaggttacttgcagcaggtctggaaatggatgtttgccccttcttttctttgattagggcactcgatccaatttgttcagctcttccttcagttgtgttgtgaaacagaaatcagaacagcataatcccatatgcagtctgggttttgagtaaagagaatgtgaagctgatatgagatataggaagatgattgtcgttgtggcgtttttaatgctgcagataaatgcatttgatctatacaagtttgttagtgttgtctggggcagaggcatctctggcttatagcgacgactccgccctgccgtgatgcttgtgatttgcggggattggaggctgtttagttgggatcccctgttttggtgtggtttgatggataaattgttaggctgtatctgtaggtgaacgaagaagcgcaccctagaattagaataattgttgagattgttactgtggtatactggtttatggatctgtttcccttctgggtaatagtctgatgcattagttgcagatataattttgtgggtattatagtttagcaatcaaacaatttcattaagatacaggaagcacaaacaaaaaagatgtaggaaaccagataatgaaactgcttgttgactgtggacaatagttaagtttaagttaatttaa

SEQ ID NO: 8264 - DNA, 506 bp, Setaria italica
  Peptide Sequence Number=SeqID_74238
tagtagtgtaagaaggaaaatcgaggccagcaagaagaagagctccgattcctctgctagttctgctggtgtggtgttgtgtaataaggaagaagaagaagaaatcaagaagcagggacctgcgacaatggcttcctcgagcgggagcggcagctcgggctcgctctccgcggcgaccgcggcgctcgccgccgccgcgggcacgggggaggagctacgggcgctcatggagcagcgccgcgccaagcggatgctctccaaccgcgagtccgcgcgccggtcgcggatgcgcaagcagcgccacctcgacgacctcaccgcgcaggctgcgcacctgcgccgcgagaacgcgcacgtcgccaccgcgctcggcctcaccgcgcagggactcctcgccgtcgacgccgagaacgccgtactccgcacccaggccgccgagctcgccgcgcgcctcgcctccctctaaacgtaactaattactaatttacgttacctttagttactta

SEQ ID NO: 8265 - DNA, 246 bp, Setaria italica
  Peptide Sequence Number=SeqID_74239
ccgcgtcgtgccgtcgctgccctctgctgcccaagcgccggaggctccagcggagcggttgcccgtcccgcgacaccgcagaggcctccgccggcgatggccggcgaggaggcgccgctgggcgcgctcaacctgtccgagtacgcctccgccggcgcgcggacggtcgactgctacaggcgcatccgcaagatcggcgagggcacctacggtgaggtatttgaggctgtggatattattaccggg

SEQ ID NO: 8266 - DNA, 396 bp, Setaria italica
  Peptide Sequence Number=SeqID_74240
cggcggaggggcggagctcgcggaggtgggagaggtagttgtagccgtcgtcggggaggccgagctcgaggatctcccggcggacgtgctccgggaggggcccggaggcggaggagtggaggtggccggcgtcggcggtggggtcggacagggaggggtcgaaggggtcctcgtcggcgaagccggggacggtgtagtcgttgttgtcgacgcggacgaagacgcggtcgttggggtcggcggcgccggcgcgcgggaagaggcggaacgtcgcgaagttgcggggcttgcgcccgcctcctcctcctcttccacccatggcgtctgcggcggtggtggcggcggcggcggcggagggggatgggctagggttttgggatttggagagcggcgtgg

SEQ ID NO: 8267 - DNA, 649 bp, Setaria italica
  Peptide Sequence Number=SeqID_74241
tttttttttttttttttccaggctcagaacaatggcttgcgttaacaatagatagatacatgttttgtaacacatgaaggccaaataaatcaagtatccttaataaacttattttctggctaaaaattacaacatgtcaacacccagaaacataatccagatctacatgttgtcaaaaacccaagtcccacttgggtcgttttcagtcagtgaagatgcaaaatcaagttgcgcttccgtaggctttgtacacacaccactgttactcaagagctgtgctgtgtgcacatctaggtgcacagctgcattgaactctgatgcaacttgaggaaggcttcaagagttcaggataccatcttgtcaggaactctactggggcgaggggaacagattaatctgaggagcttcagtaccacctttgccattttgaatggttttagatttcaagcgcagctcaggtgaagctgccaaagcactgacgacctcttccggaggtaaacaccgcttggagaaatacatggatatgtttttgttctttttggatttcactggtgaagaatctaagcctagcttgtcaagaatctctttcttgaccttccagtgattatcaacaaagtcagatatctccctcactttacgattcagttga

SEQ ID NO: 8268 - DNA, 1232 bp, Setaria italica
  misc_feature (1156)..(1232): n is a, c, g, or t
  Peptide Sequence Number=SeqID_74242
agcagccgaacatccgaagaagcatcacgcagccttgcgaagcaaacgacggagatggcttcggcggcggcgtgggagggcccgacggccgcggagctgaaggcggcgggtgcggaggcgattcccggcggcgtgagagtgaaggggtgggtcatccagtcccacaagggccccatcctcaacgccgcctctctccaacgctttgaagacgaacttcaaacaacacatttacctgagatggtttttggagagagtttcctgtcccttgaacataatcaaactggcatcaaattgcatttcaatgcgcttgatgcactcaaggcatggaagaaagaggcattgccacctgttgaggttcctgctgcagcaaaatggaagttcagaagcaagccttctgatcaggtgatacttgattatgactatacatttacgacaccatactgtgggagtgatgctgtggttctgaactcaggcactacgcaagcaggtttagatggatgcagcactttgtgttgggaggatactgatgatcggattgaccttgttgccctttcagcaaaagagcctattctgttctatgatgaggttatcttgtatgaagatgaattagctgacaatggaatttcttttcttacagtgagagtgagggtaatgcccaccggttggtttctgcttttgcgtttttggcttagggttgatggtgtactgatgagattaagggacactcgattgcattgttcttttggaaatggtgacggagccaaacccgtggtactccgagaatgctgctggagggaagcaacatgtgctagtctgtctgcgaaaggatatccctccgactccgcagcatatgcagatccaaatcttattgctcagaaacttccggttgtgatgcagaagacccagaagctgaaaatacccagctgacccaaaggctcctaccgtgtgtacatcatgaatgttctattgtggcttcttttgcttgccacatgttgtagatgcacgcttttgttgcattaacatgattgaacttcttgttataactcatcatagcccatgtcgcctgggccaataaacagatatatttcacttgtagatgctactctcatcatgcttgaattagacgccccccgttaactttcgtcgcttcttaaannnnnnnnnnnnnnnnnnnnnnnnnnnnnnnnnnnnnnnnnnnnnnnnnnnnnnnnnnnnnnnnnnnnnnnnnnnnn

SEQ ID NO: 8269 - DNA, 444 bp, Setaria italica
  Peptide Sequence Number=SeqID_74243
aacccgcccagcccacgagccaagcgacgagcagcccatccgccgaaacgccctgccgtctcccgagctgccggaacgcggcggcggcggcgggctgctgcagcgggagccgaggtctcgactccaccccccaggcagcgggacacttgggggaggcggccggccggcgaatgcgataggaggcggcggggatggggtccaagtacacgcgcgggtgctgcgggtggctgatcgtggcgctgattgcggcgctggtggccacggcggcgatgttcgccatcatgaagcgcaagcccgggggagggggcaaacacctcaagccgctccccgtgccggggccgccgggggccatcgactccaagtacggcgacgcgctcggggtcgcgctccagttcttccaggtccagaagtcggggaagctggagaacaaccagatcccgtggc

SEQ ID NO: 8270 - DNA, 502 bp, Setaria italica
  Peptide Sequence Number=SeqID_74244
gctattgttttacagtgactacatgctctcaacacagactgcggcggtgcagtgcagtggaaagtactacagccctactgatatacgcaattttgctgcatcacaggtgcgctatttcaaaccttaggagatactaaaattctaatattcgagatgggcatgtagtttcatgacatttgttggttcctatgatttacaaactacacggtaaatcaaaaggtgccttttaagtttctaatttatgttgtcatgttgtatgccaggccaattacatcttgggagacaaccctatgaagcttagctaccttgttggatatgggagcgtctatccacagcaagtacatcacagaggagcgtcgatccccgcagatgcgaaaacaggctgcaaaggattccagtatctccattcacccgatccaaacccaaatgttgcaatgggcgccctggtgggtggaccattccagaatgacactttcgtcgactctcgggacaatgctctaca

SEQ ID NO: 8271 - DNA, 2261 bp, Setaria italica
  misc_feature (2233)..(2261): n is a, c, g, or t
  Peptide Sequence Number=SeqID_74245
ccaagtccgcacaccgcgcctaccaaccaacccgcccagcccacgagccaagcgacgagcagcccatccgccgaaacgccctgccgtctcccgagctgccggaacgcggcggcggcggcgggctgctgcagcgggagccgaggtctcgactccaccccccaggcagcgggacacttgggggaggcggccggccggcgaatgcgataggaggcggcggggatggggtccaagtacacgcctggtaaccaaataccaagtagaataactacgcgcgggtgtcttgggtggctgatcttgtattcgttggtcgtcttgtatttgtcggtggcgctggtggccacggcggcgatgttcgccatcatgaagcgcaagcccgggggagggggcaaacacctcaagccgctccccgtgccggggccgccgggggccatcgactccaagtacggcgacgcgctcggggtcgcgctccagttcttccaggtccagaagtcggggaagctggagaacaaccagatcccgtggcgtggggactcggcgctgaccgatgggaaggaagcggggctggatctttccaagggaatgtatgatgctggggatcatatgaagttcaccttcccgatggcgttcactgcgactgtgcttgcctggtcggttctggaatatggggatcagatgagcgcggcgaagcaactggaccctgcactcgatgcgctcaagtggattacagatttccttatcgctgcacatccttctgacaatgtgttatatattcaggttggcgatcctgatctggaccacaattgctgggaaaggccggaaacaatgactgagaaaagaccactcacacagattaacaagaaatctcctggatcagacgttgctgctgaggccgcagctgctatggcggcagcttcaatggtcttcaaatccagtgatactacatattctgatgtgcttcttcaacatgcccagaagctatttacttttgctgatacttatagaggcctttcaagtgacagctatccaaagctccaagacttctataattccactagttatgttgatgaacttctatgggcagcaagttggctctatcatgccacaggagaccagacatacctcagttatgtaactgtacagaatggaaaaacttatgctgattggggaaggccaacatggttcagttgggatgacaaaaatccaggcacacaggtccttctgtctagactaaatttctttggctccaaacagatatctaatgctgaaaatgaggggttaaagtcgtatagagatactgcagaatctgtcatttgtggtctaattccagattccccgcaagccactgctagtagaactggaggagggttgatctggattagtgggtggaattctctccagcatgccacaaatgctgcatttctagctattgtttacagtgactacatgctctcaacacagactgcggcggtgcagtgcagtggaaagtactacagccctactgatatacgcaattttgctgcatcacaggccaattacatcttgggagacaaccctatgaagcttagctaccttgttggatatgggagcgtctatccacagcaagtacatcacagaggagcgtcgatccccgcagatgcgaaaacaggctgcaaaggattccagtatctccattcacccgatccaaacccaaatgttgcaatgggcgccctggtgggtggaccattccagaatgacactttcgtcgactctcgggacaatgctctacagacggagtccagcacttacaacagtggcactcttgtcggtctgctctctggtctggtcaccacttcctccgtggcacagtcattcacctagaggcctcatgtatgtttcggcaatggctttgatcaacatggagggatggtgcatgtacaatcgcagttttttggcgaggccgatggtgattcgcgaacagtgacaaaagcatgatttgccatcatttagatggatggttagcacttagcagtagttgttagtgccgcatttcttctgtttgtataattgatggtgctgctcctgcagctataatttttcactgtgtgctcctatctggtttgctggtataccactaaggctgtaactacgagtaatgtatttttaggacagatttcatttgttgattctgtggcgaggtggttctgttggaactgatcttggcttaatcaaagaggatcgagtccttaaagggttnnnnnnnnnnnnnnnnnnnnnnnnnnnnn

SEQ ID NO: 8272 - DNA, 346 bp, Setaria italica
  Peptide Sequence Number=SeqID_74246
ggaaaagaggaagaccccggaagtgatcatatggtctgcactaaggtggtgttgaagtcagatcaagtgatctctaacacctgatgtgatccatccattgaagatttcattttggtagcaatgcctccagccttacctgagtttcgccaattgcagctattcaaaaacttcgtctcgttttttgaccccatttccaaattgattgttccatctgactgtaagtgtagaaatgcttaacctgtacatctgtgttctttgtcgatgttaatcacacattcggttaggctattgtgaacccttcaatagaatgatttatcctgttcaatcctatagtcccttcagttag

SEQ ID NO: 8273 - DNA, 1843 bp, Setaria italica
  Peptide Sequence Number=SeqID_74247
ttcaagacgcacatcctgggctgcccctgcgtgatggtgtcgagcccggaggcggcgcgcttcgtgctcgtcacgcaggcgcacctcttcaagcccaccttcccggccagcaaggagcgcatgctgggcccgcaggccatcttcttccagcagggcgactaccacgcccacctccgccgcctcgtctcccgtgccttctcgccggaggccatccgcgcctccgtgccggccatcgaggccatcgcgctgcgctcgctccgctcctgggacggccagctcgtcaacaccttccaggagatgaagctgtacgcgctgaatgtggcattgctgtccatcttcggcgaggaggagatgcggtacatcgaggagctgaagcagtgctacctgaccctggagaaggggtacaactcgatgccggtgaacctgccgggcaccctgttccacaaggcgatgaaggcccgcaagcgcctgggcgacatcgtggcccacatcatctcggcgcggcggcagcggcagcgcgggagcagcgacctcctggcgtccttcctggacgaccgtgaggcgctcaccgacgcccagatcgccgacaacgtcatcggcgtcatcttcgccgcccgcgacaccaccgccagcgtgctcacctggatggtcaagttcctcggcgaccacccctcggtgctcagggccgtcatcgaggagcaggaggagatcgcgcggtccaagggctccgccgacgcggccctgacgtgggcggacacccggcggatgcgcatgacgagtcgtgtgatccaggagacgatgcgggtggcgtccatcctgtccttcaccttccgggaggccgtggaggacgtggaataccaagggtacctgatcccgaagggctggaaggtgctgcccctgttccggaacatccaccacagccccgaccacttcacctgcccggagaagttcgacccctcccgattcgaggtggcgcccaagcccaacacgttcatgcccttcggcaacgggacccactcgtgcccgggcaacgagctcgccaagctggagatgctggtgctcttccaccacctcgccaccaagtacaggtggtccacctccaagtccgagagcggcgtgcagttcggccccttcgcgctgccgctcaacggcctgcccatgaccttcacccgcaaggactgagccgagctggtgccacggcggaagcccaacacagaaaccaggccgaaaaccgaatcgggtggcggtatctggtatcgtatatactactactagcgaatacctaggcacggcacgcggaaaccgctgccgggattgggcgtcggccgcgggccggcggtcgccatcggacggggacgggacgggcatcagatcaggcatgggatcggagaaagatcacgcaggaaaggaaaggatagcaccgtccgtgtacagattcttcttcttcagctcgagcagctggtaggaccggaccccaagaagccggaagaggagaccaaacacaaagattaggcgtagccgcgtaggtgtcagtcagacagtcagtgttaaactaagctaagctaagctactccagtaggcatcagatcacccccagcgccgcaaagaagtggccctgacgcttaattgtaaaaccaaacccattttgatctttcttcttcttattttcttttcccccttagatcagattttttaagccagccagacaacaccctataggagaagaacaaggaaacaaaaagaaaggcccctgattgggattgtaagctagctagcttgtccgcctgaaagcaggctggcagctaggccgaataatccagtggacgggtgatgcatcgcctcg

SEQ ID NO: 8274 - DNA, 850 bp, Setaria italica
  misc_feature (26)..(26): n is a, c, g, or t
  Peptide Sequence Number=SeqID_74248
gattgcttgttcataagagtacatcncctttttttcaacagcgccagtgaagtcagcaatgtataacatagatcttaaagttcatccaggtccagaaatcaggcaattaacagaacatatagattcaatcataaacacacaggtgcagaggcccctaaaaagaagcctcacttaatccaatggaaagacagtggtctggaacttagcagtatggatgcatgccaagatccagattctcaagacttttcagatgacatgaatattttttctcaatgggtcttttccacaaaaagtaatggacattgtaatatcatctgtatcaaaattgtgactgaaggagtaacgaagttactagaatacaaggaaaaagcatctaacctttgtcagtgtctttggacgctttattgcatggtttatctgcatggaagtccgcgggagcagcctccgccgagcgccagtgcttctggccatcgctggctccggcggcatacgaatcgtcccaaaggtgtacctcggtgatccagaagagcctccccagcttctgtatcgtcggggagtccgcctccacagccggcatcgcctgcagggagcggcggcgccactagagtaagtgcgggcgaggctggagcggacagtggctcgtcgccggccgactagcactacccaccagagctggacgagcacgaatcggcggaggggaggaagagagagcggcagtgctcggacggagaaggcggcggctgcggctgtggagaggagtgcgccagtgtggtaggggaggggaaggttgactgtgcgcgtgctgactgcggaggcgtaaacgccctctcgatcacgaactacgttcgtt

SEQ ID NO: 8275 - DNA, 524 bp, Setaria italica
  Peptide Sequence Number=SeqID_74249
caaatataaagttctaacacctttcagccatcacttcttttgcttcttcccgggcttcagcttgatgacctcatcgaagtagagtatgcccttccccttgtacacctctgggggcttgcagttccggaccgcaccggcgaactggtgcaccctgtccttgtcaatgccggtgcagcagattatgttgggtttgaagcagaagacacggacggcgggcggcgtggtaaactgcacctcgtgactgtaccccagtttcaggaacagctcacggccttggctctctgacctcgctttgaaaccgacccccacgagcttcagaaaccggaaaaacttggcttccattgcagatcaatagatggtttgattgtttggtgctgagttacctcgtcgccggccgactagcactacccaccagagctggacgagcacgaatcggtggaggagaggaagcgagagcggcagtgctcggacggagaaggcggcggcggcggctgtggaggagtgcgccagtgcggtaggggagg

SEQ ID NO: 8276 - DNA, 270 bp, Setaria italica
  Peptide Sequence Number=SeqID_74250
ggggggggggcaaaaagtgttaggcaattggcacgaagctctggatggaggtcagagatggtggcgctaccgactggagcaggagcagcccatgccaggccgtggttgacatgtgtgaaaccacagctagctggagaaagaaagcagtggtacacggccagtgatggatccacctaccccccggggagcctcagagacctggtccggtccacaggtccaaaccttacccgtaccgacccgacttgcgacctggcttgagactacgactcg

SEQ ID NO: 8277 - DNA, 296 bp, Setaria italica
  Peptide Sequence Number=SeqID_74251
tgggccagtgaataattgttacatcggcagaatgagcaatacatgaaacgaacatgcaataattgcatttaaaggcatatgggcctacgcagaagatcaattggctccattatcaccttatgattactgctctctcatgaaatgcactgataatgtaatcagggcatttaaaggcatatgggcctacgcagcatcaccagaatttttacatgtcatatctaggccctagagtacaggaatgtgatgtagacacttaatctaggaattgccaatccatcaacagtacaaccaacaac

SEQ ID NO: 8278 - DNA, 304 bp, Setaria italica
  Peptide Sequence Number=SeqID_74252
gcagcggccgccgcgccccggtgccgtggtggcgctccacctgctctgcggctgctcgtccggcacctggaactacctcctcagctacgtcggcgtcgagggggacacggtggagtcgctgtcgagcaggttcggggcgagcatggatgccatcgaggctgccaatgccatggccggccccgaccccatcaccgccgggaaggtgtactacatcccactcaactcagttcctggacaggcgtatgttgcactaccccctcctcctgctcctgccccagcaccaacagataacacattgccagag

SEQ ID NO: 8279 - DNA, 606 bp, Setaria italica
  Peptide Sequence Number=SeqID_74253
cgcctcccccagccccacccctaccacgcgccctcgccgcggcggcggagatgcaggccgctgccgccttcaaccgggcagccttcaccgcccgcccgctccaccgccgctcgaggcctcccctccacataactggggcggaggatggtccggcggggagaagaggcgcgctcctgacgcggctccggtgctccggaagcctctccgtcggcgccggcggctacggcagagagcgagttccagtgtttcctagacaacaatcatgggacccctacaagcttcttggtgttgatcatgatgcatccgaagaagaggtccggagcgcacggaattttcttctaaaacaatatgctgggtatgaagaaagcgaagaggctattgagggtgcttatgataagataataatgaatagctactctcatcgtaagcattccaaaatcaatcttaaaagcaagctaaaaaagcaagttgaagaatccccatcatgggttaaggcactgcttggatattttgaggtgccatcactggagattatttcaaggagatttgtctttttttggtttcattgctgggtggagcattgcaacttctgctgagactgggcct

SEQ ID NO: 8280 - DNA, 394 bp, Setaria italica
  Peptide Sequence Number=SeqID_74254
gcaggcggtgctgcggccgccgaacggcgacgccggggtggacgggatggtgatcgtgctggggcacgagctggcggagatgtcgaccaacccgctggtgaacgcgtggtacgccggggacacgccgacggcgcccacggagatcgcggacctgtgcctgggcgtgtacggcgacggcggcggcgcggggggcatggtcgggaacgtgtcccgcgcgcccgacggcagcgcctacaacgtgaatggcgtgaacgggcggcggttcctcgtgcagtggctctggaaccccgtccggcgccgcctgctacggccccaactccagcaactgaccggcgccccctgtttccttcctcttcgttgcagggaatggtcagttcagttcttcatgccatta

SEQ ID NO: 8281 - DNA, 915 bp, Setaria italica
  Peptide Sequence Number=SeqID_74255
gggaggaaggtcagccagacgccaccgccgcccctgctcgcgtcgcacgcaacgctcaaactcctccgacgagaaagagcggccaaggagggaagaggacaggagccgtacgggaaggagggagtgcgaggatgggcgcgggggacggggaggtcgccgcgagcaaggagaagggcggcggcggcgccgagcggacgtcgctggacggcgtgcgggacaagaacgtgatgcagctcaagaagctcaacacggcgctcttccccgtccgctacaacgacaagtactaccaggacgccatcgcatccaaggacttctccaagctcgcttactacagcgatatatgtgtcggtgcgatagcatgtcgcctggagaagaaggaaggaggggcggtccgagtttacatcatgaccttgggtgtattggcgccgtatcgtggccttggtatcggtacaaagctgctgaaccatgtttttgatctctctgcgaagcagaacatctctgagatatacttgcatgttcagacaaataacgacgacgccatcgctttctacaagaagtttgggtttgaaataacacagacgatacataactactacatgaacataacgccgccagattgctatgttcttacaaaatttatcggccaggctgctacaaagaaatgatcagccacccgcccaccttttgtgagaccaccaccaccaccacctcctgagttctggtggagatagttgctgttctgtggcatttcgtgctgtgtttccatttttgtgagctctaacgctatagacgtctgggtagccttgctatacagcactgagactatcattttacactagagactgctcttttttttccacttgcttcagggcatggattcgtgccccaacggtttcttggttcgatgtgttcggt

SEQ ID NO: 8282 - DNA, 355 bp, Setaria italica
  Peptide Sequence Number=SeqID_74256
catgtggctcaacgactgctgccggtcggagaccacccggaagagatgccacctgcagatccaggtggtgtcgatcgtcacctacgtcgggtcgctcctggggatcgtgctcatgtacgtgtggtacgcgccgagcccggcctgcaagctcaacatcctcttcatcaccgtcacgctcgtgctcgtgcagctcatgaccttcgtctccatgagctccaaggtgaaggcagggtatctggcgccggggctgatggggatctacgtcgtgttcctgtgctggtcagcgatcagaagtgagcctcacacggagatctgcaacaagaaggcagaggtcgcaacaagcgcagactgggtg

SEQ ID NO: 8283 - DNA, 248 bp, Setaria italica
  Peptide Sequence Number=SeqID_74257
ccggagtgagggctttctgcctaacttcctgtattctttctttatcattaactaaactaacaaggctctgggatttcctccgtacattgctgccttgatctctcccagaagaatcaatgtactggaagtcagcaagtgtcgatatctgataagaatgctctcttatgtcatcaataactcgctcatttccatttctgttatcatatctactgccatagctgccctcatagcgatcattgtcttggact

SEQ ID NO: 8284 - DNA, 387 bp, Setaria italica
  Peptide Sequence Number=SeqID_74258
ctgggatttcctccgtacattgctgccttgatctctcccagaagaattctaattgttacttggtaagtgtcagcaagtgtcgatatctgataagaatgctctcttatgtcatcaataactcgctcagtaccatgtgcaaccaggtagtccaagacaatcaatccctaccacacatgagaaaacagaaaagagaacatcagtttcaggaacggcaaaattatcgtaatagtttataatataaaaatattatcaaaagcggcattaaaacctacatttaatattcatggctgcaagaaaacttttaccttgtaaacatgccgccaatttttaccagtgtcattgatcctcttccacacaatattcatgatcatctggtactcacttcta

SEQ ID NO: 8285 - DNA, 710 bp, Setaria italica
  misc_feature (701)..(701): n is a, c, g, or t
  misc_feature (704)..(704): n is a, c, g, or t
  Peptide Sequence Number=SeqID_74259
cttcactggctcagtctgacaacgttgcaaggctgaaatgagtgtttctgggggagctgatgaacttgactgcaacgggaagctagtggcagaaggtactgaatttggcacaccaagaggctgggatgctccccgagaaatcaaagctggctgcggagctgatgtcccagtttgtgggaggaagcttggctgagatggttgttggtttgccgggggcagtgaactgagaagtctgtgaaggaatgtaggatggagctccattctagtaaaaggaaacccgttgcaggaacaggaggagaagacacctttggtacggcagcaggaacacttcctccatttctgtcattgggaagattgtcctggccatctcttgtaacatcttcatagtttggtggtggtgaagcaatctgctggttagattagctttcgttctataggcctctcatcctgggtaggcccatcagcattgctgccacggccacgggatgaataggcttcatcatccccataatgaatccctttcccgaccatagctcctgcggcctgatccttcaagacaataattacaataggttagactaatagaacttacctttagtaattacaatacttactactaataaatactactaaccaataaccctagaatagactagtttagacaataaaagaaagtttagaactaggacctagaatagganaanaattta

SEQ ID NO: 8286 - DNA, 716 bp, Setaria italica
  Peptide Sequence Number=SeqID_74260
attcctccgatgccacaacctaactttatgattgtaatgaacatataaagctgaaaactgggtggatagcattaccgatatctgataagaatgctctcttatgtcatcaataactcgctcagtaccatgtgcaaccaggtagtccaagacaatcaatcccttgtaaacatgccgccaatttttaccagtgtcattgatcctcttccacacaatattcatgatcatctggtactcatgatagttattcgttgcttgagcaatgtctgccaggagggatccatgcgggccccatggctcattgcttgtagcatcaagaatcttttgttctattccaggaaccttgaggaccttcttattcacctctctttttaagtctcggaccgtctgatcgaacactttcttcatggctctctttcaaatcaagcttcttgtgcccagctccgtgtcctcctcggttgggtacctgaggaggcaggcagggccgtcggagcagcgcgccgcggcgacgcacggaggcggaagcggaggagtccacggggattccactcggaatggggaggcgaggagaggcggtggtggcggtggtcgtgcgctggtcgcgcccgcttcccttggctttccttcctttttcttcttcctgagttgtcgctcgccgcccgcgacgcgctgcgatgcgatgcgaatgggctggcgagcaggggaggaaagaggaggcg

SEQ ID NO: 8287 - DNA, 2976 bp, Setaria italica
  Peptide Sequence Number=SeqID_74261
cttcacaggtatcagctgcgaaggaaaggaggctgtgtttgcaaaaaatatcttgctgctcagaagcagtgtttgaagcaaaagtgagatcaccaagatattttttgcaaacacagcctcctttccttcacaggtatcagctgcgaatccatccgtggttctccaacagccagtttctactaatttcccctctcaggcacctcagcctgcagttgctgggccaccgcctgttactcatgctgctcccacagcatttgctccttctcaagcacctcaggctgctcctgcgttttgcttattcacaagcaccttatcctgctgctgccaaccagtctcaggttccccaggctgcctccacatcggttgttggttcatccccattcccatctgttgttggttcattcccattcccatccccatccccatccccatgcccattggccgattcatccccatgccaccaccataaccagcaccagtgcccatacccatgcccatgggcctgcctgcacccattgggttgggagggggtgccattgaaccagcaccagaccggccaatgccggaaccagctcccatggctttgcccatggtgactgtagacaccacaggtgcttggtttattttcttttcttgccttttctccttgcgattgattgaatcaaagtcaactccaatatcggcatgagggtttgcttttggtccagaaatgtccagattgactagaccccggctcagagtatcagaccaaagtttagatttgggctcgaatttcttcactggctcagtctgactaacttgcaaggctgaaatgagtgtttctgggggagctgatgaacttgactgcaacgggaagctagtggcagaaggtactgaatttggcacaccaagaggctgggatgctccccgagaaatcaaagctggctgcggagctgatgtcccagtttgtgggaggaagcttggctgagatggttgttggtttgccggggcagtgaactgagaagtctgtgaaggaatgtaggatggagctccattctgtaaaggaaccccagattggctatcaaaaccagcccctgatgctgtttgcataaagaagtttgactggcctgatggcacatttggtgctacaggttgaggtgcctgtgaaggagcaaatgatgtggaggcagcctggggaacctgagactggttggcagcagcaggataaggtgcttgtgaataagcaaacgcaggagcagcctgaggtgcttgagaaggagcaaatgctgtgggagcagcatgagtaacaggcggtggcccagcaactgcaggctgaggtgcctgagaggggaaattagtagaaactggctgttggagaaccacggatggattcgcagctgatacctgtgaaggaaaggaggctgtgtttgcaaaaatatcttgctgctcagaagcagtgtttgaagcaaaagtgagatcaccaagagtatctccaaaaccaaagcttgcggctgaagcagcctggaaaggatttgcatctgcaccaggtccagtagactgaatagaaccagcaggcgcagcatttgtctgaggaactgcaggactttcatcatgaaccgccttgaaaggagtaggatccccgaaaggatttgaggcatcaatctcgccaaatccagaggaagttggtggcatgcccataaaatcatttgtctcaaaacctgaatttgctggtggctcaacatttgatgtggttgttggttgaggcacagataccaaagccagtgaactaataggatctgatccaaataaatccatctctaagctattcaccactggcgcagggttcacgggaggagaagaatctagtacagatccacgtggatcaaactcatcaaatccattaggctcagcatgagcagttgggggtgcaggtacatcttcgacagtactatcgtgaaccccattcacctgttctgcaggaacacttgttgcaggaacaggaggagaagacacctttggtacggcagcaggaacacttcctccatttctgtcattgggaagattgtcctggccatctcttgtaacatcttcatagtttggtggtggtgaagcaatctgctggttagatagctttcgttctataggcctctcatcctgggtaggcccatcagcattgctgccacggccacgggatgaataggcttcatcatccccatatgaatccctttcccgaccatagctcctgcggcctgatccttcagcatattcatggttgctatgacttcctttgtattcatcttctctataatctctaccatagcgctcattagaatctctggaataacgatctccttcccgattgggtgtgtctccaggaccgccatatctgtcttcgtccctgtatccatattctctttccctcccatttccatttctgttatcatatctactgccatagctgccctcatagcgatcattgtcataaccaccaccgtatccacctgggctcctgtgtgttccactggtggcaaatgcactccggtacttgtccctggtagtgagggctttctgcctaacttcctgtattctttctttatcattaactaaactaacaaggctctgggatttcctccgtacattgctgccttgatctctcccagaagaatcaatgtactggaagtcagcaagtgtcgatatctgataagaatgctctcttatgtcatcaataactcgctcagtaccatgtgcaaccaggtagtccaagacaatcaatcccttgtaaacatgccgccaatttttaccagtgtcattgatcctcttccacacaatattcatgatcatctggtactcatgatagttattcgttgcttgagcaatgtctgcaatgagccatggggcccgcatggatccctcctggcagacattgctcaagcaacgaataactatcatgatcatctggtactcatgtaacttacaattagtattaagtactaatta

SEQ ID NO: 8288 - DNA, 446 bp, Setaria italica
  misc_feature (123)..(123): n is a, c, g, or t
  Peptide Sequence Number=SeqID_74262
tgattatgtcttcctcaccaccttgaaagccatcaacagaataattttacttgtactgggtcaaacttcattttcccagttttcttgaattgctacaacttgagcagtgtatgggcatatganaccaactgtaacttcttttagttttggagcaagctgccaaaggagaaacattagaaacatgcatgctgatatcttataaagaaaataacatgagagccaagatataaagagaaacattagaaacaacatccattgaagtaggaaaacattgtacatgctagaaaaccttttaaaaaaattgaaatgttatagacataactaaataatttgtgaatagggagaacatgcctctctggagactgcacaatatttcttcaatgacaacaacttcaaccaagtttcttctgctatgaccaagttctattcgtaatttccttcttgtt

SEQ ID NO: 8289 - DNA, 1010 bp, Setaria italica
  Peptide Sequence Number=SeqID_74263
ttttttttttttttttaaaaaaaagctcaccaaagcactttcatttattcagagtgagattacaatatcaagcaacagaccatgttaccgagagacatttaccatgatacaaacttagaagaaatggatagggagccatatagggttatgatcgcagcaaacgcgtacacaagttagcgagacgagacagcacggcaggaattataggcatagcaatatcctcaacattgtcttctttatttggaataaccggtattgcagtgatgatatccttagcatcctcttctttatccggaacaacgggtagagcagcgatatagtcaacatcctctggttcatctcttggacgctgcacttcagaaacagcaacaatgtcacttgacgagctcgcagcataaggtgaaacacttgtcgaagaagagccttgtttattcagctcacttggagatggcacctcaacccaaacgccacagtttctggaacttgtgaggtgtctattcttttcacattaactctagtgagatcactcttttgtttagcaatcacacgagagatagccttgttgcagcttccatcgaagaaacaccgccgatctttcgcattgcgaactagatcagcccaaatagatccactactcgataaggttgttgcatttccaatgatccaaaggcaatatcttgctcgagtcaaagacacatttgtccgctgtctgtttgaaagaaaacctaccaacccatcagagttggacctcacagctgataaaatgattatgtcttcctcaccaccttgaaagccatcaacagaattaatttttacttgtactgggtcaaacttcattttccctagtttttcttgaattgctacaacttgagcagtgtatgggcatatgacaccaactgtaactttctttttagttttggagcaagctctctggagactgcacaatatttcttcaatgacaacaacttcaaccaagtttcttctgctatgaccaagttcatcgaattcct

SEQ ID NO: 8290 - DNA, 199 bp, Setaria italica
  misc_feature (139)..(199): n is a, c, g, or t
  Peptide Sequence Number=SeqID_74264
aatgtatgtcttcaagtgggaaatttggctatttttctgcagcacaacctagcatagtacagtagtatactccgtacctcctagtcagcagtcgctttatttatccaaaattgtgtcgatggccaaaaaaaaaaaaaannnnnnnnnnnnnnnnnnnnnnnnnnnnnnnnnnnnnnnnnnnnnnnnnnnnnnnnnnnnn

SEQ ID NO: 8291 - DNA, 1153 bp, Setaria italica
  Peptide Sequence Number=SeqID_74265
tcaaggaaactaagcattaaactgctgcttcagttgctgatggcaacaggctataacatgtcactaaacacatacatacagatacagtaccacagagacgcagttccttgccaacatctgatcatacataatacggtgccaaggagagatcagacaggcatacagacaggtcactagtataatacaagcggagatcgacgctcgcttagtttcttgttaggagatcgaattggggtcaggcgcttggaaattctacgcccccgcacatgcagacgcagatgcagtagtacttcttcctcggttccattcctccggggtccggccgtccggggagaccagaggcgggcgggcttggtcctcacctgcgcctggtcgtgttcgccggcgcccacaggtcggccccgttgctctgggtcagctgcagagtcaggtccaccggaaccaggcacagcccgcggttccggaggctgtagtgctcgggatcctcaggcgcagcgccggcggccggaggagcacgcatgtaaggggagctcaggacctcgagttgctggtgcaggaacttgatgtaccctgacgcctcctgcagaacagaagccgtatccgtctttccaaacggtgacactagctgctggagcgcggcgaccctctcgccgatcctgtccttcttctcctttggtgacacgggagacgtcctcgggctcgtgttcctcggcttcttcgaggtcatgcttccaaactccaccgagctggtggtgacgacggccttcccgctgaagtagctgtcggtgtggttcctcttgctgtgattggccacttcagccatcatcatcttcttcgcactggcacactactggtatttgcttgccgtgttttcctgcaggatcgatggcaatcgctagctgcacctcccggaaggagaacgaacacaagaggcggcgatcgagatggcgggagctgcttgacaccgggaaacgatggagccagcaccagcagcggagctcgctgtgcgctttgttcttcctgctcgcgcgccggcgtctcctcctttgtctcccggcgtcgtcagaactcggggagagaagaagcaggcagaactgcaggaggagaaggcggctggagccgagcgcgatggtgggtgtagggaaaagaacga

SEQ ID NO: 8292 - DNA, 224 bp, Setaria italica
  Peptide Sequence Number=SeqID_74266
tgttcctagctgcaatcacattattttgtaaatttccttgtttgcctgaagccctgcctgaaccttcttaatactgagcacttgaaaagtggactcccatctgaaaaacagcctcatctgtggaagcgtaaagctgtacatttcaggcatggtacatttgcatggttagcccttcattttagtctagaaatcaactgactttgcttgattgtagaggtttctga

SEQ ID NO: 8293 - DNA, 713 bp, Setaria italica
  Peptide Sequence Number=SeqID_74267
cgctgcgaaggagcaggtgaggcacggaggagctgctccggaaggtggtgtacagcgaagaggccgcctacaagctctactgcgactacggccaccggatggggttcagcatcaggaaagggaagcagtcctacttcaccggcaccaagcggatacgcaccaaggactacttctgctccaaggaggggctcaaggaaggggagaagctcactgatgcgaatttcaacgacccacatactaggaccaactgcagggcgatggtgcggttcagggtgaatgatcatggggagtggaaggttatcaggctggtctctgatcataaccacaacctggcaaggccagaggaacggcaccttttgcggtctgcgaggtcacttatagcagggcggtcaagttcagtcgaggcaatgctatacgccgggtatcaggtacaaggtggtgctccacaattgcctgcggggagtactagtgcgaccaacaatgtggacaattcaaagcagcatttgctacttggttatggtgctgcggtgaagacgctggccgtagggactggagacctgcagagccttgtgagctacctgaaaaccagagcaaatgaagatgcaatgttctactgggatgttcaattggaccaaagcggtcggatgactaatttcttttggcgcgatgggaggagcaaggaatcgaactaatagaactagtttacggttaga

SEQ ID NO: 8294 - DNA, 506 bp, Setaria italica
  Peptide Sequence Number=SeqID_74268
ttagggtacgaaatcgtaagtgtggtgattaagccgtcaaatcagctcaagatcacatttctagaggcaaaagatataactgacttgggcactctaaaggaggcatcaaagatatttgtacctggtactttgagtcatctaagagttggttgctgtgctgttttcttttcaagcaaatgaaaatggatattggcataaaaagagagatgaaaatgaacacgaagtgttcaaattttttcacacatcaatgatgggcctagctcatttcgtttgtcattctaaattggacgattcattttttaaggcaatgggacaattcattttgtgacctgcctgatatgtgttcagtagttgataacttggcttagtttgcattgaggttttaaaaggctagcaaaattccattacttactactttcatgatgagttgtacaaataggaaagtctgttttgcatgcttccattgttcttttcgagtacctttgtttaacattatatggtcctgg

SEQ ID NO: 8295 - DNA, 573 bp, Setaria italica
  Peptide Sequence Number=SeqID_74269
cgtccacaccgccatcgccattgcctcggcctccgccgcggcctcggcagcggaggcgccgccctccccgtctcctcccccgtcgccgcaaacgcaggcgcctccctccaaacagggctccccagtgctgggcggcatcgcgaacacgaggtcgtggtcgcagtactacggcagcggcttctccatccgcgtgccgccgtccttcgacgacatcctcgagcccgaggactacaacgccgggatgacgtactacggcgacaaggccaagccccgggcgtacgcggcccgcttcgcgtctccagatagggacgaaatcgtaagtgtggtgattaagccgtcaaatcagctcaagatcacatttctagaggcaaaagatataactgacttgggcactctaaaggaggcatcaaagatatttgtacctgctggctggtgcaaaagtgttctcagctcgaacaatcaaagttaaggacaaggaggatattaggacatattacttctatgaatttggtctggacaaacaacatgttgctctaatggctactgtgaatagtggaaagacatacattgcgg

SEQ ID NO: 8296 - DNA, 317 bp, Setaria italica
  Peptide Sequence Number=SeqID_74270
cgacttcatgtaataacttgtcatccaagatcgccatctcaatgaaagggtttcttttgcataatctctcaatacaaagaacggaattcctccagcaaaagcacccaggtagtagagcagttgctgggtaaatttttcttgatccttatcagcaagggcattgtagaagtcacgacccaagaagttaaatccaacactaatccctgtggttcccaatgtgagtgcaaacaccgcagcaagcctcagccttgcttgggttttatcctcggaccaccagtagggggcagcaactttccaaaatcttgtagctagtgtct

SEQ ID NO: 8297 - DNA, 574 bp, Setaria italica
  Peptide Sequence Number=SeqID_74271
tcgtccttcgtccgtcgtccttcccttcttccgtccgtccgttgcttcctcttggcctccgccgctgcggtctccgggttccacctcggcggggacgagagcggcctcgtgcagggcgtgctcgccgcgctccgcgagcgggccgaggccgaggaagccgcgcgcttcgccgtcgcccaccacaacaagaaccagggttctgctttggagtttacaagggtgctgaaatcgaagcggcaggtcgtgactgggactctgcatgacctggtattggaggcagctgatgctggaaagaagagtctgtacagagcaaaggtttgggtgaagccatgggaagatttcaagtcagttgtcgagttttcgccttgttggagactctgatgccgaatccgagtcttccgttgcttctgatgaaagctcccgtcaaggtattgggtcctgggtgtttggataattcgttgatagttatccaatgcaatctaccaggatatatatgttgcttgcttatacatggttttacatttttcagctattgccaaggtctctcttgaagctgacatcgtacaagaagagg

SEQ ID NO: 8298 - DNA, 1113 bp, Setaria italica
  Peptide Sequence Number=SeqID_74272
tgggggaagcggcggcggcggcggggacggtggtggtggcggtgaacgggcagaggtacgaggcggccggcgtcgacccgtcgacgacgctgctcgagttcctccgcacgcacacgcccgtcaggggacccaagctcggctgcggcgaaggtggctgcggtgcatgcgtcgtcctcgtctccaagtacgacccagccacagatgaggtgaccgagttctcggcgagctcctgcctgacgctgctccgcagcgtggaccgctgctcggtgaccaccagcgagggcattggcaacaccaaggatggataccaccctgtgcagcagcgcctctcaggcttccacgcctcgcagtgtggcttctgcacgcccggcatgtgcatgtccatcttctccgcgcttgtcaaggccgataaggagtccggccgccccgccccgcccgccggtttctccaagctcaccacatcggaggctgaaaaggctgtctcaggcaacctgtgccggtgcactgggtacaggccaattgtggacgcctgcaagagcttcgcggccgacgttgatcttgaggacctgggtctcaactgcttctggaagaaaggtagcgagcctgcagaagtgagcaagttgcccagctacagcagtggtgccgtctgcactttcccagagttcctcaaatccgagatcagggcctcagttgaccaggtgaacagggctgaagttccagtttccgatgacggctggtaccgtcctaagagcattgacgagcttcacaggctgttcgagtctgattcctttgatgagaattctgtaaagatagtggcttcaaacactgggtctggagtgtacaaggatgaagatcttcatgacaagtacattgacatcaaaggggtcccagagctctcagtcatcaacaaaaccagcaagggagttgagcttggatcagttgtgtccatctctaaagcgattgacgtgttgtcagatggaaatctggtcttcagaaagattgctaatcacctgaacaaagtggcttcaccgtttgttcggaacactgcaaccataggtggaaacataatcatggcacagaggttgcagttcccgtcagacattgcaaccgtgc

SEQ ID NO: 8299 - DNA, 1081 bp, Setaria italica
  Peptide Sequence Number=SeqID_74273
agcacggctctcggttctcatgcttggataaataaaagcaaaatccggatgcgtcaaacaatatacgacaagagggatgcccactactgataccttcaggacgagcggagaaccggagatcacatgccaaaccttgcagtccaacaacttccaaccagcttagcttttcctcatctttgacctcgcgtactcaatgtgcaatccgtcattatcagaagaagcgagtagagtcccttggaggctattcatagcagctgtagatgattctatatccgtaaaatcagcaaaagctacaggcattccaccacggcgacgcatcttaaggacatgaaacccaggttccttggataaaacttccttcagttcgtcctctgtgcatgtatgtcccaaatttgcaataaagagagtagaacaaggtggtatatcacttgatgacttgtctcgtccatcgtttgagggagattgcccattctgctgcttgtgtgctggttgatcactctgatccgcagacaattcattcttatcactggaattttcattttctgtgcccgatggctcatctgatcctccatcaccattatcatcactgccaccatcttcatcctccccccatgctgcttcatcaccttcatcaccaacattctcatgatcagcatttccttctgttttgttagcccgtttgtcaataactcggtagacctcaccacctccacgaggtcttcgtgaagttgatttagctagctcaatgtgcaaacggtcaccagtctctggatcaaaaattgttccatttaacgaagtcattgccgacagggccgcctcatgagtgaagaacgtcacaaaggcaaccgcctggttgccgcggccggtatactcgaggaggcagtggtcgaagccggggcggtgggagaagaggttgtggatctcgcggggcttcacgtcgtcggggaggccggcgacgaagagcgtgaggacgccgtgccgctgcgggtccgggcgcggcgcgtacacgtagtaggggtccaccgccggcgcgcccggcgggaggcggtgggagaggctcattctcggcgcgcccgtccta

SEQ ID NO: 8300 - DNA, 263 bp, Setaria italica
  Peptide Sequence Number=SeqID_74274
ggggtggagtgagtgagggtgggagagtgggagcagagtcgagtgcaggggaaaagggggcagggacccaatcatgccacggtgtgcagtgcaggggcggcgtgggcggctgactccattgggaccggggtgtgccccatcgcggcagtcctgctcttggacggtgctgccgctggtgatggtggtggaggaggaggaggaggaggaggaggaccggggcagcagagcctccccgccgggtcaaagcagagccgagccgaccg

SEQ ID NO: 8301 - DNA, 306 bp, Setaria italica
  Peptide Sequence Number=SeqID_74275
aagattggtcatcacccatgagaccctgtattcctttcatttcaagacaactttctcagttggtcattttgacgtccactaactgtgctccaaagctctcgacaatcaaaaactcgatcaatgattacaagtaaacagactaaatcccctagcctgggttactttgatttatttctgcaaatcgaggcctcaatgctgctcatactggttagaaactatctgctatggacacgctctgctatataacattggatgtctgcatcatgacctacaaataatatcatactgcaaatactgttaaagata

SEQ ID NO: 8302 - DNA, 989 bp, Setaria italica
  Peptide Sequence Number=SeqID_74276
ctcttcctagtctatgaattggtgcccaagggaagcctgcaggaccacctagacaacaaggaggaaactctaccgtggcgaacaaggtacaagatagtgaaggacatcgccagtgctcttctctatctccaccatgagtgcgtcccagtcatcttgcacagagatatcaagccgagcaacatcctcctggataacaacttcaatgccaagcttgctgacttcggcctgtcgaggatcacggatcctggctgttcaaaggtcctgactagagctgtaggaaccgagggttacatagatccacaatgcaggaaggacggggtggttgagttcagccgtaactctgacgtctacagcttcggcattgttctgctcgagatcgcttgcaaacaaggtatggtcagggaacgagtcttgcaacagtacatcaacagatctctcctgcagcaggctgctgatgacaagttaaaggatgagttcaatagaagtgaaatggagaatgtgatcatcctagggctctggtgctcctaccctgatgatagtaagaagcggcctagcatgcagcaagtagtggctgtcctggagcatggcaggacatttccagacgaccttaactcattattagacactacttcagcttctacacaacaggaaacgtacatggtcctgcaggcacctagttctgctggcagcacctcctacgatagcatgatgcatgcatgaattgaatgacaccacgaacccctatacatctttggtcgaggttactggccatacagtatgcgcgtgtaccgaaacgtaatggcgtggaccagctgcagcgtccatggtcctcaattacgcatcctctattagtagtggatatgtgtgtatatttttatttgaaagaacaggaggggtgaggcccctactggtacgagaaaagatatgtgtgtatattgcttttgcccttggaaacatgaatcaagcatgctgcactgctgaatacaaag

SEQ ID NO: 8303 - DNA, 319 bp, Setaria italica
  Peptide Sequence Number=SeqID_74277
ggcggccatgtggacccactccctgacgaggcgcacccggtcgcgctcgatctcgcggagccaggaggacgacgaggaggaggtggaggcgcgcgagatctgcgcagcgggcgcgcggcggaggaagtccggggacccctcgcggctggatccagcgtcccagtcgctgtcgctgcggggctcggagggctcgcggcggcggcgcgaggtcatgtcgctgtcggggaggaggaagggagctggggattgggctggaacggggacgtcgcccatcgccgccggccgcgctgaggcatggggcgtggggaagctgatgccg

SEQ ID NO: 8304 - DNA, 717 bp, Setaria italica
  Peptide Sequence Number=SeqID_74278
ggaacctggcgccggcgttctcggacaggaagctccgcagcgtctcgcggatcgcgtagtaggcgaacggcttctggccggctcggtggcgaggtgctccggccacccgccgtgcctctgcaggccgagcgccttcatgaagccgccgtggaccttgccgacgccggggatctcgtaccacgagaagtccacgtccgcgcaccactgctccgtgtcgaacggcctcgtgccgctgaacgccaccacggcgaggctcgcgtcggccgccctgtcggcgaacacgaacgcctgggtggtgtagtcccctcggaaatcattccagcagttgtagaacgccgagaatttcatcttccaatgtttctcaacaacattttttatgacgacctcactctcgtaggctagcttggcagccatgatcgacagagcagcgtggtagttgctatccccatgcttaatctccttgtctaattctattcttgtgtcgagtagtcctacgcaggagcggtagttgggggatgatctgtccggaaatttcaactttccttgcagagctctgacgacgagcacgaggaggccgccgccattctcgtcgaggaggttcatccagtactccgtcacgcgcccgagcagggccaccggcttcttcgcccacagcagcagcacctgcgctgccagcgagacgaacaccgcccaccgccgccgccagtcgtcgatctc

SEQ ID NO: 8305 - DNA, 533 bp, Setaria italica
  misc_feature (508)..(533): n is a, c, g, or t
  Peptide Sequence Number=SeqID_74279
ccgccgcgcccgcgcgctccgcctcgtcgtccgcggccaccacccgcgtctcgtcgacgacgacggccgccggcggcttcgacctcaacctgccggcgctaccggaaatcccggagcggtgcgcggcggcgccggaggaggaggaggaggtgctcagcccgatcgccttcaagaagccccggttcatgatcccggcttgatctgttggcgctgatcaagcatcagcttgattttttcggtgattagttagctcagctcagttatacttgttgatagcctgggtggtggtggtgattggtggaattggtttatttgtgtacatgcataggcactactgttcatcatacatagtcttcattgttcattatttaggtagcctatagggaatagtagctagatagtcaaaggatcgattctttcattggtgtatagtactgtgcatataggatatatgtatgtatataaaatataataaaaatcaaaatcaaaagtgcgtgtgtaatacttnnnnnnnnnnnnnnnnnnnnnnnnnn

SEQ ID NO: 8306 - DNA, 591 bp, Setaria italica
  misc_feature (553)..(591): n is a, c, g, or t
  Peptide Sequence Number=SeqID_74280
ggcgtggcgcgcggtggcggatgcgcgcgctggaggggatcaccgcggtgctggcgctcacgcagctgctgtacgtggcgatgctgcacgcggccgtggccggcgaccgctgcgagcccgggtgccccaccgaggacgaccaggagcaccacaggggcggccccacctgcagtgtcatgtgatcgccccaactcctcctgctacctatatagcacatgcacattgcatgcttcgtgttgtctgatgtgatttccgttcgtcttgtgcctgtgtgtcgtttggaaactaagcaaattaagctagtttccatttttgtgttgtatcatgtgctcgtttcgtttgtgtatgtgcatgcgcgtgtgtatgtcgtttgagaatgtgcatgtgtaagtgtgttgtggtgttgtactgtattgtgatgtccatttgctgccatgttcccgcggtgcatggcagcacgtattggtgttgatgtgaaataatatggacatatttatagtttggtcaaaaaaaaaaaaaaaaaaaaaaaactactacacacttacacactgannnnnnnnnnnnnnnnnnnnnnnnnnnnnnnnnnnnnnn

SEQ ID NO: 8307 - DNA, 384 bp, Setaria italica
  Peptide Sequence Number=SeqID_74281
cgcaaaacctatctatacacgaactagatcagaaaaactccatctccatgtggtgactagcgtacttggtagatatcctctcaatgtgtgctctcctaactgaaagaatcatcttcacagcatctacttggctcttatcgaactccacccgaccttcttgagcttcttccctcgggttagtagaaaaaccatcagttcattctgaaattcttgaggcttgaacccacaaaacttgaactgcaccaagctagtcagacaagatatactcgccagcctctccttgagattggtggaagagggcaaagccttgtatgttttagcagccgaaagactaaatttctgtaggttagggcaactctcaagcagcttcagcatgaaaccagt

SEQ ID NO: 8308 - DNA, 416 bp, Setaria italica
  Peptide Sequence Number=SeqID_74282
acagattctgcatgtcgctggcctgcatgaacagcttgagccagaagtccatgtcatcgttggccgacggcgccgcctcaacgcaggcgtcctccctttccatcccgaaagaatcggagctgtccaccgtcatcgccagcgtctccgaccagaagctgtcctcgatctggtagtcctcctccgaggtgaagctgctgtccgcgttgttctccaccgacgaggccgccgagtagtcagtgctgctggtggtggacgtggagagcgactgctccggcgacgacaccggcacggtgctggccgggccgtcgagcatcacgatctccgcaggctgctgctgctgctgcttcttggacttgcgcctgggcgcctgctgggtggctggcttgggctcgaggcgctttcttgaggtacgtgtg

SEQ ID NO: 8309 - DNA, 399 bp, Setaria italica
  Peptide Sequence Number=SeqID_74283
agtcggacccgtacatctcgtcgccggcgtcggcgtcgacgcacggctagtccaacaaagcctcacgcgtcgcggttgaccgtccacacctcttgtacaaaaaaaacccactactccgtcgtatgttagattactagctttggctaaaaaattgcatatatttgttgattcatgtgaatattgtagcacaaatataggcttgaggattttctgcatgcagcttttgcttgcaacctgtatgagtgatgacttgaaattttaccccaactaagacccggtttggcagagctccagctctgaaaaaatagctccggatccatagatccagctagcttcaccatagagctgctccaccgtggatctaagatctcaaaaagcgtttggtactaaaaaaaaaaa

SEQ ID NO: 8310 - DNA, 478 bp, Setaria italica
  Peptide Sequence Number=SeqID_74284
caattagcttcgtgagatgcttttttccttctaataaatctgatagaattcgaggactgtttgacaaatgatccattggcaactgtaaatgctgttgaagtcacatgtttcccacacccacacatcaaatcgactagacgcgaaactgaattatgattcagctggtgtacttctgtttcttttgctgacaccacgtgatttcttttgacctatgagcctttacaagtcatatttccgttatgctatggtaataggcttccgcttgttcttctgtagggctttaggaaagttgatcctgaacaatgggagtttgctaatgaggatttcattaggggacaacggcaccgactgaaaaatatacataggcgtaagcctatattcagccattcatcacaccctcagggttctggaccattagcagataatgagaggcgggaatatgaggacgaaattgaaaagcttaagcgcgataatgatg

SEQ ID NO: 8311 - DNA, 1291 bp, Setaria italica
  misc_feature (54)..(54): n is a, c, g, or t
  Peptide Sequence Number=SeqID_74285
ggaaatttcccttcccccccggccgccaccaaccaaccaacccaagcaagccgntccccttcggatcacgccgggcatgcgccgcgccaccgccgccgccgctagcagcagcagcctgagggggacgaggaggagggggagggatggaggcgggcggcgggagcgcgtcctcgctgccgccgttcctgagcaagacgtacgagatggtggacgacccggccacggacgccgtggtggcgtggacgccgccggggaccagcttcgtcgtcgccaaccaggccgagttctgcagggatctgctccccaagtacttcaagcacaacaacttctccagcttcgtgcggcagctcaacacctacggctttaggaaagttgatcctgaacaatgggagtttgctaatgaggatttcattaggggacaacggcaccgactgaaaaatatacataggcgtaagcctatattcagccattcatcacaccctcagggttctggaccattagcagataatgagaggcgggaatatgaggacgaaattgaaaagcttaagcgcgataatgatgctctgacattagagcttgaaaagaatgcacaaaagaaaattgatatggagagacgaatgcaggagctggaagataagttgatctatttggaggatcggcaaaagaatctgatagcatatgtcagagatattgtacaggcaccaggatttcgctctagctttgtgcagcaacctgatcatcacggaaagaaaaggagactaccagtacctatttcactccaccaagatgcaaatgccgaggggaatcagattgtgcacgggggcttaacaaacccaccggtttgcatagaatcatttgacaaaatggagtcttccttgaactcattggagaatttctttcgagaagcaagtgaagcatttgatatttcatatgatggtgtccctggcccttcatctgccgttgttatcacagagctccattcatctggagaaagtgatccccatgtaccatcgcctccgtcaaggatgcatacctcttcagctggtgcaggagattcaccctcaaggatgcatacctcttcagctggtgcaggagattcgctctcttctcatgacgtaacagagtcaactagctgcgcagaaagtcctcccctccctcaaatgatgtcctttacagattcacgagctaaggtgtctgagatagatgttaatctggagcctgctattacagaaactggtccatcaagagaccaagtcttgtccgtaggtacttcttccttcttatttcctta

SEQ ID NO: 8312 - DNA, 862 bp, Setaria italica
  misc_feature (7)..(7): n is a, c, g, or t
  Peptide Sequence Number=SeqID_74286
agaaggngtgctcgacggcctctcccctgagcaagtgctgcagtgcaattctgaaggggagttccttcagcttgtgacgcttttgcgccccacacaggcggcacttctcaattgggctgttgagctaatgtctgacgttgtcgaagaggaggagctcaacaaaatgaatgctaggaacatagccatggtgtttgcgcccaacatgacacagatgtcagatccattgacggccctgatgcatgccgtccaagtcatgaactttctcaagacattaatcttgaggacgctccgggagcgtgatgatgcagccactggaggagagtacactccatactcctctccagcgtcatccatccagcaggatgcggccgaatgctgttacagcagcgagcgggacatggataggagctgtgagctgagtgacatgcacagccagatcagcaagtcagggcgacatgctgattacctcgtgcggtacaacacctgttttgacagcgagcaagaaatcgatgatcatctgagtgaggtcgaagaagggttcctgcgtaggctggagcgcgacattgaagcggatagaccgaaggaaagtgcaagagaacagtgtgaaatgaacttggaggtgatggccatggaggatgttgagctgaaagatgaggacaaagcagtggagaaggggttacagaaggaagagggtttggaatccatggcatgattgcaattgtgtatttgccgctggttaatgttgtgaactactgaccaatggatccgtttgtcaacacctggttgaatgtgtgactgctgtatgatcctgaatgtgggtatatgtatccttgggacaacatttgggaaatcacttattatg

SEQ ID NO: 8313 - DNA, 550 bp, Setaria italica
  Peptide Sequence Number=SeqID_74287
cgaaggtggagggcaaggccaagcaggcggcggcgagcagcctcccgccccccgcgacgctcgataacttctccgatgggtaccgctccctcgaccgcgtcgggcgccgcgaggtcctccgctccctcgccaccgactacgacgtgccccgcgcgcgcgtccgggacctcatgagacagtacatgagcgtcgcctccgccgcggcggcaggcggggatgacgcgacggtggaggaggggaaggagggctccgcggcggcgctgtaccggatggagagggggctccgggacgcgctccggccccggtactccgggttcctcgaggccatgaacgcgcagccaggcgggctcaagctcctcgcggtgctccgcgccgacctcctggccttgctgggggaggagaacgctccggcactgcgcgccctggactcgtacttgaaggagaaactggtgacctggctcagccctgcagcattgacgctccaccagataacatgggatgatcctgcctccttgctagagaagattgtggcatatgaggcagtgcatcc

SEQ ID NO: 8314 - DNA, 258 bp, Setaria italica
  Peptide Sequence Number=SeqID_74288
ggcgctgggctgggttgacttctgcacgccgcagcgcaggcagaagagaacccacgcggaaatgagagtggcgtggcgaggactgacgtgacgacgaaatgagaggggatttgatttgtttgcccccactccgcctttttttctaatttttattgttttgtatccagaggggtgggctgctgcctgctggggatgtccctctatctatctgcgttctgcagggtgcaagggtctctgcccgcaggcaggcgcggcggg

SEQ ID NO: 8315 - DNA, 287 bp, Setaria italica
  Peptide Sequence Number=SeqID_74289
ggcggcgaggaggtggggcacggaggggaggtagggggagaggtggaccccgacggcgagcgagacgaagagcgcgccggagaagaagagcaccttgttgcggctgaggtgccaccccgccagccccatgggcacgaacagcacgacgcacgccgcgacaaggtgctcctgcgccgcggccgaaaccatcgaccggccggccgcctgagcgcgcgcgcgagcggcgagcagcgaggcgccaccagatctgggtcgcggcgcgggatcgcgggctgcacgaggttagg

SEQ ID NO: 8316 - DNA, 2620 bp, Setaria italica
  misc_feature (2620)..(2620): n is a, c, g, or t
  Peptide Sequence Number=SeqID_74290
ctatccccagccgcctcgcctccattgctccccgttcccttctccccatcacctcctaaaacctccctgctcccctcacgccgcgcgctcgcgtccacaccacccgcccgtgtgtgcgcgcgcgcccggacgtggtcgccgtgctgagaactgtcgcgcgggacaggggattgaggagattgggggcggcggcggcggcggcggcggcgtgggatttgttcagtccgagattcccgggcgaggcgagatgaagtacgtcctggtcaccggcggggtggtgagcgggctcggcaagggcgtgacggccagcagcatcggtgtcgtcctcaaggcgtgcggcctccgcattacgtccatcaagatcgatccttaccttaacactgatgctgggactatgtccccatttgaacatggcgaagtgtttgtgttggatgatggtggcgaggtggacttggatcttgggaattatgagaggtttctggaccttaaactgactcgggacaataatataaccacaggaaagatctatcagtctgtaattgacaaggagaggaagggggaatacttgggaaagactgtccaggttgtgccacacatcacaaatgccatacaagaatggatcgagagagttgctatgataccagtggatggcaaggagggaccagctgatgtctgcgtgatagaactcgggggcactataggggatattgaatctatgccatttatcgaagctttgggtcagttctcctatcgtgtcggtcctgggaacttctgtttggtgcatgttagtcttgttccagttatgaatgttgttggtgaacagaaaacaaagcctactcagcatagtgtacgtggcttaaggggactcgggctcaccccaaatattttggcttgccgcagtacaaaggaattggaggataatgtgaaggagaaactctcccaattctgccatgtgccggccgcaaatattgtaacattgtatgatgtttccaatatctggcgcattcctttgttgctaagggatcaaaaggcacatgaggctattcttaaagttctgaacctggacagggtggaaagcatatctcgggagccaaagttagatgaatgggttgcaagagctacgatatttgatgcccttcaagacaccgtgaggattgctatggttgggaaatacactggcctatcagattcatacctttctgtgttgaaagccctactgcatgcatctgttgattgccgcaggaagcttgttgttgattgggttgcttcaacggatcttgaggactccacggccattgaggcgcctgatgcatataaatcagcttgggacttattgaagggggcagatggaattttagtaccaggtggctttggtgatagaggtgttcaagggaaaattttggctgctaagtatgcccgtgaaaagaatgtcccatatcttggcatttgtctcggaatgcagattgctgtggtggagtttgctcgtcatgtcatgaatctcactgatgccaacagcactgaatttgatcccaacaccaagaccccatgtgtaatttttatgcctgagggttccaagacacacatgggtgcgactatgcgcctaggatcaaggaggacctttttcaaggttgccgattgcaagtctgctaaattgtatcgcaatgtcacatatgttgatgagaggcatcggcacagatatgaggtgaaccctgatatggttccggagtttgaaaatgctggccttcagtttgttggcaaagatgatactggaaagaggatggagattattgaaatacccaatcaccgatattttgttggtgcccaattccatccggagttcaagtcaagaccttcaaagccttctcccctatttgtgggacttgttgcggccgcatctgggcagttggacagggtcctgcaagactgctgcaatggtcatccggttccagctaaacatcttctaagcaatggctcgtacacttctgcagttcaccaaaatgggcatccaaagaagcttgccaatggtctttcaaatggaacatactatgccaatggcaatggtgtgcatgcttagagcatcagcggagggccccaaggatttgcaactgtttgcttcaattttgcagttcctgttgcatcagttttgtcgtggctggcttaactatcatcatggttgctcgaggaagaaaaagttcttgccctcgatgcggactgtctgcaggggatagtgctcgttcggtggtttttagtgaaggaaccgagctggatctctttgaaggcgcgagatagtggtatccatgttcatctctaccctcttctctaaagcaaatagagcaggtttgggtcagaagagtttttatgctgtatatctgaaagaaaggctgaatgttttggttgctttatagattttcagtgagttctaaagttgaagctgagaatgcacttaaatggaagcgtgagtttcagacattaggcagtctgtatttggatattggacagttttttgtgctcttgcgcaaataagttaatgctcgtgactttctgttgtgctttgttaattcttaaaaaactgtccaatatccaaatacagactgcctaatgtccaatatccaaatacagn

SEQ ID NO: 8317 - DNA, 1106 bp, Setaria italica
  Peptide Sequence Number=SeqID_74291
tgttacaatctggcctacagatagcaataattggccgcccaaatgttggcaagtcaagcctccttaatgcttggagtaagagtgaaagggctattgttactgaaatagccggaactacacgggatgtagtagaagcaaatgtctcgattcatggcatccctgttactcttttggacactgctggtataagagagactgatgacattgtggagaaaattggcgtggaaagatctgaggctgctgcactgggagctgatctgattataatggcaataagtgctgttgatggatggactgatgatgacactatgcttgttgaacatgttttgattaacaagaaatcctcaggttctgcagttccaatggttcttgtaatcaacaaggtagattgtgcaccattcgtttctggagaacagtttgaacgatacagaggcctcttcagaaaacatgtacagacatgcgcagtcactggcaaaggcatttccgagttggagagtgctgtagtagaagtcaggggtattgagcatgtaccttctggagggcgacggtggactgtaaaccagaggcaatttgaacagctcttgaggactaaagaagctttcacacggttagaatcatcaatcaatgagcaattaccgatggacttttggaccatagacttgagggaagccgcacttgctcttgcaacaatcagtggagaggacatctctgaagaagtattgagtagtatattcagcaaattttgcatcgggaaatgatccatgagctccacgccctgcagatcctagaatctgaaatggtgcatccaacggttttgagctgaagcttgttcctagaatcaaaacaggaagaaacgtactgactggcacttgcaatggtgaacgggcacgcttttcctctcaagtgcccagatgaagaatgttgcagggaactgaagcactgtccaccttagtgcacaccacatagatgccgagaatagagttcattgagatctcagcttggtgtcagagattgtatacttggtgatgtttaggagagacttttagctctaatcgaaataagaatacactgtttgattcagtcccgtagctgttcagagtgttttt

SEQ ID NO: 8318 - DNA, 520 bp, Setaria italica
  misc_feature (436)..(520): n is a, c, g, or t
  Peptide Sequence Number=SeqID_74292
tggttaaaagagaagagatgggatgcaaggaaatttcttacttcagctggagtcatgtcatctctttctgcaactgtgggaagtttggccgttgctgtgggtcaacaagaaggcgcagatagctctgcatttgcccttgcattggtttttgctgccgttgtaatgtatgatgcatcaggaatcagatggcacacaggtcgccaagctgcgttgttaaatcaaatagtttgtgatttcccaccagagcatccaattatttcaacctttaggccgctacgggaacctcttggacacagtccacttcaggtttttgcaggagcagttgttggttgtactgttgcatatttcgtgggaaaatctgtataagaaaatagttggcatttgccttgtacacgaattctattgtcttaatatattaaaccatttttcgacgttnnnnnnnnnnnnnnnnnnnnnnnnnnnnnnnnnnnnnnnnnnnnnnnnnnnnnnnnnnnnnnnnnnnnnnnnnnnnnnnnnnnnn

SEQ ID NO: 8319 - DNA, 699 bp, Setaria italica
  Peptide Sequence Number=SeqID_74293
ctcttccatcgtgtgggttattgtcaaagtttcatacaagtttttcatgcacgttgccacatcagcacatcagcttatctgatgacatgatagaaaatttaaaagaagagagaaggattcaatttcatttagatgaaactccctagcaccaaaaccaactctgaatgtgttatgaaattaaatggtacgtggtggctatgaaacaacaatatgaaattgtgcattggaggggtagttttcaacataatttcattttcttcgtgatgacgtggctatcttgaaaacatcaaaataaaattaacggtaatgctatactacacgcgtccgaaccaagagaaaaaatcggacgcggagtgctggcctccggccccacgccacctcaagtaagtagtctcgtagtcatccatctcccgtttcatcacttatacttatccactcgttttttctcgagagtccagactctcttcatccccgaccttctgtttctcttctaatccaaagaccagcgagatgtgtgggatgatgcaggggtggcggctctccagcaagcacgctggcgggtggagcatcgtgacgtgcatctcctacccgcgccccacaccggcgtcctccttgatcacctcgacggcgtcgcgctcccccacccggcggcctcatcccgcacctgcgccccacgccggcagcctcgtcccccacccg

SEQ ID NO: 8320 - DNA, 1578 bp, Setaria italica
  misc_feature (1)..(64): n is a, c, g, or t
  Peptide Sequence Number=SeqID_74294
nnnnnnnnnnnnnnnnnnnnnnnnnnnnnnnnnnnnnnnnnnnnnnnnnnnnnnnnnnnnnnnntttttcctatcccctgtgtgcctactcagttctagcatcttatttccatttgcccagactaacaacaacctgttgctggcattacacttacttaattacatatacatttcaaagttcaaatccaaaccatattacttaggctactttcaccaacattaacggcactggaattaacctgcctcatgacccctcataccctcccatgactgtctgtatcactagtactacgcatgcatgctcatgcaagtttcagagttcattgctgcagctaatgttccatcggtcacatgcacacagatgtgaattgtgaagtcgtcgatccttattaggagaccttgaagggcttgtagcccttgaggtcggtgatgagcccctggacggatccggcggcggcgagcagtgacacgacgaggcaggagaagctcagcacgttcatccacgtccacgtcggcgagaagcggcgtgtcttggcctgcgccatgtacatctggacggggaagtagacggtgagcggccagaaggacaccgcgccgatgagccccaggaagtcgttgaagaagggaaagatcatggccacgagcgccgtgatcacgacgtacgccgtgcgccacaccagccggaacgggctgaggggaaagtcgccggcgaggggcacgcgcacgacgcgctcggcgttgaggaaaccgctgtcgggccaccggtcgcgagcccaggcctcgacaaaggcgaagatgggctggcagaagacctggtaggcgccgatgaggtggatggcgatgcagacgttgccgacgtcgatgagccagaaggggtcgtagaagccgaagccggtgaggaagttccccggggcctggttgccgaacgccgcgtacccgagcacgccgcagagcatgtagaacatggtcgtcgtcgacacgccgatgaaggacgccttcttcatcaccacgttctccggcgggctcgaccgcagcgtgtcctggatttctatgaggacattggagtaggagtaagcaaaggcgatgtctcccagggactgaaacgtcttccaaatcttctcggtcgcggacacatcgacccccacggtcgccccagtcagcgtcgtcttggcgtgcaccccacctgcaatcttggctatggagaggccgaggccgatggaggagtaggcgagggacatgacggcggcgacgatggagagccaccagagcttgtggaagttgggcagctgcgagagcaggatctggatgcccgcgaagatgatcatgttcgtcgtgttggaggcctcgcaatcagcggagtggccgttgcggtggaagcagttggagcgcttgatcgcccccatgctgatggccgtggtgatggtgtatccgatggtgacgccgacgaggttgatgtactgcgccagcgagcacagccggtacttggaaaccccgaggtatgccctgacggcctggccgtaggtgtagttgcgcttgccgtggacggggtcgggtgcgcggtagcagtcggcgaggagg

SEQ ID NO: 8321 - DNA, 511 bp, Setaria italica
  Peptide Sequence Number=SeqID_74295
cgagtcctatcctattcttgggatcacgaagcatgtttactatgttttgcctatgaacaagtcattctccgcataatagattcgtaaggtcttctcatagtggttgcgtaggggatctgtacacaaaatttcaggttctgttactaggtggattgttgacatccacagcatgcatggatatttgtggtgatgagtttgccatgtgtttggtggtaatagcacttgaccttaatggctacattttcgttttgacttggtggtctcacctgatgccacacccagtattccaaccgggattgtgaccatgtgttgtgtgtctcggttgttaagcagttcataattcttttttttgaaacaaatcaggcagtagagctgccgattatattaaaagaagaataagtccagaatggacagaacaacaaacaacatcagctggttggattgggacatcaacataagccgcacaacacaaagcaccactcaactcaataagcgtcactggccggttgga

SEQ ID NO: 8322 - DNA, 415 bp, Setaria italica
  misc_feature (332)..(415): n is a, c, g, or t
  Peptide Sequence Number=SeqID_74296
ggtcctccacaagaagaagtaagcttatttaaactgtaccccccgccccccccggcccggcgccggagacggagacgaccatgccgcgccggccatagcccgtacgacgggaatctaataaccagccaagagaaagaaaagcggagcgaagctgctcaagttttgttgctctctcctccagtcctgttgtcgtactagaatcactggtccaatttcaagggtaataagttttggattgctccgagatatcatctgcaagtagtcaaatttcttggccgctcgccgtcggccgtcgccgcgcttttgaaacctttaaaaaaaaaaaaaaaaannnnnnnnnnnnnnnnnnnnnnnnnnnnnnnnnnnnnnnnnnnnnnnnnnnnnnnnnnnnnnnnnnnnnnnnnnnnnnnnnnnn

SEQ ID NO: 8323 - DNA, 223 bp, Setaria italica
  Peptide Sequence Number=SeqID_74297
ctggttcatccctgaaaatgtcagcttcaatgctatcccaagagctttgacactcatgaccgataaagatcccacaagagaacagatgccaatataaaccatgatgtatgtctgaccatactgaggggcaaaacggaatataagcacaaaagctgctgcaagcacaatgcctgcatagagtagaagtgtgggatcttgctactgaaccagcatttctactcta

SEQ ID NO: 8324 - DNA, 728 bp, Setaria italica
  Peptide Sequence Number=SeqID_74298
taattaaatacaaagttaagtaatagcctaaagtcactgtttaagacataagtcaaagttcggtgtacaatcatgtaaaaaatatattaaggtcagagtctgttaccttgaacattatcacactagccaaaatggtcaaagatgtaaacatcgtgtaatatatgggcgaaacaactgcagtgttgaatgtgtcaagggccttgttcagatagttcatctgtgttactatgcacgagaccacaacaaatgagaacacccatgtttgtggatagactagctggttcatccctgaaaatgtcagcttcaatgctatcccaagagctttgacactcatgaccgataaagatcccacaagagaacagatgccaatataaaccatgatgtatgtctgaccatactgaggggcaaaacggaatataagcacaaaagctgctgcaagcacaatgcctgcatagagtagaaatgctggttcagtagcaagatcccacacttctgccacagactcaatttgacgttcaggaggggcatgaagcacaatagttgtcgaacccacaacacaaagaatacacccaagtataccaaatatgtgaagcttctcccgcagcataatatgggcaagaacagcactaataattatgctaagtgcaccaagtggagtgaccaagatagcaggagcaaatgcgtaggctgcaaagttagcgatctttcgtcctatcattgttatcatt

SEQ ID NO: 8325 - DNA, 1702 bp, Setaria italica
  Peptide Sequence Number=SeqID_74299
ccattcttccttcccatgtctaggaccgaaggttgctgagtataatccttgaagcatcatgatttgagtgcacttgcaaatctcagtggcacatcatgatgaccgaaatgaatctgtggcccttggcgacctgagtgggatgccatcagcagcagaccttagaggaattccttcagcggcgtagccatcctcatcctcatgtttaggaagtcggatgggtaaatttggtgggagaccatccaccatatcctttgtcttgtgaagaagaaaagtcccagaaaggatcgtaacaaagccacacatttccgtgacaatttgtgtcggattttgacgatcccagtccttgaacattatcacactagccaaaatggtcaaagatgtaaacatcgtgtaatatatgggcgaaacaactgcagtgttgaatgtgtcaagggccttgttcagatagttcatctgtgttactatgcacgagaccacaacaaatgagaacacccatgtttgtggatagactagctggttcatccctgaaaatgtcagcttcaatgctatcccaagagctttgacactcatgaccgataaagatcctacaagtgaacagacaccaatatagaccatgatgtgcgtctgaccatattgtgggatgaaatagtatatgagcacaaaagttgcagcaagaacgatagcagcataagatagaaaggctgcaagacccaaacttatgacattagttcttactgagataatatacctgagtggtgtaactaatatttgataacaactaattgggcaagagaggagggcacctggttcagtagcaagatcccacacttctgctacagattcgattgcacgctcctgaggggcatggagtacaatagttgttgaacccacaacacagagaacacatccaagtataccaaatatatgtagcttctcccgcagcataatgtcggcaagaacagcactaatgatgatgctaagtgcaccaagtggagtgaccaggatagcaggagcaaatgcgtaggctgcaaagttagcgatctcgccaaaaatcattgttatcattcccgcccaccacagtggctcaagcaagtatgagtagccaccgacacctgctcggacgccggccgcgccggccttcttgagccccttcttcttgacgatgaagctggcgccgatgaataggctggaggagagcgcgagcagcaggcccttgatgttgtccgccgacatccccgtgtaggactccacccacctcccgcggcccgcgccagccgcagaggtggatgcctctgtagccatatccgccgccagatgcacaccaaaccctaccctcccgcgaggctgcgcgcagccgctagatcgcgcgacggcggcggcggcgcatgcgagatccggagtccggccggcggcgctcgctcaactaactcgacagggttcgatcaccagaggcgagggttccgcattcggcggtggtggggactgcgtgggcggagaaggggaggagggatcgagcgggtaggagacgcagggtcggcggcgggtgtgtcgccggcgaggcggaggaggcgaagaggaggagagaaatggaatggagtggtgcgcgagtccacgccacgcggatatttcggtgtggacttgggtgggtggctagctagttgcagttggctcccgacttcggggctttgtcttggctattcgt

SEQ ID NO: 8326 - DNA, 468 bp, Setaria italica
  Peptide Sequence Number=SeqID_74300
tgtcttgggtcgctgggctgtttcgaactattgatttactgaatcgtgttgcgtctcatttattaagtggaattcagaatattggatttcaaccagcaagataactggggtaactgcaatacttgatgccatcaaccaaaaatgggagcaaacaaaattcaagttatcatcagaaagatggatggagagtttacgggttcaaaactgaaatttttgtgtcatgaaaagattacatacttatacggagaaaaaaactgcaaatattaattataagttaagtttaattgggcgtgtggagttgtaccatcattccatcaatgcacaatgtaaaaaaatgcctgctagtaatccagcacttgacccattcaaagtaaagtctgctatccagcgtacttattgatatttcaggctaaacaggttattaaatcaagttatagtgcccctaagactgtgtttaagacataagtc

SEQ ID NO: 8327 - DNA, 711 bp, Setaria italica
  Peptide Sequence Number=SeqID_74301
ttttttttttgttttttggatggaccaaaaaataggaacttacttccttcgtataaatggctaatggcatgatgtgcttgttcaaatcttcctgtattctgctgagtcgtgttgaaagaatacaacagttcaagaacgtgaccaatacggctcaccgcgatttacatgtaacccaaaacttggattcttggccaacctggctatcgtacccagaaaagtatacctgatataatcctcaatatcctgtaccaatgcctcagaaattacagagggggaaccgagctgttaccttttgatctcctacagtcaaaacctatcttctgtacccaatgggtgaatgaatggagggccattcttcccttcccatgtctaggaccgaaggttgctgagtataatccttgaagcatcatgatttgagtgcacttgcaaatctcagtggcacatcatgatgaccgaaatgaatctgtggcccttggcgacctgagtgggatgccatcagcagcagaccttagaggaattccttcagcggcgtagccatcctcatcctcatgtttaggaagtcggatgggtaaatttggtgggagaccatccaccatatcctttgtcttgtgaagaagaaaagtcccagaaaggatcgtaacaaagaaacacatttccgtgacaatttgtgtcggattttgacgatcccagtccttgaacattatcacacta

SEQ ID NO: 8328 - DNA, 1087 bp, Setaria italica
  misc_feature (1)..(72): n is a, c, g, or t
  Peptide Sequence Number=SeqID_74302
nnnnnnnnnnnnnnnnnnnnnnnnnnnnnnnnnnnnnnnnnnnnnnnnnnnnnnnnnnnnnnnnnnnnnnnngtaccggaggcaaagtttcttcaagaaaactagcaacatgccttcttcagattcttttcctattttctaattttctatcaaagaatacaacagtctcagctgagaacgaccttgtatcaccgtgatatatatccaaaaaatggatctaaagcccattctgggcatctcgagaggtataacagtggttccccaatactctacaccggtgtctcaaaaattacaaggggagtggcgccttttactttttgaagcctaaagtacaatctacaaaggtgtatcaaatgaaagaatggctgagcatggctgctgcaaatatcatcaagtgttataacgatgttgatcgaaatgattctgctgcccttggtgacctgagtgggatgccatctgcagcggatctaagaggaattccttcagtagcatagtcatcttcatctgtgtgtttaggtattcggacaggtagagttggtggtagaccatcagccatatcttttgtcttgtgaagaagaaacgtcccagaaaggatggtaacaaaaccacacatctctgttacaatctgagttggattctgacgatcccagtccttgaacattatcacactagccaaaatggttagtgatgtaaacatcgtataatatatcggtgacacaactgctgtattgaaagtatcaagagccttgttcagatagttcatttgtgttactatacatgcaacgacaacaatagtgaacaaccatgtttgtggataaattagctggttcattccagaaaaggtcagtttcaaggctattccgagagctttcacactcatgaccgacagagatcctacaagtgaacagacaccaatatagaccatgatgtgcgtctgaccatattgtgggatgaaatacttcttcgtaagtttattacgattcatgtttctccacacactaataaagaatgcaggattatatttgtaaagttattctaagtagtcctttgtttctagtattagtttcatttgttgtttacttataca

SEQ ID NO: 8329 - DNA, 526 bp, Setaria italica
  Peptide Sequence Number=SeqID_74303
tgagaacatggagtctgagaaaaacaaatattctgattccatgctagtttcatcgactttctaccactccgcagaaggtccacggacaacctgccttacacctaacatgacacaagtgcaggcggattgcatctcaagttcttgggagatgcctcaaggtggacctctgggcgagatcttaacaaactccaagaacagcaacgactcaaacaaaaagtgtgactcaaggtcatatggttggttattgaatcttgaccacgcaccatgattcctcaatccttgaagagcttgacatagatatctcaccatgaaagctaagaaatgctcagaaaagaaggttgagatgacctcgatgtttgtcccatgcatgctcgctatctctctttttcatttcgtttttgtagtattcagcaagttaaattatctgtgcttctgagtctggctgtatcttaaactagttttacaacagattatatcttgcttagttagctgcttaatggtttgacttacagaagaagcttcaaaa

SEQ ID NO: 8330 - DNA, 538 bp, Setaria italica
  Peptide Sequence Number=SeqID_74304
gggggggtggaggagtggctgtttccgtgtgtggggagagggggagagagggggagggaggaaggagagagaggagtggagtgggggagtggtttgagaattgctgctcgccttggtttccagttttcaagtgaaacttctaatgcgatacacgatctttcttcgtctataattaatattgataaggcaaggttgatgatggaaatgaactatatgttgtcttatggggcagcagaaccttctgttaggttacttggaatatatggactactcgatattttgctgcctttccaggcagcatatttgtctgatcagatgaaggatagggccagatacaaagatttgatgcttatgaaactattgtgtaatcttgatagattattctctgcagaccggccatgccactgctctttgtggctggcactgttggtatttcacacgacactggttatttctccacaagacaccctggtaataaaagcttttgctgctctgctgtatttcggatcatgggaaagcgcaattgaatttctgaaag

SEQ ID NO: 8331 - DNA, 417 bp, Setaria italica
  Peptide Sequence Number=SeqID_74305
ggggttttcgacgtcgagcgcccggcgcgccgcctccggatccgccgctgccgccgcggcgtgcatgctccgctgccggaagtagcccgaccgcggggaccccacctccgcggcgcccccgtcggcgtccccggcctcgggcttgggatgcatgcctccttgattccgttcgtgctccgggggctacaaggctcgcattgcgcgctgcgtgcgtgggcgcgcgcgcggcacggcgctagacaggattgccggtcccaatgccgcggcgcgggcggggatctgggaatgccgcgcgtggggaatggagcgggggagtgccggagtggggtggggtcggcgcctgtgcgttcgcgagcggctgcctgccagccggaacgggggcggggacgatgggttggttggttgatttggcgggtg

SEQ ID NO: 8332 - DNA, 557 bp, Setaria italica
  Peptide Sequence Number=SeqID_74306
gtctcttgaaaagttttttagtgctaaaatagacctactaagaagccttcgtgctggtgtatggaccttgttcactgagctaccatgttctgcaattattgaataaaggcctatctcagcagcagcgacttctcgtagctctgcttcaagcaactcaaccttaagttcgagttctcgaactttgctgtcatttcgattatttgaaatgcgtattggctcctggacttgcaatccatcatcagcactggtcgtattctcatgagcaatcgcaacatcctgggaatcaaattccttcacttcctccttttgcacatcaactttcttatttatgacacttccattaacatctggaactctcatactgaacctcatattccttgctctatcagtagttaaagtgctatatgttctatccccaaagtgtctttggttggattcagtcataccatatgcaaatgacattttacgaccacttctgaatgcattatgtggtggaagagacggagtttgctctctgggcaaatctgctgagaaattcgtaagtaagtaagtaacta

SEQ ID NO: 8333 - DNA, 382 bp, Setaria italica
  misc_feature (70)..(70): n is a, c, g, or t
  Peptide Sequence Number=SeqID_74307
ttacaaatggacactctaaggggaggttgttttgaggaattcaatggaaaccctttatatatatttgaangtttttttggtaccaacattccttgtggaagaaatagcttggtaatgttacatagcttctgtgttcattcataatgtcgaatttatcctgtgttctgatttcgtgcaatggtggatcattggaagctagatcacatgacttgtaactttatgacatggtcagttgtggtattctttctatatactgaatacaattttacaccctgttttcgggaaacactaggaagtgagcctagctcaactggttagggtgggaggtgtggtcgtgcactctaaccactcaggttcgagtcccctctagctcgaatttggg

SEQ ID NO: 8334 - DNA, 411 bp, Setaria italica
  Peptide Sequence Number=SeqID_74308
gccgaccgccaacagttcgcgcctcctcctccgccttccccgtccccgcacatgtccgccaccgcgctgctccagaaggcggcgcagatgggcgccacctcgtcgagctcgtcgttcctccgctgcctgggcctggacgtctcgtcatcgccgggggcctcctcgtcaggccagcagcaccaccacgaagccatgcaagcatcactaccggacacctcaatgcagcaatggccgcagcggatggagccagagccgtcgccgatgctgtcgcccgggctcggcctcgggctgccgtacgactcgagcggcgctccggtgtgcctgccggatctcatgatgggccagtcgtcgctcttcagcggcaagccggctaccctggacttcctgggtcttggcatgagcccgaccggc

SEQ ID NO: 8335 - DNA, 591 bp, Setaria italica
  Peptide Sequence Number=SeqID_74309
tagaggactgtttattcttgcaaacataacaactgatgaccaaacatccagcaagagagatacagagaggaacgaacgatgtgtaaggatacatcaaaatacaaggccagatcctttgagtttctcttgtacgatgtcgtccaatttcctggccatttcttcactaatgtgattcacccaatcccccaccttccctcttctaaagtatgctgattttttaaccactacgcttcccctttgaacaacttctgtttgactactgttcgctccactaagcgtcttgaagctgcacaatctcacaacctcttcaggaaccccggcatcttcttcttcaccggtaaatggggcaccgaggaatgatgccagcaccttgacaaactttaccggctctaacatcatctcttcatactttaggaaaagaattctatcagactttataacgctctctctccaatattcgagacagtgatcccagtaaggaccatagcccaatacgccctcgcaaaacaagttgaatccaacattaatatcaggtttttctccaaaaaactcactcataaagtgccaccgtgacacgaatgcatccttagg

SEQ ID NO: 8336 - DNA, 630 bp, Setaria italica
  Peptide Sequence Number=SeqID_74310
tgtccctagtaatttattcttcggcccatcttcagcagcttcaaatgaaaatttgggacagcaccaattcatatgttatctaactgttgttagagtgcaaattgcttatcccttttaagttattcatatctatatttgtgcatgactgtaacataattcttgtgtttttggttcagattaccctttgatgataatgcaaatgtttttggtcagatcatatgttcttctcatgtgcattctgttaatcgtttgttgttggtaccatggcactaaataagctccaggtacatgcattttgttgaatacgtccattttggtaccatgtgcattctgttagacaattatgttctgcttgatgaatacgtccattttggtgactatagcttggatgcattagtatatcaaaatatgcacacttacacaccgacacaccatatatgaacatgcagctttgaggatgaactgaagcttgtcaagctaagaggagaaattatgcaggttcgtctacagaaacactaagggattatttgtttgatattgtacaatgaattgtccatcatctgtgtaggatagggatacttaagaagcagccaatggtgtgatggttagtgactttactgtgattggacc

SEQ ID NO: 8337 - DNA, 432 bp, Setaria italica
  Peptide Sequence Number=SeqID_74311
ccaagggccaaggaaatttgtcaaaattatgtgtgttatgtatgtatagttatatactcggatgagtaggtttggaagcatgaaatagtgttctacaaagacaagtataagaaagcaaccagagagaaagagtgattaaaaaccaagattaccctttgatgataatgcaaatgttttggtcagatcatatgttcttctcatgtgcattctgttaatcgtttgttgttggtaccatggcactaaataagctccagctttgaggatgaactgaagcttgtcaagctaagaggagaaattatgcaggttcgtctacagaaacactaagggattatttgtttgatattgtacaatgaattgtccatcatctgtgttaggatagggatacttaagaagcagccaatggtgtgatggttagtgacttactgtgattgg

SEQ ID NO: 8338 - DNA, 562 bp, Setaria italica
  Peptide Sequence Number=SeqID_74312
tttgttttcttttcctttattttcttaagttcttggtatattgatgacctgatagctgattatgccaaggaaaattttgtcaaaaaaattatgtgtgttatgtatgtatagttatatactcggatgagtaggtttggaagcatgaaatagtgttctacaaagacaagtataagaaagcaaccagagagaaagagtgattaaaaaccaagacaccatatatgaacatgcagctttgaggatgaactgaagcttgtcaagctaagaggagaaattatgcaggttcgtctacagaaacactaagggattatttgtttgatattgtacaatgaattgtccatcatctgtgtaggatagggatacttaagaagcagccaatggtgtgatggttagtgacttactgtgattggccaatagtgcaaactttctctattctgtaagattattgtaatgtaagattgtaatctggtgctactaataattgtgatgtaaagtgaatcttaagatgaacaattgttgttggaaattacacttcacgcatgtatgcatgtgtgatcagaggagg

SEQ ID NO: 8339 - DNA, 1199 bp, Setaria italica
  Peptide Sequence Number=SeqID_74313
cggccccggaaccctagggttccgccgcagcaggaagctggaaggaagcgtgctttagttgatgtgtgtagatatggcaaaggaaattgtgaaaataaattgaacaaatagttaagtgtcagctagcagtgcataatgtaatgaatgcgtgctttagttgatgtttgtaatttttatcaccaatcaagtgagcaattaggttattctaaagttttcaggccatcactgcaaatatggatatggctccattcaagctggatattgatgacctgatagctgattatgccaaggaaaattttgtcaaaaaattatgtgtgttatgtatgtatagttatatactcggatgagtaggtttggaagcatgaaatagtgttctacaaagacaagtataagaaagcaaccagagagaaagagtgattaaaaaccaaggtatctacccatcactgaattttctatctatttcagctgtatggattagaattacatatcaatacaactgcactttcaattgtgggctgttaagtgaaaatgattagtaagcatttaagtctggagctattcaaaagagttttaaccatattatctcctgcccagaattatctcggcccatcttcagcagcttcaaatgaaaatttgggacagcaccaattcatatgttatctaactgttgttagagtgcaaattgcttatcccttttaagttattcatatctatatttgtgcatgactgtaacataattcttgtgtttttggtcagattaccctttgatgataatgcaaatgtttttggtcagatcatatgttcttctcatgtgcattctgttaatcgtttgttgttggtaccatggcactaaataagctccagctttgaggatgaactgaagcttgtcaagctaagaggagaaattatgcaggatagggatacttaagaagcagccaatggtgtgatggttagtgacttactgtgattggccaatagtgcaaactttctctattctgtaagattattgtaatgtaagattgtaatctggtgctactaataattgtgatgtaaagtgaatcttaagatgaacaattgttgttggaaattacacttcacgcatgtatgcatgtgtgatcagaggaggaactttcctgtaaaaaaaaccaaaaaaaaaaactaaaaaagaagaactactcaaaggacacacagggagtagg

SEQ ID NO: 8340 - DNA, 638 bp, Setaria italica
  misc_feature (579)..(638): n is a, c, g, or t
  Peptide Sequence Number=SeqID_74314
tcgctggtggacgggttcaacgtgcccatggacttcctgccggcgggcggcggcgccgggtgccccaagggcgggccgcggtgccgcgccgacgtcacggcgcagtgccccgcccagctgcgcgccaccggcggctgcaacaacccgtgcacggtgttcaagacggaccagtactgctgcacggggtcggagcaggacacctgcgggcccaccgactactcgaggttcttcaaggggcagtgcccggacgcctacagctaccccaaggacgacgcgacgagcacctacacttgccccggcggaaccaactacaacgtcgtcttctgcccctgattgaacgtgcacctgagctgaacgcatatgcttatttatagcatgatcaaataaacaagctagcataacaaaagaataagttatagcttgtgcaagaataatcaccactgctcaatgctctcgtcggtcatggcagttggcatgggtatatactatgtattgcatgcaatagctatatgttcttcaagatcggaagttttgtgcaattaatgatatcgtactacgtacatgggttttttgaaaccnnnnnnnnnnnnnnnnnnnnnnnnnnnnnnnnnnnnnnnnnnnnnnnnnnnnnnnnnnnn

SEQ ID NO: 8341 - DNA, 1840 bp, Setaria italica
  Peptide Sequence Number=SeqID_74315
tttccgtctaagtagtcctttttgtcctaacctagtctagtccctactattttggtttttttttagaaaagtagaaccctgctaaacactggaatgcataaaattcgaataacccttgatcagcacaaactattgaaaccgggattcggatgaccgattatatacccggaaagaaacagcatcggcgaactccgttacaatattatttggatacactcaaccacacttgatggcctatggatttcagtttgtggtcaacaaacgagtgacagggaaacagcagccattgatccattattagacctcatatggaaacctaaccctatatctacatgatgcttgcacaagcaaaactggattcgttgtgcggagacgttcatcatccatggccctctgatcttgccaaagtttcaacctcatgcctttgcctgagagtacaggaatgtgccaaggatggcaatggcagctcctagcgcattgacagggcggacaggtgtgtggaagatgatgattgacgaaacaatcactgatatgcgcttcattgtattgccaatgctaaacgtcaatggagaaatctgatccagagacatgtaagacacctggttatacaagtggtagaacacgctctgagcagcaatccaccagataacatttgggccaacttccgcaagagccttttgccaaccagcagcccacatttgggggccttccatagcaatagcaaatggagttagtatgacaagggacattattgacaggcaagcatagtaattcatgccactgacagacttccccttcatgcccttcttcgagaagatgttgcggaaaacaaatgcaaggttggatatcatagcacccataaatccaaccatattaaagttcagctctgtgacagcagctagagcacaaccaccaatgattggaagaagagagagatagactggaactgggaatgtctccccaaggatgaacctcgacaccaagacactgaatgcaggttccgcacttttaattatgtgcgtgaatgatactgccaccttagacatgctcaccgtcgcagcaacatggccaattgtatgtgccacagcaaccgggaaaaggactttccagaaatctaggtcggtcttgggagcctcaacaagacgggtggcccatgagaaaatcatcatcgcagagccgcaggcgagggagagtgtggaggtgagccaggggtatgggaaagcattgagaaccttcttgttgtaaatgttaaatatcacattcagcgcccaccaggtcgcaaaatagatggagatctttagcttctgtgcaccttctgactggactggcaccacttcagccttggactccttgtcatcagcagcagaagctgcgcaccggaattcaagtggctgcctctgagccttaagctcggcagtgcgcggaccatctagcggtgcaaggtagagtggtctgagggaggagaccacatattttgagggtttgagactggaaatggatggaattgaagctgattttgagcgtaggctggagcctgagaaagctgcaggggcaggagagagcctcacagaaggtaacatggcttctttcctcccacaaaccaatcaagaacggcaacacctcttcccgggatcaatccgcccggctcaaatcagaacaatagcagctggtgacggcgggggttttcgcgagggattcgaggcgggggcggagcctctggatatattgtgggcggggagagacggggatcgcaccgggcggcccttggaatctgagatgggaattcggagatcacaaggaagagaaggaggaaaaaatctaacgtaaggtaagtacggta

SEQ ID NO: 8342 - DNA, 356 bp, Setaria italica
  Peptide Sequence Number=SeqID_74316
gtatggcagacttatctggaagaaacggcattgtttcagaatcttcacctggcgtattccttcagtgcatcgttgactatcctcgtgagcattatccccactctcatcaagtccatacatccaccttcaggggctgttggtttatggtttggaagggagacaaatttataaaagaaatttggatcaagatgtatgtagagaggcactcttatattctttggagcacaagataccattagtagcatttagccaggatcattgttattctatgtttgaccacccattggtcgattccctccattacatataccatgaaccaaaggctaaaatagtttcatctgttgaccagcttttag

SEQ ID NO: 8343 - DNA, 1499 bp, Setaria italica
  Peptide Sequence Number=SeqID_74317
gaacattgtagaacttctaaagctaaatgttccgatggcgatgaaaattgcgcttgatggacttgtggattcaaactacagcacgcgagatacttcaataagtgatgttgggaagtatgataaggttgaggtttctgtattgctatgcaatgataacttcattcagaatcttaacaaagaatggagaggcgaggactgcactactgatatgctctcgatgtcacagtacattccagatcttgatgttcccattctaatgttaggtgacatagttatatctgtcgagacagctgcaaggcaagctgaggagaaaggtgttacgcttcttgatgaagtgcgggtgctagtggttcgtggcatattacatcttcttggttttcatcatgagtcaagcaatgaggctgccatggaattggagaaggaggagcaactcattttaaaaagtctaaggtggaaaggaaaaagtctagctaaaggtgctcaggattcaagcaagcctcaaacagtttcattggatgggaaagtgacaagtagtcaaaagagagctgtcaccctaagattttacagaccgaaattcaaatatattttctgtgatatggatggtacactgctcaacagtaaaagtcaaatcacagcaaggaacgcagaagctctaagggaagctaggtcaagaggagtaaacatagttattgctacaggaaaggcacgtcctgctgtaattgatgctctcagtatggcagacttatctggaagaaacggcattgtttcagaatcttcacctggcgtattccttcaggggctgttggtttatggtttggaagggagacaaatttataaaagaaatttggatcaagatgtatgtagagaggcactcttatattctttggagcacaagataccattagtagcatttagccaggatcattgttattctatgtttgaccacccattggtcgattccctccattacatataccatgaaccaaaggctaaaatagtttcatctgttgaccagcttttaggaacagctgagatacagaaagtattgttccttgaaactcctgagggaatttcgtctgcattgagaccgtactgggcaaaggcgatagagggaagggcacatgtcgttcaggcacaacctgacatgcttgaacttgtaccacctgcgacttcgaagggcaatggtgtagagattctgctgaaccacctttccattagtccagatgaggtaatggcgattggagatggagaaaatgacatagaaatgctgcaactggcttcgtttggtgttgctcttgcaaatggatctgagaagactaaagcagtggcaaacgtgattggcgccactaatgatgaagatggagttgcacaggctatttatgaatatgtcttctaacagccaagaagtcacttaggactggaactggattaatttcagctctttttgattccccatttttcctggattcaacacagaacaagttagtttcctaattcta

SEQ ID NO: 8344 - DNA, 541 bp, Setaria italica
  Peptide Sequence Number=SeqID_74318
ggaaggtggaaacacaagagcttcaggagcactgactttgatatatccactcctagagcccagcatacaatcaggggccatcagtaattggcggtagtgcaatggtgcattcttacttttgcgccgcccagcaccaacaggtacattcctcatagtgccccctgcagtccagtaccgctgacaattcttacagaagtgcctaggttggttaacattgtagttgttgtaatagcagaactttgtatccatgctgttgcaccgaggacaaggtagaatcttatctggcttcttaagtgtcttgtcctgacctgattcgtcatttgccttctcactctccccctttgggtctgatgccgctttatcttcagtactgttcatctggccctgatcttctttcttatgatctgatctaggtgaagtgcctggttgtatattttctgcccttggtggtgcatcaactttcatttgctcatcttttttctcttgttgtgcatcaaccttcatttcaccatcctgttccttttttgatgcatcaaacttc

SEQ ID NO: 8345 - DNA, 292 bp, Setaria italica
  misc_feature (283)..(283): n is a, c, g, or t
  Peptide Sequence Number=SeqID_74319
ctgtagatcaagactgtgatgcccaggagttatgttctgttgtagtatgcctatgaaaacctcaagtttttcttttaggagttttgggttacccacttattatccttgcgcaaagatgtatgtatcatcacatttgcgattttttatttgatttataatgagatatgcccatgcctgttgaactgaatccattacaactcgagttgtttttggactactcaatgattattttgcgttcgcgcctgatttgaagcaagttgatgaacaaaaaaaaaaaaaaaanaaaaaaaaa

SEQ ID NO: 8346 - DNA, 395 bp, Setaria italica
  misc_feature (70)..(70): n is a, c, g, or t
  Peptide Sequence Number=SeqID_74320
agtcattggtcctgcgatgtacttcggtcttatgggcgatggccagcctattggtcgctacgacgatatntgggcaggatggtgcacaaaggtatttttctgttattttcttctcaattgattttggttatatgcctacaagtgcccaaattaatccatggacatgcacagttgcttagtactggttgcattgtgcaagctagtgagtcttaccagtccatggacattctctgtctggggcagtatcttcgtactgactaaaccatgtcaatgtcttctctgctggaacacaggtgattacagatcatctgggcctgggtgtgaagactggcctgccctacatctggcacagcaaagcaagcaatccgtttgtcaacctgattgtaagtaaggta

SEQ ID NO: 8347 - DNA, 1082 bp, Setaria italica
  misc_feature (976)..(976): n is a, c, g, or t
  misc_feature (1061)..(1082): n is a, c, g, or t
  Peptide Sequence Number=SeqID_74321
ccgcgtgccgctgcttcggctacatggtctccaagaagaagtacatctacaccatcgacgacgattgcttcgttgctaaggatccatcaggaaaggacataaatgcacttgagcagcacatcaaaaaccttctgagtccttcaactccatttttcttcaatactctgtatgacccataccgtgatggtgctgatttcgttcgtgggtaccccttcagccttcgtgagggtgtcccaactgctgtttctcatgggctttggctcaacattccagactatgatgcccctacccagcttgtcaagccccttgagaggaatactaggtatgtggatgctattcttacaatcccaaagggcaccctcttccccatgtgtggaatgaaccttgcatttggtagtgattgtagtcttctatcgatgtacttcggtcttatggggcgatggccagcctattggtcgctacgacgatatgtgggcaggatggtgcacaaaggtgattacagatcatctgggcctgggtgtgaagactggcctgccctacatctggcacagcaaagcaagcaatccgtttgtcaacctgaagaaggaatacaacggcatcttctggcaagaggagctgatacccttcttccagtcagtttcccttccaaaggaggccaccactgtccagaagtgttaccttgagctggccaagcaggtgagggcgaagctcggtaaggtagatggatacttcaacaagcttgccgacgccatggtcacatggattgaggcctgggatgagcttaacccccctaagggtggagttgccactgcaaatggccctcccaagaaatgaaaatgcaacatagtcatactgaaaggaatactgttttggttagcgctgatggactgagatcatttgctgtaacttgaaaagttatcacctcctggaaaactgtctttggcggttttaaggtagtttaacattttttttacgngtgatgcaacaacaggtgtaaacgtcggaattggattaccttcaaattagaataaagttactggctatgctattgatcttaaacnnnnnnnnnnnnnnnnnnnnnn

SEQ ID NO: 8348 - DNA, 272 bp, Setaria italica
  Peptide Sequence Number=SeqID_74322
ggggggtcgggggaggaggttagttgggcgctgattgctgctcgtggtttggacgtggcagatggagaagaggacgagcgtgccggagagcgccatggcggtggcggcgatggcgaggcccgcgtgggagcccgccgaggctgaggacgaggacggcgccatcaccgcgcgccggcgagatccaatccggggtggggccttggcttggcttgcagcagcgtccggccgacgagagagggggagtgaggtcgttgggggcgttggggcggtgg

SEQ ID NO: 8349 - DNA, 2033 bp, Setaria italica
  Peptide Sequence Number=SeqID_74323
gctgctgttatggattatgtcaaagtcagcaaagtttccgtggaggatatgctgtataatgagagtgacattggtcgctctatggagaaaattgaggttatcgatttccaccagacattggaagttaatggcatacgcttctggtgctacactgctggccatgtacttggtgccgccatgttcatggtggatattgctggtgtgcgcattctttacacaggtgactactcccgtgaagaagaccggcacctacgagctgctgagctcccgcagttctccccagatatttgcattattgagtcgacttatggcatacaacaacatcagcccaggattgtacgtgagaagcgctttactgaggtcatccacaatactgtttcacaggggggccgtgttcttatcccagcatttgctcttggcagagcacaagaactgttacttatccttgatgagtattggtccaagcacccagagctccataagattccaatctactatgcctccccgcttgcgaagaggtgcatgtctgtctaccagacatacataaactccatgaatgacaggattcggaaccaatttgcgcagtccaatcccttcattttcaagcatatcgagtccttgaatagcattgagaactttcatgatgtaggtccttcagtggtgatggctagtccaggtggtcttcagagtggtctctctaggcagctttttgataagtggtgcacggataagaagaatgcttgtgttattccaggctatgttgtggaggggacccttgcaaagaccataatcaacgagccaagagaagtgacgctagctaatgggctcactgctcctcttcatatgcaggtccactatatctctttctcagctcatgccgatttccctcagacaagcaactttttggatgaacttcggccacccaacattattcttgtacatggagaagcaaatgaaatgtcaaggctcaaacagaaacttatttctcagtttgatggaacaaacacgaaaattgtctcccccaagaattgccaatcagtggagatgtatttcacttgcgagaaaatggccaagactattggcaggctggcagaaaacgtaccgggaggtggagagtcttcgggtggcttgcttgtgaaaaaaggattcacatatcagattatggctcctgaagatctccgagtgttcacacagttatctacagctaacatcactcagcgcattgcagttccttattctggttcttttgaagtcataaagtacagactgaatcaaatatatgagagcgtggagtcagcaactgaggaatctgatgttccagcacttattgtgcatgagcgagtgacagttcgcctagactcagaaagctatgttacgctgcaatggtcatctgatcccatcagcgacatggtctctgattctgtggtgtctatgatcttgaacataggccgtgaaggcccaaaagtagttccagttgaagaagcagcgaagaccaaggaagatacggaaagggtagcactaaaggtagtgtattctcttatggcgtcgctttttggtgacgttaaagttggagatgaagggaaatttgtcatatctgtcgatggagatgtggcacacttggatgggaggagtggtgacgttgaatgtgtaaatggtacactgaaagaacggatcaagactgctttccgtcgcatacagggtgctgtgagaccaatcccactttcagcctcttgatctggaggcgcaagatcatgctttagaactgtccaacattttcgagttcaacgtttgccttcattcagagagcagcaactttttttagtcaaatgtcttctagcacagctgttgaaaactcgaaatgattagtgctgagcctatgtactccctcagaaacataagttgtaacctttacgaatttctactaacagttactatgtgcattaacctgctttgaaataaaaaaaaaaaaacaaaaaaaaaaaacctaaaaaaaagagaactagaccaaaggacaacaacaaggggaagtaagg

SEQ ID NO: 8350 - DNA, 747 bp, Setaria italica
  Peptide Sequence Number=SeqID_74324
ttggccgtctggtacgccgaccaggacgtgatgtaggtgaggtagccattcaggtccatggcccgctccgtggagaactcgaagggccccgtgtgggcctcgccgtcgacggggtcgaaggggaagtcggcgccgcggtactcgtcgtcgaccatccggcggttgggcgcccagtacggctgcgagccgcggtagaggcgccagaacacggcgtcgacggcggcgctgacgcgtggctccgtgtagcaccaggcggcgaggacgccctgcgccgggcgcagcacggagcgggcctgcgcgtagaagcgcgggaggtcgagccagtggaaggcctgcgcgacggtgatgaggtcggcggtgcccggccccgcgacggcggcgtggatcccgtcgagcggcaggtccggcgcggtgtggacgtagcgcacgttggggaggggcgccgcgaaggcgagctgctgcgcgctcgtgtccgtgcccaccacggccttgtacagcttcgcgagcgatgctgcggcctgtccgttgccggtgccgacgtcccaggcgaggtcgcggcggggcgtcttggaggcgatgaaatcgaagagctccggcgggtaggacggccgcgtcgccacgtactgcttcgcctgcttcaggaacaggttcgccatggctgctagtctctcggcctgctgatgatttctctctcgcaatctgtatctagcttggagccaactgaagctgctgggttctcgtcttggt

SEQ ID NO: 8351 - DNA, 1144 bp, Setaria italica
  Peptide Sequence Number=SeqID_74325
acacaaccaaaggcgataatgttaccgttaaaaggtggaagaagaagattactattctcatctcagctgattttccctagttggataggctagctactcgatcaaggactcatctccgtcgtcgatcagcggcgccgaaggcccctccagcagcaacgagtccagagagctcggcgcgccgtttgggtcattgccgcggccgccacgtccttgggcggtggcgtcgatgcccccaacgcgtgggtcgccggggaggctgtccgccggctgcggcagcggctggtgcagcggggttcgcgggtactcgtccttgtcgtgccaccgccggggaagcagcacgttcatcgggtcatcgccatcgccgctgcacgctagcgcgccggtcaggtcgtccatgagtcgcggctgctccgttggcagagggggctggttcttctggcccttccgctgtcggtggagctggagcacctggctgtgcctgttggcgtgcgccgacggctcgaaggaagggctcgccagcggccggtactccggcagcagccgcccctgcctgtaacgcacgccgcacgcgttgcacagcgtgctgcggcccatcggcccctcccgccactgcggcgtcgacgacgagccgcagtgcaggcaacgcttcgatgacttccggggccgccacggcttcttcttggacgccttcggcggcttcttctttttcttcttgagcaggtacaccgccggcgccggcgccggcggcgactctggctccatcctcggaggtggtaggtctttcccctgcttcggcggcttcttcctcagcaggtacacgtcgggaactgacccaggctcccagatcgggccgtccggcgacgagtccgacaccgggctctccgggggcggctcggcgaccgtcctcgccgacgctggagggggccggtgcacctgctcccgcagcgccccggccgccttgagccggaccccgcaggcgttgcagagcgtgcccgaccccatcggccccgacctccactgcggcgtctcgaccgcgccgcactgcaggcacctccttgccctgctcgccggcctctccatggccggtgagggggtgtggggtcgtcagggggaggggggcgggccgtggcgcacgcgcaggcgc

SEQ ID NO: 8352 - DNA, 657 bp, Setaria italica
  Peptide Sequence Number=SeqID_74326
aatgtctacctgcctttcacttaaatatctattcaactattttgtttggactattctcttgatgcaacttttctttttcattcagctactcgccaaacatcaaagaaatcaagatcttggacaggaagaacgtcaggagagctaagctgtattacctgagagacaggatgaatgcacttagaaaatgagacattcttgtttctaggattgtcctttggatttgcatgttttgtgtagatgcaagaattgcagtttgagaatcacgctgtttacttccagttttgaaaggcagtttgtagttccatgcttggtttcaacttccaagcagcaagcaccagtagagataccgctttgtgattcatagttaacatatatggattagtcctatctgagttgcagatgctactgtggcctcagcgcagaaataatcttgccccccggatctctagcttcactttatcttcaaatgtgattctccacctgtttcattttgaggacattcttattagtacctgtttgtggttggcacaagaaaattgtaatgtttcagctcaccttcctgctgtcaatatcagcagttctctatcaactcactagtgcttgtacgcaagaaaaaaaagatcttatgatagtacaacaatttcgattctaaaaaaa

SEQ ID NO: 8353 - DNA, 973 bp, Setaria italica
  Peptide Sequence Number=SeqID_74327
agaagaccgaaaaaccgtggggctgctgcgaggctcctagaatttgccgctcctgtagccacgcaaccggcggctgcccagtcatcctcggccatccagtacctcaggccttacgggttcagtcgtcttaccgtgagtcagatcattctccgtgatggtattcctgccgcctctgctttctgcacgagagctctcacgatgagaggtttctccatggtgggaaatgctgaggttgcttcagacgaggatgattccagctctcctgcggttgagcaccccccacgcatcaagttcaagaggctagataagactgccaggcacattatgaatatcttgaacaaagaggcagttgaaaaggtccgctctgagagggaggttcctgatgtacagcctggatgtatcattcaaatgagattgcaagttcctgagaacaaacggcgcgagtctacattgaaagggattgtgataggaaggcgtaatgctgggatccatacaactttcagactgcgtagattagtagctggtgttggagttgagtctgtctttccgctctactcaccaaacatcaaagaaatcaaggtcttggacaggaagaaagtcaggagagctaagctgtattacctgagggacaggatgaatgcacttaggaaatgagacaggttcaacttgtttttaggaatttgtcctgtggatttgcatggtttctgaagatgcaaaaattgcagtttgagaatcacattgtttagttccagttttgaaaggcagtttgtagttccatgcttggtttcaacttccaagcagcaagcaccagtagagataccgctttgtgattcatagttaacatatatggattagtcctatctgagttgcagatgctactgtggcctcagcgcagaaataatcttgcccagatcccaagcttcactttcttcaagtgtaatttctgttgaatttttttagttccaaatggacc

SEQ ID NO: 8354 - DNA, 331 bp, Setaria italica
  Peptide Sequence Number=SeqID_74328
gtgaacttgctgcccgccaggaactcctcctcgccgaggcgctgctcgtagatgtccagaagcttgccgaggtccttgcggctcttctcgaacagctgcgccatctcctccaccttctgccggtgcgacgggtgcatcccggccgcggcgcccctgccgtctagcggcatgtcgggcggcaggtatgccaggctgtagaccatgtcggcgctggggatgtcgaagctgtgcgcctccgtctgcagccactgctcgatggaggcccgctccagcgcgcccgggccgaacaggtccttttgtccacggttggtgtacttgttagcttgtccgc

SEQ ID NO: 8355 - DNA, 1041 bp, Setaria italica
  misc_feature (913)..(913): n is a, c, g, or t
  Peptide Sequence Number=SeqID_74329
caattttagctacagaatatgcattaattcttatggcgcaagagcagatatttttgggctggagaacaccctggaggagatggagtgtgagccgcaaattgtagttgactggaatacatatgctgttgttgcgaataactatattaagggtaacctaagagagaaggcatactctgcattacagaaagcagagtcaaaactagataaaagaaattcggaatcctataaccatctgacttccctgtactgtcacctgggggacaaatcagaggtcaagaggctatgggcactccaaatgtcaaactgcaagaggcatattaataaggactacatgacaatgcttgcggtactcgtgaagcttgatgagatcgaagaagctgaatctgtgttgaaagagtgggagtctagcggaaatgcattcgatttccacgttccaaatatcctgctcactgggtaccgccagaaggacttgctggacaaggctgagatgctgctcgacgacttcctgaaaaggggaaaggtgcctcctccatccagctgggcgatcgtggcaattggctacgcggagaaaggtaatgtcgtgaaaacttatgagctgacgaagaatgccctccgtgtatacaccccaaatagtggctggatccctagttcttcaatgattgagatgatacttcagtatcttcgagatgaaggagagctcaaggatgtcgaaacttttgttgatctgctgaaagttgctgtgccagtgaactcggatatggccgaggaggctttgtcaagggctcgtgcaagggaagaaaaaaggctgaagaggcaaatgcttgaggctgtcgttgcctgagctcttgattatcaacgagatggagctttagttctgcttctgtccttccttcaaacagctagttttttttangaaacgaacagctagttattgtacttagaaatttagaatttctctagttcatgttcacatcacttagtggcatggcactagagcttctgtgaagtattttttggtgaaacagaaagaattcgtcctgc

SEQ ID NO: 8356 - DNA, 140 bp, Setaria italica
  Peptide Sequence Number=SeqID_74330
tccttggtatagtcaccatggacctccattagcttcccgaggtcaaacttgggggccgttgaggatcttgaccttccggataaaaacaattctgcagtgggaagatgcttgaggtagccttttcaattccttaccaatga

SEQ ID NO: 8357 - DNA, 260 bp, Setaria italica
  Peptide Sequence Number=SeqID_74331
cgcagcggcggcggcggcggcaagatggcggtcgggaagaacaagaggatcagcaaagggaagaagggtggaaagaagaagaccgtcgatcccttcgccaagaaggactggtatgacatcaaggccccctctgtgttctccgtgcgcaacatcgggaagactctcgtctccaggactcagggtaccaagattgcttcagagggtctcaaacacacggtgcttgagaccctctgaagcaatcttggtaccctgagtcctgg

SEQ ID NO: 8358 - DNA, 510 bp, Setaria italica
  Peptide Sequence Number=SeqID_74332
ggatcttagaccttccggataaaaaacaattactagacaagtagggaaagaatgcttgaggtagccttttcaatttccttaccaatgacctcaggaataaacttagacaccaactccttcaggtcacaggtagaggcctggttggccatgatctcaaccatcttccggcggatctgacggatctgggaggcctgtgcatagcaggtacgcttcacttggttgggtctcctctttgtgaatccgatgcaaaacaccgcaacatgtagttgtcagtggtcttcacatcaacatgggcctcaatcagtgtctgccatttcctgaccagggaccgaagcttgtcggtcgtaaaatccataccccagaagttggtaaggacattacgaccctggatatcttcagcccggagacggatcttcctgtaggcctgatcttcatcactctgaagatcggcaagggaaacctcaaacacacggtgcttgacgaccctctgaagcaatcttggtaccctga

SEQ ID NO: 8359 - DNA, 607 bp, Setaria italica
  Peptide Sequence Number=SeqID_74333
aaatggcagacactgattgaggcccatgttgatgtgaagaccactgacaactacatgttgcggttgttttgcatcggattcacaaagaggagacccaaccaagtgaagcgtacctgctatgcacaggcctctacctgtgacctgaaggagttggtgtctaagtttattcctgaggtcattggtaaggaaattgaaaaggctacctcaagcatcttgaccttccggataaaacattctgcagtgggaagatgcttgaggtagccttttcaatttccttaccaatgacctcaggaataaacttagacaccaactccttcaggtcacaggtagaggcctggttggccatgatctcaaccatcttccggcggatctgacggatctgggaggcctgtgcatagcaggtacgcttcacttggttgggtctcctctttgtgaatccgatgcaaaacaaccgcaacatgtagttgtcagtggtcttcacatcaacatgggcctcaatcagtgtctgccatttcctgaccagggaccgaagcttgtcggtacgtaaaatccataccccagaagttggtaaggacattacgaccctggatatcttcagcccggagac

SEQ ID NO: 8360 - DNA, 290 bp, Setaria italica
  Peptide Sequence Number=SeqID_74334
ctgttatacagttgcaagacatactataccgagcattgcattcaccattcattgtaggagtgtcaggggtgcaagtgagtatgccatgtgggtggtgggaagggtggcagtgcaaagggtagagagtgggaagagggaaatttggtagagtggcccccttcaggtggtaggataggacaaaggttaacagcacaagaaggccacgattttggttaagtgcctttgtagtttttcctttccacctgcttgacccatatttattttgcttgcctccagattggcccccttag

SEQ ID NO: 8361 - DNA, 537 bp, Setaria italica
  Peptide Sequence Number=SeqID_74335
gagagaataagtgttgtactatttctagtcttcttagttggtcttattatacttacatctgagattgatggaacaattcaaatgaaaagttacctcactggaaatccagaaattcgtcttgctctcaatgaggatttgagcattggaagaactggatcttcgtcatatgattacagaagttcttctggaggagcagtcattctcgatgattgtaacttccatgagtcagtacatctggacagctttgacattgacagaactttgactttagtaagtactctaataaggcttttatttcttgttatctcttttgttttttgggcagaacatcaagcactatatttacgaattacgatgtattatttcagcaaagttagataatttctatttaccattgcacagataccacctgatggagaatttgctgtaatgaactaccggatgacccaagaatttaagccgccgttccgtgtaacagcactaattgaagaagctggaccatcgagggctgaagttctactgaagatacgagcagac

SEQ ID NO: 8362 - DNA, 1085 bp, Setaria italica
  misc_feature (1042)..(1085): n is a, c, g, or t
  Peptide Sequence Number=SeqID_74336
aaggaaaattttcagttagatgacataattgagagaataagtgtgacattcagctctagtggctatatacttacatctgagattgatggaacaattcaaatgaaaagttacctcactggaaatccagaaattcgtcttgctctcaatgaggatttgagcattggaagaactggatcttcgtcatatgattacagaagttcttctggaggagcagtcattctcgatgattgtaacttccatgagtcagtacatctggacagctttgacattgacagaactttgactttaataccacctgatggagaatttgctgtaatgaactaccggatgacccaagaatttaagccgccgttccgtgtaacagcactaattgaagaagctggaccatcgagggctgaagttctactgaagatacgagcagacttctctgcaaatgtcacagctaacacaatcacagtacaaatgccagtgccctcgtacacaatgagagcaagttttgagttggaagctggagcagttgggcaaacaacagattttaaggaaggatccaggagacttgagtggaacctaaagaagattgttgggggttctgagcacacccttcgtgcaaagctgacattttcccaggaatcacatggaaatatcacaaaggaagctggtccagtgaacatgaatttcactatacctatgtacaatgcatcgaagttgcaggtcaggtatcttcagatagcgaagaaatcaaagacatacaatccatacagatgggtgcgatatgtaacacaagctaactcctacgtagctcgtctatgaggaactcgtgtttgtacacttgtttctggtccattttttggtgtattatttgaggtttatcttggacagagtggcatgtatctgtaactttatagtggaacaaatatcactctgctcctgtagtcgaatacattgtaggttcacaacttttccctcgtacaatgtgcagaagattcgtgatcacgttttaatgctacaaaagatagatgaatctaagttaaaaaaaaaaaannnnnnnnnnnnnnnnnnnnnnnnnnnnnnnnnnnnnnnnnnnn

SEQ ID NO: 8363 - DNA, 585 bp, Setaria italica
  Peptide Sequence Number=SeqID_74337
agctttgcgacgtcatccatccgccacgccaggaggcgagccacctcggaggaggaaggaatcctccgcctccgcccgtcttcctcctcgttcccctccgcgtctcctcttctggaatcggattggtgtagagagtaatcggcgcttgggactgattcctcttgttggtatggaaccctaactcgctttcttgcttcgttcgattctaggtaagagatgggtgtttcgactgcgcgagctaccaaatcgaaatcttccattctttcccgcagttggtcgattcgatttggttgttgggttgggcttccttggttgcccacacagccatacgaaattggtcacgaccaaattggagcgaagaagatttgtttgattgtcaccgtgtatggtaaatcttttgcagattgattaggttgtttttggttcagcccgaatgagagaattttctcttcttcctatgttatcgatattcgctgtgtttgagttctttttgtctctcttaattgtgattcatgataagatggagggaaatttcgacattaggagagagcactccatggcttaagtatgtgttgtgttgatgta

SEQ ID NO: 8364 - DNA, 365 bp, Setaria italica
  Peptide Sequence Number=SeqID_74338
ccgtcgccggcggcgaagaagacgagcttcttggggtcggtgtcgcggacgctgagccggctgaacccgttcaaaggcgggtgggccaaggacacggccagcgtcgccgatggacgtgacggtaggaaagatatgcatgttgtgaggcccaagaggaggaggtcctccataagctaatcacatctcatcatgttggtttaggacttagagcaactccaagagttccccaaaaaattcttcctcaaaatgaggtattgggggaatgctaaaaaatttttccctaaaaacatatcagcccacagcaaaacgctcttaactataaaacaataattcaaaacaagccacatcataacaaaaaaaaaaaa

SEQ ID NO: 8365 - DNA, 1158 bp, Setaria italica
  Peptide Sequence Number=SeqID_74339
tggacgtgctcccttccgccgccgacgcgcccatcccggccgcgttcctctgccgcctcctccacaccgcggtcaccaccgaggcctccgccaagacgtgccgcgacctggagctccgcgtcgcggcggtgctggaccaggccaccgtgggggacctgctcggcgtcgcgctcgatggcgccggggagcacgtccggaacaccgacaccgtgcgtcgcgtcatcgccgcgtttgtggagcggcaggcggcggcgtcggagggcgggcggagccggcgggcgtcactgtccggcggagcggagctcgattcgggcgcggcgatggagaaggtcgccaagacggtggatgagctggcggcggagatcgcgacggaggagtcgctggcgatctccaagttcgtcggtgtggccggcgcggtgcccaaggaggcgcgggcgtcgcatgactgcctgtaccgggccgtggacatctacctgaagacacacccggagctggacgagatcgagagggagaaggtgtgcagcgtcatggacccgctcaagctctcgtaccaggcgcgcctccacgcgtcgcagaacaagcggctgccgctgcaggccgtgctcagcgcgctctactacgaccagctcaagctccgcagtgccgccggcgccggggacgacgacacgcagtcggccgccgggaaggcccgcgcgcaggcgagggcggacgcgtcgctggcgcgggagaacgaggcgctgcggtcggagctggcgcggatgcgggcgtacttgtcgggggtgcagcccagcaaggggagcgggtcgtcgccgtcgccggcggcgaagaagacgagcttcttggggtcggtgtcgcggacgctgagccggctgaacccgttcaaaggcgggtgggccaaggacacggccagcgtcgccgatggacgtgacggcaggaaagagatgcatgttgtgaggcccaagaggaggaggttctccataagctaatcatcatctggtcatgttgatttaggacttaggagagtgtggtttgtagtttcactattacgtttgtttttatttaatgttgtgctatactagtacaagtctataccatgtgtgcttgctttaagcaaagcacaaaaattgcatgtatattgtattagagtcatataagatc

SEQ ID NO: 8366 - DNA, 390 bp, Setaria italica
  Peptide Sequence Number=SeqID_74340
aagagtttatgaggtagaggaggaggaagaaagatagatggagagggagcgaatggagggcaacaatcttctgcattttcttgataccccaagcgcccattacagaaggacatgcgatggatttgaagccgaaaatggtggagatgatcactctgatgcatcagatccggctactgcgagggaaatgttggagtgtctgttgaaccaaccagcaaacaaattctgtgcagactgtggcattcctgatccaaaatgggcggccttgccttttggggcattcatttgcattaagtgcttccggaacacacagaagtcttggagtgcacatatcaaaggtgatttcggtgaatctggatgagtggacagatgaagaagtcaattgtttagctg

SEQ ID NO: 8367 - DNA, 750 bp, Setaria italica
  Peptide Sequence Number=SeqID_74341
gtaggtgagcccggacccggcgtccggccgcccggcgttgggctggaacaggcagaaggccagcgtctccggccgcgggtcgctgaggtaggcgaagtaggggtacgggttgatgaggaacggcgagccggtcttgctcaggaacgccaggagcgggtctagcgtagcggagagctccggcttgaacgcgccggaggaaggggggtcggagctcgcaagcacgtccatggcgttcacggtggagaccttgacgctggagttgggcggcagcgcgtcgtaaaggttctgcattgccgggacgagctgcgaggcgagcgacgcgtcggcgaagaggacctcgttgccgacggagacggtggagaccgccggcgacgaggacggaatgtgcgcggcgacccaggcggaggccgcggcgggcgaggacgcgaggttggcgatgtcgccgttggtggcgccgaggaggagggagatgcccgtgccggcgaaggccgagacgacggccgggtccgtgccgtagaggcggaccttggagatggtcgtggactggaggaggcgcgcggtggacgacggcggcgggaggttgtccgccacgtcgccgtagttgatgccgatgaaggattgcggcgctactgaaggaagacgaaggagctggatgactcccaagagcgcaagcataatccacctcctctccgccatctcccctgtcccctccttcaagcaacaaaaagaaacagagaggcacgatctgat

SEQ ID NO: 8368 - DNA, 1116 bp, Setaria italica
  Peptide Sequence Number=SeqID_74342
cgttgtactattcatccacacagtgcggtgcttgtgctagtatctccttccacctctggggtgtggagtctgcactggacagacagggaccccgagcggagcagagcactagtagagcagagcaaagctacagtcccaacccaaccaaacctaacccaattgccaacaaaataattgaatggagtgtccccgccacagatcagacacgagcaagccaacaccacaacctacaaatcatcatcaccagcgacggacacgacctgccccgccaaggaatcgaaaagaaaaatggagagacacggaatggcaggcagcaggggcaagaggagcaagaggacaaggggacctgcctgcctacggctcggaactcagaaggacgggaacttggcgcagcgctgcttgaggtacacggcgcagccgtccttgggcacgatggtcggcatgtacacggggtcgtcgcaccccggcgtcctctcccgccggaagtccaccaccgatacgaacagcgccatgaacagcaccaggtggttgagcgcgtaccgctgccccacgcactggtgcggcccggcgccgaacgccaggaagttgcgcttgaacaccacgtcctcccgccgggactcggagaagaagcgctccgggtcgaacgcgtcgggctccgggaacccctggaacgacgactcgtacaccgacgggaacacgatggcgcccttgggcaccgtgtaccactctgtcagctggaacggctcccccgcgatgtgcggcaccagcgtcgccggcggccggtgccggacgacctcgcgcgccaccgcctgggtgtaccgcatctcctggatcttctccgcggtaatgggctcgcccgactccggcgaccaggccgcggccacctcggtgcgcacgcgggcgagcacgtccgggtgggagtccagcgccgagacggcccagcagagggatgaggtggatgcgtcctgcgccgcgaagaggaagtcgaacatgaacccgccgatctcctcgtcgtcggtgtgcgcaggtggcgggcgccccgccgatgcggcctcctccatctcccgcagcgtgtcctgcatccagaagtccaccaggcactcgggctcgacgccg

SEQ ID NO: 8369 - DNA, 136 bp, Setaria italica
  misc_feature (131)..(131): n is a, c, g, or t
  misc_feature (134)..(134): n is a, c, g, or t
  Peptide Sequence Number=SeqID_74343
ttaaattgagtctggctgttggtataattcttgcaaaaataccaactctgcacaagtaacttatttcagccaatcaggcatcgaaacttaaactgttaatttttcattggtataaaaaaaaaaaaacaagnganac

SEQ ID NO: 8370 - DNA, 754 bp, Setaria italica
  Peptide Sequence Number=SeqID_74344
tcgtgttctaccgcgaaaaagcttctggaatgtactcctccttaccgtatgtcattgctcagatagcagttgaaatcccttatatttttatccaagtattcattttctcagcaactgtgtacccaatggctggattcgagctgactgtcacaaagttcctttggtttgttatatatatgatactgagcttcatagactttacactattcgggatgatggtggttgcccttacacccaacgaagagatagctgctgtcctgtccttcttcattttcatgatatggaatagcttctctggcttcatcctcccaagaaagatgataccaacttggtggaggtggatgtactgggcggacccagcagcatggactgtctatgggctcatgttgtctcaacttggcgaccgcatggagttcatcagtgttccagggcaaccagaccagtcagtgagtgagttcgtgaaggactacctaggcctgcaagacgaccactttgccttgattacaactctacatatcgcactaagtacacttttcggtgttgtgttttgtcttgccatcaagtaccttaagttccagagaaggtagattattaacagagatgaagaagatggagcagaggatgtggagcttcagtgcaattgtatctataatgtataagtgccccaaagtgaaaaggcacaataagaagggatagaagggaacaaaaggggtttgtcgcaagtattgaatacattagtgtaccacaggcaatt

SEQ ID NO: 8371 - DNA, 538 bp, Setaria italica
  Peptide Sequence Number=SeqID_74345
gggccacgcggggtcgtgggcgggagcgtacccggagatcgtgacctgcgcgaacaagttctgggcgccgacggcgaagccggcgctggcggcggagcccggcacggggcagctgaacccgctgaaccccaagacgtaccgcgtggcgcaggacgtgctgcgcgacctggcggccctgttcccggacccctacctccacgcgggcgccgacgaggtgaacacggcgtgctgggaggacgaccccaccgtgcggcgcttcctggcggacggcggcacccacgaccggctgctggagctcttcgtgaacgcgacgcggccgttcctggtgcacgagcttaaccgcacggcggtgtactgggaggacgtcctgctgggccccaaggtgtcggtggggcagacggtgctgccccacgacaccaccgtgctccagacgtggaacaacggggcggagaacaccaagcgcatcgtggccgccggctaccgcgccatcgtgtcgtcggcgtcctactactacctggactgcgggcacggcgggtgg

SEQ ID NO: 8372 - DNA, 317 bp, Setaria italica
  Peptide Sequence Number=SeqID_74346
catcgaaagctccaaacgcaagcccccttccattctcatccatcccagtgatcccaccaccggacacaacagcaagcagcgaaacggaagcgccggcaatggggtccggctccgcccgcgtcgcgaccgctgcggcgcgcctcttcgctgccaccgccgccttcctcctcatgctcgcgcgaggcggcgagtccgtcagtttctggctcccgccgccgtccgccgggggagggggacagggcttcctcggcggcgcggaccgttacctgacgcgggacgagcggtggatggaccaaaccctcgaccacttcaacccc

SEQ ID NO: 8373 - DNA, 1135 bp, Setaria italica
  Peptide Sequence Number=SeqID_74347
tttttcgtttttttattttttgtttttattttttcttttaactctagttattttgtaagtaacacaactcctcctgctgctgaatcctcctctagactgtggtggtaccaagtttgcagtgaggttgcatttttccaggtggcaccaaaaaatgatagtgtccgctcccaaaagattgacacaaggtaccatttggacttgtgcagaaatgtttttggggaaggagtctaccctgatgtcttcatgacaaacttatactatggaggcacaaaaattgcaggttctaaaattgtttttgcaaatggctctcaagacccatggcgccatgcttctaagcagaaatcatcagaagaattgccatcatacttaattgagtgcaagaactgcggacattgcagtgatctctctggatgccctcaagctccttcaaatattgaaggtgattcatccaagtgttcatctccagaagctctgaacaaagtaagaaaacagattgtcgatcagattgatctgtggttatcggaatgtcaagagcgaggttagtttggtctatgtgggtgttctgccactgaactattgtggttctgaattgtccttgatagtttctatctaatggctctaacatttcctctgggcctttgcattatcaaaaggaccgtggtggctagctgcagcacctccaattcaatccttcagttttggcctaaaacattgttgctctatctgcattttcaggacatgacaaggggccattgctgggaagcagatggaacctcgctactatttgataaatctgtgcgagctataggcatagggttgcaaggccaaggcaaatatgatctggttgggcttttgctgtactgcagactgcagtataccgtttgcgtaaacaatagactgatgaatgatccgctggtggcaaataaataaaacaggtggctctcggcatcttgggatatgcctgcagagttcagacgtgagagatgcccaccttttgggctcggatgcgttgatctgtactgacgttaccaggatacatgtaggctctgtttgcttcaacttatcagtcaccgaactagttgtttttcttcttctattaattaaattctagtccgttttctagtcttttaaaaaa

SEQ ID NO: 8374 - DNA, 481 bp, Setaria italica
  Peptide Sequence Number=SeqID_74348
tgttaaatgttaatctgaaacaattatttaatttgaattgaccatgcgtttgactattggttttctttagcctctagactgtggtggtaccaagtttgcagtgaggttgcatttttccaggtggcaccaaaaaatgatagtgtccgctcccaaaagattgacacaaggtaccatttggacttgtgcagaaatgtttttggggaaggagtctaccctgatgtcttcatgacaaacttatactatggaggcacaaaaaattgcaggttctaaaaattgtttttgcaaatggctctcaagacccatggcgccatgcttctaagcagaaatcatcagaagaattgccatcatacttaattgagtgcaagaactgcggacattgcagtgatctctctggatgccctcaagctccttcaaatattgaaggtgattcatccaagtgttcatctccagaagctctgatcgacaatctgttttcttactt

SEQ ID NO: 8375 - DNA, 1848 bp, Setaria italica
  Peptide Sequence Number=SeqID_74349
cggagaggtggcggtggtagggggtgcggcggaggatagtggcggagaggtggcggtggtagggggcgcggaccgttacctgacgcgggacgagcggtggatggaccaaaccctcgaccacttcaaccccacggaccatcggcaattcaagcagcgttactatgaatttcttgactactaccgagctccaaatgggccgatcttcctaaatatctgtggagaagcctcgtgcaatgggataagcaatgactacttagctgtgatggcaaagaaatttggtgctgcactggtttctcctgagcatcgatactatggaaagagttctccttttgacagtttgacaacagaaaatctacggttcttgtcatcaaagcaggctttatttgatcttgctgttttccgccaatattatcaggaaaccttaaatgccaagtataatcgttctggggcagacagttcttggtttgtttttggagggtcatatgctggagcactcagtgcttggttcagattgaagtttcctcacttgacatgtggaagtcttgcaagctcaggagttgttcttgctgtttacaactttactgatttcgacaaacagattggggagtctgctggtcctgaatgcaaggaagcacttcaagaagtaacaagacttgttgatgggcagcttcagtctggccgcaactcagttaagcagttgtttggagcagcaaagttagaaaatgatggtgacttcctctacttactggcagatgctgctgctattgcgtttcaatatggtaatcctgatgtcttgtgctccccgctagttgaagcaaagaagaacgggacagacttggtggaaacattcgctagttacgtgaaagattattacattggaaaatttaaggcatcagtggcatcgtatgatcaacagtatttgaagaacacaactcctcctgctgctgaatcctcctctagactgtggtggtaccaagtttgcagtgaggttgcatttttccaggtggcaccaaaaaatgatagtgtccgctcccaaaagattgacacaaggtaccatttggacttgtgcagaaatgtttttggggaaggagtctaccctgatgtcttcatgacaaacttatactatggaggcacaaaaattgcaggttctaaaattgtttttgcaaatggctctcaagacccatggcgccatgcttctaagcagaaatcatcagaagaattgccatcatacttaattgagtgcaagaactgcggacattgcagtgatctctctggatgccctcaagctccttcaaatattgaaggtgattcatccaagtgttcatctccagaagctctgaacaaagtaagaaaacagattgtcgatcagattgatctgtggttatcggaatgtcaagagcgaggacatgacaaggggccattgctgggaagcagatggaacctcgctactatttgataaatctgtgcgagctataggcatagggttgcaaggccaaggcaaatatgatctggttgggcttttgctgtactgcagactgcagtataccgtttgcgtaaacaatagactgatgaatgatccgctggtggcaaataaataaaacaggtggctctcggcatcttgggatatgcctgcagagttcagacgtgagagatgcccaccttttgggctcggatgcgttgatctgtactgacgttaccaggatacatgtaggctctgtttgcttcaacttatcagtcaccgaacagtgtttttctctcataataaatcagccgtttcagcttttcagccggcttataagcatactgacaagttcgttaatacaatatactatatgcatctggcgcaaa

SEQ ID NO: 8376 - DNA, 555 bp, Setaria italica
  Peptide Sequence Number=SeqID_74350
atggctttgcaggagaattcctatctaagtgatccattcggcctatgttaggagagatgccagtaacaacaggagcacctgagaccttcatagaagaagcttcatattgcggcctaaatgcttcaaaaggtcggcttccaaaagcgcgtagagttctgagtccatcagcatttgcaagtatcttaaaaccattgtctactgtagtaacagcaagaaggttgccttctttattgaacctcaagcgaggaagagctgggaggcctccatcagcttccgtgcaggtcagcatattagtgttgctggtgtagtgcagtttgatactgctcagaatcacttcttggctgctggtgaagataaccagatatcaaaactttattcactgatcatacttgctcacctcccaatggagctcgtgcatcaccggtgtctgtacctctagcagctgttccgaaggctggtgccgcatacccaccacttacagctcatactccattccaacctcctccacctggtccatctttagctggttggatggcaaatgctgctgcctcttca

SEQ ID NO: 8377 - DNA, 226 bp, Setaria italica
  Peptide Sequence Number=SeqID_74351
ctttaattcactgatcatacttgctcacctcccaatggagctcgtgcatcaccggtgtctgtacctctagcagctgttccgaagccattccaacctcctccacctggtccatctttagctggttggatggcaaatgctgctgcctcttcatctgttcagtctgctgttgtagcagcagcatcaatacctgttgcaccaaatcaagctgtctccatgttgaaacggc

SEQ ID NO: 8378 - DNA, 240 bp, Setaria italica
  Peptide Sequence Number=SeqID_74352
atctgttcagtctgctgttgtagcagcagcatcaatacctgttgcaccaaatcaagagtctgagcaactaatgaagcgactgaggcctagtggacatggcgttgatgaggccacctatcctgcccccatccctcaacctgcttggtcagtggatgatcttcctaggacagttgcttgttcactgtcacatggatctaatgtaactagcatggatttccataccgaactacgtacaataac

SEQ ID NO: 8379 - DNA, 489 bp, Setaria italica
  Peptide Sequence Number=SeqID_74353
catgaaactcagctagctatatatgatgcgtcaaaaatggagagggtctatcagtggataccccaggacacgttgtcagctcctatatcgcatgcatcgtactcatgcaacagtcagctggtttttgctgccttcgctgatggtaatgtaggtgtttttgatgcggagaacttgagattaagatgccgaattgcgccatctgtatacatgtcttcgacagccataaacaggtacccgatttgtacacttattgcgtattagctgaccatatgaaatgttcgttgtgctggtgtgttttctatttcacttttggtaatgtttgagtcctgattccaatgcctattctagttagttgctacctttagcaaagtttgctaaaaataaatgactggctttttcgtggggtctaagttttgatgggagcttctctgtggttcggcttagtgagtaatcgattttgagttattagcttgctagttgagtatcagg

SEQ ID NO: 8380 - DNA, 674 bp, Setaria italica
  Peptide Sequence Number=SeqID_74354
tttttttttttttttttttagtttctcgcagatcaatttctgcattaaaaatcttattattacaaggtagaaccgtccacagccatcattaggagtagtacatcacccagcaaacaaagagtctgtttttttcccttttcccatttctcccttgattagcacacacgcatgacagtcgtgaaacattattacatcacacagcttctggtagatagtcctctccaagcacatgtttcgcctgtaagcacacgcaaaagatcacaaaagaacactcagatgatccagcaaaagagggggaaaaaggcaaagaaaaagaatctttattacttggaaaagaagatctggccgctggtgcctgcatgtttaccggcaagcacggcgcgcggcggcgagctgaggcgatcagtcgctgtcgctgctgctgctgctgtggccgtcgtggtgtccctcgccgtgcttcttctccttcttcttcttcttgtccttcttctccttgtggtccttgtggtccttgtgctcgccggacttgtcgccgtgctcgccggtgatcttgtccttgatcttgtcgactatgccctccttgtggtcgccccccatgtggagggtctcctcgatcttgtggatgatgcccgacatggcgatgcttctcttttttgctcgagagggaagtggcg

SEQ ID NO: 8381 - DNA, 736 bp, Setaria italica
  Peptide Sequence Number=SeqID_74355
cttagttttttttttttttttttttttttttttttttttttttttggttcaaagggacaagctcgcagatcaatttctgcattaaaatcttattattacaaggtagaaccgtccacagccatcattaggagtagtacatcacccagcaaacaaagagtctgtttttttcccttttcccatttctcccttgattagcacacacgcatgacagtcgtgaaacattattacatcacacagcttctggtagatagtcctctccaagcacatgtttcgccggcaagcacggcgcgcggcggcgagctgaggcgatcagtcgctgtcgctgctgctgctgctgtggccgtcgtggtgtccctcgccgtgcttcttctccttcttcttcttcttgtccttcttctccttgtggtccttgtggtccttgtgctcgccggacttgtcgccgtgctcgccggtgatcttgtccttgatcttgtcgacgatgccctccttgtgctccccgtccttcttgtggtgctcctcggccttcttgtgcgcctccgccttcttgtgctcctcctccttcttgtggtcgccccccatgtggagggtctcctcgatcttgtggatgatgcccgacatggcgatgcttctcttttttgctcgagagggaagtggcgatggagatgcggtgcggtggtgtgagagtgaaggatctattaagaggacatattctggatttcgtaaaaggtcagctggt

SEQ ID NO: 8382 - DNA, 1685 bp, Setaria italica
  Peptide Sequence Number=SeqID_74356
gggacgcgggtccaacgccgccgccgccgccgccatgtcatcgcttagccgcgagctcgtcttcctcatcctccagttcctcgatgaggagaagttcaaggagaccgtgcacaagcttgagcaagagtcagggtttttcttcaatatgaagtactttgaggagaaggtccatgctggggagtgggatgaggtggagaaatacttgtcaggattcaccaaggtagatgacaataggtattcgatgaagatcttctttgagatcaggaagcagaagtatttggaagcgcttgataggcatgatagagcaaaggctgtagatattcttgtcaaggatcttaaagtcttctcgacattcaatgaggagttatataaggagataacacagcttctcactcttgagaattttagagaaaatgaacagttgtctaagtatggggatactaaatcagctcgcagtattatgctgattgagcttaaaaaacttattgaagcaaaccccctcttccgggaaaagcttgtctttccgactcttaaagcatcacgactacggactctgattaaccaaagcttgaattggcagcatcagctttgtaagaaccctcgtccaaatccagatatcaaaactttattcactgatcatacttgctcacctcccaatggagctcgtgcatcaccggtgtctgtacctctagcagctgttccgaaggctggtgccgcatacccaccacttacagctcatactccattccaacctcctccacctggtccatctttagctggttggatggcaaatgctgctgcctcttcatctgttcagtctgctgttgtagcagcagcatcaatacctgttgcaccaaatcaagctgtctccatgttgaaacggccaaccataacagattatcaaagtgcagagtctgagcaactaatgaagcgactgaggcctagtggacatggcgttgatgaggccacctatcctgcccccatccctcaacctgcttggtcagtggatgatcttcctaggacagttgcttgttcactgtcacatggatctaatgtaactagcatggatttccatccgactcgtcatacactacttctagttggatctgctaatggtgaattcacactttatgagattggtctgcgtgagacgttgctttcaaggcccttcaaaattcgggacataaatgcatgttcaccacagtttcagaatgctgtggtcaaagactcctcaatatccattaatcgagttacctggagccctgatggagaattgattggagtcgcattcacaaaacatttgattcatctacatgcttatcaacaaccaaatgagacacgccatgttctagagattgaggctcactccggaggagtaaatgacatagcattctcccgaccaaataagcaactttgtgttgtcacatgtggagatgataaactgattaaggtttgggatatgcacggacagaaattattcacatttgaagggcatgaggcgcctgtgtattctatctgccctcatcataaatagagtattcagttcatcttctcaacttcccttgatggaaaaattaaggcctggctttatgacaatgtgggatctagggtggactatgatgctcctgggaagtggtgtactactatgctctatagtgctgatggaactaggttgttctcatggt

SEQ ID NO: 8383 - DNA, 666 bp, Setaria italica
  Peptide Sequence Number=SeqID_74357
actatggcaaagggacaagctcgcagatcaatttctgcattaaaatcttattattacaaggtagaaccgtccacagccatcattaggagtagtacatcacccagcaaacaaagagtctgttttttttcccttttcccatttctcccttgattagcacacacgcatgacagtcgtgaaacattattacatcacacagcttctggtagatagtcctctccaagcacatgtttcgcttggaaaagaagatctggccgctggtgcctgcatgtttaccggcaagcacggcgcgcggcggcgagctgaggcgatcagtcgctgtcgctgctgctgctgctgtggccgtcgtggtgtccctcgccgtgcttcttctccttcttcttcttcttgtccttcttctccttgtggtccttgtggtccttgtgctcgccggacttgtcgccgtgctcgccggtgatcttgtccttgatcttgtcgacgatgccctccttgtgctccccgtccttcttgtggtgctcctcggccttcttgtgcgcctccgccttcttgtgctcctcctccttcttgtggtcgccccccatgtggagggtctcctcgatcttgtggatgatgcccgacatggcgatgcttctctttttgctcgagagggaagtggcgatggagatgcgg

SEQ ID NO: 8384 - DNA, 2707 bp, Setaria italica
  Peptide Sequence Number=SeqID_74358
tacttctagttggatggaaatccatgctagttacattagatccatgtgacagtgaacaagcatggatttccatccgactcgtcatacactacttctagttggatctgctaatggtgaattcacactttatgagattggtctgcgtgagacgttgctttcaaggcccttcaaaattcgggacataaatgcatgttcaccacagtttcagaatgctgtggtcaaagactcctcaatatccattaatcgagttacctggagccctgatggagaattgattggagtcgcattcacaaaacatttgattcatctacatgcttatcaacaaccaaatgagacacgccatgttctagagattgaggctcactccggaggagtaaatgacatagcattctcccgaccaaataagcaactttgtgttgtcacatgtggagatgataaactgattaaggtttgggatatgcacggacagaaattattcacatttgaagggcatgaggcgcctgtgtattctatctgccctcatcataaagagagtattcagttcatcttctcaacttcccttgatggaaaaattaaggcctggctttatgacaatgtgggatctagggtggactatgatgctcctgggaagtggtgtactactatgctctatagtgctgatggaactaggttgttctcatgtggaacgggcaaagagggagactcatatttggttgagtggaatgagagtgaaggatctattaagaggacatattctggatttcgtaaaaggtcagctggtgttgctggtgtagtgcagtttgatactgctcagaatcacttcttggctgctggtgaagataaccagattaaattctgggatgttgataacactaatatgctgacctgcacggaagctgatggaggcctcccagctcttcctcgcttgaggttcaataaagaaggcaaccttcttgctgttactacagtagacaatggttttaagatacttgcaaatgctgatggactcagaactctacgcgcttttggaagccgaccttttgaagcatttaggccgcaatatgaagcttcttctatgaaggtctcaggtgctcctgttgttactggcatctctcctaacataggccgaatggatcacttagataggaattctcctgcaaagccatctcctatactgaatggtggggatacagcatcaagaagcattgatataaagcccagaatctcagaagaaaaacctgataaggcaaaaccttgggaattgatggaggtcttaaatcctcagcaatgccgtgtagccacaatgccagaaactcctgaccagcccagaaaggtcgtccgccttctgtacacaaattctggtgttgggttgctagcactagggtctaatgccattcaaaggttatggaaatggagtcgaaatgagcaaaatccgagtggaaaggccacagccggtgttgtgccacaccattggcagccaaatagcggtcttgtcatgacaaatgatacagcagataccaatccagaggaggcagttccatgcatcgcactctccaagaatgattcttatgtgatgtccgcttgtggtgggaaggtttccttgtttaacatgatgacatttaaggtgatgacaacattcatgccacctccaccagcatcaacatttttagcgtttcaccctcaagacaataacatcatagcaataggaatggaagattcaaccatccacatatacaatgtcagggtagatgaggtaaaaactagactcaaaggacatcaaaagaggataactgggttagctttctccaccaaccttggtgtacttgtttcttctggcgctgatgcacagctgtgtgtgtgggccaatgacacctgggagaaaaagagaaccatttctatacagatgccagctggaaagactgcttcaggcgatacaagggtccagttttagttctgaccaaagtcacttgctagtagtacatgaaactcagctagctatatatgatgcgtcaaaaatggagagggtctatcagtggataccccaggacacgttgtcagctcctatatcgcatgcatcgtactcatgcaacagtcagctggtttttgctgccttcgctgatggtaatgtaggtgtttttgatgcggagaacttgagattaagatgccgaattgcgccatctgtatacatgtcttcgacagccataaacagcaatccacctgttcaccctcttgtcgtcgctgcacatcccaatgagccaaaccaattcgcggtcgggctgtcagatgggtctgttaaagtgctggagcccttggagtccgaagggaagtgggggaacacccgccccggcagacaatgggattcccaatggcaagacgccggcatcatcagctactagcaaccccgccgcggatcaaatccaaagatagatgtatcgctgaagttttctctgtaaattttctaattgaactgacttatttgtatgtggatgtcgttaggatattattgttgcatttgttggaaaaagcaggacagaacaggttaaggtcaaaacttgtctcatgaaaggtgatgtttgcattaggggatagtagtgtccataaagtgtgtcgccttaggtattctcaggtttagctcgaatgatgtaagctatatatttcttaatgcatgtaaagcaatatatagttttgccccaaaaaaaaaaaaaaa

SEQ ID NO: 8385 - DNA, 538 bp, Setaria italica
  Peptide Sequence Number=SeqID_74359
aggttacccagtacaagaaaggaaaggatagccttgtgcagggtgtgcttcctgcattccttgttcttgcagtaggcacaccctgcacaaggttacccagtacaagaaaggaaaggatagcctttcagctcaagggaagcgtcgttatgaccgcaaacagtcaggatatggtggtcagacaaagcctgttttccacaagaaggccaaggacaacaaagaagattgtgctgaagctgcagtgccagagctgcaagcactactcgcagcacccgatcaagaggtgcaagcacttcgagattggtggcgacaagaagggcaagggaacctctctcttctaagctgatgataaacttgttcttagccccaggtcatctgccagaagttaccatttggaatgttctatgttatccttatatagggagatacatcagatgggaacccactggagtgatacaagatatatcttgtgcttgtgtctgaatcagctgtttttagctcgaacataatagcatattcatcatttggtctcgtacaaact

SEQ ID NO: 8386 - DNA, 1631 bp, Setaria italica
  Peptide Sequence Number=SeqID_74360
tagtttaattagtaaccgtactaaaactagttctaggtattattggttggttctagtactaaagacctagggttttcggttccgacctcgcgccgccgccaggacactcggacggacggaggaggaagctacagctcggcagccatggtgaacgttccgaaaaccaagaagacctactgcaagaacaaggaatgcaggaagcacaccctgcacaaggttacccagtacaagaaaggaaaggatagcctttcagctcaagggaagcgtcgttatgaccgcaaacagtcaggatatggtggtcagacaaagcctgttttccacaagaaggccaagacaacaaagaagattgtgctgaagctgcagtgccagagctgcaagcactactcgcagcacccgatcaagaggtgcaagcacttcgagattggtggcgacaagaagggcaagggaacctctctcttctaagctgatgataaacttgttcttagccccaggtcatctgccagaagttaccatttggaatgttctatgttatccttatatagggagatacatcagatgggaacccactggagtgatacaagatatatcttgtgcttgtgtctgaatcagctgttttgtcagataaatttggtacaatatagtttgtacgagaccaaatgatgaatatgctattatgttcgagaccagtcaggatatggtggtcagaccaagcctgtgttccacaagaaggccaagaccaccaagaagattgtgctgaagctgcagtgccagagctgcaagcattactcacagcacccgatcaagaggtgcaagcattttgagattggtggagacaagaaggggaagggaacatctcttttctagattgcttgcctatctggatgctgaagttgtggtgtctactactgttcttaaaacctctcgtcaaatgtcaggcattggaatttggatacataagcatggtccgcattaagaactactaatgacactgaaatttgacgagaggttttaagtacagtagtagacaccgcaacttctcgcccggatagggagcacgccgcaggagccctagctctcccttccgccgccgccaaaatggtgaacgttccgaagaccaagaagacttactgcaaaaacaaggagtgcaggaagcacactctccacaaggtgactcagtacaagaagggtaaggacagcctatctgcccagggaaagcgtcgttatgaccgcaagcagtcaggatatggtggtcagaccaagcctgtgttccacaagaaggccaagaccaccaagaagattgtgctgaagctgcagtgccagagctgcaagcattactcacagcacccgatcaagaggtgcaagcattttgagattggtggagacaagaaggggaagggaacatctcttttctagattgcttgcctatctggatgctgaagttgtggtgtctactactgttcttaaaacctctcgtcaaatttcagtgtcattagtagttcttaatgcggaccatgcttatgtatccaaattccaatgcctgacatttgctctgagtgttggtcgacttttggctaaatgaagttttgtagcttgaaaaaactcaaaaagttaaaaacaaaaaaaaaaaaaaa

SEQ ID NO: 8387 - DNA, 499 bp, Setaria italica
  Peptide Sequence Number=SeqID_74361
ttttttttgcaatcacagggcgccaacagtaaccagacaacttcacacaaccttgccgcaaagttaacacaagcacgatcaatggcagacacaaatttcaaacaaaaagtaacagattcaagctacaaaacttcatttagccaaaagtcgaccaacactcagagcaaatgtcaggcattggaatttggatacataagcatggtccgcattaagaactactaatgacactgaaatttgacgagaggttttaagaacagtagtagacaccacaacttcagcatccagataggcaagcaatctagaaaagagatgttcccttccccttcttgtctccaccaatctcaaaatgcttgcacctcttgatcgggtgctgtgagtaatgcttgcagctctggcactgcagcttcagcacaatcttcttggtggtcttggccttcttgtggaacacaggcttggtctgaccaccatatcctgactgcttgcggtcataacgacgctt

SEQ ID NO: 8388 - DNA, 285 bp, Setaria italica
  Peptide Sequence Number=SeqID_74362
aaagaactcctaagagaagattagtagttcttccatattttggggggttctcagggtttagctgcattaattattactgcgctaactgatcagttctagcacaagctagactcatatctagataagctgccggtagtctgcccctaagtggtggtggatcaagaagtcgtcgccggcgacgatgggcgccgccgcgggcccgtcgaacagcagcgagctctgcatgtgcattagcccgccaggaccaccgccggcgatcacgtgcgcctggtgcggcggctggtg

SEQ ID NO: 8389 - DNA, 1241 bp, Setaria italica
  Peptide Sequence Number=SeqID_74363
ttttttttttccttaacaacccatattatatgattatcatttggaagaacatgaacaacattggagatgagagagagaggggagaggaataagaaaaaaaaagtgctaagacgcgaatttaattcctggagcaacagcaacaacaatggatgcggtgtgacggttgctgtggcggtggcttgtgaattcccaaaatggctagggagaacgtccctagatcccacatctcattgcctgccaaccaatcaggcaaccaacctttccatccatgatcaatccacccggtcggatcaggacgggaaccaatcaatcggtcggaattgtggatttggtggcgggtcatcatgacggcggcggggcggcgaggggctgcggctgcggctgcggctgggccacgaacgggtgctgcagcaggcgcatcgcggacggccggttcgccgggttcttctggaggcagagactgatgaagttcttgaagtccggcgaggcggtgcgcggcgcctgcggagagtcggagtagcagatggcgcacatgagcgcggcccagtcgccctgcttgccgaggttctcgccgaaggggaaccggcccatgtagaactcgaggatgctgaggccgaagctccagatgtcgccggcgtagccgtcgtaggcgccgtcgttgaggtcggtgttgatgcgctcggggctcatgtaggcgatggtgccgacggaggagttgcaggggtccatggtctggttgaggatgcggcccacgccgaagtcggcgatcttgacgcgccgccccgagtcgatcaggaggttggagggcttgatgtcgcggtgcacgatgtggcgccggtgaaggtaggcgatgccggagagcacctggcgcgccacgtgcgcgaggaagccctcgtcggcgatgcggcggccctcgagggatcccccgtccatgtactcgagcaggatctggagctcgccggcctgctcgtacatgccgtggcagcgcaccacggccgggtgctcggcggtgcggaggatggcgatctcgcgcgtgatctgccgccgcacggcgtcgtcgtggttgccgtagagcaccttgagcgcgtaggcgcggcccgtggggcggtggcgcaccatccacaccgtcccgccggccccgctgccgatgcggcgcacgcgctccagctcgcacagcggcggtgggttcggcggcgcggagccggccgaggtcggcggggtgggcgcgccgagtgacgccg

SEQ ID NO: 8390 - DNA, 696 bp, Setaria italica
  misc_feature (691)..(696): n is a, c, g, or t
  Peptide Sequence Number=SeqID_74364
agcagctgcacgcaaatcacaggagaagaagcaaagcgcgtaggtgctgctagcctgctagtgtgacgatgatgaagggtggtctccttgtgctcgctgttctgctcgtggccgcggcgtgcgtcgccgagggcgcgggcgagtgcggggcgacgccgccggacaggatggcgctgaggctggcgccgtgcgcgtcggcggcgcagaacccgagctccgcgccgtcagccggctgctgcagcgcggtgcgcaccatcgggaagcagagccgggagtgcctctgcgccgtcatgctgtccagcaccgccaggagcgccgggatcaagcccgaggtcgccatcaccatccccaagcgctgcaacatcgccgaccgccccgtcggctacaagtgcggagcctacactctgccatgagaagtgatgactccagggctgatgcataacatgtccgaaaattaccgaagcacgaagtcgtcgtgtccgtctgtgattctgtgtctgtgttaccaataaacgagacttgcgagtaccatccatgtggaactctagcatgaatgtatgatgagtgtatcactagatacgtactccatgtagttctgttcagggtccagagatgtagtcctgcactgtcgaaataaaaatggttttttcgataaaaaaaaaaaaaaaaaaaaaaaaaaaaaacaaaacgnnnnnn

SEQ ID NO: 8391 - DNA, 203 bp, Setaria italica
  Peptide Sequence Number=SeqID_74365
cccctactcagctgcataggagtggatcagacacgcctcacctgctccaagatgctgctcttccagcgagacgaacgaatgtagtcatgcacagccgagtatctcgatagcgagcggaggcgttaatatcgggtgctgtgctgctctgaggtcggcggagcggagctggagccctaccctagtcgcggcagcggcggcggcgg

SEQ ID NO: 8392 - DNA, 341 bp, Setaria italica
  Peptide Sequence Number=SeqID_74366
agtggcagaacaagatgaaggcggcggggaagccctacgacaagcccaacatcgtcaccggcgccaacgtccaggtgtgctgggagaagttcgcgcgctacttcgaggtggagctcaaggaggtgaagctcaggtaaggctactacgtcatggaccccgagaaggccgccgagatggtcgacgagaacaccatctgcgtcgccgccatcctcggctccacgctcaacggcgagttcgaggacgtcaagatgctcaacgacctgctcgccgccaagaacgccgagacggggtgggacactccgatccacgtggacgcggcgagcggcggcttcatcgcgccg

SEQ ID NO: 8393 - DNA, 138 bp, Setaria italica
  Peptide Sequence Number=SeqID_74367
aatggccgccaatcaacaagaactacgtcgacatggacgagtaccccgtcaccaccgagctccagaaccggtgcgtgaacatgatcgcgcatctcttcaacgcgccgctcgccgcgtccacgtggatgggcgtctccc

SEQ ID NO: 8394 - DNA, 278 bp, Setaria italica
  Peptide Sequence Number=SeqID_74368
tcgaggggtataggaacatcatggagaactgccacgagaacgccatggtgctcaaggaggggcttgagaagacggggcgcttcaacatcgtgtccaaggacgagggcgtgccgctggtggccttctcgctcaaggaccgcagccggcacgacgagttcgaaatctccgacatgctgcgccgcttcggctggatcgtgccggcctacaccatgccccccgacgcgcagcacgtcacggtgctccgcgtcgtcatccgggaggagttcagccgcaccctc

SEQ ID NO: 8395 - DNA, 300 bp, Setaria italica
  Peptide Sequence Number=SeqID_74369
cagacctcctgtaatttccctttgcagtagacattgtttggctctttattggggcagttttgtactgacggattcaaagattatcgtgcattgggaactcctaataaagagccaaacaatgtctactgcaaagggaaattacaggaggtctgccagtaaataccactagctgaatcctcaggacattttattcatggaggaagaagatatgccgccattcacttcagttgagtaactgcagcgtgtatggcatctgcaagatggggcacagtcctcgtgctcaaaccagccatgctgatc

SEQ ID NO: 8396 - DNA, 304 bp, Setaria italica
  Peptide Sequence Number=SeqID_74370
taacttactaagttgttagtaagttaagttcttagggttttagttgtcttcttcttcccggtcggtcgcctccacatatcgtctctcagatcgggaggcgaaaccaaggaaattatatacatatttgtagtgtgatcttcataagaagtcaagatggtgaagttcacagcggaagagctccgtgccatcatggacaaaaagaacaacattcgtaatatgtccgttattgctcatgtggaccacggcaagtctacccttacagattcccttgtggcagctgctgggattattgcccaggaagttg

SEQ ID NO: 8397 - DNA, 838 bp, Setaria italica
  Peptide Sequence Number=SeqID_74371
gcttggcggggtgcttggactgggcattggggcacgacgacggggaggtggaggacgggggtggccgggacggcgcgccggcgtcggcggcggcgggaggcgaggaggcacacccagggagaggaggacgaggaggagcacgaaggcggcgccgacaccgatgccgacgagctcccagaggtggagcccgaacaccagcgtgccctggtcggagtccgacatgggcgccgcgttgcccagctccctcccgggctcaagcagaaatggcggatctccccggaaacccgagcagaattgggcgctaaaacgaatttttccaagaaaagaatcgccgaaaactggggttttgcagggaatttggtgagctagacttgattctcgcagggaacaaacaaatgagtgggcaaacaaagtggccaagaacgaagaatctctgcgatttctgcagggacgcagtgggaaaagtaggactttgggggtgggagagaggaagggatttaggacaggatggagtgacgaaaaaggtaggatttggagggtgattgggcccgaaaaggttggatttgggggcaatgtggggcgcggagagcggatcatttcgagggtgtgaggagccgggcgaggttaatctagctctgatgatgcgaggatggaagattttgggtgtggaggcggaggacgagggtggtgctggtgaggtgtggcctgggtggctgggtggttggtggcgatcattagaggccaatcacatcccaaatcaacaagaaatgtacaggaaggcctggataatacaaaagtgactgctcagagtagactgtagagtgtgtgtgtgtgtgtg

SEQ ID NO: 8398 - DNA, 578 bp, Setaria italica
  Peptide Sequence Number=SeqID_74372
ttcctttgagcttcaagttgaaggtgaggaagcctaccagcctttctcctgtgtcattgagaacgccaatgtcatcatggcgacatatgaagacaagctttttggtgatatccaagtttacccagagaaggggactgttgctttctctgctggtttgcatggctgggcctttaccctcactagctttgcaaagatgtatgcctccaagtttggtgttgacgagactaagatgatggagaggctctggggtgagaacttctttgacccagccacgaagaaatggaccaccaagaacactggttctcctacatgcaagagaggttttgttcagttaatcagttatgctatgagccaatcaagcaaatcatcaacacctgcatgaatgatcagaaggataagttgtggcctatgctgcagaagctcaatgtgacaatgaaggctgatgagaaggagctgattggaaaggctctcatgaagcgtgtgatgcaaacttggctgccagctagtactgccctgcttgagattgattgatattccaccttccgtccccggcgaaggcacagaaatatggtgtggag

SEQ ID NO: 8399 - DNA, 733 bp, Setaria italica
  Peptide Sequence Number=SeqID_74373
gtttgaggtcctcaagtccatctgcctcatcatgccacggaggcccatccgctcatcgcgtgagggggcgatgttgtgctctggcaacgccattgcagcctcgccagcattcacctcctcgtgctccatgtctagctcggctttagctttgtttttcttcgaaccgccatacatgaggctccccactatcacctgaactgtcccagctgtcaggactccacctacactgccacccataaccctgtggtcagggccacataaagctatgcatagccctccacttcgggtccgggtgccaccatcatccagcaccaagtatgacccagaaaggcacaggatctcaaatcgaccctcatatgtaaccacaccaccagagtctgaatcctgatgaagggttgctgtagaaacagctccagttgctgaaatgatgcacactgcccttgggccttgttgtgaaaaggccattatcctggcagcaacatcctctcctggttgaataataatcacatgaggagtaaaacctgttccaacagagccaagaaaccactttccaagcgaagccaactgttgcatcttcccagagccaggtggtcatcctctgccgcgtttctctcaaggggcaccagagcctgaaccccctgatcccctgacccaaatcctgaacttggtgtgctgaccatggttcccaccccgagttcgacaagcgaagcgttgatgatgaaatgggcgataa

SEQ ID NO: 8400 - DNA, 909 bp, Setaria italica
  Peptide Sequence Number=SeqID_74374
tatttattcgtatttgttctagttagttatttagttattaagtagtaactacactaagaaaacaagagtacagctataaacttgtgtaaaaaatagaattaggcatttacccgtctgatgtcatgtaaatgtggtattcttgtctcatgaaggccacttgatcgctattgagcccagtgaaagtaaacatcccgatttgcttaatgatgtggctccaatctccaggcgttcctctggatttcagcgcatcaaatagctgctgcctcatgctaattatcctatcagccatggccttcagttccagagtccattcgttgaacatctcactgtccttgagtatagtcgccacgatagagggaccatgaagaggagggtttgaatacataggcctaatcacaagtttgagttgactttcaaccctaacagccacatcagcacttccacatacaatgctcaaagcaccaacacgctctccgtacaatcccatgtcttagcatagctctgagccatgagcaattcaccaccatcagcaacaaacatgcgcactgactgtagtcatctttgttctaagacttccactcgcaaagccttggtaagcactgtcgaagaacggaagcaacgattttgatctcatgagctgcctaatctgttcccactggtcaatggtaggatcaactccagtagggttgtgggcacaagcatgcagcagtacaattgatcctaaaggtgcagaactgaggtcttctaagagtcctttgaagtcaagccacgggttgcaggatcatagtagcggtagctcctaacagtcaatcctgatagggtgaagacctttgggtggtttccccaggttggttgtgggatgtagatagtgcgctcatgatagtgccttgcagaaattcactcccactc

SEQ ID NO: 8401 - DNA, 723 bp, Setaria italica
  Peptide Sequence Number=SeqID_74375
agaaggaagaacaatagcgtggcatctgctttgaggtctgtgatgttgttcttcatgctgatgcaattcacaggggtggtggccaggtcattccaactgccaggagggttatttatgcttctcagctcactgccaagccaaggctgctcggagccgagtttaccttgtggagatccaggccccagaaaatgcacttggtggtatctatggtgttctgaaccagaagagagggcacgtgtttgaggagatgcagaggcctggtaccccgctctacaacatcaaggcttacctccctgtcatcgagtccttcgggttctccagccaactgagggctgcaacctctggccaggcgttccctcagtgtgtgtttgaccactgggacatgatgggctctgatcctctggaggccggctcccaggctgctcagctggtgttggatatccgcaagaggaagggtctcaaggagcagatgacccctctttctgagttcgaggacaagctctaaattttggtggtttgtgctgctgttacccatgctggtttcatggccaattcgtctactgtaacgggaactactttcatgtttcatttcctttagttgtcagatgcatctgtttttgaacatcattggccatatggcattgtgctgctaagactgtatttgttatccggttgtgatgtaacagatgaaatagagttcgtatctgtggtttaagtggtaaa

SEQ ID NO: 8402 - DNA, 496 bp, Setaria italica
  Peptide Sequence Number=SeqID_74376
aattaggactacaataagacaagaactagaacaaatcctctcttgcaggtagcagagcctgtgttcttggtggtccaatcaagcaaatcatcaacacctgcatgaatgaccagaaggataagttgtggcccatgcttcaaagcttaatgttaccatgaagtctgatgagaaggaattggttggcaaggctttgatgaagcgtgttatgcaaacttggcttccagctagtactgcactgcttgagatgatgatattccaccttccttccccatcaaaggcacaaaagtatcgtgtggagaacttgtacgagggaccccttgatgatatctatgctactgctatcaggaactgtgatccggagggtcctcttatgctgtatgtttctaagatgattccagcatctgacaagggcaggttctttgcctttggtcgtgtcttctctggccagggacatagttgggacccatgatcctaaccttcataccagtagcaacct

SEQ ID NO: 8403 - DNA, 870 bp, Setaria italica
  Peptide Sequence Number=SeqID_74377
gtcgtgtctcttagttttttttttttttttggtttattaaatacttggcactgatgcagcaaaaacaattgcatgtgcgtctttttattaggagttcccaatgcacgataatctttgaatccgtcagtacaaaactgccccaataaagagccaaacaatgtctactgcaaagggaaattacaggaggtctgccagtaaataccactagctgaatcctcaggacattttattcatggaggaagaagatatgccgccattcacttcagttgagtaactgcagcgtgtatggcatctgcaagatggggcacagtcctcgtgctcaaaccagccatgctgatcctcccgtctgatgtcatgtaaatgtggtattcttgtctcatgaaggccacttgatcgctattgagcccagtgaaagtaaacatcccgatttgcttaatgatgtggctccaatctccaggcgttcctctggatttcagcgcatcaaatagctgctgcctcatgctaattatcctatcagccatggccttcagttccagagtccattcgttgaacatctcactgtccttgagtatagtacgaccaacgaatagagggaccatgaagaggagggtttgaatacataggcctaatcacaagtttgagttgactttcaaccctaacagccacatcagcacttccacatacaatgctcaaagcaccaacacgctctccgtacaatcccatgttcttagcatagctctgagccatgagcaattcaccaccatcagcaacaaacatgcgcactgactgagcatctttgtcaagacttccgttcttcgacagtgcttaccaaggcttgcgagtggaagaacggaagcaacgattgatctc

SEQ ID NO: 8404 - DNA, 1225 bp, Setaria italica
  Peptide Sequence Number=SeqID_74378
atttaatcgaacaacagcaatctcttggaacaggagcatttcaaaaaaaaaatactgttggaacaggagcgagctgacacggagagacatggttctgacacatgttcaggagctcgacgatgccgccgccgcctcggccgtcgtcttcgcctcgagatacgtccaagaaccgcttccgaggtttgagctggggaagaagtccatctccaaggacgcggcgtaccagatcatccacgacgagctgctgctggacagcagcccgcggctgaacctggcgtcgttcgtcaccacgtggatggagcccgagtgcgacaggctcatcctcgagggcatcaacaagaactatgccgacatggacgagtaccccgtcaccaccgagatccagaaccgttgcgtgaacatcatcgcgcggctgttcaacgcgccggtgggcgccggcgagaaggccgtcggggtcggcacggtggggtcgtcggaggcaatcatgctcgccgggctggccttcaagaggcgctggcagaaccggcggaaggcgggcggggaagccctacgacaagcccaacatcgtcaccggtgccaacgtgcaggtgtgctgggagaagttcgcgcgctacttcgaggtggagctcaaggaggtgaagctgcgggaagggtgctacgtgatggaccccgacgaggccgtgcagatggtcgacgagaacaccatctgcgtcgccgccatcctcggctccacgctcaccggcgagttcgaggacgtcaagcgcctcaacaacctcctcctcgccaagaacaagcggacagggtgggacaccccgatccacgtggacgcggcgagcggcggcttcatcgcgccgttcctggtacccggagctggagtgggacttccggttgccgctggtgaagagcatcaacgtcagcggccacaagtacggcctcgtctacgccggcgtcggctgggtcatctggcgcaacaaggaggacctgccggaggagctcatcttccacatcaactacctcggcgccgaccagcccaccttcaccctcaacttctccaaaggtctcttattttttgcgcatttcctcgtgtcgtgtccgatttgatgcatacaccacaatcttctggctaacgtgctcatggtgcaccgcaatttcaggttccagccaagtcattgcacagtactaccagctgatccgccttggctttgaggtaaattgcaacagtgca

SEQ ID NO: 8405 - DNA, 1592 bp, Setaria italica
  misc_feature (1507)..(1507): n is a, c, g, or t
  Peptide Sequence Number=SeqID_74379
gtttttttttttttttttgtatattcacccacagtaactacatagaatacggtgggtaccaaaagcatcgtctctcattatctcatacaacagcatccaggtactacaacataataatttcaccatttatatgataatatatgcggggttcctaatcaacacagcaaccacgacaactcttctcgcacctacggggaagttagcgcatgcatatgctgtgcctgtgtcctcagctcagccgccttacccagccggccaactacctactcgcggtcgcggatcgagttgatatcgatgttggaggtcctcgagtccatctgcctcatcatgcccggaggccatccgcccatcgcgtgagggggcatgttgtgctccggcaccaccatcgcaggggccgcctcttcctctccagcattattcacctcctcgtgctccatgtccgcctcggctttagctttgtttttcttcgaaccgccatacatgaagctccccactatcacctgaactgttccagctgctgtcaggactccaccaacactgccaccgataaccctgtggtcagggccacataaagctatgcatagccctccacttcgggtccgggtgccaccatcatccagcaccaagtatgacccagaaaggcacaggagtctcaaatcgaccctcatatgtaaccacaccaccagagtctgaatcctgatgaagggttgctgtagaaacagctccagttgctgaaatgatgcacactgcccttgggccttgttgtgaaaaggccattatcctggcagcaacatcctctcctggttgaataataatcacatgaggagtaaaacctgttccaacagagccaagaaaccactttccaagcgaagccaactgttgcatcttcccagaaccaggtggccgtcctctgccacgtttctctgaaggggcaccagagcctgaaccgcctgatccccctgaaccaaatcctgaacctggtgtgctgaccatggttcccatccccgagttcgacgagtgaggcgttgatgatgaagtgggcgataacccaagagtcaccgcaccatcaggcttatatttccttggcctcccccgcttcttcttcacctgctcatcctggccaccgccagccccactcccctgatcccccttagcatcagcacctacggcgacacccatgccaatgtccatagcaccgccggaactggcgccgccaccggcgctgtgctgcaccacaggaggtgaggcctcaacatggtggtacccctgcccaatgtggggccccccgacgtgcgggttctggaatgcgtaccccgcagagactgcatcaagatgctgccggtacccgccgggcggcgggccgtggagccccggcgagtggccggggacacccggagccccgatgcccccggtgctgcgcgtagaacgacgagaagttgggccccgacgccaccgtggactccctgccgtccattcataggaatgggcagcgccgcagagccccctnaccgccaacccaccaccaacacgcagaggggccaagcctagttgcaagaacggcacaaggtggctactttgttcactattcgaga

SEQ ID NO: 8406 - DNA, 1859 bp, Setaria italica
  Peptide Sequence Number=SeqID_74380
cttcgctcaccccctccctcaagccagcggcagcaaaagcccggagaagtagagagaacccttcttcctccccgctggcgagagatcgacgagcgagacgatggtgctgtcacacggcgttggtggctccgatgagtccgtgcactcgacgttcgcctcccgctacgtccgcgcctccctccccaggttccggatgccggagcagtcgatcccgaaggaggcggcgtaccagatcatcaacgacgagctgatgctggacgggaacccgcggctgaacctggcgtccttcgtcaccacgtggatggagcccgagtgcgacaagctcatccaggcctccgtcaacaagaactacgtcgacatggacgagtaccccgtcaccaccgagctccagaaccggtgcgtgaacatgatcgcccatctgttcaacgcccctctcggggagtctgaaactgccgtcggagtcggcaccgtcggctcatctgaggccatcatgctcgccgggctggcgttcaagaggcgttggcagaacaagatgaaggcagctggcaagccctgcgacaagcctaacatcgtgaccggcgccaatgtccaagtttgctgggagaagttcgcgcgctacttcgaggtggagctgaaggaggtgaagctgagcgacggctactacgtcatggacccgcataaggccgtggagatggtggacgagaacaccatctgtgtcgccgccatcctcggctccacgctcaacggcgagttcgaggatgtgaagctgctcaacgacctgctcaccaagaagaacgccgagacagggtgggacacgcccatccacgtcgacgcggcgagcggcgggttcatcgcgccgttcctgtacccggagctggagtgggacttccggctgccgctcgtgaagagcatcaacgtcagtggccacaagtacggcctcgtctacgccggcatcgggtggtgcatctggaggaccaaggaggacctgccggaggagctcatcttccacatcaactacctcggcgccgaccagcccaccttcaccctcaacttctccaaaggttccagccaagtcattgcacagtactaccagctgatccgccttggctttgagggttacaagaacatcatggagaactgccaggagaacgcgatggttctgaagcagggcctggagaagatggggaggttcaacatcgtgtccaaggacaacggcgtgccgttggtggccttctccctcaaggacagcagccggcacaacgagttcgagatctccgacttcctgcgccgcttcggctggatcgtgccggcctacaccatgccccccgacgcgcagcacgtgacggtgctccgcgtcgtcatccgcgaggacttcagccgcaccctcgccgagcgcctcgtgctcgacatcgagaaggtgctgcacgagctggacacgctgcccgcccgcgtccccagcggcgacctcgccgcgctcgccgccgccgaggcgagccagagggagatggacaagcaacgcgaggtgatctcgctctggaagagggccgtcctggccaagaagaagaccaacggcgtctgctaagcaaccgatgcatatatcatatatggggaattaccctttttttttctttctttgatttgaacttatggtgagatatgtcctgtttatgaggtcagtaatttgtcgaggataatttttagaggacggattgctcctgctcgatatgatgcagtgagtgtattatgttacgtgttgagcaccggcatgttggtttgtgacatttgtgcaacttaaactagtataagatggacccagctaatggtgcgtccagtatcttatttcattatgtaacctgttg

SEQ ID NO: 8407 - DNA, 1970 bp, Setaria italica
  Peptide Sequence Number=SeqID_74381
cgccgcggccgcgcggaggccggtggttgggccaggtcgccgcgattagtagtaccagcttaccactcgggcactcccactaccaccaccaccacacaaaccgaacctacccacgtcgggagcaaggacaatcggcagacggcaggggaggcgtgagcagccgcagcagccatggtgctctcacacgccaactccatcggccgggacgacgccgtggccagcaccttcgcgtcgcgctacgtgcgggagctgctgccgcggtaccggatgccggatcggtcgatcccgcgggaggcggcgttccagatcatcaacgacgagctgatgctggacggcaacccgcgcctgaacctcgcctccttcgtcaccacctggatggagcccgagtgcgacaagctcatcatgggatccatcaacaagaactacgtcgacatggacgagtacccagtcaccacagagctccagaaccgttgcgtaaatatgatagctcacctgttcaatgcaccgattaaggaggatgagacggctgttggagttggaacagtgggatcctcagaagcaattatgcttgcaggcctagcattcaagaggaaatggcaaaacaggaggaaggaacaggggaagtcatatgacaaacccaacattgtcactggtgctaatgttcaggtttgctgggagaaatttgcaagatattttgaagtagagctaaaggaggttaagttatctgaaggatattatgtcatggaccctgtcaaggccgttgagatggtggatgagaacactatatgtgttgcggccatcttgggatctactctcaccggggagtttgaagatgttaagctattgaatgaccttcttacaaagaagaacaaggaaactgggttggatgtgccgattcatgttgacgctgcgagcggaggattcatagcgcctttcctctaccctgagcttgaatgggacttcaggctaccgctagtgaagagcatcaatgtcagtgggcacaaatatgggcttgtctacgctggtgttggttgggtaatttggaggagcaaggaagatttgcctgaagagctcattttccatataaactacctagggacagaccagcctacattcacgctcaacttctctaaaggttctagtcagatcattgcacaatactatcagctcattcgcctaggcttcgaggggtacaagaacataatgcagaactgcaaggcgaacgctgccgttctgcgggaaggcgtcgcggcgactggccggttcgacatcctctccaaggagaccggcgtgccgctggtcgccttctctctcaaggacagcaaccatttcagcgtgttcgacatctccgagaacctgcggcggttcggctggatcgttccggcgtacaccatgccggccgacgcggagcacgtggcggtgctccgcgtcgtcatcagggaggacttcagccggagcctctccgagcggctcgtgaacgacatccagaagatcctgcgcgagctggacgcccgcgccacccacgccgtgcgggtctccagcgccaccgccgcgcagtcggacgacggcgtcgtggccaagaagagcgtcctagagatcgagcgggaggtcgccgcgcgatggaggaacgccgtgaacaagaagaccggaccgtgctgattggcgcgtggaggaggatgtgatccggaggtttcgccacgacgccttcggtcttgatgtgcttgtgtatctatcgtagacgcttgtctgcgtggtccaattccgtgtggcgggcgcctttggggttggggctggggctgtctcactgtgtttgctgtagtcttgctacgtaactcgatgtattcgtgtggcatttcgatctggctgtttatgtttgagacgacaatatgttcaggatcgaaccagaaataaaaatggctgtaaaggttggaattgtgcataatgaggcagggaaaggagaagaattctat

SEQ ID NO: 8408 - DNA, 1293 bp, Setaria italica
  Peptide Sequence Number=SeqID_74382
gacaaggatcttgccaagaagatttggtgctttggacctgagaccactggcccgaacatggttgttgatatgtgtaagggagtgcagtacctcaatgaaatcaaggattctgttgtggctggcttccagtgcaccctcctttgaggcccactggaagccagccacaacagaatccttgatttcattgaggtactgcactcccttacacatatcaacaaccatgttcgggccagtggtctcaggtccaaagcaccaaatcttcttggcaagatccttgccccaacaagcacaaccgtctttacatggaagcccgtcccttggaagagggtctccctgaggctattgatgagggccgcattggtccacgtgatgatcccaaggtacgctccaaggatcctctctgaggagtttggttgggacaaggatcttgccaagaagatttggtgctttggacctgagaccactggcccgaacatggttgttgatatgtgtaagggagtgcagtacctcaatgaaatcaaggattctgttgtggctggcttccagtgggcctcaaaggagggtgcactggccgaggagaacatgcgtggcatctgctttgaggtctgtgatgttgttcttcatgctgatgcaattcacaggggtggtggccaggtcattccaactgccaggagggttatttatgcttctcagctcactgccaagccaaggctgctcgagccagtttaccttgtggagatccaggccccagaaaatgcacttggtggtatctatggtgttctgaaccagaagagagggcacgtgtttgaggagatgcagaggcctggtaccccgctctacaacatcaaggcttacctccctgtcatcgagtccttcgggttctccagccaactgagggctgcaacctctggccaggccgttccctcagtgtgtgtttgaccactgggacatgatgggctctgatcctctggaggccgggctcccaggctgctcagctggtgttggatatccgcaagaggaagggtctcaaggagcagatgacccctctttctgagttcgaggacaagctctaaattttggtggtttgtgctgctgttacccatgctggtttcatggccaattcgtctactgtaacgggaactactttcatgtttcatttcctttagttgtcagatgcatctgtttttgaacatcattggccatatggcattgtgctgctaagactgtattttgttatccggttgtgatgtaacagatgaaatagagttcgtatctgtggtttaagtggtagta

SEQ ID NO: 8409 - DNA, 536 bp, Setaria italica
  Peptide Sequence Number=SeqID_74383
acaacggattgattttcaaatgttatttcccaatccataacccacctctccatatcccatcctatatcgctctttccctttcccactcaccatccaacaccaccttaagtgattcttgtagttggagaaagtactaactactgaatattgcagacaccctcgtaaggagtacttcactccctgccagcattgatgctgctggcaccgaggagtggaggaagcgaaaggcagctcagagtctgaagaggctcgagttgaaaggaagagggttgagaggaggaacacttgcaacaccttaaaagaagcgggtgggcaaatcgtagaagatgtgatgagggctcccaatgacaaattgcatcaggctatcagcacatcacacgatagtttgtcagcagggcgaaggaagccaaattcagcctccaaaggtattcttttgtttgtatgtttgttccaccgtttaggttttctcaatatccatttcccatgtttccaagaacatgaatcttacctgccaccacagtatcagccacaatata

SEQ ID NO: 8410 - DNA, 819 bp, Setaria italica
  Peptide Sequence Number=SeqID_74384
tgctgagcctcgggctgtccctcggcgggcggttcgttcgtaataggaagggggagaagctcgcccggtcgtcgtccatggcggccgtcatgacggcgcccgtggaggcgcccgcgctcgggaggacgagctcgctgccggtcgacacggaggcgtcggaggtggggaggaagcaggggctggatggatggggttcgagccgtgagaccggtggtcccgccgaggagccggcggcgagactgcggccgagcttgagcccttcatctggctcgtcggacggcgaagggcaaaggttgcaaggtgcgtgtggcttctctgttttctcccgtgggaggtttatacttagtatttcgctacccataggtggtaatttagctttcagattccatgcttagcagtgctgattgagattgatttggttgatgacttgatgtttgtaaaattgcgttaattaggcattatattttattgcagaggagaaaaacatgataggcagataccaatctttcaagaaatcagtttgtgatttgcagtgttgagtgacgtatgatgtatgaagtagaaacgtagaacacttgtgcgtggaggcctagagtaagtattgagctttggctagctaatgagatctggggctgcatcctgcattgttagcattgggcaattgtagtacagcttgtttcgcgcttcttgtactgaacaactttaccgtaccaaattatgggagttaaactatttacaaccgttgcatgtcacattcaagtacaatgaacagggtgctttatcaagcatgatgtagtttgatggatggatggtaagcaa

SEQ ID NO: 8411 - DNA, 1188 bp, Setaria italica
  Peptide Sequence Number=SeqID_74385
taggtacggtatagttactaattagtacggacgacccgtaggaaggacgtcccgacgactacgggaaggaacgaagctcgctgccggtcgacacggaggcgtcggaggtggggaggaagcaggggctggatggatggggttcgagccgtgagaccggtggtcccgccgaggagccggcggcgagactgcggccgagcttgagcccttcatctggctcgtcggacggcgaagggcaaaggttgcaagacaccctcgtaaggagtacttcactccctgccagcattgatgctgctggcaccgaggagtggaggaagcgaaaggcagctcagagtctgaagaggctcgagttgaaaaggaagagggttgagaggaggaacacttgcaacaccttaaaagaagcgggtgggcaaatcgtggaagaggtgatgagggctcccaatgacaaattgcatcaggctatcagcacatcacacgatagtttgtcagcagggcgaaggaagccaaattcagcctccaaaggaacagccactgccgaggcgcacagcccgtcatcagttggtccaccagctggtgaggttgcaagttgcgcaacggtagcaagcccaccaccgtcttcgttggctggcagagcggcagcccttggctccaggggatatcaacaaagcacttcgggcacatatgcagcaagggcaaggagcatgggggatgtggagagaaccatgatgcaagagatgccgagcgtcttcaccaagggtctccccaacggcaacaggttggaaggcttcctgtacaagtacaggaaaggcgaacaagtgcgaatagtttgcatttgccatgggaccttccacactcccgccgggttcgtggagcacgcggggggcggcaacgtctccaacccgctgcggcatattgtcgtcaccccgctcgagaacctgtgaaccttcgctgccagacccatgcaaatgcaagtgttctgtagtgtcaccttcagcctagcatcagagtagatgtcatcgaccgattgtgtagtacagtgcttattatgctgatgaaattgagggccattgctcccagccctgccgacatcttggtggtagcatgacctgttgataatgtcttaatccttcctgagagtggtttagttctgtagcgtcaggtcatgctaccaccaagatgtagatgtcatcg

SEQ ID NO: 8412 - DNA, 205 bp, Setaria italica
  Peptide Sequence Number=SeqID_74386
tgccgtccctgttgccttaggaaaagttagatgcaacttgtggattgaaacgtaggagtatggtgttgtgatgtaatttatctccggttctgtgatgagatgtaggagcacggttgatgtcgtcattttgcaaatgtagctatgacatgtttgctaaagaggctaatgctactcctggggtcgctagttgtctgtaaaaaaaaaa

SEQ ID NO: 8413 - DNA, 263 bp, Setaria italica
  Peptide Sequence Number=SeqID_74387
ccccgatggacatgacgtcctgacctgtttgtttgaggcaagtggcgaggggcggcggagccgagtggccgccgccgcagcgaaccgtcgcagcataccaaagctggctgcgcttctttattaacctactcatttagtgcgaagtaacggagcaaaaaccagcggcgcagcgaccacacccaaagcccacagctttcctccccctcccctcctccccggcgcggcggcgccacccagcaagccaccagacttagctcccacca

SEQ ID NO: 8414 - DNA, 587 bp, Setaria italica
  Peptide Sequence Number=SeqID_74388
cccaaatcacttcatccacccgaaaggtccagacgcccggagtcaccaccacccacctctctgtccactggctcacgccgcgaccgccccccttgtcccttgagatctcgccgccgtcgtcgacccccgccgccgcctcctccccgttccggcttccccgatggcgcggctgcactggctggaggccatcctgccgctcggcatcatcggcggcatgctctgcatcatgggcaacgcccagtacttcatccacaaggccgcgcacggcaggccgaagcacatcgggaacgacatgtgggacgtcgccatggagcgccgcgacaagaagctcgtcgagcagtcctccggcaactagggtattggtcagcctcaaacttttccggatgttgacgaacctatttcggaagcacagaactctttagtttccttgtataatgggaacaattggttttgcttgaaatctcaaaacaattgggagaataatgtgtatctggaatctgtttaattgaacaaagttgctttcctttgtcatttctgtaccccctgagacacgcaacagtggataggaaggcacacaggggagtagg

SEQ ID NO: 8415 - DNA, 497 bp, Setaria italica
  misc_feature (444)..(497): n is a, c, g, or t
  Peptide Sequence Number=SeqID_74389
agccattattgggatgctgctgactattgcttgttagccatgtcaataaatgtaatacaaatccactgaaatggtaattcatgtttctgcagggtattggtcagcctcaaacttttccggatgttgacgaacctatttcggaagcacagaactctttagtttccttgtataatgggaacaattggttttgcttgaaatctcaaaacaattgggagaataatgtgtatctggaatctgtttaattgaacaaagttgctttcctttgtcatttctgtacccccatttctttcctcctctggagcagattcatgaagaagataacagtgttcacagttgttatgacttttggcaagtatgttctgataaaacattgtggattcagacgggtagaggcgtacaactgtgtaataagaacgataagaaatatacagtgtgattaaaccnnnnnnnnnnnnnnnnnnnnnnnnnnnnnnnnnnnnnnnnnnnnnnnnnnnnnn

SEQ ID NO: 8416 - DNA, 362 bp, Setaria italica
  misc_feature (334)..(362): n is a, c, g, or t
  Peptide Sequence Number=SeqID_74390
tggaggccgctatggcggtggtggctaccctagtggtggacatcatggtggatggaattaagaggtgcaaccacgtatgtttctctataccataagtaaggtgtggtgatgatggatttgaataatgcgtggaagtgatgtctgcatagtataaaacatggtaagtagctagaatgttttatacatggtagattgagtgttgtggtgcatgaagtatgtgtactaagatcatgtcagctagccatctatggcactgtgcacagctggcttttagaaattgtacctcatcatctgtggatctatatacatataaataaatgaattttaacccgtnnnnnnnnnnnnnnnnnnnnnnnnnnnnn

SEQ ID NO: 8417 - DNA, 870 bp, Setaria italica
  Peptide Sequence Number=SeqID_74391
ttgaaatacaccataaacatccttaaattatccttaaacctgtctttagcacataaataagtggaaatgagttacaaggatcgaagttgcaacaatagtgtctacttcagttttgacttggcagaacttttcagtggcttcgcaatagaaacaggaggactactttttgccgtcttctttacattgtaggttatggacataaatgcacagatcagtgcaatcaaaatggtcgggtagacataagctgattgtgttggatcgctgttcactggtttcccgaatagtgcttctttcactagaccccagataaccaaaagggtaccaaacaaagtcatcctcccaggatttatgatgccaacaagtgctccagcaacgcagaagtagctcccagcaagtatctctagacgctggagatcaactactgcagaagcatttttggcttctgtcaagttgtaaatgtcaaacaggtcactccaccttggaaatgcaattcttttagtgaggctgctcacaatagctccagggtagagcatggccttcacaacagctggcgggaatatctcatttgagaccaactgagatgaggtgacttgaattggtgttgtgcatgtgcctgctctacaagggaccctgaagagcgggatctggaggatgaggaggaggaagtaggcgcgggaggcgtagatggagatccggcggctcgtccaaccgccgcccacccgccggcgctgcacctcgaccgccctcggccccgccggtgctgctgacggggacgacgagctcggcctcgccgctgccgccgccgccctctctctcctcgtcggtggcgccatggctcgcctgcacagccggcttcctgctgcttttttt

SEQ ID NO: 8418 - DNA, 303 bp, Setaria italica
  Peptide Sequence Number=SeqID_74392
gcagcgttgcaggacgaacaaaatgcacatcaagcggatgcttccccagcacgagcacaccacctgactgatcacaaccctcgcggaggccggcagcgcacatcgctggagagtccagccatgtcgtcgggtccggcaagggggccagcagtagcagcgcgggcgagagcctccggaactcctgcaacgacttcgcccgcaccctggcgcggctgccggccagcatcatggagggcttgtcgaggtcgatccctcgccgccggagccaccactacccggccgctccccaccgtctccagccac

SEQ ID NO: 8419 - DNA, 508 bp, Setaria italica
  Peptide Sequence Number=SeqID_74393
gctccccatgcagctcccggccagagtcttgccgccagcaaccagagagaaggcagagatctgcaaaggtttctcaggcaggccaagcaagatcatcttgccctggggcttgagcagagcgaagtaagggtacatggacatgcttgccgaggccgtgtttataatgccatgcattgtgcccttcgcagccttcatctgactagcatcgctgctgacaacaaaggcatccgcaccaagcttctccagagcctcctccctcttctccggcgacgtgctgaccacggtcaccctcatcccaaacgccttcgcgaacttcaccgccacatgcccaagcccaccaaggccgatcacgccgatgtgcttgcccggctcgttcagcccgtggtacttcatgggggtgtacacggtaatccccgcgcagagcaggggcgcgcccttgtcgaggggcatgccgtcggggaaccggatgacgaagcgcttggttctacgtacgtacctaattgttcgt

SEQ ID NO: 8420 - DNA, 973 bp, Setaria italica
  Peptide Sequence Number=SeqID_74394
tttttttttttacgtacaaagaaagccgtgggaatgtccatccatttctctttgtgcacaagtacattaatccatagctcttacacggttggaattggatggcttagatggatttgtgaacaggagacctagagaaaatgcaaatggttccttccttcgagtgaaggctctgttgcacagggcaaacagtacagttgcatgttcaaaccacagcttcttttcccttattatcacactaacacaatatatcaacgcataacagtatgcttagtttccacccttggcacatttgcgaatcagagccgtaagtcgtcgctagctatagggctgaaaccggtgagctcgctagtcacgccgcgacgagggtgttgccgacgtcgatgacgaagcggtacctgacgtcgcccttgtcgaggcgctccagcgcatcgttcacgtcctcagcaccgaccacctcgatgtccgccgtcaactcgtgcttagcggcgaagtccatcatctcctgagtgtccttgatgctccccatgcagctcccggccagagtcttgccgccagcaaccagagagaaggcagagatctgcaaaggtttctcaggcaggccaagcaagatcatcttgccctggggcttgagcagagcgaagtaagggtacatggacatgcttgccgaggccgtgtttataatgccatgcattgtgcccttcgcagccttcatctgactagcatcgctgctgacaacaaaggcatccgcaccaagcttctccagagcctcctccctcttctccggcgacgtgctgaccacggtcaccctcatcccaaacgccttcgcgaacttcaccgccacatgcccaagcccaccaaggccgatcacgccgatgtgcttgcccggcttcgtttctagtcccgttggttactttctattgggggttgttactacggttaattccccgtcgttcttagttagttcttaggggtt

SEQ ID NO: 8421 - DNA, 168 bp, Setaria italica
  misc_feature (153)..(168): n is a, c, g, or t
  Peptide Sequence Number=SeqID_74395
ttgctgttaatttggtagtagaatatcggtaagctgtgtcttccttgatgctacctcccctctatgcaaaagatgctcctgctgtacaaatatcttcacttgattttcatgcaaattccatcgctcttctactaaaaaaaaaaaaaaaaaaannnnnnnnnnnnnnnn

SEQ ID NO: 8422 - DNA, 441 bp, Setaria italica
  Peptide Sequence Number=SeqID_74396
tgctcgcctactaccatccttgacggctccatctaccaggcgccacagctctgcaacgtcttcgcctcacgcatagtatatcctctcctccttttcctatggtgcaaggggattgtaggttctgcattttcctgactatcaatgctatgaaatgtgctgtaaaaactttctgttagttgagcctttcatcctgtggacattttcagtgggttgtaccaatgggattgtgtgttttagcccttatgagttttacttgaactgctcatgtaacattgcagagtagggctatgcatcatatatcgaaagcctttactgtggcatgctcgaagttggagaagattaggaatgtggaaactgagtctgatgcagcagcctctgaatcaaagacacaaaaggaagacaaatacgaacctagaaaaggaaacttaaaaacgaaaataa

SEQ ID NO: 8423 - DNA, 1195 bp, Setaria italica
  Peptide Sequence Number=SeqID_74397
cggggccgacggcgcgggcgcgctcccgccccgccgggcacggacatgacggggatctgcttccgcgaccagctgtggctcaacagctacccgctcgaccgcaacctcgtcttcgactacttcgcgctctcccccttctacgacatcacctgcaacaacgagtccctccgctcgcgacaaatccaccccctcgacatgtcccaactcacgaagatgaccgggatagagtacgtgctgagcgatgtgatggagccgcacctgttcgtgatccggaagcagaagcgggagagccccgagaaatcaagcgccatgctcgcctactacatccttgacggctccatctaccaggcgccacagctctgcaacgtcttcgcctcacgcataagtagggctatgcatcatatatcgaaagcctttactgtggcatgctcgaagttggagaagattaggaatgtggaaactgagtctgatgcagcagcctctgaatcaaagacacaaaaggaagcaatcgacctgaaggaacttaaacgaattgatcatatcctctcatccttgaaacggaagattggtgctgcccctccccctccaccttatcctgagggctatgtcccgccatcagcagaacaagagaaagcaccagatgatgtgctggcatcagaggcaccgcctcaacttgaccctatcattgatcaaggccctgcaaaaagccaagattccaatgagagatttgtagcttaaatgcagctgactcaagaactacctgtatgtttttaagtcgcagatgtggactttggattcagtcatgatggttttatttaaggccaaaagacagaactaaccacctggcatgatatttccatgggttaggctgcagattaggcaatggcatttgatccggtgttatctgctattgttgttgacttgtttccactgagatatttttgacttcatgaagtggctatagtttttcggttttacaagtgtgcaagactgggggactcatccattagtgattgtagacttaaaagtcatatgacctgatagccggtgaccatctgcgacttccattttctgctgctgtcatgacgttgttacagtaagttatttgactcccgaattttgtacttgcttttgttaagagttcaatcctgattggaggttgtacctgccttgaaagtaaaggataggacgaagg

SEQ ID NO: 8424 - DNA, 600 bp, Setaria italica
  Peptide Sequence Number=SeqID_74398
cctcttagtactatttcaatactaacagctttgtcttgctgtacaattcatagttttctttttctcttgtttgagtgtttcatctttcaactattgccagccttcattctgaagtcagaattcggcattagggactgctcttccatgcacttgcatggatgcccttttgggttgcagcatcaaattaagagaagaatgtttccctttttctaagagttgattcttttctaagagtgtcaatttcacttacatgcatgccttttagaatttgggaatgccatctgtaaatggacccagtatatacaaaatgggttgctgatgagtggcaatgatgatcagccctttttaaggacatgcctttgataaatcgaggcagctgtggcgtcaaatttgaccttgaacctctgtgttgcagcttatgcgatcattccttgtttgaccttgaacctctctctctgccctcctttcctggtggtgatggcaactaggcaagccgtggcccccttcacacatcatcatcaggccctttgctggtgacgagcatccaccaggtatgctcgccccttctcttcccttcctgttgtgctaaacagagcaccc

SEQ ID NO: 8425 - DNA, 349 bp, Setaria italica
  Peptide Sequence Number=SeqID_74399
gcgctggtggaaagaagacaccgggccgacggtccacaccttcatactccttgcctcagcgtagccggcgacgtactccggctccatctccaggaagctgttggtgacgatgccgtcggcctcgaccaacgcttgctcgacgtcgtccgcgaacatctcaaacccgggcgtcccacggaagaacccaggagcttgagccctcgacacctcgacccttttctccaacccgggcacgacgaccggctcgttgtcgtcggcgacgccgtcgtacgcgttgaacctctcgacgttgtgctggcacaggaggcagaaggcgcacatgctgaagaagctgagccgcgggacggcg

SEQ ID NO: 8426 - DNA, 464 bp, Setaria italica
  Peptide Sequence Number=SeqID_74400
cccatcctcatcactgagacatgcaatctccgctttcgccttctccaaaatctccctccactttgcatcgaggtccttttgcaaatccctcctcatttgctccacctctgccatgtgccgcctcttgctactctccatcctcgcaaaaacctccccaaacttctgaatcgactctgtgagagccatgaacccgttccgatccccttcaacagcacagactttctgcggttcaggttcacccaattccgctcccggccctgaaagccctggccttggctccccaccgccgcccagcaggcactccggagccttcattccccatcccaagcgcggcgatggctgcgtgtcacggcggcgcttcacgaccggaggctgggaacgggggcaggggcgggtgcggtggaggaggccgggggcgacgggcgcaggattgacaccatcttgtcatagtagacccatttcac

SEQ ID NO: 8427 - DNA, 739 bp, Setaria italica
  Peptide Sequence Number=SeqID_74401
gtctctagtttttttgttttttttgttttttttttttttgttaagcactacgagctatcaaatgatattatctggaaatcacacatcagtaagccaatagccatatacaataaccaaaagagcagtaatattttgcttagcattgctgaggaaagaaatgcaaaagagaattatacaacaatctgcactggttgttggcggatatattccctgttaattcattagctacatatcacttgggatctgagtactcacaatcctaatatcagcagttacagagttaatcataataacctgcctaccatgtggattcatctattgacatgaaaccccaattttgttcctcattttgtgaacttccacttccaggctatatgctacggagaagcatccatggcaccattgttttgcacttcaccaccaccatcctccaatctcttatcatcaccaccatcctcatcctcttccacatcactcccatccccatcctcatcactgagacatgcaatctccgctttcgccttctccaaaatctccctccactttgcatcgaggtccctttgcaaatccctcctcattagctccacctctgccatgtgccgcctcttgctactctccatcctcgcaaaacctccccaaacttctgaatcgactctgtgagagcctattgtaacccgttccgtattcccctttcttaacttagttcttactttagtttacttttttcttttgtttcttt

SEQ ID NO: 8428 - DNA, 378 bp, Setaria italica
  misc_feature (60)..(60): n is a, c, g, or t
  Peptide Sequence Number=SeqID_74402
atgctgcgcgcgaggagcgcgctcgagagcaggctctggctcgaggaggaggccgccgcnccgggcttcgcgctcgtcgtgcaggcgttgagggccccgccttgatggccaattcttcagtatctttttcatgtgtctggattttagttagaccttgtcaaggaattggtacaagaggttcatgctccatatgacggttctcggcacggcagccatggaatctggccaacttcatcgtggtttgtcgagcctgtattgccttgatttggtgttggagtttgacaaatgcagtgttgctttcaagttatgcaatgcatatagactgatgaatggtgatgcactgatccggcttgtagatgacaagtgtgatgagctgat

SEQ ID NO: 8429 - DNA, 655 bp, Setaria italica
  misc_feature (54)..(54): n is a, c, g, or t
  Peptide Sequence Number=SeqID_74403
acctggattattccgcagatctagaatatatgactcgacaccctcatcctccancctttttacggcattttccatttcagctgcagcagtctgagaaaaggcagctagtctaacatacccagtcttgcactcatggccatcgtccgacctctttttgcttttaactcaggaaaagattgttctctgctcccatacattggcaattggcgtacaatgtagcaggaatcaatggcaaagattggatttggggacctctctgcaagaaaaactagtcttatcgaagatctaccaaggcctaagcaacagagcttgcacgactgcgaagaggtccccctacaattagcgaactacggcgccggggcggttgcgccggcggcggcgatgagctggctggccccatcgacctcaggcgtagccgttgcggctgaggtgggatcaacgaaggtctcacggatcagccccacgcctccaccagcgtcttctgcacccgattcacctgccagcaacccaaacaaacagaatcgccataaaagaaaaatccttctttcttggcaacaacacgcagccgccgtccacgggcaccggaggaactcggaatcccgacccacctcgcgcgccttcgcgacggggaacgcgacggtgagcgactcggccc

SEQ ID NO: 8430 - DNA, 1788 bp, Setaria italica
  misc_feature (1)..(40): n is a, c, g, or t
  Peptide Sequence Number=SeqID_74404
nnnnnnnnnnnnnnnnnnnnnnnnnnnnnnnnnnnnnnnnaactagtcctaattaaaatattttcatgctataattctgaatttctggtcgtacatgctgagaattaacgaaacacgggcatttggcaaggtcaattcatacacattgccacgaaccgccgaatagatgatgcctaaaatcaagcatgcgaggatcagccagcctatatatacaccattacagcactttatcagtctatactatcagctatacaatctactactgttgaattcaacaatatacagagcctatgagctgaaccatctaagaagcagaaccctttgtttgctctattcccaacgcttgctctgccaccatgatacatgaatccatctccaaacttgtggcctcgctgttttctcttagttgaggcgctctcggcagagataggatatcagggctgcattgtatgtcaggctggatccctacttgatcgatttcatgcagtgctggagagagatacttcgcgaccgtgataaacagagcagagccatcatccaactcagtgacactctgaatttttcctttaccaaaggttctgtggccgactagaatagctcgcccattgtcatgtaaagcccctgccaagatttcgcttgcacttgcacttccttcattgacaagcactacaagagggtcatgtgttaatgaatgcccttggatcatatttatcggtagcacattcccctcacgatcaatagtgttgacaagagtttcatctccatccaaccaaatttgagccacatcgagaccagctttgaccaatccacctggattattccgcagatctagaatatatgactcgacaccctcatcctccatcctttttacggcattttccatttcagctgcagcagtctgagaaaaggcagctagtctaacatacccagtcttgcactcatggccatcgtccgacctatgagagataattgtagttgatagaggagaaagattgataatttcacgagatagctggacctctttttgcctaatcctgccacccctgtcattgtcagctccatctaatagtttcactttcactgttgttcctacacggcctctaagcctctgagctgcagcctctccatccaacccagaaacacttttcccgtctatctcaactagctcatcgccttcatgtatgcctgctcgatcggctgggcctccctgaatgcagtccataacaagcaagcgtccagagcttggctccctgtttatgaataccccaaccccttgcacattcccatcgcttcctatcctgaaactctgatactccgttgggctgatgatccttgtaaatgggtcgccgagcgtggaaagcattccactaatcttaccataggccgcgtcagctgatttcagtggaaacatctctaccattgtttgctgcagtttctgatcccaatcttgatggttgaaggtgggatcaacgaaggtctcacggatcagcccccacgcctccaccagcgtcttctgcacccgattcacctcgcgcgccttcgcgacggggaacgcgacggtgagcgactcggcccgggccggtgggggcgtcggcagcggggacatgtcaccggcgaacccggtcagcgacaccacggccgcggcggcaaaccccgccgccgcctgccccagcgcccgaccgccgtgctccgtcccaaggggctaccggaaccgaccaaccggacctattcaaaaaaagcaagattagtgcaaagaaaaaaaattagctgttgaaacttctgaagagc

SEQ ID NO: 8431 - DNA, 348 bp, Setaria italica
  Peptide Sequence Number=SeqID_74405
cggcggcggccggccacggcggcccgcggcagcggcagaggaagctcggaggagagaagacgacgacctcggcggtgcagggagccgccgcggccggggacggggacgtcgggaggtgcggcggcgccatgtccgacaccacgctctacctgctgctagaccggttctcgcccagctgagctggcggccgggtccccacgctggccgccgccgtccgcgcccgcgttccggcgaccccggccggtcgtgaccatctgtacaggcgaaataattgcccgcgatggttgttgtaaatgtttgtggcttgtgaattgtggcttgtggttgttcgcttccccccaaaaaaaa

SEQ ID NO: 8432 - DNA, 1608 bp, Setaria italica
  misc_feature (1509)..(1608): n is a, c, g, or t
  Peptide Sequence Number=SeqID_74406
gacggaactaccccaaacccaaataccccccaatccgcccccgcaccggcacggtcaccggctaccggcggcggcggcgaatccgcttcggggctcgcgcgatcggatcggcgcgggttcggcttcgcttgagcggcgcgggttcgtgcccgatcggagggcggtggcggctacagcggcggcgtctctggcgtaatctgccgcggcttcctcctggagaggagcggaatggacggggaagcgttccgggtgggcggccacttcggttcttcgcacccctctggagccatggaggatccgatgcagagccagaaccagttcctgtttaacgccaggcctgcgccgctgcagctgcagctgttcgggagccccgcggtccccgcggttggtccttctggttatattaattacactggaaacaaccacctttctgttatgagccaagcaaggaacacaaacattgatacagggaatgagaagcagctgaaacttcagatgtccttgaacaactatcatcaacaggatgctgatcagttggcacatgtcggcaatccaagtgctgtatcaaccggtctaaggctttcttatgaggatgatgagcacaactcgtctattacatctggcagtggtagcatgtcctcgttgcctaccacgttgcctcttcttgatgatcttatggctgaaattgataaagaaaacgaggagattagctattacttgagacttcaggctgaacagattggcaagcagatgaaggaggtgaaccagcggcggatgatttctttcctggcaaatcttgaacgggcggtaggaaagaagctgagggagaaggaactggaggcggaggccatgaacaggaagagcaaggaactgaatgagcagatcaggcaagtcgccctggaagtccagtcgtggcagtcagctgctctgcacaaccagtcggtcgccaacaacctgaagagcaggctgatgcaagtggtggcgcagagcaccaacctgaccagagaaggctccggcgacagcgaggaggacaacgcggcctccagccagaaccccaacgccggggcacccggatgcttcttccagtccagcctcctcgggggccggagcacgacggcaaccgtggggctgggggcctgcaggtggtgcggcgggaaagaggcgtcggtgctggtgatgccgtgccgccacctctgcctgtgcgcagactgtgagagggtctccgacgtgtgccctgtctgccggttccccaagagcggcagcgtcgagatcaacatgtcctgacaggaaatcctatgtacgtcaaagcgcactggacgagcaatgatatacacagtaactagatgtaagcgtgttccaacggtggtgtacatgttagcatgcttttttttcattttcttgagaagttctggacttagtccaggtgtaaggtcacctcacctgcttgggatctcagaaggtaaaaagggatcaggtttgcatcttgcaatccatatgcattccaaaacnnnnnnnnnnnnnnnnnnnnnnnnnnnnnnnnnnnnnnnnnnnnnnnnnnnnnnnnnnnnnnnnnnnnnnnnnnnnnnnnnnnnnnnnnnnnnnnnnnnn

SEQ ID NO: 8433 - DNA, 231 bp, Setaria italica
  Peptide Sequence Number=SeqID_74407
gttaagctgacataagacaagggataattggataagaagctaatgtctttaacaggcagactggctttctttcctccttttctgatagaaattggcggtcagatgctagaaggcatctggagttattccaccaatgattgcgctgtatgtgatgtcctctgattatctagttcagtaatgtgctgcatggagtagctctatcgcattgtgggaatggattggcttgctagt

SEQ ID NO: 8434 - DNA, 2079 bp, Setaria italica
  Peptide Sequence Number=SeqID_74408
ttgtcttcctttgtttgtctattctttactactattgttaaaaattgtacttaccttctctttcacggcctcggaatccatcaacagtgtttacatctatcacttcctttgattgatccccaaaggtcaaccgaaaattgtccctcaataatttcatctgctgcctgtacggtgatatcacagccacttcagaactagatttgagttctggatagcgcattgccagttgatgatataggagagttataaactccacttcatcctgattcacccaagaaccacttccaggtggctgggattcaacaccatcaacatcaaagaaacaaaatggtccgaagcaggtgtaggaatgccatgggcgtttcttgctgagaccctctccatcttgtagtaccccttcataaaattcttttgaagggaagatactaatctctggatgcatgcgatactgaattttaagcatttgcactggaaaaccagcaccttgaaatcttttgaacaagcttgttccatatcccaatttctgagcagttgatgaaatgactgttgcgggcaactgaactgggtcaccaacaagaaaaatttgtctgcacccatggaccaagggtataagagttgcaggttccactgcttgtgcagcttcatcaattataacaacatcaaaagcacggctcatcctgctgaaaattgatgatccactgaaactcagagtagaaaatacaatggccgcttcgtccagtattgaagctctaatccgatcatattcgccagcccctcgtctcccaccatctaatgtgcgatctacaccagaaagtttttgttgtatcaggtaatccatagaaactgctttaacagaatgatgtgccttcactccaatgcgcacaattttagggttgtaagtgttgttattttcatctcgaattcctgtgttaagaacacgtaacacaatctcatcgagtgctgagttggatggagcacagaccaacacatgggcccgatacttgcgactggaacttacaacttcaggtttcagttcatttccagtggggtaaaaaccatcatcaccatcgacaggcataatcaaatctctagggtttgcaccaagtaaccaaggagatgcttttacccagtgtgcatacttgccatcaatgtccagctctggtccatgcctttgaacatcaaatcctccttttgtcttcattcttgcaggagcagaatggagaacagcactgaggagtccaaggatagtttgagtctttccagttcctggaggaccctgaataagaacaaatgatctgcgcgaaagacctgcattgactgcctctagctgtgaatcattaagatttgctttgaggtgatccataagtggctgagggacattccacgcacgactttgatcatcaccatccttatgcttctcagcagctgaaagaatcgagtccttaaaaggaagagaagctacagaatgcatagctgtgaactcccgcattatagttgacaagctgcagaccttcaatatccacagggtgctgctctcagctgccaaaatggaagcaaaacgctgcagccttggagcgttcacagaaacaattacaagaattttagaatttcgcctgccagaaaagctctaagagaaatagttgcactaccaccacgctgttccaccaatgcaaaggcgtacgcagtaggggtcactccctcctcaaatttctccttggagagcagcactaggtcattctcccccacattctcccgaaaatcgttctccaccgccatggagaacttatggaacccctcggattccgcgcacaagcccaccgccaccctctgccagtcgagcccagcatcttcttcctcctcgtcgctgcgcccccggacgatctgcgccttgacctcctcgaagagcagcggctcgaagacgccgaggtagtcggccaccgacttgtacgtgtccttcacgcgctgcagccccttcgcctgcttgccgcccttggattcggcgacgaggcggaggtagtcccagctgaggacgatcttctggaagcggtccatggcggcggtggaggaggaggaggaggc

SEQ ID NO: 8435 - DNA, 1048 bp, Setaria italica
  Peptide Sequence Number=SeqID_74409
ctgaagagaaagaatgaaaactgaaaagggaaattaagcttttgttgctgtttgctttggtgtaacaaaatctctggaggctgctctagaagagtcaatttgttactctgagagaatagagtcagcacgtgctacagtagaccgactcagtgtgagtagtattgatgcaaatcttgccctcatgcaggagttactcttccctttaattcaagtaggcaagatcgtttactctctcagccagtgggaagatcctttgaaatcacttctattcttagcttttatgttgtatgttattcaaaggggtcttgtcagttacattgtgccctttgttttcttaacttttgctgttgtcattctttggcgtaagtatattggaggtggaaaactgttggaagtgcttgaagtaaaacctcctccaagtaaaaatgctgttgagcaaatcttgatattgcaggaggctatatccaagttagaagattctctacaggctgtaaatattgctctcctgaagttcagatctgtcttgtttgcctctgttcctaaggccactgaagtggttgcagcagtacttattgccgcagcaacatttcttgtcttcgtaccttctaggcatctgctacttatgttcgccctggagttgtacacgagggagatgccactaaggaaacagaacactgagaagttccgcaggcgaattagggagtggtgggctcgcattccagctgcacctgtgcagatgatcagacctaacgaaaccaagaaaaagaggtgatcatgggctctcgaaagggaaaaggagtccgctgaattcccattcccggttcaacctgaccagctaacctgtccagattttaaccctgattgctcgatatcatcattgtagtgaaactgctacagattagcgcagataaccaatgtaaggcattgctatggatgtacaattgtcaaaagctttttcaaaatcccccccttgattgtaaggcattatttgaagttaggatgataaggttcttgagctcctgattaattggttccatgctgctcttct

SEQ ID NO: 8436 - DNA, 477 bp, Setaria italica
  Peptide Sequence Number=SeqID_74410
cccccgcccagctgttagagaaggaatatctttgctgcttgcgctcatagatacctacaatagcatgatggttcctgcctctggaaaaagaccaaactttgatcctgttatttctgcattactggatcctataattcaggtgagctttctgtgtcaactgtcaggtgtgccatataaattgccactatagcattatgatgaaactgagttgccaaaatacaatccagaacattgcaaaaactgtgacaacttttgatggtattttggcaaccacactggcaatgtaaatggtaatggaggcaattttgccgtgtcttatttattgtcactatagcataatgtcagatataatgtctttctaatatatgaagggttttttatcacatataaaacattgttattgtataacaaattttacccatggtacagctttacggagttattctaaacagtagcttctgatagcaacatatcact

SEQ ID NO: 8437 - DNA, 2213 bp, Setaria italica
  misc_feature (2156)..(2213): n is a, c, g, or t
  Peptide Sequence Number=SeqID_74411
actacctcgatcgcgtcgagggggaggtgcacgcgctgaatgactcctggaagaagatcgaggaagcattgaacagttgcagtgcaagcaccggggatatcattagtacaacggagaggatgcaacaggaacttgaagttatcactcagcggcaggaaattgtgtcatgtttcctgcgggattaccagctatcaaatgaagagataaatgcacttcgcgaggaagacatagatgagaaattcttcaaagcattactgcatgttcaggaaatacactcaaactgcaaggtcctgttgcgaacacaccaccagcgtgctggtttggagcttatggatatgatgtctgtgtaccaagagggtgcttatgaaagattatgcaggtgggttcaagctgagtgtaaaaagttaggtgataccgacaatcctgaagtaagcgaacttttgaaaaaggctgttcgctgcctgaaggaaagacctgttcttttcaagtattgtgcagaggaggtggccaacatgagacaccatgccttgttcaggcggtttataagtgctcttactagaggtggacctggagggctcccaagaccaatagaagtgcatgcccatgatcctcttcgttatgtaggcgaaatgctgggttggctacatcaggccctggcatcagaaagagagctcatagttgtcttgcttgaccctgatgcaatgaccgacagtggtccagcttctcgacgtcagtctgggagagatggtgattcctccagaggagagtctgatgtaacttttgtgcttgatagaatatttgaaggggcatgtcggccatttaaagttcgagttgagcaagttttgcagtcacaaccaagcctgatagtttcttttaaacttagcaataccttggaattctacggctacacgatagcagaactgctgggcgaagacactgcactgtgcaatacaatatggtctcttagagatgcagcacagcagacattcttcagtatcctgaagagtcgaggagagaagttattgcgatatcctccacttgttgcagtcgacctctctcccccgccagctgttagagaaggaatatctttgctgcttgcgctcatagatacctacaatagcatgatggttcctgcctctggaaaaagaccaaactttgatcctgttatttctgcattactggatcctataattcagatgtgtgagcaagctgcagaggcacaaaaatcaaaaggttcacttgcacggcgtggtagaacgagctctgatcctagtggaaatagcagagattcgatatcagttgatgctattctgtctaagaatttatctacatcggttctgagcgctgagtcttcatccaaagtctacctcgtcaactgcttatcagctattcaggaaccattgaagggccaggaggttgctacaagctatgtaaacaatctgagttctatgattgaagcgcatgtacgagcccttgtagataaagaagttgacagcattcttaggaaatgtggactgtcaaataagatgccatacataaaggactacggcaacagtgatgatgccaaggctctggcagatgttgttgagacatcaccacaaatgcttctggaatgcttgaaggcattctatggcatcgtgactggaacagaaggttccttgcctgaattcgagcaactgcaggttccaaggttacgttcagatgcctgctatggtttggcaagagctctagcagaaactcatgagctcatttataaggcggtgatggatccaaagaacaactatcctgacccaaggtcattggctaaacactcgcctgagcagataagaactatactggaaatatgaggtctatgcgcatgcctacactgttaattagaggggaaccatgcaaaggaaacaatgtgatgtaaatctccaactacaagctgcgagttcaattgattgccaagatattgaagtggtgactcttttactgaaatcttgtatcatagtctcttgtattcctttttgtgttataaaaccacatgaatcattattttctgcagtgatgtactttttatgaacggcttgaccctttcgatgtacggcttgaccgattgatgataccagtggtataccagaagcaactgagcaggcatgttatacttcaaaacnnnnnnnnnnnnnnnnnnnnnnnnnnnnnnnnnnnnnnnnnnnnnnnnnnnnnnnnnn

SEQ ID NO: 8438 - DNA, 286 bp, Setaria italica
  Peptide Sequence Number=SeqID_74412
gtgcagctcaaccctgttaacggagatgctggctaccagcgactggtaaacgctcttgttgagggtggtggaggagatgagggactccccgctcaggtacgccagctccccgtccaccctctccctgatcctctcgtcgatttgttgcgccgtcaggacgaacggatgatccgatgccatgacccatccccaggtgtcagcgaacgatggcacatgagcagtgtatgctttcacatacttgaagacgtgcctgagggtgttgtagatggaggagaagaccctccct

SEQ ID NO: 8439 - DNA, 277 bp, Setaria italica
  misc_feature (276)..(276): n is a, c, g, or t
  Peptide Sequence Number=SeqID_74413
ttaaaaaaaaaccttacttcccgttttgttcgtgcggcgacgaggcgaggagcggaggagtcgcgaggagtcgaggaggatccgggataaggcaagatgaacaggaagccaggagactgggactgcagggcgtgccagcacctcaacttcagccggcgggacctatgccagcgctgcggtgagccccgtggagctgctgaccgtggcagtggtggtggaggtgactacgccaacttcggtggccgcggtggctcctccttcggcggtggctttggng

SEQ ID NO: 8440 - DNA, 388 bp, Setaria italica
  Peptide Sequence Number=SeqID_74414
ccccatgatttggtcttgtgacttctgcttttcactaatgcatatgcacctctgaatataacgctggcaggtctggatgcaacgagcacaacttcgctagcaggatggaatgtttcaggtgcaacgcaccacgggactccggtagcgctgccatgacctacgataattataacttgtaaatgatcaaatctttcctccttccgtgcccgatcttcacgatctgacctccgcgtatgatacttttgcaggcactgaggtgtaggagctgacggaccccccatgaagtctgcagcgacgtcgagcagaagcagcagcaagaagaagagtcttcaatcaacatcataagagagtagtagatttgcaaaaggcatccccgatgctctattac

SEQ ID NO: 8441 - DNA, 649 bp, Setaria italica
  Peptide Sequence Number=SeqID_74415
tgctggctctgatgtccgccctggtgactggttatgcaactgcggcgcgcacaactttgccagccgctccaactgcttcaagtgctctgccttcaaggaggaggctgctgtcaacagtggtgctggtggctttgatggtgacatgtcgcgctcacgctacagcttcggtggcggcgctgcccgcactaaccgccctggttggaagtctggagactggatctgcaccaggtctggatgcaacgagcacaacttcgctagcaggatggaatgtttcaggtgcaacgcaccacgggactccggcactgaggtgtaggagctgacggacccccatgaagtctgcagcgacgtcgagcagaagcagcagcaagaagaagagtcttcaatcaacatcataagagagtagtagatttgcaaaaggcatccccgatgctctattacttagttttgttccacccctaccgttccttttagatttggttcccatcccattcccatttgggacagtaccccagacctatgtttgctgttttattcccccgttatttcccgcatgtttgcgcttggatcgagtcatgtcatgtaaccccaaaacgcttgcttcatcacaagtattaactagtactgttgcttttctttaaaaaaaaaaaaa

SEQ ID NO: 8442 - DNA, 564 bp, Setaria italica
  misc_feature (562)..(562): n is a, c, g, or t
  Peptide Sequence Number=SeqID_74416
ccgccgccatcgtcgcgctggcgacgctcgccgtcgccctcctcgactactccctcctgctcctcttcctcgacgtgctggccacctgggcgctcgccgccgccgtctcgcccgtgtacacgctcgcgctccgctggtggccgcggagcgccgtgggcggggtcgctgccggcgtcgcctacgtgctgctgctgggcgccgtggaggtgttctcgaccgccgccgtcacggcatactacttcgagtgcagggagagcgtggaggaagaggaggaggtcagggccggcctccggtacatcaagctgcccaacggagacgaagcaaacatctgaccaaaatctaccaccttttttctcttcttgtgaaaaattcttgggacgacatgtattgtttgataccaaggctattgattttttgtgtaattgttgtggcaaggtagtagagcatagcatagaatgtaatgtaagttgataaattataacttgcattatcccaatgtcatttacataatctaaatccagaagattgaaacgaatacgagcaaaaaaaaaaaaaactaaanga

SEQ ID NO: 8443 - DNA, 411 bp, Setaria italica
  Peptide Sequence Number=SeqID_74417
agaagcggcggaggaggcaggaggaggtgaagaagcgcggggagcgggaggagaggcgacggatggaggatgcgcggaggcgtctcggtatcgcggtccctgatgcttccagcggtgatggaggcagtggtgcgcagagaaggcccgtgtatgagtcgaagaagtctaaatcgcagcctaagcgtcatgagaatgtccaatctgaagccaatttgggagaaactcaggtatttgagcagcaattggaagatttgcagagcaatgggtccctggaggatactgatggtgtgatggttgatgctctggaattgggggaggaacaaatttccaagccatcatcggaagagagcaatggaatcgacgatgatgatgcttgggagaacaagagcttttgtattgtaattttgtact

SEQ ID NO: 8444 - DNA, 449 bp, Setaria italica
  Peptide Sequence Number=SeqID_74418
ggagagaaatacttgcgtaccatatggcaagtctgaatgtaaattttgttgcggtctcgtgacccaacagatactggtacaatcagtcgtgtaaactgacaagggcgccgcggcgtcacgcgtttcagccttggtgccttcatcgacgccactatttatcccgtgcgcgtaccacagcctgacagccgggtgccacggccggaccccggccgctctagcagacgcccttggtcttcccgccggcgagcgacacgctgcgttgcaccgccacgacggactcccgcttcacgaccctggccgtcgcctcctcgccggagccctttgccgcgggccccagctcgatggtgaccctcatcctcggcacgggcccgcccttggcctcgtcgtcgagctcctccagcgccatccgcacgtgggacaggaaccgctccgccagggggcgcccgaag

SEQ ID NO: 8445 - DNA, 176 bp, Setaria italica
  Peptide Sequence Number=SeqID_74419
ttaacattccaacttttgaagttttagggagcccatggttttaccgggggctcctatgtggcttctggaagctagtggcttctggaagctagataagcttcatagctttaaagcccagcaggcccaatttgaaatctaaataaatatatcaacataggagtattagattcaacaaa

SEQ ID NO: 8446 - DNA, 415 bp, Setaria italica
  Peptide Sequence Number=SeqID_74420
ttttttttttttttttttacctttaacaaattcatttgatttagtggcttgagcagcttttggatgtcaacctgaattcatatatgtacttaatgtcgaaccatacaaatcgaatttaccaccaatctcaaatttctggacaaaagcaacctgatcaacggaaatgttagagcggaatttacaactgtttacatgatctgaacctacaacatctcacaaccaatcatcacagctctgctccgaagcctagagcacagacaaatccaacagatctacgaaagaattgggttaccactctagccgaatcctccgaaaattacgacgaaatcgtcacacgaccattcctcagcgctcgacagcacagcaagaaggcaccaaccagcaaaaatcggggaaaagaatgagcagccttaca

SEQ ID NO: 8447 - DNA, 302 bp, Setaria italica
  Peptide Sequence Number=SeqID_74421
attcacaccagcgaaaagcccaggcggctctcgggcgatcggccgggtggcgagatgacggacagccggcggccggacgggagctacgggccggagtacggccctttgccccctgagcatgaatacgccatgtaccgtcacttgtcatccaggaggagggccccttggcctctgcaacatggggatggggattaccctgggaggatattggagcagagattgagaagagaaccttttgggctttccaggtacagttcagtagactgttatttctctcttcttcatttcagcttcaattcctt

SEQ ID NO: 8448 - DNA, 207 bp, Setaria italica
  Peptide Sequence Number=SeqID_74422
catccttcaagtgatatcactctagaaggtagctgcacagcagatggtaatgggggcttcccagagccggtaagcatccacgggtgctgcttcagggcacccaacatgtcgggatgctttggagaaagatcagataacagactcacggtgctgctccacaccctcatgtcaggaacatatccaggcaacagtttggaaagtagtgga

SEQ ID NO: 8449 - DNA, 517 bp, Setaria italica
  Peptide Sequence Number=SeqID_74423
ggggtaggtcgccatgatgggcggaggtggcgccatggccgcggcggcagcggcgggggcggccgggattatgggggggaggtggggatacggggaggcggtgagcttctgcacgacgtcgcggaagtcggacttgtcgatgttgtagaccgggggctggggaggcgggtggtcggcggggatggacgacgcctgcgccggtggcggcggtgggagcggaggagacgggcggggaggctgcggcggcggcggggaaggcgccctcatcgaggaagcggaagcggatgcgggagcggaagaggcggaggtggaggacaactgcttggagatcttgtaggaggccttgttgagggacttgagcgaggatgcggcggtggatgccgaggacggtggcggcggctgcgggaggttgggcttgtccatgaccatggtggattggcggaagagagcgggggctcggcgaggaggggagtggggggagattgggatttggggagtgaggaaggcagtagggagg

SEQ ID NO: 8450 - DNA, 1124 bp, Setaria italica
  Peptide Sequence Number=SeqID_74424
ggcggcactacgaggcgcttgtggaggacgtggccgccatcgaggccggccgcgtcccgctcccgagctacgccggcgaggacccgtccgccgcgacgcccgacagcgccgctggtgccgcgtccgcgcccaaggacggcggcggaggaggaggaggcgggcaccggcgcgaggagcggaagagcggcgtcgacgtggggaagagctgctccaaggcggagcaggagcggcgcaagggcatcccgtggacggaggaagagcacaggttgttcttgctgggtctggataagttcggcaagggcgactggcggagcatctcgcgcaacttcgtcatctcgcggacgccgacgcaggtggcgagccacgcgcagaagtacttcatccgcctcaactccatgaaccgcgatcggcgccgctccagcatccacgacatcaccagcgtcaccgcgggggaggtcgcggcggccggcgccccgatcaccggcgggcccgccgccgcgggagcgatgccgatgggacccgcgggcatgaagcaccaccacccgggtccgccgatgggcatgtacgggcacgcgcccatgggccaccccgtcgccgggcacatggtggcgcccgccgccgtcggcacgcccgtcatgttcccgccgggccactcgccctacgtcgtgccggtgggctacccggcgccaccggccaagatgcaccagtgatcgcttacctttccggcgtgatctcgatgctcttcttcttgctcatgcatttgcacatctgcaaagctgcatttctttgcttgttttctttctttgatttttgatgatcttgtgtagccaccgtccatccttccctgatctcccactgatgtaacatagatggcttgagtgagtgcagggcaggcaggcgaataataagtatctgctgactgttgcaggagctacttataatcacacccagggaggctccagaaacgtgtaattagcagcagcctcccagggtgcattgatcgatcatacgtgcagggttgcaactggggactgatcgaatccattttgcggatgtaaattgattgcctatatccattttgtgcagaaagatacattgatcgccatggtacatttgccccctca

SEQ ID NO: 8451 - DNA, 441 bp, Setaria italica
  Peptide Sequence Number=SeqID_74425
gtgcccaccagttgtacatgtgaccaatcagatgtggagttttaaaccatagaagagttctgtataataggatgcatttcaatgatgatggtggcatcctaaaagaccgacttcagttaattcttagaactaccaagcatagtaaagtttcttaagattaataaatttctgtgatgactgaacttatattgtgctcccttttttcctagctcaagctttccgagttgcatgaaccatatgtgttaatatcatatatcttacagaagttagagcttagtcaatgttagtgagcttggataggaggctgcctctgcctctgcctatgtttactgcattcaacatatatggtggtaatctgatgcaatttgcagcttcagagactagccaagccatacttcaagaaccataacaactaaattgttgaacattccttaaactacc

SEQ ID NO: 8452 - DNA, 773 bp, Setaria italica
  Peptide Sequence Number=SeqID_74426
aggactaccatttaatgtgttatttgtaaccctgttacctttgtacatttgtaatcacttttgtgagatggctgctgattaccataccgcaacaccacgagcacatgtgtcggactttacaaatgagcatgtgcctttgtaaatatcttgctctttcagtgtttgctgctaattttaattgccatgccctatttctgacatggagcagctgagatttgttcagacatagccccttagctcctcagcagatgagggtgataatgtcctgtctaattggttctggagactcattacatatgcctatattgggaagaaactactacagcttcagagactagccaagccatacttcaagaaccataacaactaaattgttgaacattcctaaactaccaatgacaccacagagtggtagagggactattgatgatgaggaagttggaaggtgcacatattactgttcttcgcaaaaggttattcaatggttaatgctgccaccaacgccaccacggtgcccgtggaatggaaggctgcgtcctgctctctcgcatcacctttcaggagtatgaattgaagctgaagcctatggttgctggtgtgtagggtgctagcggctcagagatcaccagccagtagcatttcttggtgttaatttgaacactggtggacaacaatccaaatgatattgccatgtacataaatttcagtgatgttgctgatatcatatttcgttatcgtagcatgtgttatttgagatggatattattgcttca

SEQ ID NO: 8453 - DNA, 1274 bp, Setaria italica
  Peptide Sequence Number=SeqID_74427
cgcgcaggagggtccggtcgtggtggcgccgccgcaggctgatgaggaggaggtccatgggaatggcgctgctgcggttgaaacctcgtctccaccagctgtctctggtaagacggtgcgttgtcagatttgtgctggagaagcagtgcgcggtcgaccagagcgtctacctcgtcggcgacgacccggcgctcggcctttgggatccggcgaacgcgattcctctggagtgcgcggaaagccacggctggatcttagagaaagatttaccggccaacaagctgattgagttcaagttcttgctgcgagattcctcgggaaagttgcactggcagaatggacctaataggatctttcagacaggtgaagccgcaaacactttggtcgtctatgaagattggtgtgatgtgaagaatcagagaatagcagaagaggaggtagtcgcatctgttgtgatggaggaagcggttgtttcagatgacagtggaagcagacaggatactgttatagaagatgagttgcaaatggatgataaccaggaggtcaaagaagatgaacccgctgttgacgaggaggaagagaagtcagccgttaatgtatctgttcaagtggatacgctgaagataaacgaaggccaaccacatgagtcaatgctgcagaaagaactggaaattatagacgaacttcatgaaacagtagacatggaggacgtgagtgctttgtgtgctgatgagagttctgctgaaaaaactgaagaagataatatcttgcctgagcatggtgttccagtcgagaatgggttggccagtgcttatgaacatgatttgctttggggttggaaggtcgtgcagcagctgctgatgaagctgggcatcagaatggatactacatgaaggaagcataatccagtgctatctacctatgcgcgtgctgcagtttggatgaaacggtgttgctttcaaagatcgtctgttttcacccccagaggctggcgactgcctttatttcaggaccataaccgtgaagtctagcactctggcagctgtcagtattgtatgtgtatattccttttccagaaatgctgttgcttagcagaaaccagttaccaataatcggcccgtcagttttagtgttttgctgtcgttggtggtcgaaacttatcctatttcatatcgcctgaagtcttgaagatgtacgctggtccgcagaagcgcagatgttgtctgcgcgttgtatatacctgtggtgagagatgtctttgagaaaagtggata

SEQ ID NO: 8454 - DNA, 141 bp, Setaria italica
  Peptide Sequence Number=SeqID_74428
aacgagtaccgcctcccgcccgaccacaccgaccgctaccaaaagaccgagatctccctctgccgcgtgtacaagcgcaccggcatcgacgacggccatggccatccctcggcgcgctcgacgccctcccgccgcgccacg

SEQ ID NO: 8455 - DNA, 457 bp, Setaria italica
  Peptide Sequence Number=SeqID_74429
tcgaagggataagtttttcttgctaggatcactgagctgccatttgcaattggataaaaggcggggcttgatacctctgctatgtggacgaaaataaggaccatcaggttcgaagtggagaggcgggaagctgaaggtacacacagatgggaaggaagagactgaagcgcgccaagaacggcaggtgccaataaaagcaaggaagtcatggaatgagttaatgagaataatgatttcatgaagcaggctgtccaggagatctgcacaaacatgaggtccagatgaagtcgatgaggtagagccagaggcgtggcaggcgttcttagaaggcctctcgacaatggtaacttctctggtgctgtgagtggcatctgccagcggcgagaactgggcgccctgctgcggcgacggctcccttccgccacggcggcggcgaattccggccatgggggggcgc

SEQ ID NO: 8456 - DNA, 2102 bp, Setaria italica
  Peptide Sequence Number=SeqID_74430
ccttggtctagttcttcttttagttttttttttttttttttttttttttaattgagctgtaccaccaaccaaattcatatttctctgtacaagaaacgtttacaaaatgttaagatcatcagctaacatcctaaaataagcaactgagtgcttatgatgcagcattccttacttattacaaaatttccaggctgtaagaaacatttgcagcactttatttcaatcaaagtacaaaagaaaaagggcaatattagctcaagctgacagggaaacagccatttctatcatacaccttcgctggttcgctaacatggatttataagaaactgctagccatactcgaccgtgtatttccaaaattccattcggtttctgtcctgcaacaggaatccttcctctgagaatgcctcctatgtaaaatgatatcactgcttagttgcaacctcatctttagattctacctgatctgcagaacttcttcgaatttttctagttggattcctcattgtgacaaattcctctgcagacgttgggtgaatgccaatagtggcatcaaaatcttgctttgtcaagccagccttaacagcaattgcgattccctgaattatctcaggtgcgtcatcaccacacatgtgcactcctacaactttgtctgttgtagcacaaacaataatcttcattaatacacgatcaggtagtccagatagagtggccttgagaggcctgaagttggcaacaaagacatcaacatctccatactcttcaatagcctgctcctcactaagaccaacttgtccaattggtggttgggagaacacagcagaaggtacagctctgtaatctggtttggtaggttcattgccaaagacagttttcacaaatgcccctccctccatcagtgcaactggggtcaggttgatcctattggtaacgtctcccacggcccaaattgaatcaactgaggtacgagaatactcatcaaccactactgcaccattcttatccatttcgacccccacctcttctagtccaaggttctttgtatttggcctgcgacctgttgcaaacattacatgtgagaacccaccaaaagtctctttattggtcttcagagataacaggccatcatttgatttagttacagcttgaggggtctgttcagtatgaaatgtgatgccccttaatgacatctgttcagctacaaaatctctaacctcttcatcaaaccctcttaaaactttcttctgccgaataaacacatggacctcactttttaagccattgaaaatgccagcaaactccaaagcgatatacccgcctcccactattgcaattttctcaggttttgagggcaaatccagagcagcatccgaatctatagcatactctataccagggatatctggcatcgatggtcggccaccaacaccaattagtatgttcttagcagtgtagagcttaccattcacgctaacagtatgaggatcaactatctttccacgtccttcaattagagtgactccagcattgttcaaaatattcttgtaaatacaaactaggcgctgcagctctgtatttttgttggctatgagagtgttccagtcatgcttcggatcagtctcatatgtccatccaaagccatgagactcttcgaactcatgagagtacttggatccatacaccaacagtttctttggaacacatccacgaagcacacatgtgccgccgaggccgccgagctcatccgtggcgacggtggcgaagggcatctcgcagatggcgacgcgcatgccgtagagcgtggaggcgaagcgcgacgcccgcacgccgccgctcccggcgccgatggtgaagaggtcgtagtcgtactcgccctcggatgaggcgccgttgggggacgccgcggcagacgccgagacgtggcggcggcaggggcgggagagcctcgggagtgcggcgagggaggggaggcggcggaacccgcggcggagttggagggccccgcgcgaggagaaggagcgggttagggtctggagcgtggaggagcaggagaaggggagcgtcgcgtgcgccgccatggctggctcaccgcagcggcagcg

SEQ ID NO: 8457 - DNA, 398 bp, Setaria italica
  Peptide Sequence Number=SeqID_74431
cttgcaacgtgcaacaaaccctggcaggaggagcactgcacaacggaatccgacgctaagaaacggtggaggaggaggaggatggcggcggccggtgcggctcgccccctggccgcgggggagcggcggcccgcgcccccagcactcgagcggcgcccgtcgcccttcccagtgatctggaggggtctcgaaatcgctcgccagcgccgtcttcacttgctacaccatcaccacagccatggcatctcgctgggcaccacagcgatgccgtgccccctcttcgatttcttcttctaagcaggatacagtgttgctgccgctcaaacaagcgtgggcgaaggaggagcagtgtccactaatgacacagagcggaaaggcagcgtggcgtcagatagcga

SEQ ID NO: 8458 - DNA, 2345 bp, Setaria italica
  misc_feature (21)..(21): n is a, c, g, or t
  Peptide Sequence Number=SeqID_74432
ccatcacagcctgcatctcancgccacttattcaaccccaatgtcagcctcttgtagcataccgacatcatttgctccatctccaatagctagagtagttttacctgtccaattttaaccaacctggtgaccagtgctttctgttttggagaaatccgacaacataacacagatgcacagttgactgctagatccagaaatgagttcttgaggctgctcgtgagagcatgtgtcagagcattgccgtcaataataagagcaaataaagttgaggttcctctcatgaaaacctttgttctagcatctagtaattttctatcaatttcttcatatggggccattctgtttccttctccactacatccctctgaagcacttgtacttgagttatccagcgtgataaaaatttcctccatctctttcctcaataagttacatgagtaacctatgttgacagctgtctccagcttgtctccagttaaaatccagatcttaattccagcttgtgcaagtttgtgaatacactcaggaaccccactttgcaatctgtcctccactgcagtagcacctaagagaaccaaatccttctcgatatcttctgatgccttctccacagcttcatcatgatcggtatgtacagaattcttggcagctgagtacttctgattccatagaacatattgctcctcagtaagttcacggtatgcaagtactagggtccggagacctgcctcagaatactcattgatgtgacacttcgttttgctcagacaagcttttccattatctttggagagcctttcgaatattacactgtcagctcctttgcagaacaggaataaccgacccacttctgtcctcacaataacagacatacgcttacgagcactgctgaactctaagatgttgagtagtttataggttctatccacctttccaccaaagacaggatcatattcatgcactgatatggttgtctgtgtcctgtgataaaattcaaaaccaaactctctagcagctgtaacaagagctccttcatcaggtgactctgcttcataaggcataccagcagaatttctatctgccacaggaattgcagtatgacaaacagctaatactcggaaaaacatctctatagcatccctagaacattctttggcccatcttccattcatcaaacggccatcagtgaagttgaatcccttgactaatctcttgaattcagtagtgttcttgtgcccataattggcagtagtttcagctatttctccataagacgtctccatttctgtaggactattcccataagcaaccccagcaatagaacatttcaagaactccatcgagttgcatgttaatgttcctgttttgtcagacaaaatagtatgaacttgaccaagttcttcattcaaattggaagtgcgagctcttgcaggtttatcagactctgcacaatacatattctggtcttgatttatgaatgtgctctgtaacaccttgacaatttctatcgatatatacaatgaaataggcaccaaggtcacatacagcataaggcttgtgagaaaatggcaaaaggctgcaaatgatgctctgtttggatcaaagaatatatttgcttgatctggtctgaggtaccatgcatagtttcctggacttatctcatgctttgttttcatcccaaacacaattgacccgaacgttgcaatagcaaagagaatagcaaaaagcagatatattattttatccattcttcgttcaactgagcttctctttgatggtggctccattgcattttgcatcacctttgtatcatgccctgtgaatattacagtgccatatatatagcttgtattgcgaagttttgagtcccttagaaggatctgttgtggagacagaggatattgttgttcattgtagtacaacgtccctaagaaagaatacagtttctcatttggatcctcgcatcgaatgaaagctttgaagctatggaaaaactgctcatcattcaagcccatagtcacatctagtgcctgttttcgcttcaagtttgtctctccatcaagattcattgtctcaacatagcatattccatcgtcgtagctagacgagagaaaaagaagatctgcagggaagaactcatcctttttaactttaactatatcaccaactcgaagcttcttccattctgtctcatgaaatgactgggtcccatcatacacctcaaccttcctattgttcacttctatgtcctgctgcttccgcctccagtcctcgacggcctccttggccatggctgcgctgacgacgacgaggagcgggagcaggacggagacggcgcggta

SEQ ID NO: 8459 - DNA, 655 bp, Setaria italica
  Peptide Sequence Number=SeqID_74433
ccttttatatatgaatgagcatggcatcatgcctacttggcggtacgaacctgtcttacggtaaccttgaacccgcatcaatctccctttcgtcaacaatgctcatcctaataataaatcatagattgctacaaaagaatggttaaaagacctactaacacaacccacaaaattgacggaatacaacaatccttatttacattttccaacccacaattgactatttacagtatgcattaagccttgaaaaagtgtgtgcttgacgtggtgataccgagtgtatcctccgtgatctatcatatgccacccttcgctttcttgtataagggatgaggcgatgtcgctgaactcaatgttgacgcaagctgtagcttggtttgtccgtgaagcacctagaatacagcatttgagaatcaatgaggtggtgttagaaaacattacagaagcaatcgctaccgcagttgcaagttcaaaacttgtatttgtcccagaaaactatggccaggaaaatatattaacccctattttcttcttatcttcttcttttccccaatgagcgggagtgcaaggtattttctttactagcaaggtctatgcgcactgggccttcagtttgatttgctacaaaaataaagctacaattaacaaatcaagc

SEQ ID NO: 8460 - DNA, 1243 bp, Setaria italica
  Peptide Sequence Number=SeqID_74434
ctcttttttagtttttttttttttttttttaattaaactggtaccttttatatatgaatgagcatggcatcatgcctacttggcggtacgaacctgtcttacggtaaccttgaacccgcatcaatctccctttcgtcaacaatgctcatcctaataataaatcatagattgctacaaaagaatggttaaaagacctactaacccaacccacaaaattgacggaatacaacaatccttatttacattttccaacccacaattgactatttacagtatgcattaagccttgaaaaagtgtgtgcttgacgtggtgataccgagtgtatcctccgtgatctatcatatgccacccttcgctttcttgtataagggatgaggcgatgtcgctgaactcaatgttgacgcaagctgtagcttggtttgtccgtgaagcaccagataaaatgcagttcagtcgaatctggttttagtacgccgtagctccactgctttgcaggacctgctgaccttcaagtgggtcttttggcagatcttgaactagtgttaaggcaagtaccagtgttgcccagacaggtcgatcctgtgccaggtgctcggaatgcctgggtgtgctgcctggtgcaggcaacttttccggggttcaatccaaacaggccattcatctcttatgaagttggatctgtttcaccagtctctaagaaatgggcaacagcagagtagagctgctgttcttcaaatggctttgacacatatccatccattccacattccatacatttttcaaaggtcgcttggattacatctgctgtcatggctaaaatcgggacatgccaatgcggcttatttccataattatcagctgatacttcacccatctggatcacatcattgatttttttctctacggatcggattaatcttgtagcctcaaacccgtccatctcaggcatctgaacatccatgaaacaagcatcaaatgtgtgaggtggcttgagcatatcaattgcatcatttccactgtccacacatgtaactatagctccatatttcttcaaagaaccagctgcaactttacgattgactgcattatcatccacaaccagaatctgttttccagttagtacactttgaagaaccgaagactgatctctattgtgttgccttgtaaccccaatccctaaggttttgcgaaaactagcagcgatagtactaaggcggtagggttcctatgcaatcaccatat

SEQ ID NO: 8461 - DNA, 2550 bp, Setaria italica
  Peptide Sequence Number=SeqID_74435
actagaccctactttaagttacctacaaaccaaaatagacaacttagaattatcatccacaaccagaatctgttttccagttagtacactttgaagaaccgaagactgatctctattgtgttgccttgtaaccccaatccctaaggttttgcgaaaactagcagcgatagtactaaggcggaggggtttccttatgcaatcaccatatcctgtcaacctcaaataatcagactcggcagggcttattgaggttcccaaaagaaaaatctttggcatgggttcagaagacttgtgtgtgccctttagttgaagatctacaaggcgacgataaaatgcgaaacctgaacccttaccccaagcttctgtatcaacaaggaccatgttcggattgcttttgcttgaggtgcaggcttccagcaatgctgaaaatgcagattcagttgtggcaacaagattgcaatgtattccaagtctctgcagatggtacatagtaatctctgcacgtgcattccttccatcaataataagagccctcattccttgaaagtctgatggagtaggttcgaaataatatcttttaatatcaccaggaccttttctgttctccttgaaaatggcagtaaatgaaaatgtactaccaactcctgatttactcgtaaaccctatttctccgcccatcaattcaaccaaacgttttgtaatactcaagccaattccagttccaccatatgtacgtgaggtggaactgtcagcttgcatgaaaggtgtaaaaatacgcagttgagcattctttgttattcctatgccagtgtcttcaactctgacaactaagttaattgtatctgtttcaccagttgaagttttgaacatcctaaaattctccaatgacttccagctatctgctacttcaagcccacttagtgtgttccatagcttcatgttgtcaggatcatccagaacttctctgttctgagcagaaacgtcataaaaaatgtttcctgccctctttagttcctcaaccaaatgcacttgaacgaagatatggcctcgttcggtaaacttcatagaattccccacaagatttgtaatgatttgccgaaaccgccaaggatccccaattagaacatctggaacttgatcagatacaagcacagccaactctatgcctttagcctgtgatttttcatagaacagagataccacattgtcaagaatatcacggacatcaaaaggcactgcttccaactcaatccttcctgactctatcttagctagatcaaggacttcatttatcaagtttatcaatgcctttccactttcttgagcagtaactacaaaatcctgctgagttgtatcaagttccgtgtccattagcatctgcaacatacctagaacaccattcattggagtccgaatctcatgggaaacagttgctaaaaactgagattttgcaacatccgcagcttcagcttgtccttttagttctctcattactatataatcttgttcagccttttcaagggagttcagagttgcataaataatatgtccaacaagcaaaacaattatagctacagctgctgatattataattgcagaccagggaagtgggggttcatgtttgaatctgcaatgcatttcatgtttgcgtgttgggtctccaaaatcaatgctactaatgtgctgcagatcaccagacacagtaaaatcagaaccatacattttgataggagaggtatgatttgtggtgtcatataacctaacaactatcttttgtttgctagcgagttgctctaggagtttatccaccagagaaggaacatcaaatgaggcaccaagataacccaatgtagcatgaatacgctcctctggtgtcgcatttggaggaagatcatatttgtacacggtgaacgtaagcaccacaccgagatgattagatttcagaagcttaaaaggggacgttagagcccctttacctgttgcccgggaacgtaatatattatcatgatcttccttcccagacatcatatctacagatatgatatgcttcacagtttcctgagagaaaataacaggtgcatactcatcttgaactggtgatggttcaagcttttcaggattataatcatgaacaagggactgatctccagcttccatcttcttaatcttccatccgtgttgttgctcaaactgctccctttcactgtgtaataccttcaatgcataggccacaccgctcatcaatggcctttcaaatgtcgtccttgctgtgaagtcctcgaatgttttctgatcgatagcagacggattcttcccatggtgaaatgttgagaccaatatagccaaagcttgcacatggttcatgcttacattaaactgatcctgtagcatccttgctctctcatcacacatattagcaagattctcaattctcctagcgacaacatctgcatacatgcataaaaatatgcatccagagctacaaagcccaattgagacaccaataagcagggcttctttttgaccactttcgacttattttagcacttg

SEQ ID NO: 8462 - DNA, 450 bp, Setaria italica
  Peptide Sequence Number=SeqID_74436
tcgtacgtcgttccggtctaaggggttcgttgcgcgacgggggactgcgggtcgggcgaggtggagtgccacggcgagggcgcggcgccgccggcgacgctggcggagttcacgctgggcggcagcgggggcaaggactactacgacgtgagcctggtggacgggtacaacctgcccatggtggtggaggcggcggcgcccgggtgccccgtgacggggtgcctggtggacctcaacgagcagtgccccgcggagctgcgcgccgggcaggggcaggcgcgggcgtgccgcagcgcgtgcgaggcgttcgggagccccgagtactgctgcagcggccagttcgggaacccggacacgtgcaggccatcggtgtactcgcaggtgttcaaggcggcgtgcccgcggtcatacagctacgcctacgacgatgccacctccaccttcacctgc

SEQ ID NO: 8463 - DNA, 498 bp, Setaria italica
  Peptide Sequence Number=SeqID_74437
cccttccccccgcgccgcctcccgaagcatcccctcccaaaaccctcgccgccgtctcgcgagcagcagcagcagcagcggccgcagcgcacagccgaaaccctcctcgcctacgcccgggaccaggctatccatggcggcgtcgctgctcctccgcgccgcgagacggcgggagctcgcgtcccctctcggatctctgggtgccagcttacagtcaacatatgctgccaacatatgctcaaaatggggcagttttgcaagacctttcagtgcaaaagcagctggaagtgaggttattggaattgatttgggaacaactaactcatgtgttgctgttatggagggaaagaacccaaaagttattgagaatgctgaaggtgcgcgaacaacaccatctgttgttgcatttactcagaagggtgaaaggcttgttgggactccagccaagcgacaggcagtaacaaatccgcagaatactttctttggaacaaagcgcat

SEQ ID NO: 8464 - DNA, 268 bp, Setaria italica
  Peptide Sequence Number=SeqID_74438
tttcctaaacctcatcaggagatccccatcattataggggagtggtgggacctagaggaccttggacaggtggacaggcacttgaggcattatgtggctgacgattacttcaaagcgtccacaatcaatgccaagcttggagatctctacaactgctctggtaatcaaactagtattagactaattcatgtccacgttgaaatattatgttttatctcactgaagtttcatgattcaactttgaaggcgtcgtcgaagaagcctacaa

SEQ ID NO: 8465 - DNA, 955 bp, Setaria italica
  Peptide Sequence Number=SeqID_74439
gcagagcacattgagctagctagccaaatctcataccatggacagccggagccttccagtggcagccaccgctgctctcatcttcttctctgtcatagccctgtcagcgggtacagccatcgtcgagcacacctttgttgtgacccaggtgactatgactcacttgtgcaaggatacgctggtcaccgtggtgaatgggcagttgcccgggccggcgatcgaggtcacagagggagactccatcgccgtccatgttgtcaacaagtcacccttcaacttaacaatccactggcatggagtgaggcagctgctcaactgctgggctgatggcgtgccgatgattacccagcgccccatccttccagaccataactttacctaccgtttcgatgcttccgggcaggaaggaaccctatggtggcatgctcatgtcccctgcctccgtgcaacaatacatggcatcttgatcatccggccgaggcatggagccatctcctatccatttcctaagcctcataaggagatccccatcattataggggagtggtgggacctagaggaccttggacaggtggacaggcacttgaggcattatgtggctgacgattacttcaaagcgtccacaatcaatggcaagcttggagatctctacaactgctctggcgtcgtcgaagaagcctacaagctggacctggagcccggcaagacctacctgctccgagtactcaatgctgcgctcttctctgagtactacctcaagatagctgggcacaagttcatagtggttgctggcgatgccaactacgttagcccctatacgacggacaccatcgcgatcgctcccggccagacattcgacgccctcgtggtcgccgatgcgtctcctggaagatactacatggtcgccatgcccaaccagcctccaaagcccgacttatcagagcccagtcttgcc

SEQ ID NO: 8466 - DNA, 1271 bp, Setaria italica
  Peptide Sequence Number=SeqID_74440
tttacaagaagaaagaagacgacaagcaattgagtactcggagcaggtaggtcttgccgggctccagttcatagtggttgctggcgatgccaactacgttagcccctatacgacggacaccatcgcgatcgctcccggccagacattcgacgccctcgtggtcgccgatgcgtctcctggaagatactacatggtcgccatgcccaaccagcctccaaagcccgactatcagagcccagtcttgcccactagaggcgtactgcagtatagcaacggagcaggaggaaatcagcccggtgatgttccaatgtcaccagagatgcctgacaaccacaaccatatgctatcgttctacttccatggcaaccttaccagcttgcaccacccaagacacctaccagtgccgaagcgaatcgatgaacgcctattcataacgctcgggcttggctccgtttgtcggcaaggccagtcctgcgagagaggagcagagagcgacgaggtcatcgttgtggcaaccatgaataatatatcatacgagctccccaccgtgtcgagaccactgctagaagcccactaccagaaccccagcaacattgactggctgcaagaactccctgatgtaccaccgcgggtgttcaacttcactgacaattccttgatcccaacaggacccaaggaggaacagctagagccgacgtccaaggctgcgttggcacggcgattccggtatggagctgttgttgatgtggtgttccagagcacgtcaatgttgcagagcgagtccaacccgatgcacctgcacggacatgacatgttcgtgctggcacaggggagcggcaactatgacatggaaagggatgtggcgaagtacaacctagttaatcctccacttgtgaacaccgtgcttgtaccacggcttggatgggtggctgtccggtttattgcggacaatccaggtgtatggtatatgcattgccacttcgagtttcatcaatcaatgggcatgatagcattgttcattgtggaggacggaccaacagcgaacacatcgctcccctcaccgccagtggattttctgacatatggcgatgataataatctcatgccagatgaatactacctttagaatgagcaaattaagtcccacgcgtacactacaacaaaacatagtggtagtcatgcttggattgctatgctattgaaagcgtatctatatttcttatgctcccggcagttgttaacacactttagtaaagcacttcaaaacttgc

SEQ ID NO: 8467 - DNA, 890 bp, Setaria italica
  misc_feature (753)..(890): n is a, c, g, or t
  Peptide Sequence Number=SeqID_74441
agtaaaataatccctcccacgacgagctcgagcagcagcagccatggggatagccgtggtggcaaccgtcgcggcggcctcctcctcctcctacctcggggtgccgccgagggccaccgccgcggcgagggcaccggcccgtgcccacatcgctgcggccgggatgtcctcgagggcgtcctcgttcgtcgggggcggtggaggcgggctcgcggtggcggccgcctcgatagccgcgcggccgaggagagccggttcggggggaggcggcgcgctcgggtgcaagtgcctgttcgggttgggggttcccgagcttgtggtcatcgccggcgtcgccgcgctggtgttcgggcccaagcagctccccgagatcggccgcaacatcggcaagaccgtcaagagcttccagcaggcagctaaggagtttgagactgaactgaagaaagagcctggggaaggtggcgaccagcccccacctgcaacccccacggcggtaggcgacggggaggagaaaaaggggcttgaggcatcgtcaagtagcaaggagagcacatgaggatctatcaagatttgttagggctctgtatgtacaactgtattctgggcttctggagttaccagcaaattcctgcccatttgttttgatcaccttgccaagtagcgatattattcgtagtttgtacccgggaagaacaatttttctgtgaaaaatgtcatgttgttaaataagaggaactaaaaaaaaaaaaaaannnnnnnnnnnnnnnnnnnnnnnnnnnnnnnnnnnnnnnnnnnnnnnnnnnnnnnnnnnnnnnnnnnnnnnnnnnnnnnnnnnnnnnnnnnnnnnnnnnnnnnnnnnnnnnnnnnnnnnnnnnnnnnnnnnnnnnnnn

SEQ ID NO: 8468 - DNA, 293 bp, Setaria italica
  Peptide Sequence Number=SeqID_74442
cctatcccctgtgtgccttgcctatcctctgttgcgtgtctcagtagcatcagagtataccgttattcctggccatcagccagccagtaatttacacaaaaaatggaagagaagggagcagggaggatgacgctgcgttcctcaccgtcaccgtcttcgatctccttctcatcccctactgtactaaccctcctacaaactgctaaccaactgcatgcctatcaagtacggtaacaacaacaacccaaccaacaaacgagaagaacacaaagaagaaacaagagaaaagactg

SEQ ID NO: 8469 - DNA, 323 bp, Setaria italica
  Peptide Sequence Number=SeqID_74443
gtcaaggatgtcgttaagagcttgacacaacccagaaatctgctggtcccattgttgtagctcttcagtgtcatcgtcaaaatgtatcacagcttcaacctgatcaattgagccccgcattctatcctcataaatcatccgagatgctatcttctcagcaggtatgcagttgcacatgtgaagtatccatctgttcccagcaattcagtagtcttccttggatcaatgcccaacaatgtcccaagctcatcaaagctgatatttgtgtatagtttacttggcacttaaggtagtatttattgtcttctaatttcttatttgtt

SEQ ID NO: 8470 - DNA, 132 bp, Setaria italica
  Peptide Sequence Number=SeqID_74444
atccatatggtctcacctagtggactaaatagaactctcggactgaaacaagatctatttagtccactaggtgagaccatatggataaggcacaacaacttagaccttgaagcctctgctgttcctccttcc

SEQ ID NO: 8471 - DNA, 183 bp, Setaria italica
  Peptide Sequence Number=SeqID_74445
tccgagagttctatgttagctcactaggtgagaccatatggataaggcacaacaacttagaccttgaagcctctgctgttcctccttcctcttgccttctcaaacttccttcccttggcgcggacgtagggcttggtgtgcccacaggccacaccaagccctacttccttcccttggcgcgga

SEQ ID NO: 8472 - DNA, 347 bp, Setaria italica
  Peptide Sequence Number=SeqID_74446
cgacttcaacgctgtgatcctgaagcggctcttcatgagcgagagcggcgggcggttggtcttgctcatgaagagccgcttcaggatcacagcgttgaagtcgctcttggtcctccggacgaggaagcggtacagcttgacgaggagcttgaggtagacatcgtcggacttgggcgcggtgcgcttggtcttcttgttccggccgccggcgacgagatcgataccctgcgaggagatgggggctatgtgtcaggtactggtccaatgtatcggagaagagaagcccgcgaggaggttcgaggctaccatggcggagcgcggcgagcagtgacggcctgcggcggcgg

SEQ ID NO: 8473 - DNA, 163 bp, Setaria italica
  Peptide Sequence Number=SeqID_74447
cttaggttcaccgagacagcaagggctaggatcctcttgtcatctgtgactgtaccaacaataacagcaatgttcttctcctcctttcctttcatgaagttggcaaggcggcgcagagagatgggagggcgttggccttgctcatgaagagcctcttgaggat

SEQ ID NO: 8474 - DNA, 737 bp, Setaria italica
  misc_feature (733)..(733): n is a, c, g, or t
  Peptide Sequence Number=SeqID_74448
tgttactaaaaaacttgagcataaaattcttgaatgagctcagattcaaaggaaaagcacatatcatgacaacccacagagggaagtttcataatgagctgggtagaaagtatcatcattgcaaacatcattcaagacaacatgctgctgcttaacatttgaattagcagaaccaaaaaagaacaaagaacttaatgttccaggtgagtgaaagaaataatgcagatatatggttccctcagcacattatcatactcgtcaaaggaaatcagtattagcatggttaatttataccatcactgggaaccagaaattaggatttacataatcaatgaaactaacaacaaaaaaggttgaaaagtttgcttttctaccaaatcttaatgagaataatccagctgaaacaatcagggtaacatcaggattagcaaagttatttacacacttttttgtcatgcttattaggttcatgaggcttacaattattgataagtgttacaatttcaaacatgcacaaactattattgtttcagaaacatgttgtcgcattgaactaaagcataccgtgttctcgccaagtggagcacggagagcaagctggtcaaatgtgaggcactccccaccagcattgataatcctagcccttgctgtctcggtgaacctaagtgcggtaaccttcattgctggaatctcttggatcctcttgtcatctgtgactgtaccaacaataacngcaa

SEQ ID NO: 8475 - DNA, 603 bp, Setaria italica
  Peptide Sequence Number=SeqID_74449
tgtgtgggactccaggcgcagggccaaagtgcttaacagcttccctagcattcttaggacccctcaggataacctatttgagaggtcacaaattatgtggacagctaggtagcattgaactctattacttagtataaaaaaacaatttcagcaggagaaaggttgactgtaattcaaaggtacaaaagttaaagcatactggggggagtacaacaacttagaacaaaatcaagcaacatatctacacacctcaacttctctccacgagttttgttagaaacttgattatctttagaagcataatataggacagataacaacaaatcctatattcataacaatacatagaaatactattgattctgtcagtcaaatcacatgggagtgatagcatgggttgacatgcactgcgttgatcagttatggcatcagtacacagcatactactatttcaatgtgaaaggagatgtctaagttctaacattaggcactattcggaaagcaacaatgtagttggttgcacatttgctttcatagctcaaatgatatgtggaatggtcagtaacagttgaaataaattaatattttcgattcgatcactgg

SEQ ID NO: 8476 - DNA, 534 bp, Setaria italica
  Peptide Sequence Number=SeqID_74450
tggaggcgtcaaagcagttctgacaagtaccaatccacaaaaggacgagtagactactcacaccgggatagctattcccttgcttgacatgttgtcaaggatgtcgttaagagcttgacacaacccagaaatctgctggtcccattgttgtagctcttcagtgtcatcgtcaaaatgtatcacagcttcaacctgatcaattgagccccgcattctatcctcataaatcatccgagatgctatcttctcagcctaccagtgtcgaaatattggtaattaggatcgaatttagaaaattttaaaacatacactagaatcgggattacaggtatgcagttgcacatgtgaagtatccatctgttcccagcaattcagtagtctacagatcatgtttttgctcgttaaatagaaagaacaaaaaacaatagtatacaaatagtcacatagtcaagtgatatgaaggataatcatctgtaccctgccattcagtaccatctacatgtcatgttttctttgaataaaggaaagaacgtg

SEQ ID NO: 8477 - DNA, 678 bp, Setaria italica
  Peptide Sequence Number=SeqID_74451
ctgagagtagtagcacaatttgttgtcctggttataattttgaaagatattactaattactgtcgatcgctcaaacagaactgtcgcacaatgctgatggcaacacgcacaggcaattagaccttgaacccacggctgttcctcctgccacgagccttctcgaacttccttcccttggagcgcacatatggcttggtgaggctgtgaggcacaccaggagccttgccaaagtgcctcactgcctcacgggcattcttaggacccctcaggaggacctacagaaggccaacattgacaacatcagcttatcatcaaattaaaggaagcttaaacaatgcaggagatggattgttctactaagaatggtaatattacagcacaggactggataaattgcacaatatacaagactgctgaaatattgaatgcaaaagctttgctcagatacaaggaaactttatgatcccagacaacccacaaagggaagtctcatagagctgggattagaatatttatcatcactgcagaacaaaatcaagctgtgtcaggtaactaaatggttaggcaaaagaacagaagcttgttaaaaaactaaataccaaaggactcagcaaaattgtcaaatgagctcagatacaaaaggaaaagcacatatcatgacaacccacaaggaggatc

SEQ ID NO: 8478 - DNA, 539 bp, Setaria italica
  Peptide Sequence Number=SeqID_74452
agcgatcgacagtaattagtaatcactttctactgagagtagtagcacaatgctgatggcaacacgcacaggcaattagaccttgaacccacggctgttcctcctgccacgagccttctcgaacttccttcccttggagcgcacatatggcttggtgtggctgtgaggcacaccaggagccttgccaaagtgcctcactgcctcacgggcattcttaggacccctcaggaggaccgtgttctcgccaagtggagcacggagagcaagctggtcaaatgtgaggcactccccaccagcattgataatcctagcccttgctgtctcggtgaacctaagtgcggtaaccttcattgctggaatctcttggatcctcttgtcatctgtgactgtaccaacaataacagcaatgttcttctcctcctttcctttcatgaagttggcaaggcggcgcagagagatggggagggcggttggccttgctcatgaagagcctcttgaggataacagcgttaaagctgctcttggtcctcctgaccaag

SEQ ID NO: 8479 - DNA, 1281 bp, Setaria italica
  Peptide Sequence Number=SeqID_74453
attttgtttcactgctactatcaaataatggaagattagaagtatggcagatgatggataatcttatcctacacactgaatctattgtgtagaccaaatactccgcttattatctgatgccattagttaattagctctcactgttcattgtttcttgggcgcttgattattatgttgtgtgctaaaaaggagtaaattgaggcttgtttattttgcatggtttgcttgtaacgtttgaatcatgaaagtgcttggtgttacatacttgcattcctatctgtctcacatgcatgtcttcatggtttaataatctgtagaggtttgctaacttttacaatggaattggggtactctcatttatgacaatcttttcaaatatttatgtgagctacatgtagacgattgaatctcactatttgctacaatccttaggttctgctaaggggcctaagaatgctagggaagctgtgaagcactttggccctgcacctggtgtgccccacagccacaccaagcccctacgtccgcgccaagggaaggaagtttgagaaggcaagaggaaggaggaacagcagaggcttcaaggtctaagttgttgtgccttatccatatggtctcacctagtggactaaatagatcttgtttcagtccgagagttctatgttagctcacctcagtttcaggacgtttgagggcttggtgtggctgtggggcgacaccaggtgcagggccaaagtgcttcacagcttccctagcattcttaggtccccttagcagaaccgtgttctggcccagaggtgcgcggagcgcgtagctggtcgaaggtgaggcactcgccgccagcattcacgatccgggccctcgccgtctcagtgaacctgagcgcagccaccttcatcgccggcacctcgtagaccctcttgtcgtcggtcacggtgcccacgatcacagcaatctggttctccttgcccttcatgaaattgacgaggcggcggagcgagagcggcgggcggttggtcttgctcatgaagagccgcttcaggatcacagcgttgaagtcgctcttggtcctccggacgaggaagcggtacagcttgacgaggagcttgaggtagacatcgtcggacttgggcgcggtgcgcttggtcttcttgttccggccgccggcgacgagatcgataccctgcgaggagatgggggctatgtatcaggtactggtccaatgtatcggagaagagaagcccgcgaggaggttcgaggctaccatggcggagcgcggcg

SEQ ID NO: 8480 - DNA, 841 bp, Setaria italica
  Peptide Sequence Number=SeqID_74454
cggaatggcagacttccacatagttatcacccacaatgatacgtacgataagtatatttgcaattggctgacaaacacaagtctcacggtgcaaaaaaacaagagcaaaatttgattggtctgcaatccagtaatagcacaagattctgacatctaaagcggagcaactctggcaccaaaacagtcatgtttagatgacgagcaatatgacatgtattcgcaaggttgctgccacttagaccttgaagcccctgctgttcctcctccctctcgccttctcaaatttccttccctttgagcgaacataaggcttggtgtggctgtgtgggactccaggcgcagggccaaagtgcttaacagcttccctagcattcttaggacccctcaggataaccgtgttttgtccgagcggtgcgcggagtgccagctggtcaaaggtgaggcactcgccaccagcattgatgatcctggccctcgccgtctcggtgaacctgagcgcgcacaccttcatcgctggcacctcggtgatcctcttgtcgtcggtcacggtgcccacgatcacagcgatctggtcacccttcccctccatgaatttgacgaggcgacgcatcgagagcggcgagcggttggccttgctcatgaacagcctcttaaggatcacggcgttgaaggggctcttggtcctacgcacgaggaagcggtagagcttgacgaggagcttgaggtagacatcgtcggacttgggcgccgtgcgcttggtcttcttgttgcggccgccggcgacgaggtcgatacccatggttgtgtgaccgcggcggcggcgatggttgcggcggcggcg

SEQ ID NO: 8481 - DNA, 1563 bp, Setaria italica
  Peptide Sequence Number=SeqID_74455
ttttttttttttttttttaactagaaaacccagagcacggaacttagacaagcattctgcccgacatcgcatcatacgattgtatggtaaaaattggttccaaaaggacatggcaagcatttgcagcagcaaactgtacagaatgctaattctggaggcgtcaaagcagttctgacaagtaccatccaacaaaaggacgagtagactactcacaccgggatagctattcccttgcttgacatgttgtcaaggatgtcgttaagagcttgacacaacccagaaatctgctggtcccattgttgtagctcttcagtgtcatcgtcaaaatgtatcacagcttcaacctgatcaattgagccccgcattctatcctcataaatcatccgagatgctatcttctcagccttccttggatcaatgcccaacaatgtcccaagctcatcaaagctgatatttgtgtatagtttactggcactaaggagattatgctcaatcattgcccggtcaagcacagtggacttatctggtaacaaagctttttgatgcggcctcagctcctctgcaaatgcatcgatttcaggtttcctcaaaatcctttcaaggtaaaccttctgcagtattgggtatatcttcagcttcgaacatctttcatccttgtacagcgtagcaagaacacgggagcgttgtggaccagcaccagccaatattgtgcacgtcacagcagcactaagagcttgctctagagcattttcatcgatttcttcgtctccaatcttgcgttgttcaatctgagagatatcataatatctaagtgcagcttccaggaatcttctttttagatccaaaatccttgcataacagaccttgtactgtaagtttagaacttcctgctgactgttggtgaccaaaaaggatgccttgttgataaaagcctcagcattcactgcatcatcatcctctaaatagagtcgtgcaatctggacacatttggataatttgttggtgtcatcaagcatcctgattcctgagtccaagtcaatcccactaagcatctgggctgctttcgaccattgttgttcagactcatatagttctgcaagcttctctctaatcactacaacctgctcctcgaaggagaccacgcgcggctggatctgcgtgagcgcatagtgggcgacctccttcagcgcgtcggactcaagcttcccaaggtcctgcgcaaacgtctgcagcagctgccgcgacaccacgagcggcacctcgtccgacaccatgtggtcgaggaagcgcttggcctgggagatgtccggcggagaagacgataggaccgaggcgaggatgtggcggtactgctcgatcttctggcgctggtcggcgatcgccgccgcgctggcgagggcgctgtccatggcttcgtccgccccggtggcgcgggtagccggaggggaggggttgaggggtgtggccggcgacggagacggagaggggtagctagggttttggcgttcgatctgcggcgatggtgatgggaacttgggaggaggaccggaatctggaggagtt

SEQ ID NO: 8482 - DNA, 983 bp, Setaria italica
  Peptide Sequence Number=SeqID_74456
catttgccattccatttacattcaaccaatgaaccaaacaccatttaaaacttcaaaagagaatcggatatccaaaaccctattccccacccaaattctatcttagatggttcaatattgcatcaaaatgatttaaaagggaagcagaggtgcaaaaccctaatatgttaacaaacacttgcaaacttccgatagagtgcaaaacatcgagcaaaatttaggagatcctggaactgggtgtacaaataacaaagagccctcaaacgtcctgaaactgaggtgagctaacatagaactctcggactgaaacaagatctatttagtccactaggtgagaccatatggataaggcacaacaacgttagaccttgaagcctctgctgttcctccttcctcttgccttctcaaacttccttcccttggcgcggacgtagggcttggtgtggctgtgggggcacaccaggtgcagggccaaagtgcttcacagcttccctagcattcttaggtccccttagcagaaccgtgttctggcccagaggtgcgcggagcgctagctggtcgaaggtgaggcactcgccgccagcattcacgatccgggccctcgccgtctcagtgaacctgagcgcagccaccttcatcgccggcacctcgtagaccctcttgtcgtcggtcacggtgcccacgatcacagcaatctggttctccttgcccttcatgaaattgacgaggcggcggagcgagagcggcgggcggttggtcttgctcatgaagagccgcttcaggatcacagcgttgaagtcgctcttggtcctccggacgaggaagcggtacagcttgacgtaggtagtctttgtaggttagtacatcgtcggacttgggcgcggtgcgcttggtcttcttgttccggccgccggcgacgagatcgatacccatggcggagcgcggcgagcagtgacggcctgcggcggcggcggcggaggggc

SEQ ID NO: 8483 - DNA, 905 bp, Setaria italica
  Peptide Sequence Number=SeqID_74457
tttttttttttttttttctacagtagaagggccatggatgataaatgccaagctctgataagaggtgcaacagaacattgtcttcttgctcaacaagcgggtaacaccacgaatccttcaaatatctttcaaaattataaccaggacaacaaattgtgctactactctcagtagaaagtgattactaattactgtcgatcgctcaaacagaactgtcgcacaatgctgatggcaacacgcacaggcaattagaccttgaacccacggctgttcctcctgccacgagccttctcgaacttccttcccttggagcgcacatatggcttggtgtggctgtgaggcacaccaggagccttgccaaagtgcctcactgcctcacgggcattcttaggacccctcaggaggaccgtgttctcgccaagtggagcacggagagcaagctggtcaaatgtgaggcactccccaccagcattgataatcctagcccttgctgtctcggtgaacctaagtgcggtaaccttcattgctggaatctcttggatcctcttgtcatctgtgactgtaccaacaataacagcaatgttcttctcctcctttcctttcatgaagttggcaaggcggcgcagagagatgggaggggcggttggccttgctcatgaagagcctcttgaggataacagcgttaaagctgctcttggtcctcctgaccaagaaacggtacagcttgacgaggagcttgaggtagacatcgtcggacttgggcgcggtgcgcttggtcttcttgttcctcccgccggcgacgaggtcgatacccatggctgtggctggcggggggcggcgctagggttcctgctgcggctgcttaccttgtccgcctccggctcgggaaggagggtggcggcggc

SEQ ID NO: 8484 - DNA, 198 bp, Setaria italica
  Peptide Sequence Number=SeqID_74458
gggcgaggtagagcttgggaagtagacgcggtcgttgatgggctggatgcggaggacggcgaagaggaggaggaagacgaaggcgctcagtatgttgatgaaggcggagacgcccaggtcctccagcgtcgccattccgccgcaccgctagctgcgccgcttgctgttgtttgcaggggagaagagggagaaggggat

SEQ ID NO: 8485 - DNA, 2843 bp, Setaria italica
  Peptide Sequence Number=SeqID_74459
tttttttttttttttgttctctaccgagacacaccattctcattcttctgctctcgatcagctagaatcacaattcagcgcgagacacactcattgaatacgcaacactagagctgactcctcatctggcacatcagggtttacttttacagtcactaccacactacacactagcatgtacatcgaacaattcatcaatcattggcaattcagcatcctttttaagggtaaggtaactaagagaagaattcacaggaccaggaaaaccaaaatcaagttagagaccactgctttttcagtatcattcagggctggatgtcgtagtgatagacgaagtgcggcggcgacggcgagtccatgtcgctcctcacgtggatcccctcatggtactgggtactcctgctgtattggctctcctcgtggtggtagtgcatctcgtgggtgcttctcaagtgactctcctcatggtactgagatgagctcctcacatgagtctcctcctcctgacggtgatgatgctgttgcttctgggctttgtcgatcctcacctccaccgtctcctcctctttcgccgcttcctcgaaaagatggaagatgggatgcaggtaggcgttagccaggaaggatttcaggttcaggttaggctctgacgcgtgctccatgttatccttctccatcgcttcctctagcggatacttcctgaaagcaggctcgaaccggctcttgcagtatttgtggaaccatattgtcagcagtggcaggaagatgagtagaggggtggagaaagcagcttcctttgtgctcatcaacccaaacagagttaggtgagagatcaacaggcttgctattattcgggaatgcacctgaggccaaaatgcagcagcgctctcgtactcctgattgtaaacattgatgatctgatgtctgtagacgaggaaagcaaaggcaaagaagatgataatgaatggcaggagaatgggggtgacgacggcgtacacaagcccaaggaggaaatacagctgcagtgttggaaggttttctccaagcccaatgctaccaggatccatcgccctctccctgtccctctccgttttcacgataaacatgtttttcagatggtatatcaccagaggcttcactcgaaggatctcgtttgcaataccagcccagccatcaaccattatgtacgtcatgaaaaatgtggccttcattggtatagctactccgattgtcattggtatttgtgtagcaggcttgtggaggaaagtgtatagctgttcaaaggctgtgccagcgattatgcttccaaggaatacattcaccagcatgaagtaataatatttcgaagcagtcctcctttccagcgatgattaagagatgtagccttcaacttttgacatgatcagtaaaactgtagggaggatatagagaaagatcttcagagccagaccgggaacaaacccctgcaggaaggattttaccacttttacttctattactggcttcagaaaaggagcaactttttcaagaccctcaagattggcaagtgattgcacaaatgtgataggtatcatgtagaaaaacaccaaagcaaagaccgcaacggatatcagaaatctgcggatactgagagagaaaaatgggatggcaagattctgccaataaacatcccgcggttcaggagcccaatcagtcagccattgggttgggttcttcgactgttgtgtctgtgcacacacagcagcaccccatcttgagtcaaacgtaacaaaagaaaccggcataatagcttttgggtcattgagaactttctggcgctcggatgccatcttcctctcaagctcgctgattctagcctgatagtagtcaatttgatccacttccctgccacagaaaccaaggcatcctgtccttctagttggtcttttctcaggatgcctttcaaacttcagctgatagtaatccaaccaattttgaagcctatcccttttcttcacaagtttagcgtaccgatttgcgttgtaaacaggctgctgaccaagatagtggtctggatgatttcttcggaagaactcgtcaactgtttcagaagttgaatggcttgagatgcgaggaatgtttctaacaatcacagtaaactgatcggcgcaacgcttctgggaagccaggaaatgcaatctcataaatgcaacattgctgtattctttatacagcatgaagcacacccagaatgtgaacacatatgccatcaggagatgaacaaagaatctgttggatccagggtttacatttgatatggaaagcttatcgatatcactgaaaacaacttcttttttagattaagtaatgtgccgcctgatacattgactggaacaagaaccagcagtgcgagagctgcaatgggcaaaaacatcttgagaccgagcgtgtagatgcgtaggtagacggcggagtcgaggcccgcgtgcgcgatgagctcgggctcggtcacgcggagcgcgccgggtacccagctgaggaaggtgatgtaggtgcagatgttgaggttgacgaagcggcggacggcggagcgggaggagtggtcgtgggtgcgcttgtgggcgaggtagagcttggggaagtagacgcggtcgttgatgggctggatgcggaggacggcgaagaggaggaggaagacgaaggcgctcagtatgttgataaaaagcaaatttgccttttgtaatcaccacatttctcaacaaccataatttgtgattggttgaaaacagagtagaatgaacaaaatcatgcctgacaaaatgcaaggtgaatgagacataagcaaaggagagggccatgtacct

SEQ ID NO: 8486 - DNA, 538 bp, Setaria italica
  Peptide Sequence Number=SeqID_74460
ccaaacattgagaaacacaaaccattatacaatgcatattggtactgcttacaagcacatactgtgattacgttttatcacaccacaatcaccatttcccctgaacctgaacgaagtaacaaatacaggcaccaaattgctcaatgtacaccgcaacatagcatagatgaaaagaatgaactatatcagttaaaccaaacaaatcccgaaacgacatcccactcagacgttctcagccccttctttcttcatgtggaacggctcatgcgccggcgaggacccgccgacgacgccgggcggcggcagcggcgtgccgtagatctgcgcgccgacgccggcccgcatctcctcccggcccctgtgcttgccgaggaagtagcagccgaagccgagcaggatggagaagaagatgaagggcagggagatcaccagcacgaaccccatgcctcctctcttgctgctccggaattccaaccgcttggaggagcaggggagaacgtgaaggatgctttgaagggaggacgatggtggaggtgag

SEQ ID NO: 8487 - DNA, 366 bp, Setaria italica
  Peptide Sequence Number=SeqID_74461
taaacgcggcggcggcgactgccggtgggaggatgatgacagggccaagagctgcatcaggtatcagagggaagaggcaaagattcaggcttgggttaaccttgagagcgccaaggctgaggcacaatcaagaaagcttgaggtgaagatccagaagatgcggtcgagcctagaggagaagctgatgcggcggatgacgacggtgcaccggcgcgccgaggagtggcgcgccacggcgcaggcgcagcacctgcagcagctgcggcgcgccgccgccgacaacacccggcggctcaaggcgacgagccaccaccgccacctgccagggagcgacgccgcctcctgcggctgcttcccctgcagcaa

SEQ ID NO: 8488 - DNA, 361 bp, Setaria italica
  Peptide Sequence Number=SeqID_74462
tgttactggctcaaaggcgactcaggttagagctgtagcagctggtcaactgaaagtccaacaacatgctgaaccccagcacccctttctccagatcgaacaccagcaggttgttctccatcgtcttcccgccgatcaccattgccagctcgccatcaaccggcatggcgcccggccccatctcgaggatcccgacgcacatggcgccgtccacctgcaccaggtcgttgttattgaacacagtccagttgcttctggcgccggccagctccaggtcgatccttggtacgtcgtagctgatcggccgcttcagcagcgggaaggcgccgttgtagcacagctggaacggcttcaccgctgg

SEQ ID NO: 8489 - DNA, 545 bp, Setaria italica
  Peptide Sequence Number=SeqID_74463
gaaatttgttagcatcgtgcctgaggaccacaatgatactgctgcaaaatgttcacgcaataacagagatgcctacaaagcttgtgctactggagtacaagtgcagcactctgttactggctcaaaggcgactcaggttagagctgtagcagctggtcgactgaaagtccaacaagctgaaccccagcacccctttctccagatcgaacaccagcaggttgttctctatcgtcttcccgccgatcaaccggcatggcgcccggccccatctcgaggatcccgacgcacatggcgccgtccacctgcaccaggtagttgttattgaacacagtccagttgcttctggcgccggctagctccatgtcgatccttggtacgtcgtagctgatcggccgcttcagcgccgttgtagcacagctggaacggcttcaccgctggcacacgcttcacatctgtcatcttccctctgcaggtgagttgatctcgatcagctcaaagatgatcatcagtatcagtcagctcattaattaagtactggcagtgta

SEQ ID NO: 8490 - DNA, 432 bp, Setaria italica
  Peptide Sequence Number=SeqID_74464
aaattaaaccaaataacaaagttaacttaagaatagactaccaagtactagactttaacttttagtttacttgagattcatattattatcacagttcagccctctcttctttcagcaaaagcataacaggcatcttaaagagacatttttatcaagtagtgagtaccataacaagaactcaatgcttcctcccatttgtcctgaccatctcagcttgggacagaatctgaagtcatgggtccactaccagacccatgagaactatgggtgccaacaggcacagtgcgctgagcaaaactgagcaactgtttgcgctgatccgcattggtatgggggaggctggcacgcagaagctctactggcatttccctgcttattactgctgcagcagcagtaataagcagggaaatgccagtagagcttctgcgtgcc

SEQ ID NO: 8491 - DNA, 1200 bp, Setaria italica
  Peptide Sequence Number=SeqID_74465
cattactaccatttaacaaacttcatagatcatagcagttcctgaagaacaaaaatgacacaagcaaattctcaaggacgtgttgcggccagcacgacttccacaccttcaggccaacagaattacaggggaaaaacaaggcaactactcgctgaaaataacaccttgaagagcagttaaacagtgtcttcaagtaacagctacagaccgcctggggcttcctcttaagagcaacagacccacaggagctttgcaatcttgtcccaaacacagctaaccacgtaatagatgcaaaacatctggctccctacaaagataatcaatacagacatgttgtgacttgtgaaactaaatttaaaatcttgtattaccatcagttctttgatgctccagtctgctttacttttgtttcttgagattcatattattatcacagttcagccctctcttctttcagcaaaagcataacaggcatcttaaagagacatttttatcaagtagtgagtaccataacaagaactcaatgcttcctcccatttgtcctgaccatctcagcttgggacagaatctgaagtcatgggtccactaccagacccatgagaactatgggtgccaacaggcacagtgcgctgagcaaaactgagcaactgtttgcgctgatccgcattggtatgggggaggctggcacgcagaagctctactggcatttccctgcttattactgctgctgcagcaggttgcaattgcgcagtatgaaccacgctatcaaatttagtcatgcagtactgtgtaagtagcccaaagaaggcatcaaatgatgcctgccatagagctctgttctgcacactgtaggcagaagccacatgctgatcagtgagcagaactgttgctctgtccagtacagactttatgatgacagaagcccaatcacctgctggggatccaaggggtcgaagaggcggttgcaatgacgaacacacaatagctgcaaggcaagcactgagatcactcaactccatccggaaaacacatgtggatatggctcttgcaagtctagtcattgtctcagctgcactgatctcagagggcatatttccaaatatggtccttagatgccggaagactgccatgcaagctatccttgcaagcacactgcctgaagtcacgagttcaaggtaacgggacagtagtttccggccc

SEQ ID NO: 8492 - DNA, 3010 bp, Setaria italica
  Peptide Sequence Number=SeqID_74466
tttctcaaatgggaagggcaatcccaaaacattactaccatttaacaaacttcatagatcatagcagttcctgaagaacaaaaatgacacaagcaaattctcaaggacgtgttgcggccagcacgacttccacaccttcaggccaacagaattacaggggaaaaacaaggcaactactcgctgaaaataacaccttgaagagcagttaaacagtgtcttcaagtaacagctacagaccgcctggggcttcctcttaagagcaacagacccacaggagctttgcaatcttgtcccaaacacagctaaccacgtaatagatgcaaaacatctggctccctacaaagataatcaatacagacatgttgtgacttgtgaaactaaatttaaactcttgtttaacttagaagaattacaataattaccatcagtctttgatgtccagtctgcacttttgtttcttgagattcatattattatcacagttcagccctctcttctttcagcaaaagcataacaggcatcttaaagagacatttttatcaagtagtgagtaccataacaagaactcaatgcttcctcccatttgtcctgaccatctcagcttgggacagaatctgaagtcatgggtccactaccagacccatgagaactatgggtgccaacaggcacagtgcgctgagcaaaactgagcaactgtttgcgctgatccgcattggtatgggggaggctggcacgcagaagctctactggcatttccctgcttattactgctgctgcagcaggttgcaattgcgcagtatgaaccacgctatcaaatttagtcatgcagtactgtgtaagtagcccaaagaaggcatcaaatgatgcctgccatagagctctgttctgcacactgtaggcagaagccacatgctgatcagtgagcagaactgttgctctgtccagtacagactttatgatgacagaagcccaatcacctgctggggatccaaggggtcgaagaagccgttgcaatgacgttagtttacgttaaagctaattgtacgaacacacaatagctgcaaggcaagcacgtgaggatcactcaactccatccggaaaacacatgtggatatggctcttgcaagtctagtcattgtctcagctgcactgatctcagagggcatatttccaaatatggtccttagatgccggaagactgccatgcaagctatccttgcaagcacactgcctgaagtcacgagttcaaggtaacgggacagtagtttccggcccttcggtagagtgactatgcggagaaacaccaaatcatcatatgaagaaagaggagcattcttattaggtgcaaggggatcaactaattgcagtgattctgcaagctgctcgaggagggcctgtcttctgtttctcagttgcaaaccaccatcttgctgctggctaaattgcagcagacgatcaatatcatcaacatcaagtagtaggcaaagtccatcttcaatagtgatcctagcagccaacattggttcttggtcaagaggctttgatgcagatttttcagtgttctcacttggtgcagaggcttgttcaacatcaagaagcggacgaggcctgcggattgaagaaaatgggagcctcccaagagcatcaacctgtaggtatgcatgtggttcatccttgctccgtgcacgggaagatggatctctaatcaaggttggacagaagtggtgctttagttgtgcacctgctgatttttttgctaaacaagcttgatggtagtaatcgtcaatatatgggtcattgatgtgtgtggcagcttgctgcatccttgcaatgttctcaatttcttcagtggacatgtacttggatctaaaccgtggccacccattatccatcctcatattattgacctcataaccttggtgaggatatcgttgtcccagccttccatgttgcaacatcgatcttgctcttggatcactcaagtcaggcatagtgaagtttccatcaaatctacccatcacttgcgaaggaggatgctgaggaccaaacatttgcatgctttgtggtggggaatgatggggaccaagcatctgtgcatgcagttgtgagaaatgaggtggagactgttgtattggcagcattccatgttgttgacgaggtggctgcatttgaggaggcatcagtccattgggacgttgcaattgatgctgcatcaaacctggcataaacctggcaccattcccatgcatttgtccactatttaaaacatgattttgctgcacattttttgttgccacacccatcggacccatatgagccagctccctaccaaatggaggtcctggaggcgtacctccatggtgaaactggggaagaggtagatcattttgtgcggacataggcatctggaaagcagtgggaggagatggcatgttcatatgatgtggttgactaggtgaagaatgagatgctgcaccagatggagggtatgaaatgaatgatgatttaggcacaggaattggttcggtattattgtactgagggtcttgttgtgggtatgatgatgttctgtgcaaaggagatggctttgctccaagaataggttcagcatgattgtactgagcatcttggtgtggggatgaggatgttctgtgaagtctagagtccatgaagtcgactgaatggggtggttgggaccaccaattcttcttatccagcccatgatcagtgtccaatacaggctgcgcaggccaatatgaagagccagtctcttgcacccagtctgcattagaactttgtctagaaacagatcccctatgacccactattcctggttgctttggttcattgacaattctggtcagcttcgagaatgttccagcaagatcatcaacgtcagtaaaagaacccaccccttcatcctccaaaatattatccctcccatagagagggtactcttcatcaccatgctcaacaaatgcagtatcaccatcatcgtcattccaattct

SEQ ID NO: 8493 - DNA, 532 bp, Setaria italica
  Peptide Sequence Number=SeqID_74467
ggtacgcacgagcagcatgttcagttcaagtcagtgcaggttatgttttttttttaaacagatcaatcggacaatcacaccttaatatattgcccaatcaggcaatagatacaggaactttggaagtacattagactctctctctctctctgtcaaaagatgaaaacccagcatcgttcaattcaaagggttcgtaggaagctcggagaagaaacttaaatggcatatgactaagcaacagctacgggcgccgacacgacacctcactgcatctcgaaccgtttggcaatcagcacgctcatgtcgagaaacctctgggcacagttggtcaggcaggttgtttcccccgagctgaacttgcttcctggggtgccagtgatgcatttgtcccagcacacgcttgtcagcttgcccaccatctcgcccatcatcgccttctgctgctcttgctggaggaatcgctgcatctcggggttatccatgggcgcctctctctcttcctctcctaaaaccctagctctgttcttgcttg

SEQ ID NO: 8494 - DNA, 292 bp, Setaria italica
  Peptide Sequence Number=SeqID_74468
cgcggagcaagggcaggtggtccgggagcagcgccgccgcgaatccgtgggccgcggcggagtaggaatacagcaggtggcgcgccgggtcgatggacagtgactcgaggtgcgccgcgtgccagtgcgccggggacgcgtgcacggccggcatccgcgccgggtccatgaacacgatgtaggtcgtcgtgttgccgccgtcggcattggcattggcattggcaagcgagaggcttgcaaggaagaggaggaggagggggagagtgagctccattggagagggagcgtgact

SEQ ID NO: 8495 - DNA, 940 bp, Setaria italica
  Peptide Sequence Number=SeqID_74469
gtggcgcgggaggcggtggagggcggcgtcaccgtcgccggctaccgcgccctcgtcgaggtcttcacgcgccggaagcaggaccagctcttcttcaccaagcaggcgtacctgacaaggttcaggaggaatctggaccaggacatggtcaccgagccatcgcatccgtaccagaggctgctggttgctcttgcggcctcacgcaagtcgcaccacgacgagcccagccagcacatcgccaaatgcgacgcgaggaggctgcacgacgccaagaacggcggcgcgggatcggtcgtcgacgaggctgtcatcctcgagatgttcagcaagaggagcatcccgcagctcaggctggccttctgcagctacaagcacatatatgggcatgactacaccaaggcactgaagaagaatggctctggtgagtttgaagaagctctgagagctgttgtcaagtgcatctacagtccttccaagtattactccaagttgctgcagagaagtatgctatgcgcaggaactgacaaaaggttgttaacaagggcgatattgggcagcgacgatgtcggtatagatgagattagatcagcgttcaagagttgttatgggaggaaccttgcagacttcatccatgaaagcttgcctcagagtgattacagagattttcttgtggctgtggcaagagggtcagccgcctcatgaagttggcatagaggaaaccttgacttgtccagcgaagcaaatactgcttttcatgatgcaggagtaagtagaacataaaaaacagcagtctcgtgccatctgaacttggatttcaggttatgaaatgttaccagtttatttacaaatttgcttggcttgtgacggagaaaccatcacatctcatgcacaaagtaaaacacaacagtgcgcttattgcagaggtacttattatttacgt

SEQ ID NO: 8496 - DNA, 396 bp, Setaria italica
  Peptide Sequence Number=SeqID_74470
tttaaaaaacaaactggcaacttttatttacccaccattctttgacagcacgaacataagtagatagcatagttacatagcacaaccaatggcacgatcgaccagacacaccagagcaccgtaccatcgaccagacacaccagagcaccgtaccaatcaaataaccacctacagtgctacactttgtacatcacccgcgcagcagctgcaggttggtgcacctgcagcgcccggccggcggccggcggcggcggcatgatgctcttggcgccgaccttggcgtagtagtactgcgtgaacggcgcgaacccgcgctgcttgtcgtcgaccccggcgaccatggtgggcgacggcgcgacctgcaggaacatgtagttcccggcgaagaaggtccca

SEQ ID NO: 8497 - DNA, 343 bp, Setaria italica
  Peptide Sequence Number=SeqID_74471
tggcatggttacaatgaactatccatgttcacaactcacttttgcaagttttacttttgcctcatccagttatttggcaccatccatcttcacaactcacaagacaattcttatcaagatttaacaggaccaattgatcaaggtagcatcagaaaatcaattatccagctgtaatacctttcgaggtactctacatggttttgcaaggtaactatacttcctgacattgatactgcggcatacttctcattggtaaaagaacatcaataagacattccaggggatcatttttcacaaaaagttaactgtgacagagcatcatttccatccccttaaccttcca

SEQ ID NO: 8498 - DNA, 420 bp, Setaria italica
  Peptide Sequence Number=SeqID_74472
catactagtatacgccacttattcagcaaatgcctgggacaatatgagaagctaagaaaagcaggccttccttgacaactaccggaagtttcctatgtttgcggataatgatctctctgaattcgatgaatcacgggaaataatagagagtctagttgatgagtacaaggcttgcgagtcaccagattacattaaatggggaatggaggatcctggagaggcaaatgttgcagctgcactggattctaagttagtggtgtaaatatcaaggtgatgtctcagcattaaacattgttaacacagaaatagtttgatgcacaatcttatgaattgaatagctacatggcgaccttgttgaacgcataaattatttggatctctctgttcattgtcttcctgcaaatagtgagtccttgcatt

SEQ ID NO: 8499 - DNA, 1757 bp, Setaria italica
  Peptide Sequence Number=SeqID_74473
ccccaccaatctcactcgcagttggtgcgcgctcgcgtccaagccaagcaaacccaaaaccctagcctgccgccgccgctgccggccgggatccctccctctctctccgggcccggcgtaccctatcctcgtagcaaccctaaccctccccgcctttgccgccgccgccggagttggggggcaaaaatgccgcgcgagatcatcacgatccaggtggggcaatgcgggaaccagatcgggatggagttctggaagcagctctgcctcgagcacggcatcggcaaggacggcctcctcgaggacttcgccactcaggggggcgacaggaaggatgtgttcttttatcaggctgatgatcagcacttcatacctaggtctcttcttattgacctggagccaagagtgatcaatggaattcagaacagcgagtataggaacctgtacaaccatgagaacatatttgtcgctgagcatggtggtggtgctgggaacaactgggccagtgggtatcatcagggtgagcaagttgttgatgatatcatggatatggttgatagagaagcagatggaagtgatagccttgagggttttgtcctttgtcactctattgctggcggaactggttcaggtatgggttcttatctattggagacactaaatgatcggtacagtaaaaagcttgtgcagacatatagtgttttcccaaatcagatggaaacaagtgatgttgtcgtacaaccttacaactcgcttttgactctgaagcggctaacactgaatgccgactgtgtggttgttcttgacaatacggctcttaataggattgctgtggagcgccttcatctatcaaatcctacttttgcacagacaaactctttggtctccacagttatgtctgcaagcacaactactttgaggtatcctggatacatgaacaatgatctggttggtcttcttgcctccttgatccccacaccaaggtgtcattttctgatgacaggttacactccattgaccgttgaacggcaggttaacatgatacgcaaaacgacggtattggatgttatgagaagacttctgcagacaaagaatataatggtgtcatcatatgctcgaacaaaggaagccagccaggctaaatacatttccatacttaacatcattcaaggagaggtggaccctacacaggttcatgagagtctgcaaaggatacgtgaaaggaagcttgttaacttcatagattgggcccctgcaagcattcaggttgccttgtcaagaaagtccccatatgttcaaacaacacacagggttagtggtttgatgttagcaaatcatactagtatacgccacttattcagcaaatgcctgggacaatatgagaagctaaggaaaaagcaggcctttcttgacaactaccggaagtttcctatgtttgcggataatgatctctctgaattcgatgaatcacgggaaataatagagagtctagttgatgagtacaaggcttgcgagtcaccagattacattaaatggggaatggaggatcctggagaggcaaatgttgcagctgcactggattctaagttagtggtgtaaatatcaaggtcctgcttgttacccaaagattcaactgtagctgtccggtagttatcagtttgatgccgcctgctcatctagatcccatcaaagtgctatcagagcgggttacgctcttctctgcaatcttgaagtttccttacccaccccccccccccccc

SEQ ID NO: 8500 - DNA, 608 bp, Setaria italica
  Peptide Sequence Number=SeqID_74474
tattatgttcctactgatgaaagggcatcactggaagatagccacttctatttggagcaatttttaagtaactcatccagtgagcagtttgcatggacatatttctttttggatgttcctcaaggttcagctggtgcacttatccatgtacagcttaagtcggataaagaattgaactacgagttgtactcaaaatatggtggcttaccatcaaatgatacttgggattattatgcgagtaggacaagcagcagtaatggttcactatttttttcgttacagaattccacaagttcagacatggatctatcaattttttatgctaaagagggaacttggtgctttggggtgaagtatccaagtggtagggcaaattctcagacgtacatgtctgtatcccttcagggttgccatagaaactgcaatcagaaaggtgtgtgtcattcctcagttgatgaaagtgggctgacgttctacagcttctgcacctgtgatcgtgatcatggtgggtttgattgcagcgatgagctagtctcccctaatgggcacatttggcagtctgtctttctaattgcctcaaatgctgcagctatttttaccttgtcctt

SEQ ID NO: 8501 - DNA, 1745 bp, Setaria italica
  misc_feature (1680)..(1745): n is a, c, g, or t
  Peptide Sequence Number=SeqID_74475
ctggactggctggagaggattgtggaaccttgcaagagggcggtggcagtttcagggattggattggagaggctgcattctgtggaactcgttgggtcaggttctcgggtaccttccattgccaaggtgcttgcgggattctttagaagggaaactagtcgtactctcaatgctagcgaatgtgtggctcgggggtgtgcgttgcagtgtgcaatgcttagtcctacattccgggttcgggaatatgaggtgcaagatgctatccctgcttcgataggatgttgcacgagtgaaggcccaatttcaacattgtcaagtaatgcattgttccggagaggccttccctttcccagtgttaagaccattactctacagaagaacagcagttttaatttggacgcatattatgtggatgagaatgaattgcctcctggtaccccaacaaggatcggtagttttcagattggcccattccaagcagacactgaagcttctaaagtcaaagtaaaaattcgtttgaatctacatggtctcatttcagttgaatcagctgctttgatagatgattatgaaaggaatgcaacttctgctgaccatatggaggtggattccagtggtgatgacacgggccacaagtcaagaaatgaaaggtctatccaacggcaggatctgccaatcgctgagtacatttatggtgcaatgagcaagcaggaattgctggaagctcaagagcaagagcagcaactggcttatcaggataaacttatggaacgaacaaaagacaggaagaatgcattagaatcttatgtatacgacacccgtaataagctttctgagaggtaccggagctttgctactgattcagaaagggaagaaatatcagttaacctacaacagactgaagaatggctttacgaagaaggtgatgatgagacagaagcagtttactgtagcaaacttgaggaactgaaaaagcttgtagatcctattgaaaatcgttgtaaagacgacgaagtgagagctgaagccatgagggagcttttgaagtgcattgttgatcacaggacggctgccaagtcactatctacacttgaaagagatgctgttgacaacgaatgcaataaagctgagcagtggctaagagaggggttgcaacttcaagaaaccttgcccaagaatgtggaccctgtactttggtcatatcaaatcaagagaaaggaggaagagctggatatgttctgtcaaaacatatcaaggcacaaggcttctccagcaaggacggatggcagcaggggttcagatcacatggctacaccagatagagattagatattcatgaggtttcttgactgtacgaccacgattgtcttacaatttgtagcaatatgtgaatgaatgagtttctgctaacaccgtcatctaattgaccctgtaccacactgggcccaccgtcatcttcttggttcttgaggtccagggtgcagttttcacttgagagcctactaatcacaattattgatacctgtgaattcttttcctgtactcggagcaaggttaggttgttgtctgcttcagtttgtgatgaatgaacagaagccaaagaaaattgtatgcaataggcctcataaggacagtgttttctttcccccgcttagcatgtttattgttgttgaataaccnnnnnnnnnnnnnnnnnnnnnnnnnnnnnnnnnnnnnnnnnnnnnnnnnnnnnnnnnnnnnnnnnn

SEQ ID NO: 8502 - DNA, 666 bp, Setaria italica
  misc_feature (1)..(37): n is a, c, g, or t
  Peptide Sequence Number=SeqID_74476
nnnnnnnnnnnnnnnnnnnnnnnnnnnnnnnnnnnnntttttttacacgacaatgaatccgtgatttttccattgccaaatgccaaccaccaataaatcagaatcagatacgatcatgctactaatcactatgatctcagacaacaaacatcacacagatcagaaacgtatactgtatatagtaggaaaacgtatacgtaagtatgcacaaggcaacccaccacatgctacacacgtgcacacaccaccacctacggtatctgcttgaccatggcgttgacgatgccgagcgcgttggccgtgaggtgggagacgccgacgaggtggccgcgcacggcctccctgacgccgccgccgcccgcggcctccgccttgaacccctcgacgcacatgtcgtcgttggtcagcgcggcgctcgcccacgtctgcacgctgtcgagctggaacctcacgtcccggctgctgctcccggtcgacccggtcccggcctgctgcccgctcctccccttccagaggcgcgccatggcgtccaccgcctgctccagcaggtcctcggcgtccccgagcatgctgacgcagtcccgcgcggcctcggcgcccagcggcgccaggtggcccgcgcccgccatcgccttcatcgcagccgtcgccgcccgcgcgccgccc

SEQ ID NO: 8503 - DNA, 428 bp, Setaria italica
  Peptide Sequence Number=SeqID_74477
gtgctcagagacagcagaagacatgcccacctgcagtgaaaacatgccacaaactaataaggaagcacacaagagaagcagatctgaaaggtcacgtggatcatcccccaattctgaaccttcaagtcactctcaccatgataatgttaagggatctcattccaacaggacttcctcagattcgagatctagatctccccgatcccagtctcgatttagagcacattctccatcttattctgctcattctagttcaaaatcaactcagcatgaaggatcaagatcaaatatcaaccatcctgttccattttcagtatctgcttcaccacagcacaagtcatcacctgatgtagagaacaaaaatctagagggcctgatgaattctcgcttggaggacaatttggagttcaggacaagatccaaagttg

SEQ ID NO: 8504 - DNA, 206 bp, Setaria italica
  Peptide Sequence Number=SeqID_74478
ctgtctgtgtgttctcggtttgctatgtgaggaaagaaatggtggttgtactctgcgatgacacacatacacagttcatacatgcacacatgcctacataaacatagcatgtacacagtacctccatatatgcagcaactatcttagcatgcatacaacttcttctgcgtgcagatgcatatgagcatcatatataatatatatat

SEQ ID NO: 8505 - DNA, 854 bp, Setaria italica
  misc_feature (1)..(13): n is a, c, g, or t
  Peptide Sequence Number=SeqID_74479
nnnnnnnnnnnnnttttttttttttaaagataagtttttggtacaacttgatttgcagatttaacattcaagcagagtacaaccaccatttctttcctcacatagcaaaccgagaacacacagacagatctagaaaagcaggcacacagtaacctgagatgacacacatacacagttcatacatgcacacatgcctacataaacatagcatgtacacagtacctccatatatgcagcaactatcttagcatgcatacaacttcttctgcgtgcagatgcatatgagcatcatatataatatatatatcatgtatgtggggtgtgggattacggatttgcagtgggttcatgcttcagaggccgccgtagcggatgtcggagaacttggacttgagccacttgacgctgctgcggacggtggtcttgatccggccctgcgtggcgaagacgttgtacgccgccaccctccgccgccgcttcgcctccgggtcctcgcgggcgctcggcccgttgaagctgtacgacttgccctgcccggcgccgccgccgccgccgacgtcctcgtagtcgtacccgccgccgcagccgtagtacgccgacgagtgatcgtgcggcaccgacctgcacttctccatgggcggtcgggatcctcagaaccaccaccgcttgatgatcctcttgttcttggatttgctcgtgagatgagtgggggagtggcgaggggaaggtgggtgatgaatgaagctgagctcttactcccaatagggacggtacgggaatacctacaagaaaccaaccaaccgacttagaatagaatacctacttagttacttaggaattttagactacgtaga

SEQ ID NO: 8506 - DNA, 275 bp, Setaria italica
  Peptide Sequence Number=SeqID_74480
ttggtcatacaacaaaaggaccatatctcattacatccttctctgagaaacacaagacttatttcgttttgtggttcacaatataggggacttatcttcccacttattcaatcttttcaaggcttcttccacctctttgttccagttggtcctgaatgtaacccataccaggatcagtgtctgcatcagggttcccccaatcataccacaccaaatacccgccgctccaaggtcaaagtagaacccgaggaggcatccaagggggatgcccacga

SEQ ID NO: 8507 - DNA, 393 bp, Setaria italica
  Peptide Sequence Number=SeqID_74481
tatcatcaggagcgaacaccgttgctgctattgaactagcaagaagccagaaaacaaggaaaactcattgtgactgttcttccaagtcttggggagaggtacttgtcgtctgcactgttcgatgagttgagaaaggaggctgaagccatggaaccagtgccagtagactaatctcaccaatccaaacagagtactggatatttggtgcataataaacttcccagcaaccatgttgcaattgccagctgtacttcaattcttctcatcaaaattgtactttcagtccccctaaaaaactctccttaaaaaaaaggttgtactttaagtctgtcatgtgcagaccttgtgaaaaaaagagcaaaaataacaatgaaaatgtttagcaagaacaaa

SEQ ID NO: 8508 - DNA, 1467 bp, Setaria italica
  Peptide Sequence Number=SeqID_74482
tcctcctctcttcatccacggtgacacagtgagagagagaggtagcaagctagagggcgtcgacaatggagaggatgctggcgaggctcgtgcgcaggaggtcgctcctccaccagggagcggcggcggcgtcaatggagctggccagcgcaggcggctcgccgtcgctcttctccacgcagcagcagcaagcggccgccgcggatcccggcgtcctgccggccgggctcaacatcagggactccgcgtcccagctgattggaaggacaccaatggtttacctgaacaaggtcaccgagggatgcggcgcccggatcgcggccaagctcgagttcctgcagccgtccttcagcgtcaaagacagaccagcaatttcaatgttggaagatgctgaaaagaaagggttgatcactccaggaaagacaacactgatcgagcccacatcagggaacatgggcattggcttggcgttcatggctgccctaaaagggtatgaactcgttcttacaatgccctcctacaccagtcttgagaggagggtgaccatgagagccttcggtgcaaatctggtccttaccgacccaacaaaagggatgggtggaacagtgagaaaagcaacagagctttatgagaaacatcctagtgcatacatgcttcaacagttccagaatcctgctaatgtcaagatacactatgagacaactggtccagaaatatgggaggatacacttggacaggttgatattttcgtcatggggattgggagtggtggcactgtcacgggtgtcggcaaatacctcaaggagaagaaccccaacgcgaagatctatggagttgaacctgctgaagcaaatgttctgaatggtggaaagccaggacctcacctaatcactggaaatggcgtaggattcaagccagatattttggatatggatgtcatggaaaaggttcttgaggtgaaaagtgaggatgctgttaagatggctcgagaattagcagttaaggagggtcttttggttgggatatcatcaggagcgaacaccgttgctgctattgaactagcaaagaagccagaaaacaaaggaaaactcattgtgactgttcttccaagtcttggggagaggtacttgtcgtctgcactgttcgatgagttgagaaaggaggctgaagccatggaaccagtgccagtagactaatctcaccaatccaaacagagtactggatatttggtgcataataaacttcccagcaaccatgttgcaattgccagctgtacttcaattcttctcatcaaaattgtactttcagtccccctaaaaaactctccttaaaaaaaggttgtactttaagaagtgacatgaaaacataagtagtgttctcttaaaaagatacagcaattacaaagacataaataaacattcaaaaatttagaacttgactcctgatgtggctaatgtggaatttagt

SEQ ID NO: 8509 - DNA, 380 bp, Setaria italica
  misc_feature (365)..(365): n is a, c, g, or t
  Peptide Sequence Number=SeqID_74483
ggacattttctgcagagggcacacggtgcttatcaatccagagtgcaaatattgaaccactgcatcgatctgttgtagcaaatctccgtggactctacgtctttgagagaaacatcaatattgatttactgaagactgtccttacaacttcaaatttgctgtcatcattggatctgcaggatgctcgtatcaagtctctgcccaatgaagtttttggtttgtttaacctgcgttttctgggccttcgaaatactggtattgaatacctaccagaagcaataggaagattgcagaacttgatagtgttggattgtttcaatgccaagctatcaactttaccaagggcatagctaaacttaaaaggntgaggtacttgtatg

SEQ ID NO: 8510 - DNA, 1065 bp, Setaria italica
  Peptide Sequence Number=SeqID_74484
gttttggtgcacaaaactactttgatgaacattctgaacaggtaaccgacagtctcaaatgctgaacaatgatatagatccttacatagttcacctgctctgctcaaacaagcaaaagaatggcgcaacactgcaacaggagggtgtcctgctcctttcctcacaaagcaaaagaatggtgggaaacagcatccctacccaagctcacaaagccaaggcacaagccataacaaaaagaagggctgccaccagcctcgacgcaccagcgatggtcggaacggcgccattcgtcggactcggacccgcgcagtcgtcgttgttgccactgaagcatcccgggtgcatggcggtcttgggcacttcgccgtccaccttgaagctggtggcgggcttcccgccactgaacaggacgcaccagaagtacggcccaccgccgtcggtgccgctcacggccaccccgatctccgtgtggttcttgctgtgcagcacctgaaggtccttggcgtcgttgaccaggatgtccaaggcctcaggtggagaggggtacttggactggcaagccacgagcctcccggtgatcttagagagcgttgccacttggacaccacagtccggggcgaatttctcggcaaaactggactccggaggcttcttgtcacgcacatcgctgcattggccttgatatgctttgatgtattgcagagcaatgcatcccagaccttgattatcagaaagagaggaggccttgctggcagtacggttgctgttgaccaatgacacgagctgatcggcagggttgttcgtgctgtcggcggcggaggcggcggagagcaggagcgccggcagtagtagggcggccaggcagcggccccgccggacatcgccatctgagctctcctcctcctcctcccccggcccgcgcgcgcgctggggacaaattgggatctgggagctcgtgcgagcttggagggtgagctggctcggcaagtgagtagcagaggatctcttcctccgctcgatcccgcttcgagctcttctttttatggctttttttcggtgcgcgcc

SEQ ID NO: 8511 - DNA, 337 bp, Setaria italica
  Peptide Sequence Number=SeqID_74485
cgcaagttactactacatacagatatatttttttctacgatgggatcataacaggggttaagtctagctaattaacatactccatatgggctactgcatgtatacacgatcgagtttcgagtcgagcatatatgatgcttaattcatgttggacgatggaaccacatcttccgctgcttgatgaactactccgccatcttgttgatgtcgtctccttcgccaccgccgccgcctcgtggagcacgcgccaagccgtagacggagggcctggacaccacgttgtggacctcgatcttgggcaccttctcaacggccacctccccggccgcgccggcgg

SEQ ID NO: 8512 - DNA, 656 bp, Setaria italica
  Peptide Sequence Number=SeqID_74486
acggcttgaagaagcaatgtgtttatcttgattggcgacctttctcgcacggtcagttttcgttcttgatgtcttgatggtagatagttggggagctgctattaagaggcactgttgaacgttaggcgttaacacaaagaaagcaaagctgttccttttgctgttgggacttgggagtgtagcttagggtctggatgatgatattgaatgtttctgttgggaatttctgtcgtgggaaaagatattgccatgtcaacaagccgagatcatggtggtattgtggcaatccgtttgctgaatttgtcttatatctatcaaatagctgggtgcaattttgtgttatcagtagtcttcttgcccttgtttagtccaaacatagagcaatggtttgttttcttgaatggaaactgaagacatctataagattttaatgtgtgaattcttaaggactttgagatacatggtgaaggaaaacgaaagatgctgggctgttcaactaatacagatagtaaccttatctcttgtttttgaaggtgtagacacgaagtattggtcgtgccagaatagtttgaacaatgttgtctagtgtccacaaagagaattaatatagccattctgtccgcaagatgaacaaatttgtatggatgccttatgca

SEQ ID NO: 8513 - DNA, 873 bp, Setaria italica
  Peptide Sequence Number=SeqID_74487
caccactgcagactgcagtcgccgcgcatggagctcggaggcggagggcgacgaggcgccggcgaccgcgtccggcggcagctgcagtcggtgggacggttcgcggcgtacctcggcggcagcttcctcctcctctccgccgcctcctccgtcgccgtccggtccctccgcgccgtctccgaagccaaccagaggaagttcgctatgccgtgcggcgcctgcgaggggaagggaacctacgcgtgcaggctctgcaggggcagcgccaccatcgagtggtccccgatgcacgacccggtgttcgtcaatccatgcctctgccctacctgcgatgggaccaaggtgcagcgctgcttgaactgcctgggaaaaggttacgcttgaagaagcaatgtgtttatcttgattggcgaccttttctcgcacgacacgaagtattggtcgtgccagaatagtttgaacaatgttgtctagtgtccacaaagagaattaatatagccattctgtccgcaagatgaacaaatttgtatggatgccttatgcatatcatgagtcttgaaaaaactacccgtttgtatgctaatctcttgttgaaattccatatggaagccgtctggtgtttactggcattgtgggaagtggagccacttcaaccgtgaatggacaatttagtgtggcctgcagactgagactgcatcacacagctgtggaatctgctctggtaataatacaacttaaggaccttgtgctctggtatttccgctcccattctgtttcctttgcgactgagcagagctgcctggtccagacgcctgcagctggcagggctgcctggccggtgagctgcctgccaggccttcaagcaaacacgct

SEQ ID NO: 8514 - DNA, 660 bp, Setaria italica
  Peptide Sequence Number=SeqID_74488
cgcagatgtgctttcttcggcttctcctcgccccgcctcagcttctcctcgcccccacgctgggccgacgtccgcaccgggtcctccttcctcgtcgagcttgcagcctccccctgaatctggatctggatcagaacaggaatggcccggctccgacaacccgagcaacaggaagaccaagatagcggaagtacaagaacaggtgaatgctgcagatgtgcttacttcggcttcttccctgccctccgcctgccccacgcctgcattgggtgaggaagacgaagatccgtttggatcctgtttattgggtgaagaaactccccctccctctactgacacctatgaggccaaggagaagaataagaagcaaagacagaacaggaaaaggaagaaggagcatcaacagaaacatgtggccgagccgatggaccctgagtcaccaccagaagtagagcttccacaacagtggcaccgccctcttcttaatccatcggatgaactgtatcgcttcttcgaaaaggttatgcaggagatgccacatgcagatgagaagctacgcatagatttccctgattttgtatatgagaacgcggagctcgcgtgcactatctgcaatgccaaagagaaagatgaagttgaatgggttaagtcattggtggc

SEQ ID NO: 8515 - DNA, 1330 bp, Setaria italica
  Peptide Sequence Number=SeqID_74489
tggtaaaaaggtaagtaaggtagtctattctaactagtaaactattgttggccgagccgatggaccctgagtcaccaccagaagtagagcttccacaacagtggcaccgccctcttcttaatccatcggatgaactgtatcgcttcttcgaaaaggttatgcaggagatgccacatgcagatgagaagctacgcatagatttccctgattttgtatatgagaacgcggagctcgcgtgcactatctgcaatgccaaagagaaagatgaagttgaatgggttaagtcattggtggcctcaactcttaaagatttgtatgagaagaatggactacctacaccagatttcaagtttcttcgcaagcccgattgctgctttccactaaaacagattctagattctcaccaccgtctcttcaaaacgattaggctatttaaaggagctgatcggatcacggttaaagtagcaacatctcgtgggaagaaaatttttcgggccgttcttatagcgatattgcaggtgcttcgagatggatacacttgggatggaaaactttgtcttgatgatatttattggactgaggttagagggtttgttcaggtcatgattcttagaaggccaacaaaaaagaatggcaaggatgagcagttagcatcagatatgaagagtatttggaataatctgatgggcccatattttgatgttggagacggaatacttcctacatacttttcaaggctcaagactgatctcacaaagggtgtcaattcttttgttcatttgtattggttttttgattaccttatctaccacccagcatttgcttcatcatcggcaagacgtaatcttattcttgaactacatttagtttcgaagtccttccgagtcaagaacaattcattcttaaagaatctttttacagaggtatctgaacagccttggcgtgaggatgctcgtccgtatcctattctgaaaagaatcttgaactacaggaagaatatccagaaaaatcagacagagtacaaaaatgtccatgaggtgagaatagcaacaaaagtaggtaatgagataaaatgggaaagctacagcaacccacacaaagttattgtgcatcatgtggctgttcaagtagatcaactcaaagccgctgttggagatgaggaagctgttggggttcgagatgagcttgctaccggtgatgatgaagtgagtgttggggagaaagatagccaggaaaatgatgatgatgataagatgggtgttggggagaaaggcattcaggaaaatgatgatgctggtgctgctgatgatgctgctgatgcgtagatagg

SEQ ID NO: 8516 - DNA, 316 bp, Setaria italica
  Peptide Sequence Number=SeqID_74490
aacatgcacatcacgctggttgactgcatctagaatgaagcaaagtgcagaaagcgaagtaaaaatgtatgcttgtggggtgtcacgacagaacagcaagctgtgatgattttacgaggcttggttgttggtgaccctgcccatcccgttgttctgctccaggaagcgcacgacgacgcaggtgatgttgtcggcgctgccccgctgggaggcctccgcgaggaggcgcttggcggcctgctctgaatccaggatcggcttcaccatggccacggcttcctgcaagcagaggaggcagaacatgaagaaagcttgg

SEQ ID NO: 8517 - DNA, 2184 bp, Setaria italica
  Peptide Sequence Number=SeqID_74491
ttttgtagactgatcaaccctctgcaaatggatcaactacaacaagagcactggaagtttgttgctgacttcgtagctttatagcactctgctctgctgtgtcaacttcagcatcttcagccttcttcagcaaagcagactcacgttccgggaattttggcatttcggccaacacatctgccaaagcagagccttttctgcttagttcaaaatattcaactgctctctgttgtatttcaacatcaatatagctctcatactttttaaatattgtgaggatttgttgctgcaatccaacatcaggaggttgagtgtgcatcaatatcttggcataggttgagagaagaatggcaacagtacttgtcgatactgtcggaagtttatcatttataatagcaaacagttccttagggctacaaccaggtctccgggccaaaagatggccatactctccaagaaggtaagcactcaccttgaccatagtctcatgcatagcaggcttatcaagatattctctcgcctttgctgcagcatatggctgcagatcttcgttgttagtgacaaattgcaccactcgataccatatatcatcacttacaaaatctcctgctttatctataagctgaagaataacatcaacataccatgaaagatctggagcaaacttctctgcaagaatagctgccttcagagacagctcttcacgcattgcaaattcggctgtgttaagatactgcaacaactcctcaacaatttccttcgcatttgtaacatcacacataccatatagtaaatcaagagccctccgtctaatgctgatatctggatccttcaaagatgtaatgatctgagcctggtgccttttgatgatatcctgcacatctgttactaacagcatcctcgtcatgttttccagaccaagataccgaatatttggttcccggactgcaataaacttcccaagaagagccacgcactgtgacatcatctccttttcagcatccagatgcatgaccagagcaagagcttcaaagagaacagcatgtgaggcattattcttgttaacgtttttaacaacatcagtgcccatcaaaatgcgctgtaaaacctcaaacaaagctcgtcttgcattgggatcttcaatggtagggaagtactgaagagccctcattgtcttaacctgaagccaaggggatgggattccatagtaagtgtattcttgtggaatatcttgatttcttgctaacctctccaatattcttacacattttggaagacaattccaatatgcttcagcattgttggatactagtgaaacaaaaaggctcatgacagatgttagcacacctaggtcacgctcatctagaagttgtgccattcgatcagcccagccatcaatattcacaacatcaggattcttcctataaagccgtaaaaggcatagagcagccttctttctgacaacaggacggcagctacttgatataagaagtttctggacatctggggctagtgactcagaaaattctttcccaccaatgttacccaccattgtcaatgctaagcactggaaagtctcatttcgtccaattatgtcattccgcactgtatttattaccatccttaggaaatcattgttctcattaagtaagcaagatgtcacgatatacccaacctgcttctcggggtattttggtgctgatatcaaagaaacagtttccatatgcccaaaatcaacatcataacctagcatataaatgtaaagcattttccatacatactttttcttctcatatggtgataagcccttctcatttttgaaccgcgtgcggatgttgcctagctccttgtcgacgcggaggcgctcctgctccttgttgtggcagttgcgtatgtcgctgatgaagaccgagagcccccgcatccccgagagcgccatctcctcctcccctggctgcccccaccgccgcttctagaaaccccagatccgcgtgccgccgcgcgagatctggcgcccggatcgggggagcaaaaccctgcggggcggcggaatggatcggcgcctccgcgcggggaggaggaggaaggggttttgattcggccgcggcggtcgtcgtaggtgggcggcggggaggtgcggctgatctgcctgcctgtctgccccggcggtggtgtgtgcgtgtg

SEQ ID NO: 8518 - DNA, 2169 bp, Setaria italica
  Peptide Sequence Number=SeqID_74492
tttttttgaagctcaacacaactatggaaacccactgtagtaaccgatcattcagatagtccaaaggattgtagctatgcagccacacgacacacacaccatgaacaaaacaaaacctattaatttcctttccctattccaacctttattggtacaaattgtaatgcaatgcgcataaaggcaactttacaatcggcttggtggaaaacctagcaccttatataaacacacaaaactaccgatattcaccaccagacctgggcaatacaagttatacaaatgggccaaaaagggatgggatggtaatgacaaacaacaaattaagattacacaatatggcaactgctccatggaggggcctcgcaacaggcccaaaagaatctagcgctttcccggtgaagaatccagctcaagtctactccgccagccctttctttgttccacccgttgtgttggcagcaagatgcttgtggagatgttagatcctcgtattaaacaactgtcatgtacatcaaaacgctattgtttttgtttttaattctcattctcatagcaatccagcaagcatggcaccggggtcattgtatgtggcaggtgcggcagcaggcaattgtggctgtaccggggctggaggtggggctgcctgagtccttgggatatcgatcaaatgctccttgatgaattccttcaactcgaatgtcaaatattggtcgcccgatgcaactgttagccggagttgtgtcctgtcttgtggatctgtttcaactcttatcagacaaagcatcgcacgtgttgcttcagaaaagaatgtagtgcacgcaaccagattgttcaggttgttatcaagtccaggagcaaccgccaagtgaaggctcatgaaaagattagctatctcaggaagaggcagcggtttcacaccttttaccacttcttgaaccttcagcaaatgaacagttagtgccttccactgggggaaaaattcttcagggctaagagttataggttgcaaaaatttattcaagacaacagggagtcgaagtttggcatccaccagtgcagttccaaacgtatatgagaaatcaagaacagcaacatctctacttgcacggagatttgcgacctcaagaggaacttgcacctgcgctcttggagggatagtatctggaactgacgagagctccatttttaaatgactaggaggtaaaatcagagctcgcactgacataagaggtgaagtatttttgttccctaggaacagaacaagacgaccatgatgggcacgccattccgctttcaaaccaatctgaatgtgaggatcctcatacagcactccactatcttttgtgcacaatatatgaaacttctcctcaacattgacaatcggctgaactgagttggactgatcctcaagggtagctagtgccaagtcacctactggactttgattggcgtccaatccttgggcaggatattgctctacagcaggagggccctcaatcgcaagaggacccaaaagatctgctaggaggtctgcgggagaagttgaacgggatgtcgaaggaggttcaactttagtctcatggttggtctcagtaatgtttgtggcttcgctaacttcaacaggaccattttctttgggagcttcgacgggagggttgggagcttcttcataagttgcactgctctcctgactatcagtaacagtttggcttggcatcttcacaagagttagatgattagctgctggcgttgatccatttgcagagggttgatcagctacaacaagagcactggaagtttgttgctgacttcgtagctttatagcactctgctctgctgtgtcaacttcagcatcttcagccttcttcagcaaagcagactcacgttccgggaattttggcatttcggccaacacatctgccaaagcagagccttttctgcttagttcaaaatattcaactgctctctgttgtatttcaacatcaatatagctctcatactttttaaatattgtgaggatttgttgctgcaatccaacatcaggaggttgagtgtgcatcaatatcttggcataggttgagagaagaatggcaacagtacttgtcgatactgtcggaagtttatcatttatggtctattcctacctagttgtctagtttccttaaactt

SEQ ID NO: 8519 - DNA, 384 bp, Setaria italica
  Peptide Sequence Number=SeqID_74493
cccaaggacgaggtgtggccgttcctgctgcggttcccgatcgggtgcttcggcgtgtgcctgggcctcggcagccagacgatcctgtggggcgcgctggcggcgagcccggcgatgcgcttcctgcacgtgtcgcccatgatcaacgtcgcgctctggctgctcgcggtcgccgtgctcgtggcgacgtccgtcacctacgcgctcaagtgcatcttctacttcgaggcgatccggcgcgagtacttccacccggtccgcgtcaacttcttcttcgcgccgtggatcgcggccatgttcgtcaccctcggcctgccccgggcctacgcgcccgagcggccgcacccgggcgtgtggtgtgccttcgtcctgccgctcttcgcg

SEQ ID NO: 8520 - DNA, 543 bp, Setaria italica
  Peptide Sequence Number=SeqID_74494
ctgcaaaggctggagtcattgggttcacaaaaacagttgctagggaatatgctagcagaaatattaatgcgaatgttattgctcctggatttattgcatcagatatgactgccgaacttggagaagagcttgagaagaaaattctgtcaaatattcccttagggcgatatgggcggccagaggatgtagcaggtctggtggaattcttagccctcagccctgctgcaagctacatcactggacaggtccttaccattgatggagggatggtaatgtaaggctttggcaaactctcactcgggcttcaaatttcccccttttgtcctattatttgtcctaaaaagactgtaattcacagtttttaggtgtcccttttttaagggacgatttgttttttgtgcagtgatttctagtgtctagtttatagggagagtgggaacaataggtagaaatgtaaggaatttgcaggcatatattttcacttcctttgtgagcgattacttccagacatgttttggtccatgtccatctgatatgagcatg

SEQ ID NO: 8521 - DNA, 607 bp, Setaria italica
  Peptide Sequence Number=SeqID_74495
taaaccatataaggcttgaatttgcatgcacattgctatcaggcatcagcgactaattctaacacgcaggcacaattctgaatctgactatttgtttattctgaaataatggatgccagattcttgtaacacagttcaatatgctttatgaccattatagctggaatggaataggaatataagcttaaatgatttaagttccctaaactttcacacaatagacatacagaacaaaatcaagagcttaccttgatagcactgatatgctcagggctagacgtatcatactcaaatttcataggatgccaagtcatttgtcttttggatttgatgactggttccatgaggtataggtcaaagttcttctctccagttcatcttcaagacctttgatagaaaataatgtctgcacatagtgttcatccggaatacaatcatgctcctgtagaactgctcctttctgaaaggttaagcgtagacataatgtctgagacagaaaactaatgaacaagaaaccttaagtgctatgagcaacagctagaggttcacattttccttttgcaaccatatacataagtatgtcacatcagatctacttcattcttgt

SEQ ID NO: 8522 - DNA, 618 bp, Setaria italica
  Peptide Sequence Number=SeqID_74496
aaatgggaggcaacaggcactgaatgccaaatttggcacaaaactttatatggggacattacgtacaaggcctaataaaagtgtacaagagtgaagtaaaataaaaacttacagcatttggccttcgtccaagcaacctcttggtcactaccatctgcagtggttaaaaccccacagaactgttactcccgcaggctgttgaatgtgaaacctatactatttgtgttatgttggcacaaaactagttatattggtgtagtgttttgacagcttcacgtaagatataagatcataataaatctgcactagccataaggaaatgggaccaagatcatggtgctgacaaaacagacactaatcaagtggcattcttgtagctgttgtatgaagatggttctggatgtgtagactacgtagagtatccctgtttgtggaaaagaagaccagaatatagatctcataaagcaaccgcagataagtaactagaccatgaaagcatttgagcagcttgcttagtacttatccaaatcagcaataggacgctaccattcttgattgaatcacaggtgaccatatatacaacctaactaagggaaataacaaaaatttaaacaaaaa

SEQ ID NO: 8523 - DNA, 1361 bp, Setaria italica
  Peptide Sequence Number=SeqID_74497
accagatggacactatatctttttgcatgtgtttcaatacactgtctaagaacttgtacaataactaaaaagagaaaactagttcctttttcttattatacaaggggaagaatacgtataagagcatttaagctattgttacagctatcctgttccgttagtagaaagggttgctaaacattcccttccttcactgcatctgtctcctgcatattgcatagtgatggagctgacaaacttcaaaactaatgctctgtacatccaacctcttaagtcctaactgtctaaacgcactccgatcactgccaatactctatgatactccatatctctgtagctgcatctgcaaatactatctgctaatgaggctggtaccgattatgaacagtatctgacccgtcaaaacggtgaggacaagattgtgtaaacattttgttaaaagttaaccagcagctgagccgatttcggcgggccaatggttccttgctccaacagatgcatggccgcactatatgagaactttctggcaaatagaaaacatggaacggaggtaccattgcattggcaccactctgtcctgtgctccatttcatagttgacatggttgatactcttgatagcactgatatgctcagggctagacgtatcatactcaaatttcataggatgccaagtcattttgtcttttggatttgatgactggttccatgaggtataggtcaaagttcttctctccagttcatcttcaagacctttgatagaaataatgtctgcacatagtgttcatccggaatacaatcatgctcctgtagaactgctcctttctggtttctccgtaaattgaaccctaatcgtctagcatttggccttcgtccaagcaacctcttggtcactaccatcttacaatgtcttctgaatacttgtaatacattcttgtcacggacaacaacttcaacatgttttctggtcaatactacccactgagatcctttcctccatttatcctttggaatggcaggagacatgttttgattataacgcttctctgtcttgtcaacaaaactgtctacaaaacttttaggtgaagccatcaagtaagtatatatgtagctgaaattgtagagaggaacacagctatcagagagcaaaacaaagcgctggttcgcgggatcctggagcgctgccgcgaacaacatcttctctgccacgaccatggtgtcttcgccccacaccaccttgacgctcctcgcaagttgccgcccgtagaagtacggcgatcccgtggtggtgcggtcgaggtggaaccccggcgcggagtgcacgtacaccgagaacctcccctcctcgccgttgcggaagaa

SEQ ID NO: 8524 - DNA, 298 bp, Setaria italica
  Peptide Sequence Number=SeqID_74498
agaaaaactgaagtgtaaatgaaaataacataatcacaattcatgtttcccaaaactcaccacatgatatttttccttgctcgttagcataaaccttgataaattccccctgcaacagcaaatagaagatttccagaaaaaataacagtagaagttattgaaggaaatcaattttctaatttctgcaaagcatttaacttgcatcctaccttaactcatttgacaaagtatattggtgattgtgatgaaatattcgttactttgtttaaattttaaacttttttactttaaaacttta

SEQ ID NO: 8525 - DNA, 461 bp, Setaria italica
  Peptide Sequence Number=SeqID_74499
aaagtacagcattgtagtataaagatcattcatgccagatctctgaagactagtgcgtagcatcaccaaggcaggtgccaaacaccctgcagacctttgggcgcctattttaccatgatagttgtttcttttctttaagtttaaatggttgttcctagcatcgtagcatatatgtaactgcagccagtggcctgcaagaccttaacaagactcgcgttgtaaaactctgttttcctcttcctaacacaaagatatgcacctctcctgcatattctcgaaaaagaaagacaaccacatgacaaaaaagtacctttcttttcctatcatctaggggctggacttcaatggctagtaaagtgtccacatcatcggctgtaacaacatagctaggctgccttgctccttctatgaaatttacggagccatcttctaaatggcgtacccactcaaaattacaagtt

SEQ ID NO: 8526 - DNA, 618 bp, Setaria italica
  Peptide Sequence Number=SeqID_74500
ctcacttggagtaacatgatggtttttagttaaccgaaatagacaaccccaaatacaacttactaagacttgaactggggaagacattggtgaattgaacgtgaggatatggtgtctggggaacaatatcaaagctgcttttgcttgtagtcaccaatacttttccagcaggaggatcagtaggtacaggatggctggtattattcgacaattcagtatgccatggagtaatttggtaccgcgactcccttaatgtttcctcaataacaataagttgctcctgcatatgcctaaacaaaaccttcagattaccaacaattgattgggcatcgagaacagagggctggagattatcatactcagacagaagaggcagcaaagaagatatgaaagtcgatctttcttgttgggctgcctgcaatgcatatgttagacggatattctcctcaataatatcttgcctgtacaacaaagcttttgatgctgcatcaactaaatcttgctgctgctgatcaaatgccatgcgcatataggcgatacgtttctccaacgtgtatttctcactaagtatttgtgcttctttcacagagtaatcagcgagatgcttctttaatcgtg

SEQ ID NO: 8527 - DNA, 1956 bp, Setaria italica
  misc_feature (1)..(26): n is a, c, g, or t
  Peptide Sequence Number=SeqID_74501
nnnnnnnnnnnnnnnnnnnnnnnnnnataggacctgctcttctgagagggcagaaaaaatattatcaacataggttgctgttacttctttgatcagtttacaacaaaatcgtgtgtgaaattttacaacagataaaagacaacactaacatatacgccgcacctatcaaacgatatgctacatacattagaagaagcgtaaatacaaggtaagtgggtctacttgaagaaaaggcccttctttcttcctcttctcctctcaacagccatatttttgaacaaccttaatactagaacaatagtatcccgcaacagtgtattttctgctggcttcagattataatcaacaccatcagcagatataatcaaaaactctgtttgacgcccatgtggaatctgaatagcagttgcttgctgaaatttctcagtgataacaacaccacgctgaccaatacatttaatgctgtagccctctctctttattgctaaaacagctggttcccacatgtctaaaaatctgacctgaggctgttggacttggacttcataggtcacgtgcccaatttcaagagttttcttaataagctccttcgtttcaggatcacatgatatttttccttgctcgttagcataaaccttgataaattccccctttcttttcctatcatctaggggctggacttcaatggctagtaaagtgtccacatcatcggctgtaacaacatagctaggctgccttgctccttctatgaaatttacggagccatcttctaaatggcgtacccactcaaaattacaagttgtggtaccattgatggggtaaccgcttgctagaagttctcgtcccggaaaaggttcacctgtgattcgaagcccttctatacctggcaatggatcatcatctgcagcttcagagaaagaagaaccaggctcctcaagaactgtaggaagataaggatatgaagggtttgcatcctcaagaccagatgccaaattaggtgagtccccaggaccccatcgagtagaaggttcttgggtgttttgggattcagcgctctctgaaccatccagtacatcatttctactaagacccttgaatggtgggttttgactcggggtctcgtgaaaccggacagcatgagaatcaccttgagatacttgagcagaaacatctgtcctaaattggcttctgctcgaaagagagttccctcccatgtcatcttgttcagcatttcttgtaggaacctcacttggagtaacatgatggtttttgttaccgaatgcaccccaatcacttctagcttgaactggggaagacattggtgattgaacgtgaggatatggtgtctggggaacaatatcaaagctgcttttgcttgtagtcaccaatacttttcccagcaggaggatcagtaggtacaggatggctggtattattcgacaattcagtatgccatggagtaatttggtaccgcgactcccttaatttctcctcaataacaataagttgctcctgcatatgcctaaacaaaaccttcagattaccaacaattgattgggcatcgagaacagagggctggagattatcatactcagacagaagaggcagcaaagaagatatgaaagtcgatctttcttgttgggctgcctgtacaacaaagcttttgatgctgcatcaactaaatcttgctgctgctgatcaaatgccatgcgcatataggcgatacgtttctccaacgtgtatttctcactaagtatttgtgcttctttcacagagtaatcagcgagatgcttctttaatcgtgcaatctcttcttcaccttctttgaccttaacagtaaggtcctgcttccaggatatgtttgagttcatatctgaaactggcagtaacctggaatcataatctccatcttttctgtgcctattgggagaaagggaccgagatgaaggagtggag

SEQ ID NO: 8528 - DNA, 166 bp, Setaria italica
  Peptide Sequence Number=SeqID_74502
tttttttgtaacatccaacggaaattatatctagtagcaaggacgaataaagttttatccttgcaagatcagaggaattgtgctgtactccatcgaacaaatccatattgtctaccttcatcgaactagcactaggatgtactcaggtagagatagaaccatcaat

SEQ ID NO: 8529 - DNA, 365 bp, Setaria italica
  Peptide Sequence Number=SeqID_74503
ctggtgtcgccgtgcccggtgacgccggcggtgctgccgacgccggtgctgtcgccggcgcgggaggtgctggtggagatggccaaggaggcgtggggcgtggacgggtacgggtccatgaagggcctcatccgcctccgcgccgacgccgggggcgccgccggcgaggaggactcgggctccggcgagagcgacgtggaggagcacgtcgaggtggagcgccgcctggaccacgacctcagccgcttcgagatggtccagctcccggcccccgcgggcctcgactgcgaggacgacgacgaggacgaggaggcgcacgcggcgaggctggaggaggagaacctgaccctccgcgagcgcctctt

SEQ ID NO: 8530 - DNA, 1060 bp, Setaria italica
  Peptide Sequence Number=SeqID_74504
ctgctgagaaatggtggacgaagctgcagctggtgcagatgcagcggtggaagaacttgtggatttactccacataccaaaggtgtttggagattctgctccaataaggctcaaggtgcgagacgagttctcatttgtgctgccactaaggaatgcaggcacgtaagacttgctttctgttctggtgaaggacagtgaatgctgctgtgaatcacccgggtacttcgtaggaaagaccgaatttactttactactacgactagtacgccagcggtcggtgtggaggatgaatccccagcaactgatttcggttctccagtgatctggtgttggggcttgttctgtgtggcttggacagattgagctgcagcgaaattaagctgaggataactatgtcttgctgcttcttgatggctttggaaaactgcgtggttctgtgccaatgcagagaagtcaagaccagttggggcagatcctggaggaccaatggtgccaaagggcatcacaaaaggctgagaggacgcaagatcaatcctcacaccctggccacggctgacttgtggctgttgctgctgctggtgatggtgttcacttaacttcttcatccgagaggcgtagccgccattcgcccttccactgaatagttagctcgccagttcagattaccactccaaagcatgggtgtccggattgtatactttccagcagcaggcttctgatcgctcgagggctttacaggcatcggcattggtccgaaagtcaactgcgccgccgacatgtgtgagtgctgcacacccccgcagactgggcagccgctgcaagatgcataaagccaccaggaggatgaagcgccttcatgttattgccagcagcagctgcaagagcgtttcctaggtcagagggggccacagcaggggaaattgacatggaaccagagcagatggaaagcatcgtgaacggacctggcatggcattctgttgatggggcgcctgctgctgcgccttgtcgcctgggcgcttctggtagaggccgagggcagcagggccagcagctcctggt

SEQ ID NO: 8531 - DNA, 5160 bp, Setaria italica
  Peptide Sequence Number=SeqID_74505
aactgcatcatcaataatttgtcatcacacagaccagagctgggggtactgcatccataatcagtcactttcattcatccatttcctttcccccccaaagctacttacaacgaacccggagccaggtcatgccatgccaccaccaaccccttggctggcttctattctacttgggatacatattttccttctcccctaacaagctaaaaacaatccaagcagagtgtgtcctgacagattatatgatgggagcaccaacaaccgcatcataaggttacctgatcctgcattctaattgaatctttcctccatcagttaagctgaggaaaaaaaaacaaagagcaatgccactagagagaccagctttgggcatccatccatccatgcataaaaagggaataaaaaagagagatttctatgcacctcctccggtcttttccgccatgggaggataaccaaccaactacacaaaagtatcactcccatcaaccattccaaaatccgaatacttcttaagttagcaagggcttctgcaaggatggagcaggcgcgcctccctttgtgaccacctaccagcagctgagtgggttctttgagccaccgctgctgttgtgatcgcttctcctcttcttcatccgagaggcgtagccgccattcgcccttccactgaatagttagctcgccagttcagattaccactccaaagcatgggtgtccggattgtctactttccagcagcaggcttctgatcgctcgagggctttacaggcatcggcattggtccgaaagtcaactgcgccgccgacatgtgtgagtgctgcacaccccccgccagactgggcagccgctgcaagatgcataaagccaccaggaggatgaagcgccttcatgttattgccagcagcagggacctggcatggcattctgttgatggggcgcctgctgctgcgccttgtcgcctgggcgcttctggtagaggccgagggcagcagggccagcagctcctggtgcttgtggcgcatacgcattggatatgaagaaatggccttgtgggaacggctgctgtttcaatgatgaggggggcatgtgtgactgctgcttgcctccccgcattggaacctggtgacacattcggctgttgaccaaggattgatggcatagccatactgaagtgatttgctggagttgacttggagctggatgtcgatgcagggttcgtcgctgactgctgtggtgatggcaattggacaggctgctgaacaccctttgcacttccagtagcaggtgggctgccacctgtacttttggacactgaattggatcgagatggtgaaccggaagccacaggagcatttgaagatcgagatagatcccctcctccagtagaaaggttggttaaagaaggccccatttttgatgaactcatgcttaaagaactctgggattggtgaccaggcgtggagagggcctgcatatgaacttttgcttgttgctggtggagaccgctgttcttcatcacaatcaaattagagggtggagcagcaggtggagtcgtagcagcagatgaaggtgtccctctccctgaagatgccttcaattgaggagattgaactcccccttgggtagcacttgcagggtacatcatattctgaaagctcgccatgttcagacggtctgggtacccacctgcattatttggtgtacttggtgcagcagatctaggccgattcagatggtgttgctgctgaatcatctgctgatgcttctggtgcatctgaaggaaatgctggtgctgctggtgctgctgctgttgctgctgagaaatggtggacgaagctgcagctggtgcagatgcagcggtggaagaacttgtggatttactccccataccaaaggtgtttggagattctgctccaataaggctcaaggtgcgagacgagttctcatttgtgctgccactaaggaatgcaggcacgtaagacttgctttctgttctggtgaaggacagtgaatgctgctgtgaatcacccgggtacttcgtggaagccgatttctttctctcgctgtcgccagcggtcggtgtggaggatgaatccccagcaactgatttcggttctccagtgatctggtgttggggcttgttctgtgtggcttggacagattgagctgcagcgaaattaagctgaggataactatgtcttgctgcttcttgatggctttggaaaactgcgtggttctgtgccaatgcagagaagtcaagaccagttggggcagatcctggaggaccaatggtgccaaagggcatcacaaaaggctgagaggacgcaagatcaatcctcacaccctggccacggctgacttgtggctgttgctgctgctggtgatggtgttcacttaacttcttctcactctgactgccagcagtttgagcagctggcattagtgcaaaatttggaagatgaaccggaacagcaaaattgtgttcatatccacccttctgagggtgagacttgtcgtcacttgatgggccatcttgcccagtcttgtcaccctcctgtcggtgtgtgaggccagatagtagcacagggcgctgattgctaccagaataattctgggaattactggcggcggcagctgcattagcatttggtgcatatcccaatagcccttgggattgttgtggctgatgcttctgtgatgaaccggacaagcttggcattggggtcttctgatgactttgttgcctgtgcaccttgctgctgtgacgggtgcatcatgtgagaagagtacacatgtccgttgaagaaaggaacagctgggcctggcggtgccatgcctcgatatgatggaggccctccagcatgggcagcaacctggaacgggtaggcaccattctgtaagatcgccaagaactgggcatccggttgcaagttggcaaagctcaagttcatggccgcagcaccagggtttgctgccgaagcgtgggcactggcagatggtggcatcgcattgctggctccagaagattttccatccccagctcgattggcagcatttgcagctgccaccgctgcagcatgttgttgattgaacggaaagatgaatgcagggccttgcagcatgtttggcataggggtggattgctgtgtttcatgagcagggggttgcttcctttgacttgattcagcaccagcagcattgcccagtgctttatcctttgagagattcccctggaatggtgaggtagccattgaaggagcctttgcttcttgcattggagtgtgggccctaacagggtagttcccctgcattgggttcacaagcagggaggctgcatccgtaggtggcacaacacccatgttgaatggcctcggaccaaagaatggccccgatctattggcagcagcagctgctgctgccgccgcagctggtggccagaaagagttcatctttgcaactcgctgctggtgctggataaattgcgcaatgtagcaatgcgtagcacatcgctttgagcgtgttggtggtggaagcaacgcagcatgctgtaatccgctagaagaccctggtttgacatccatgggatgaagaccagctgctgatagtcccgggactggaccaaggtaaccaaacggtgggaaactccccagccagcctccaacaggtattggcataggtggtgtaacagcaggcatagcagatttctcatgctttacttcagactttgagggcttctgctgctgcgactgcggtggctgcggctgccgtcgttccgatggtgatttttcatcaaggctgggcttctccaaatccaactgcagcgtgagcttcttcggcgcgaactcatcagccggaattctttgcaccttctggtcctccaaatcaatatccagccctctccgagtcctttcgccatctttcttttcatattttcctctccccaacatgtccatctcagaatccaatcccttcttatctgcatcagggtcggaggagccatctctatcaggagatagcttcccaggagggggagccatgagatcaatgcaaaacttttcttgccgagcgccatccgatgccagctcaatctttgtcgtggctgtagcttcgccgttcctggcctcggagcccaccggcgttgcttcaccgtcctgcttgcatgaaggtgctgccggcggttctgtccggctctccgacctgtgatcccgccgatctgattcgctgggccggagctccggatctctgcttctaccacggtcttccatcttctctggctctcgcgaagtctcgagttgagcagcagcaggggcagcggcactgatgccactttctgctgcggccgacgtagatgtcttcccttctgatcttgacgcgggaggtgcctccgaccttgaggacggctctgccaactctggctttgctgggctcgccggacggctgtcttcatcgtacttcaccagccgtggtctcttcctctttggcgctatagtggaaagtgaggcggaatctgacggtcggacgccagaagacgagggggccggtgaggagttcccggacttggcttccggtgcgtctctgggctccagcttgtggttgctctcctgcttgggagggcaggtgaactgccttgtgagcccgaacagcacctcggcgacctcgatctcctcctggatgaaagatggggactttgaaatcttcggtggcagcggctgtggcggggttgttgaaggcgctggggacggcgatggcctctgtttcggcgctggccctgaaccggcgctgcctctttcaccaccaagaggtttcagcttcttccgagcaggggcggtggttgaggccgacgccggggagatcggccgtgacgaaggccgttggatctgcgaggcgtctccggcgccgacgttgcctccgctggttccaccgccggggacaggccactcgtgtgaagagcgtttcgttgaagctgagcgagccttcctcgggacaggcacgccgatcatttcgtcgacggccttggcgacgatggggctcttcggattggagccaccgcccttccgctgcatctgctgctgctggccgtggtggtggtggttgtggtaacccccaccgccgccgccaccgctgctgctactgctgtggtggtggccgccgcctggctgc

SEQ ID NO: 8532 - DNA, 309 bp, Setaria italica
  Peptide Sequence Number=SeqID_74506
gcaagcagctcgatcttacgtatgtgtgattcgcccataattcctcgttcatgcttgtgttgtgttgtgttgtgtgtgcatttcctccgtgcggagtgctgtgcttgcaaagtgaatgcaagcaggtttgcagcaggggcatagcagattagcagctgcagctagctgtgctcatgtactgagtcggattggattccgattcccttgttgtgtgtctttgttcaggatgcccgcgtctgaatgcatgcgagtgtccatgtctttagtgtgcgctcttttgagtatacgggcatatatagctgtgcccat

SEQ ID NO: 8533 - DNA, 361 bp, Setaria italica
  Peptide Sequence Number=SeqID_74507
atattcaggcagaggtcaagattattaagtgtcttgtggaaaacattgctgtcgacatctcatttaatcaagttggtggactatgtacactttgttttcttgaagaggtcgacaacttgatcagtcgaaatcatttattcaagcggagtatcatattgataaaagcatggtgttactatgagagtcgtattcttggagctcaccatggtcttatatctacttatgcattggagacgctggttctgtacatatttcatatattcaacaactcttttactggacctcttgaggttatgtaccgtttcttggaatttttcagcaactttgattgggagaaattttgtttgagcttgtggggccc

SEQ ID NO: 8534 - DNA, 497 bp, Setaria italica
  Peptide Sequence Number=SeqID_74508
ttaatccttctgcccctcatgctcagcaccaaaaatttatgcagcacaaggcaatgccatggtctctgaacagcttgaaagaaataacttagctggattgatgcagggtgaaagggataagagagtgccaaatggtctctttatcaatgacagaaatggacaaaacaggtctagatttgcaagaacccgatctagccctgaactgacagattcttctgttgaaggatttcgtggcaggcggacaaatgtggttggtatggaaaaatctttgagggttgattacagcagcagaagaaatatattggttccagaagtgtctagcaaccacagcactaagtcttcacaggatgaatcaatgtcttccttgaacagttcatctcaccctagtgcaaaggcagtttcggactcaaatagtgtttcgagcagctatcgtgaagataatggctgtgtgatgaacgaagaacttccttctgtctctcaatcatcggatatgcacc

SEQ ID NO: 8535 - DNA, 277 bp, Setaria italica
  Peptide Sequence Number=SeqID_74509
cctctcattcctctcctgatcaaccgtcttcacctcagcctcgcagacaatgaggcaccgctggaaggtcaaattcgttatgttctcatgagttgagaaatccggcacacgaaatgaaagtgctgctatgtgcagatttgatagggtagttgaatgatggcatggtcacttggttctggcattgaagccctgagatagcaatattttgctctgacactcgtgaccatgtcctgcatgagttcagacggttgaggccatcagcagccaacaacaaaag

SEQ ID NO: 8536 - DNA, 541 bp, Setaria italica
  Peptide Sequence Number=SeqID_74510
atctcggaagaagtgtcagcaaagttcgatgctaatgataggttcaatctccttaagaaggttcaagtatatggattggatgactaccactgttttggttatgttcagtgaaaagtttgatctctacaagaacaacaaaaatacatcacctgttgagttgatcttttttatattttgcataaacaataatctcggaagaagtgtcagcaaaggcaatttctttagaatacgcagtgcttttgcatatggagcgaaaaggcttggaaagttacttgaatgtccaaaagaagatttaattactgaattgaatcagttcttcacaaatacatggatgagacatgggagtggaagtcgtcctgatgtgcctaccccaagtcttgttgatgtgcagcctcagaaagttgttccttctgtagtgtcaaacagtcacagaagtgtaacagcattgagaaaaaaagttgaaaatcctaagcttcttgctaatcaggataatcttcgtgtgaatcaagataattctactgaagttggtcacagttattct

SEQ ID NO: 8537 - DNA, 602 bp, Setaria italica
  Peptide Sequence Number=SeqID_74511
caaagctctggatgctagttcgtggaatgaagtgactgtaaatacaacaagatcatcaagagacaaatggggaaaaagacctgcctttgcggcaccaggcacaaccacacgtagcaagactggttggcagatgggaaatgccaacgatcatctcctaactgaagttgatgatggcccaagaaatgggacagtggtaccaatcattaatgaagcttctgagagggtagcagggtccgattctatttcaacgcaatcaagaactagtgtaccaaatgattttgattcatcacaaattggcatgcctaatccagtctttgcaccttttcttattggttcgccacagcagaggcaagttgataactctggactgacttttgttccaacaggtccaccagttccttttgttgtcctcccatttgttccagggaatagtgatggttctggtccccagtttgagagaagcgaaggaattgatcagcttcctgccaatattgctggtcaaaatttcagtttgctcaatgatgttcaccaaccagattgtggtgccacctcaacagcatcaatcaatactatgactgagccatccgaggaacacaagcctg

SEQ ID NO: 8538 - DNA, 703 bp, Setaria italica
  Peptide Sequence Number=SeqID_74512
tattgggggttttactactacctactaattctaactagtctttcaaatggtgctggtgctttatctggccctccaggaccaccattttttatgatgtactcgtatgaacctggcgcaaatcatggtccatccacatctgaaccaattgaatttggttctcttgggccacttcctgcagaaaatggtgatgacataccacggtccacgcgccaagtaatgcctaatgggttttatggggcaaaagggcgtggtccatataggggtggttcctctcattcctctcctgatcaaccgtcttcacctcagcctcgcaggtaatactataatctttgttgatcactgtttctattttttaatgtttaagtatgagcagtctgaaaaatccaaatcataactgtttaaggaaaaatccaaatcataactgtataaggaactttattttatctgtgaagaaacttgtgatttcgatatataagcagtgtaaatgcacggtaagcagttgccactagtaagttacttacctataactaacattaagtaattgacagacaatgaggcaccgctggaaggtcaaattcgttatgttctcatgagttgagaaatccggcacacgaaatgaaagtgctgctatgtgcagatttgatagggtaagcaggaattgaagagatagtctgcttcgttattttctattgtttgtttgtta

SEQ ID NO: 8539 - DNA, 2204 bp, Setaria italica
  Peptide Sequence Number=SeqID_74513
cgaactcagtctatactatccgactcagtctatactatctcagtctatactatatattgataaaggcatggtgtttctatgagagtcgtattcttggagctcatcatggtcttatatctacttacgcattggagacgctggttctgtacatatttcatatattcaacaactcttttactggacctcttgaggttatgtaccgtttcttggaatttttcagcaactttgattgggagaaattttgtttgagcttgcggggcccagttcctataagttcacttccagatatgactgcggaacctccgctgatggacagtggtgaattgttgctggacaagtccttcctggataactgtagcactgcatatggagttgtgcctcgcacgcaggagaatcagggtcgaccatttgtttccaaacacttcaatgttattgatcctttacgtgcaaacaacaatctcggaagaagtgtcagcaaaggcaatttctttagaatacgcagtgcttttgcatatggagcgaaaaggctgggaaagttacttgaatgtccaaaagaagatttaattactgaattgaatcagttcttcacaaatacatggataagacatgggagtggaaatcgtcctgatgtgcagcctctgaaagttgttccttctgtagcgtcgaacagtgacagcaaccacaacactaaatcttcacaggatgaatcagtgtcttccttgagcagttcatctcaccctagtgcaaaggcagtttctgactcaaatagtgtttcgagcagctatcgtgaagataatggttgtgtgatgaacgaagaacttccttctgtctctgaatcatcagatatgcgccatgatgaacaagttctggctaatttaatggattccgtgaagttgcatggatccaatggacagattcaattgccaatgcaattaccttctcatctgtctgtagcacattcccctttattggctccaatagctttttcacaaaagcacttggctggggttcaaccacctaacttagttggggcaccatggttgcccaatatgcagttcctccatggattggtgacaccaacagcccaatacatacacaatccaaatttggcaccaagtgttgaagatggcagtgagaatgagaagcctattacatcggatgcaaaccatgatactgacaaaacttggcatcagtatggtattggatattctagacaatttgatcctgaagtgagagatcctcgcatctatgatattgatgggaaggaacgtccttcttttcctaatggtgtacacggtgccccattggaaaggcagatggaattcactcttgagaataatggtgcagatgatgaaacctataccagcatgttccagaatcaaacaagtagagaacgcaatgtagattactctaagcggagtggttttgtgaacattccttcttcgcaaggcagttcatccagaggcaaagctctggatgctagttcgtggaatgaagtgactgtaaatacaacaagatcatcaagagacaaatggggaaaaggacctggctttgcggcaccggccacatccacacatagcaagactggtgggcagatgggaaatgccaatgatcatctcccaactgaagttgacgatggccctagaaatgggacactggtaccaatcattaatgaaacttctgagatagtagcagggtccgattctttttcaacacaaacaagaactagtgcaccttttctttttggttcgccacatcagaggcaagctgataactctggactgacttttgttccaacaggcacaccagttccttttgctgtcctcccatttattccagggaatagcaatggttctggtccccagtttgagaaaagcgatggaattgatcagctttctgccaaaattgcaggtcaaaatttctgtttgcttagtgatgttcaccaaccagattctggtgctacctcaacagcatcaatcagtactatgactgagccatctggggaacacaagcctgacatcttgaaaggtgatctcgttaaccattggcacaatctacagtatgcccgactctgccagaatgctcgttccctgggtcctgttctatacccttttccggtaccaccaatgtatttgcagggccatgcgccatgggatgggcctggaggaccagttgcaccaaatgttaactggacacaaatgatt

SEQ ID NO: 8540 - DNA, 1982 bp, Setaria italica
  misc_feature (1871)..(1873): n is a, c, g, or t
  Peptide Sequence Number=SeqID_74514
taaagtaaacggaaaaataaagaacggaaataaagaacaataacaaaaagaagaacaatacaatacaatacggacaagaattaatttcgaagacagagagaagtgagttcccaaccagattctggtgctacctctacagcatcaatcagtactatgactgagccatctggggaacacaagcctgacatcttgaaaggtgatctcgttaaccatcggcacaatcttcagtatgcgcgactctgtcagaatgctcgttccatgggtcctgttctatacccttttccggtaccaccaatgtatttgcagggccatgcgccatgggatgggcctggaggaccagttgcaccaaatgttaactggacacaaatgattggtcctggtcaacgagtatttcctgtgatgcctctgcaacctgctgcggaaagaggtactggcgttttccagcactatggagaagatgcacccagataccgtggaggcacaggaacgtacttgccaaatcctaaggttccatttagggaccggcactcaaattcaagaaactacagaggaggttataatggtgacaggagtgactacagtgataaggaaggaagctggataaactcaacacaacgaaatccaaatcgcagctatggacgtagccagtcggagaggtctggcatgaggtctgatagacaggccaatgatgagagtcaatctgataggcaacggcgaacttacagaaatgactcatacaggcatgaggcgagctctcaatatcttgtgcagggccaatcttttggatccgcaagctctatgcgcaaaccagggaacattgcacatggggtttacacaccacaatcaacagcttcaaatggtgctggtgctttatctggccctccaggaccaccattttttatgatgtactcgtatgaacctggcgcaaatcatggtccatccacatctgaaccaattgaatttggttctcttgggccacttcctgcagaaaatggtgatgacataccacggtccacgcgccaagtaatgcctaatgggttttatgggcaaaggcgtggtccatataggggtggttcctctcattcctctcctgatcaaccgtcttcacctcagcctcgcaggtagttgaatgatggcatggtcacttggttctggcattgaagccctgagaatgcaatattttgctccgacactcgtgaccatgtcctgcatgggttcagactgttgaggctatcagcagccaacaacaaaagcatgttccctagctggtttttatggtgctgtctgatatttcacaagcactaaatagtgaataccatcaaaagtctggtgttttctgatatctcacaagcattggaatagcggatagcatgaaaagagacatcatcatcggcagattattttaccggtcgcttatgaactttcctggaaccgaagcaacaatcttcagaacaaatcgtggaactgtcaagcccagaaatccagaatatatatcttcatgcagaaatcagaattgaactaagattatgagcaaggatgaattgagttctgaccttctcaaggatatgttattaggttgaatggaaccggaacaagcatttcttcgtcaaaatcaaatacaatcttgaaaaagcattgggttttactacaattatcggggcattatatggccatgtgtaactgaaagctaataaagagttctcgtttctaggtaggatcaagatcatgtaacacatacagcaaactcttcgcttaagtgtgctaggagttaggtgaatcctagattaccaattctcgtggtgtttctagctggagggacatgaatccatgatgcactcacgcacgagtgaaaaatgatcgtctttatcttnnnaaggtagggaaatacctaaggttaacaaaattaatacgtaggtagtttactaagactaggaagggaacaatagaaataccaatagaatagacaactacaacgacaacga

SEQ ID NO: 8541 - DNA, 2025 bp, Setaria italica
  Peptide Sequence Number=SeqID_74515
ggtaccgccgcagccgacctggaccttctcgccgccgccgaccaagaagcaccccggcctggccccgagctcgagggacaccgatcctggactgccgtcgagccccggcacgacgtcgagcagcgcacccgagctcttgtccgcggacaccgtgagcttgtccgtgaccaccatccccggcatgtcgaacggctccagcatcgcggtggccgtcgagttcgtggcggcgctggtgccggagccctgggggatgagcctgaacgtcgcgtggacggcggcgtcggtgccgccgctgtccttgggccgctcctgcatcttcagggagccgttcacggcggagagcacgaaagccttgccgccggattcttgcaccagggtcaccagctgggagtcagattccggagggacgggggttatccagtcggagggcgcggcggtggcgccgccggtcttggcgtcccagtctccggtggtgaggccagcgaggaggaacggtccgaacaggaccgcttgtatagacgcgtactcctgccgatcatcttttattgcttcagtccgtaggtggataggtaattggagtgacaagtgatcaccactattccactccttgctaattgtgaggaaagtccctggagatgctaattccagaaccttgtcattcaaagttgcctttgcaccattcaaagatgtccatgacggcattctcacgttcaatgtcgcaaattgaccgtttgtctttgcagatatggagagtgacacctgtaggtactgatctgatgagctgagaggctctagtttctgggtgacagtaaggccggcagttctccagttgaacgtgctcggtatgaactgaataatgtaaagtgctggtctttcacctttctcctcaaagtagatggaatcccccagtttggagaaggattctatcccagtgccatagcaacaccagaatgaattgaattgagttccccagccatggtagctccttgcctttgatctcccagggccctgtggcagcatgtagatcatcacaccaggatccctgcctctctggatgctcagcacgccattgatcagcgctcgctcgtagtagtccgcatatgcgatctccttcgtccatctgaatagatggcgcgaaaccttgagcatgttgtaagttgtgcaggactcctcagtctcagtggtcagagcaccagctaaacgctttggatcggaccagaattcactgacagatgtgccgccagtcgcataggcatgggaagaattcactgtgtccatgaagaacgttgcaatttccttgtaaagaggatcacctgtaacttcgtatcgcatttgcccaccgacaacaaccggaatatgcgtgttggcatggaaatccgaaagactgtctgcctggactgcaagcagccccaggaagcatggcttgtcgaagagatgcgcgagcaccagatgcctctgatcattcgtgatggagtatagctggtagagcacgtcgttcatcccgccggtctcctcgttgagcgacgcccagtggcgctcgatgctgtagctccggatgacgctgccgacacggccggcgaagtagtcggccatggcgaccaccatccccagcgccttgccgttgccggccacggcgtgctggtccaggaggccctgcatgatcttgtggatggtgtagtagggcgcccagacgggctggatggcctcgaagcggtcgaagaactcggcagggaaggcggagaggtagcccgtgccggcggcgcgctggcactcgtgcagcgcgtccaccaccgccgacatcctgccggcgagcgtggcgttgtgcgtgctcgcccacatcttggccgccgcgctcaggtagtgcccgacgaagtggccccggagctcgacgtcggggccctcccagccgccgtagggctcccccggcgccggcagccccgcctgggcccggaagctccagacgaggcggtcggcgtccaggagcagcaggtactcgaggtttgtccgctgcgcgcgcccgtacgc

SEQ ID NO: 8542 - DNA, 954 bp, Setaria italica
  misc_feature (900)..(954): n is a, c, g, or t
  Peptide Sequence Number=SeqID_74516
cctgtttacatccagtcagctatggagcaatcccctggagtcattactcctcagctggtccctgcaaaccacaccatccatagcaagcttgtgactcctggaattaggaattcacgcctaaaccggcgtaatcaaatgtttgaagcaaccattggcagaaataccaaacggcctgcttgtgaaaaattcaattatacgagccagccgactcaaacgtcttgtgtcatggacaatggtggcacccaaacgaacgctcgtgactcccatcccttcactgcatctaatgtatttgcagcggaaaatactaggcctgcacctaatgactctactacaggtattcagacacaaccatctgttgttgatgagccgtattcagtgcctccacatggtgggcaggcagagacacatgcctccatggaagaggatgattgtgatgagaacatcatatttgaggacgatgaggaagaggatgaggggtacctttttggaggccaagaacctgatgattgggaagctaatgaggatgtcgatctcgagacggctaatgaagatcccaatgaacccgatgtaccagatccatatgatgcggtttatgccaatgtccctaacgtgacgcacatgctcaagccagaggataactgcgagcactgcaatgcagaaaagtttgagtccgagccacctggattctgttgtcacagtggaaagattcatctttccacccatgagacaccaccaggactcatgagattgtggtcgagctcggacgctgatgctaggcatttccgtgcaaacatcagatatttcaatggccacttctctttcacttctatgtactgtaagcttgatcgtgtgaccaccgacatcagaaactatggaatttacacattccgtagaaacccnnnnnnnnnnnnnnnnnnnnnnnnnnnnnnnnnnnnnnnnnnnnnnnnnnnnnnn

SEQ ID NO: 8543 - DNA, 591 bp, Setaria italica
  Peptide Sequence Number=SeqID_74517
aagggatagggcacggagggtggcagtgtctcatgggcacatcgcattaataaataagaggcggcgtgattcatatgctagaaagagattatttatgacgccaaaagagaagaaagagaaaacaagatagtccaagagagactatagaaagagggccaaagaacaacaggcaaacaatttgcatcctgactctatcgctatgccaagtcctcactttaccccagagttggtattccctcttcctgataaatcgccgtcaagaatatcggacgagttggaaatcccccttgtaaacggcaggcctgtttacatccagtcagctatggagcaatcccctggagtcattactcctcagctggtccctgcaaaccacaccatccatagcaagcttgtgactcctggaattaggaattcacgcctaaaccggcgtaatcaaatgtttgaagcaaccattggcagaaataccaaacggcctgcttgtgaaaaattcaattatacgagccagccgactcaaacgtcttgtgtcaataggaacaaataggtaggacaacccactacgaaacgactacgtagaactacccaataccctta

SEQ ID NO: 8544 - DNA, 481 bp, Setaria italica
  Peptide Sequence Number=SeqID_74518
tttacctaataaactaatttttaccagcactggtacaggaggtccatatattctaaaacatcgatcactaaatgagcccactagccgtgaaactacttccttgaagaacattgatgcaacctgacgatacaatggtgattgaaaacttaaaatcaactaagaagtagagatcacaggtcccaggaacaggaccaggcttaaattcccaaacgtttatcaaatgaatcaaaaagtccgctttcagatgctgtcgtcttgataaacttgggcttctccatctccacatgagacacatagctttcgacaaggaacttgaatccaatctcgagttcagcatcaaatgagccgtcatcgttccgcctaataatcctggaccgctggcaccacggcacaaagtcctcgtagaggtccaccgccgcgacaaccgcaaacatctgctccggcgagtaccccatcacgcgcctctcctcgtagaccttgg

SEQ ID NO: 8545 - DNA, 598 bp, Setaria italica
  Peptide Sequence Number=SeqID_74519
acttcttcgatctgattcctgctgttcttgatgagatgtcatacctggggctcgaatgcaattctgttattcacaatgcgataattaatgggtacggtaaagctggcatgcttgaggagatggagagtgcactttccaagatgcttgagtgcgggaacaatgtgccagacatttacacgatgaactctatcatctgggcatacgggaactatggaaggacagatgaaatggagaagtggtacagtgagtttgagctgatgggtgttgagccagataccaagacgtttaacatcatgatcaagtcttatggcaaggccggcatgtatgacaagatgatgtcgatattcaaatatatgaagaaaaggttcttctcactgacggcggttaccttcaacatagtaatagaatgttttggacgagctggcaacattgaaaagatggagtactatttccggcttatgaaaattcagggtgtgaaacctagccccatcacttactgctcgctagttaatgggtacagcaaaggtgggcttcttgataagattccaggaattattcgccagactgaaaacactgatgttgtcttagatactccgtt

SEQ ID NO: 8546 - DNA, 585 bp, Setaria italica
  Peptide Sequence Number=SeqID_74520
gacgccctgcgcggccgcctcggcgtcgacgagctcccccctctggccatcctcacgggcggcgccgttccgctcgccggcggcgcggcgggccccggggcggctggtgaggaggcgaaggccaaggaggagaagatggcgttcgacgtgaagctggaggggttcgacgccgcggcgaagctcaagatcatcaaggagctcagggcgttcacgaatttggggttgaaggaggccaaggagctagtggagaaggcgcccgccgtgctgaaggctggagtgcccaaggaggaggcggagagtatcgccgagaagatgcgggcagtcggcgccaagatcgttctcgagtgagacgacgagagctctgtatggcctcgtttcttgatttgttttatctttcttgtacgaagaaactgataggattttggaacaaggaagcaataattagcaaaattgactgtggagatattttcattgccagtggaaatgccaattgggctttggggaatacggtcttagggatattgcttcgagctctgtatcttgactgtttgtgtttatggtgaaaaattgagattcttttaactt

SEQ ID NO: 8547 - DNA, 764 bp, Setaria italica
  Peptide Sequence Number=SeqID_74521
tgcctctctaaatagtagcatccctcatgtcctctaatcatattaacaaaagacaggcactgtaaaaagaagtagttgaaaccctacacgactcgaaatgattctgctatttgtttcagatccttgtaatgcctcttccattgcagaccgtttgcagttacgctgaacaggtagagtctgttcccagctgcagtggctgtaatgaacacatggggcggctccagctcaaactggtagtaagttcttcctgaatgctctgctgtcgctgaggacaagaccttcccttctacattctctccgatgacctctgggccgaaggcactgatcactttgtcagggttaccgatcttctcgatggtcgcatcatcaagatcatctgcaaatctgcgaactggagctacgacgacgaacaaccggccctcctttgggtttgcaaagcgcaggtcgatctctgtgccaccgagatcagcaattgacacagggacctcgtcccagccctcaggaactttgaagctgtaggggatgatggggctccagccgactccatggccgccggacttgtcatctggcctacggtatgttctccagccattctcatcaggttctgataagcctgggatcctccctgccagcaggccctgagtggcggccaggccatggcctgcaaacccaagcactgaagctccacaggcagctgcagctgcagaaatcaatgaacgcctcctccccatcaatttctccctcctcctcacgcgacactgaaa

SEQ ID NO: 8548 - DNA, 776 bp, Setaria italica
  Peptide Sequence Number=SeqID_74522
aacaagcaaagaagctggtcgtggcaagcaagcacccgaatgatgagcacataatgcttgaacaacaagtgaaagacctcaaaggaaacataagcctcttaaaagacatgatgacgaaagccaagcaggagacattaaaaggaatagaagaaaatacaaagctgaaagatgagatcagagaccagaagaagatgatcgatgagctaagtaagcaaaacgagtcaacccaggagtccttggctcaaaaatacgcagaggtgaaccacctcaaagaagaggctgctcaaaaatgcgcagaggtgaaccgcctcaaagaagaggctgaagggctcaagaaagacaaggaagagctgcaatcacgtgtctcacgtgccaatgaacttctccagctcatgacgagtgctttgtgccagggaaagggtgctgacaacaggcagcttcctgacttttgacgcctagaacttcagaaatgctgatagcaaggatcgaatcaaaatttcatgttttgtgcatctagccctaggctaaccgattcagccagcgtttggaggtagacaaggttggactcttggaatgctggactgtactcgtatgtataaatagcatcaggactcctattgtcgagtgtacggggaactttgtggtagatctgtttaaccacctgggtgcttaaacggtgttttaattgtaagcgcaagtcctttgtgcttaaagaagagttttggtaagtttcaggcaaagttcaagctttgaggctctctaaaaaaagaaaaaaa

SEQ ID NO: 8549 - DNA, 328 bp, Setaria italica
  Peptide Sequence Number=SeqID_74523
ttttttgagatcttaaaaacatattagccagcaaactcacatggtccaagtaattatctacaaattgcagatatactgatgctatctgatcctgtgaagcaccattgtatggtacaacaggcaactatggcatgtccgcatgtgtaaaacagactcttttctgatgttcttcagaagcattgttcatagcatagcctgagttaagaaacagcagctgcttcaagcggcgtgccagcagcagagggcaaggcctccctgccgtgcggcctcaagagcgactcgccgtcgcagctcgccggccggaggggctggatcccggccggggttg

SEQ ID NO: 8550 - DNA, 263 bp, Setaria italica
  Peptide Sequence Number=SeqID_74524
cccaacaagaagcgagtaatccatgacatccgccagctgtaaagcaaagtaaaacaaattacaaccatctgaaataggtacaaatggaggcaaggaacgaggtgacttaatacaacactccaggtgaactaagataaaagtcaggcaacctatctcatgacggtagtggtactagtgtattacaccatgacgcccaaactaaaaacagggcacccatatcataaatagcatcaacatagaaaaaaagagtgtttcttcagcaa

SEQ ID NO: 8551 - DNA, 424 bp, Setaria italica
  Peptide Sequence Number=SeqID_74525
ctcctagtggaaacgccagctttcatcagcactctgaacagttacgccatcggaacaccattagactctcaggcttctgccctacaaacagatgatagtctgtcgccatcgtcgctggactcagttgtggcagagagaagcattaagaccgagaactatgggaattccagttcagccaattctctgaattgtatggacaatgatcagttactgagatcatcggcagtgttggcaggtgattacacaaaaactccatatataccggtttatgcttctctgcctatgggcattatcaataaccactgccaattggtcgacccggagggtgtccgcgctgaactaaggcatctgaagtctttgaacgtagatggggttgttgttgactgttggtggggattgtggaagcctggattcctcgcaagta

SEQ ID NO: 8552 - DNA, 702 bp, Setaria italica
  Peptide Sequence Number=SeqID_74526
tcttcatgaaggtaggtgagcccatcagcaacaccaatgcagatcttcatccttgtcctccagtctaagatgatgccactgcgtgacttaccgaaaagggtctgtgcaaggctgttgttctccacgtaattgtagaccagcatcttctggcctccatcgaagcagcagccatgcagtttgacaaggttgtgatgggttatgttggatatgacactcagctcattcaagaactcctttgttccttgcctcgactctgaggagagcaccttgatggcaaccttctcgccattattcagctttcccaggtagacacggccaaaggaaccctgtccaagcttgtttccagggcagaagtttcttgtggctttccttaactccttggacgagtaaattttcacgttgccggtgatcgggatgtcttggtcatgctgcacaatctggcttctggaattcttcttcctccggaacacagagaagcaacccattcctattgttttgagcctctcttatttggaattaggatcttcagatatacaaaagaggtgttgatagctacctgcagattaattgatcagtggaagacttcactctgatgggctgaagtctgcataaagagccaagaacatcgaacacccagcaaggaactcttggaaggttaacttaaagtaagtaaagtaattaagtaagttaaagttaagttaa

SEQ ID NO: 8553 - DNA, 814 bp, Setaria italica
  Peptide Sequence Number=SeqID_74527
tagttcttgtagtatttgccacaaaagaagtctgttcgtgctgctgcggaagagttccttgcaaaggctgctcaggaatttattgggaatagtgatagcagggtgaagggtcctgttagacttgttcctgatgaagatgaggactagatcagtatgttagttttgttaagatatcaagaatctattgctgctactatagcttggctgcaaaagtctgcacctgcaaaaagctaaaagttacacacatgctgatttgtacaacattgtgcatccgacatgagggtatatacagcaattgcagttcatggaatttttaagataagcacaattcacaatccttgcatgtatactaccattagatccttgtagaggttaatccttgtcagtatctcaaatcactctgctaaatggatgcttaccggatgatgtccacatgcctgattgaaatatgcaaagcgaggtagaagttctggatgatgaagataaatctacctacagtgctgtgttgttgtacatgagacagggaatggatcaaaagtcttgctttcttcctctgttttgggagcaattgacctcaaatcctgtatctgagtttctatctggaaagaaaattttgactacctatttgttagagtaattgtatgatttgtgcgctacagtacccctaataatgagtgttatcatatattcgatgtaacctagatctgtagaagatttgcgacttccagcaatttggggtattcagcctgtgtaagacataatcgatgtattcatgctgatggatgaactttcttttgtcagtaacttaaaaaaa

SEQ ID NO: 8554 - DNA, 937 bp, Setaria italica
  Peptide Sequence Number=SeqID_74528
tgaattcctcgccgccgtccaaatctgcttagaagccagaccatggccgccacctccgctgacgccgcctcggcggttccgccttctgcgatatccgcagccgaggatacgctcgcggccgccgagtccgtcggggaccacctatcccagctgctcgcggcggcggcggcggaccccgacgccgtggccgagctcccgccactgctccgggcgcgcgccttcctcgcggtggcgcaggctgccacctccctcttcgcggtgcggctaaggtgttctggaattgaccccgacgagcacccgatcagaaaggagtttgagaggttaagcctgtggcaagagaaattaaatcgatttgaggactgggacaaggcaccacttcgccctactactacactgaatacacaagcagcagcaaggttcattggacactcactttcccacctgacatctgatcaaaagagaagcatgcaggcaatcagtagaggagaaagaaggggctggtctgggcagaagagaaagtctgagtatttgccacaaaagaagtctgttcgtgctgctgcggaagagttccttgcaaaggctgctcaggaatttattgggaatagtgatagcagggtgaagggtcctgttagacttgttcctgatgaagatgaggactagatcagaaaaatggatgcttaccggatgatgtccacatgcctgattgaaatatgcaaagcgaggtagaagttctggatgatgaagataaatctacctacagtgctgtgttgttgtacatgagacagggaatggatcaaagtcttgctttcttcctctgttttgggagcaattgacctcaaatcctgtatctgagtttctatctggaaagaaaattttgactacctatttgtttagtagttaatttgtttatttgttatttttgttttgttttcgtttt

SEQ ID NO: 8555 - DNA, 678 bp, Setaria italica
  Peptide Sequence Number=SeqID_74529
taagttaggcttgggtagtagaatattgaaggccttatttgtttgagcctgggattgtggatcgtatctttaacaatcacaagatgtaacaaacaccaaatctgtgttataatatgcaccttttcactgatacatagaggcctgttggtagatacaatttttcttgtcaccaagtttataatcattcattttctattaattggataggaccatgtattcgaatagtagttttgtggattaaaatattttttaatgctattgaaaatgcacaagttgagattgaaagcatcagggcatgttttgttggagttgtttatgctgtcgtacaaatgtgtgtacgtatccattgttgcatgaccaaagtgtcctaacctaacataataactatactcggcttgcggcttgccccaacatcaattgttcttataccacaaacataactggagttcaacagaaatctcttctacatgatgaaagtttacttttttgttacatgtatactgtagcctgtgttagttgtgatctcccttcggacctcttgactgatgttctgtttccatgcaggaaaaatggatgcttaccggatgatgtccacatgcctgattgaaatatgcaaagcgaggtagaagttctggatgatgaagataaatctacctacagtgctgtgttgttgtacat

SEQ ID NO: 8556 - DNA, 496 bp, Setaria italica
  Peptide Sequence Number=SeqID_74530
aaccgctgcatgggcgccgcctgctaccgggacaccttcctcctctgggcgcgacctgcgccctgggcacggcgctgtgcatggtgctgtacgcgcggtcgcgcggctccgccgggaggcggctaccacgctagggcgccaggcgtgtgcggcgctggttggctaacgtagatgatgatcataaagaagggaccagaagtttctctggtgagtgagtttagctgtttaggtgccacataattaagagggggaataaaatatctagagagtactgctaggtgatgtagtgcagcattttttttctttctttgtaagaatcttttgttttattagtttgttgatgactcaacttacaaaacagtcccttggaggctctgaaaagcaatgtgtatgcttacggatgaaaagaaacagagagcatgtaaacgatgctgggaatcgcaagttttttgcgatatcagcacggtatgttccaacacagtttctaacaaaaaaa

SEQ ID NO: 8557 - DNA, 532 bp, Setaria italica
  Peptide Sequence Number=SeqID_74531
ttgaaatgctgcttctgctgccacaagaacctcgacgccaccatggacgtcttcgtgtacaaaggagagcaagcgtttgtagcgccgagtgccggtgccagcacatagcgaaagaggagcggcgagagatcgaaatgctcatcaggaagcgccgcgacgcgttccaccggcggcacgctgctgcggcgcctaagttgcaaggagcaaatcggctcatgagactgcaaaccgccgcacgatgataagcatatgttaaaacgctgtataaatactgttgccttcttccattttacaagttaggagtgccttgaatcgaagaaagatgtcagtggtgagcggatggtactgctggttgacctttggcctgggtgccaggaaagacgacttccttctcttttttgaagcagaggaagaggcaacttctgaataataatggactcagacagcatcatacggttcatggcttatggcgcataacatttttcatgaagcaatgtctttatttggcatattcaaaaaaaaaaaaaaaaaa

SEQ ID NO: 8558 - DNA, 354 bp, Setaria italica
  misc_feature (310)..(354): n is a, c, g, or t
  Peptide Sequence Number=SeqID_74532
agaaggaaaaaacaagacaagactaacaggatgtaaggttgtgaatgtcttacaaagtaggaagccgatcaataatcaagcattgttcctttgccctggtattatggtttcagctgtcatttcatctaatgttatgaggtgtttgtgctgggtgtggatttcttgtgactgagtgatatccttccagtaattgttattcatccggtatctcctaccgacagattatgggactcatgaatatgatgcattgttatccggttatcccaatgaaagtttgcttaaagataaatgtgggttaatttgagtgctnnnnnnnnnnnnnnnnnnnnnnnnnnnnnnnnnnnnnnnnnnnnn

SEQ ID NO: 8559 - DNA, 263 bp, Setaria italica
  Peptide Sequence Number=SeqID_74533
agttcaaccgtgcatttcttcatttgcattcaacaccgagggagcatcacgcttaccgccagcagctctcaaagtacaaccaaaaccttaagcttagccattttcttgttaatccaaaatttacattagatggcatggttgccagtacgaaggaagcaaaaatctggaaccaaacttccatgtgctttgcaaattgcaatgtagtttagctcggccccaatgagaaaatgaatattctgttctaagtgtttgttcctccatag

SEQ ID NO: 8560 - DNA, 1499 bp, Setaria italica
  Peptide Sequence Number=SeqID_74534
atttttgtacgacataatgttcaggccgtacgtattttttgtcatgttctttctagctagtcatatcgtgtctgcccttttagacaatgtataaagtgtggttgaactgattatacacgggtgtgaatttttatctgtgcagactgcagaatgcaagagcattaaggttggaaaaatttcacacccgtgtataatcagttcaaccacactttatacattgtctaaaagggcagacacgatatgactagctagaatgaacatgcaaaaatacgtacggcctgaacattatgtcgtacaaaaattcattcacactagtttcagggccacatacaactccagatgccaagccgaaagtcctagcactcgttatttaccactaacaacctaataatgatactataaacagattagctcaagactcatcccgaactgaagcgttcgtacgcacacatgtaaaaagtgatttacacgttgctgcttgaggcttgcatcatgccatcccggatctgctcgctgatgtccttcacgtggcccgggccgtgggggatgaacactgtggtgttcttcgagccgtccccgagctccttgatggtgtcaaagtactgtgtgaccatgatcaggtccatgacttccttggcgctagtgcccgacaccgagtgcgagaagttcaggatgttctccctgaggccgtcggttatagcttgccgttgcttggcaatgccaacgccagagagatatttcgcctctgcttctgcttcggccttcttcaccagaagaatcttctctgcttctcctttgtagacgcttgccagctgaagcctttgggctgcgtttatatcattcattgctttgcgcacagcagcatcagggatgatatcaaccatgaggatgtgctcaatgctgtaaccataatctgccatcaccttttcaagctcctccagtacagcttttgccacatcattcttttgctcgaaaagatcgtccagattcattcttggaactatggcccgaacaacgtcgaagacataggcctgaatttgctgttggggattctgcaactcatagaatgcatcatcagcattttcctttacaacacgatactgaattgtgcaaatcagctggacgaagacattatccttggtcttggtctcgacgcggacgtcgagggactggacgcgggtggtgagggaccccgcgacgcactccccggcgaaggggttgaagaagtggaggcccggctcggcgaggcggacgaagccgcccccacttctccaccaccgccacgctcgcctggtccacgcacccgcagaacacgaagaacgtgctcaccatctcgacccttccctcggctccggctcggccccggcggcggcgaatccggctcggccctcgaacggcgtcgcgtcggcgtgggcggggggatcccttcgatctcgcgctggcaccaccggcccttgccttcgtggaagaatcgcgaggctccaactcgaacgatcgat

SEQ ID NO: 8561 - DNA, 1005 bp, Setaria italica
  Peptide Sequence Number=SeqID_74535
ttcttcgcgcaaaagacttgatcaacttctggtcatctgttggggcatgttgcccaggcaaagcactggaattcaatagcttgagctccatttcattcctttcacgaagacactcttcaagttgctttttcaagtccaccaattgctcatttaacaactctgcttcactctcatagttttctgccttgagtcttgttttctcaagctcaacattaagtctggaagcagataaggttaggtcttctttcatatatgaaagttctttcttaagggtttttttctccctttctgaactttccaataatcgctgcaaattcccttccaagtctttgatcgattcctttgcagatgatgcagatgattctgcactgatcctagaatcaatctctttattgagttgtacctcaagttcattatttttttacttgatcatgataccgctcctgataaccagacaactcctttagtagacgttcctgtaatgcactctcccgcccttttgttgctgccagttcttgctccacatagttcagtttatccaggaactgcatcctttcatcctcactcttggataattgctcctccaatgcatcaatttttgtttgatactcctgaacttgcttctctgcagtgtccaatgccaccacgaactctgatttcaccatctggcggcagtggtacgtgcagaccatgtcgtcgaactgctcccctggggcgccggcgggcacgagggcggtggggcggtcgtagagaaccatgcggcggtcggaaactggactccggccggccgcgctcgcgccgccgccggacttgacaacaacgaggtcggcgtcgttgtcggtgtcggcgcggcgcttccgctgtggtggggtgcggaggatcatctcgccgccttcgcagtggttctcgcctccccgccccggggttctggaagcttcggctggttcctagggttttgtactggatgcgagggggcgataaggggggggaaggagcggagtggag

SEQ ID NO: 8562 - DNA, 446 bp, Setaria italica
  Peptide Sequence Number=SeqID_74536
ccatagacttgatcaaatattggccttacatgcatagcgattatcggatctgttggttgtattgccacggccacatttgtcatccattgaagcttccgggacgtgtcgttggcaatgtcgcacgctagctgctggaaaagggctaggaggaccccttggtttagtgggatgggaactgctccacataatgcttgcaaatcaacctgaaataaagttgcaaccgtgtaagacaaaaaatatccacatagtagtagttatataacaataaaatgcacaaataacctgacaaactgcataatgtgcggaaacatgttcattaaattggagatttgcatggcgatatacattttttgttttttagcaaaaagattcagggtcatgcatgtatggtaggtgtagtaaagattatttttaaaagaaatttaggattgagtttacctgtagaa

SEQ ID NO: 8563 - DNA, 1804 bp, Setaria italica
  Peptide Sequence Number=SeqID_74537
ttttttttaatttttttaagttaatagaaaactaaggcagaataacatttgcgctggacgtaacatatccaagataatgaacccgacatcgatatgcaactcagtaccatgtcacacatgaccaatttacaccggaagataccttccacattcctaaactagcctcctagtcctgtcagactggtcagacacaatgtatagcttcctttttcggtttcatatgctatgcaaaattctctatgtacaacgatgcaatgtccgaatgcgccttacgattgttacttgtgacttatcagcactgaggtgatcacgtgcatgattaagcggatgtttgttgcatccgatgcattagttgttggcagggaccgctggtgcgccaggacgccatagacttgatcaaatattggccttacatgcatagcgattatcggatctgttggttgtattgccacggccacatttgtcatccattgaagcttccgggacgtgtcgttggcaatgtcgcacgctagctgctggaaaagggctaggaggaccccttggtttagtgggatgggaactgctccacataatgcttgcaaatcaacctgagaacacaaccaagaaactatggagacatcgcttctttgaagagccattgtaaatgcctcatcaattttccgctcagcaatcagtcggcctagttctttcatagggtccaatggagcatctacctcagggagattggccactggcccattactgggctgcaaagcacctgttttctgagatgttgggctccctgatgcaaaaagtgacaaaagcttgcgctggccatcaagtaactctgaattaagaccctggttcattgacgaggctgaagtgattgcttccttcaaagtttgtgctaatggagtatgtgccgtcagaacctgctgctggatagcagcaccgtgctcagacatgcccttctggaatgaaccatctacttgctcaaatattgtcttacaggattgttcaaatgctggaataactgatgtttcaaagctagagcggaacgcatcctgaagtatctgcttggtggatgtctgaaactgtgtttggatctgcctagcgacgctagcttcaagttttgtggatatagacttatctagctgattagcaaccttatcacccagcactttctgaagtgaatcagatacagcagaagataatgacttctcaatgataggtgctgttgtccgagcaacagcaggtcccagcgaagatatttctttctttaatgacttctccagcataacaggaatatccttgtttacagaagttgcaattaaagtagccatctgctgcattcgctctctttcatatttttcatgccttacattttcctcctggaaacgggcccacatggcatcaatgttagccttgatggacttttccatgtttcgacttagtgatgcctcaattcttttgccttcctttgcaattggagcagacacaattgagctcaattgcttttgcaggttgccatatgtggctataagctgttgcagtgttccttgaatagctgcagcttgcagggaggaatcaataggagggttctcattgcttcgaggttcatgcgaggaatcagtagagttgaaagtggttgcagaaggagacagttgcccagccacttgaggttgaggatgcatgactttcccctctttggcagctgaggttaaaggcaaatcccttgaagtacaggggccatcagttccagttccatcagaagctccagttgctctcttcacagcatcttcatcttcagcaccagaagattgct

SEQ ID NO: 8564 - DNA, 1810 bp, Setaria italica
  Peptide Sequence Number=SeqID_74538
tgcagaagatgtccatcgtttagcaagtgcaagtgtagatgggcgggtatacgtatggaagattgatgagggacctgacgaagaaaataaatcccaaatcacaggaaagattgaaattgccatccagattgtaggagatgctgaaacctatcatccgagaatatgttggcactctcataagcaagagattctgtatgttgcaattgggaattgcatcttaaggatagacacaacaaaagtgggaagaggaagagacttccatacggaagagcctctaagatgcccacttgacaagctgattgatggtgtgaacatagttggtaaacatggtggagacattactgatctctccatatctcaatggatgactacgcgtctggcttcagcatcaaaagatggcacggtaaaggtctgggatgatcgcagggtagcccctctgtctgtactgaaaccacatgatggtcaagcagtttactctgtttctttccttacagcacctgaaagaccaaaccatataaatcttgttacagcaggcccgctcaaccgagaagtaaaaatttgggcctccactaatgaagatggctggttgtcaccgagtgacccggagacatggaaatgcactcaaacattggaacttgtaagttctctggaaaataggtctgaggaggcatttttcaaccaagttgcggtgttgccgcaggctagccttatattagcttagcaaatgccaaaaagaacgctatttatgctgtgcatcttgaatatggtcaagatcccgcctcaactcggttggactatatagcagattttactgttgcaatgcccattttgagtctcacgggaacacatgaaaaccaacctgatggtgaacaagtcgttcaagtttactgtgtccagacaatggctatccagcagtatgggttggagttatcactctgtcttcctcctccagctgataacattggatctggaagagatcctgcaatttctcatttaaatgagaggcttccagaaatggcagcactggattccacagcaactactcctgttgattcttcaactgctgtttcgactaagccatcaagtgatagtcagggcacagctcctaaatcaaagatgaatcaggctggatctccagttgtcttaagtagagacccttcaggaagtgatcgtgatgtggaccagtcctcttttggtaggaaggatagcatcggaaaggaagagccaagaggcggccatagtgatggtgggctcacttctgctgaaacagttgcaagtggcagctcacagaatgtagaagcagaagcaaaacatgtagatgagagaaaatcaaatcaaactgttggattcgaggctggtaaggaaaaccaaattcttcctgagaagaaagggagacctatcaagccttcagaacaaactgtagacaccctcagtgaacgcacaatagtaactgccaagtacagtgtagaagattcacagcctatggctgatagatcagtacccacgcttttgaagcaatcttctggtgctgaagatgaagatgctgtgaagagagcaactggagcttctgatggaactggaactgatggcccctgtacttcaagggatttgcctttaacctcagctgccaaagaggggaaagtcatgcatcctcaacctcaagtggctgggcaactgtctccttctgcaaccactttcaactctactgattcctcgcatgaacctcgaagcaatgagaaccctcctattgattcctccctgcaagctgcagctattcaaggaacactgcaacagcttatagccacatatg

SEQ ID NO: 8565 - DNA, 320 bp, Setaria italica
  Peptide Sequence Number=SeqID_74539
ggcgcgccacggcaaggtccaccgcggccgcgatctgggcctcgttggtgacgtcgcaacgggcgtaggacgcgtcggggccgagccccgcggccacggcgcggccggcgtcgtcctggatgtcggtgagtatcaccttggcgccgttgcggatgaactcggtggccgtcgccttgccgatgccgctggctgcgccggtgatgatggcgaccttaccagctaacctctggctgttcgactccgttgagaagctaccgatgaggccacgcaaggctcccggagctctgcccgtctccctcctgaaaacgagttgcgctgct

SEQ ID NO: 8566 - DNA, 1027 bp, Setaria italica
  Peptide Sequence Number=SeqID_74540
tgatgctccgtgtagaaagagtacgtcaactgccctcacggagcatcagacatggtgattgcaaagcaagctattttattatattatctatttgatcggcattggaccagaccagattcagaatggaggtatttggtggatgattttgctgctacctttgggattactaatagaacattgcttgagtgcctggtattttgtcttctagatgattattcttcagaagccttggaggaggcatgctctcttcttcccaagatctctagcaaggaggcacatccgaagatagcacaagttcttctagaacgtcagagacctgatatggcactggttgtgcttaagtgcacagggcgtgataacttctctgttacagaaagcattgaaaaagatggcatttcatctcttagtgaagcggtgactgcagttcgtgtaagaattgagcatggccacctaacagaagcatttgtgtatcataggagctactgttctagggtgaaagaacagcgagcagcagatatgacacatgctggtgatgcactcagaagctcttggatttaccatgttgaggggatgatgactgaattttgtaatatctgcattgaaaggaatttagttgataaaatgattgatctgccctgggattctgaggaagagaaacatcttcacaagtcactctttgattacgctcatgaaatgcccacggaaccatgtggtagtctgcttgttgtttactaccttcggcgttatcgatatttggaggcatatgaggttgatcgtagtcttcagagatttgagcaaaagaaattggaaagtactactgaagagattgcttcaaaaatcagaaaaattgctcaatggagggaaaatttggttgctaaatgccttgatatgcttcctgaggtccagagagagaacatgaaagccatcaacagtggagaacaaagtcagtttcctcgaactgctcaaagatcttctccagttagtcaggtggtcaaatcaccaagtcctgccattgagttgagctcct

SEQ ID NO: 8567 - DNA, 582 bp, Setaria italica
  misc_feature (319)..(319): n is a, c, g, or t
  Peptide Sequence Number=SeqID_74541
atttttcaatgattacacctattattgcatcacatcaccagttcatctttgatttgtgtgtcaggcatgatttccaattcttcaacaaccaaaggctaaatgaattgtatgaaaaggaagtgagatacctcatggtaatttgtcatctagattgttctgtaatttcagctggatgtaaagaaacatgttaggtcaacttgtgcttcattttgtgcgtagtttggcattgcactactctcctccactacgcagtagttttgcaattgtcactgttaatcttggtgcttaacatcagaaaatttatgcagcaagcaaaccngaagaaagataccatagatggtgaagatgaagatcagttggagcctttgactgctgaggagcaggaagagaaggagcagttattagaagagggttttgcatcatggacgaggagagacttcaacacatttattcgtgcatgtgagaagtatggtcgaaatgacataaaaagtatagcctctgaaatggaggggaagacagaagaggaggttcagcgtttattgtcttaaagtttttcttaaggttagtcgttatttacttaag

SEQ ID NO: 8568 - DNA, 165 bp, Setaria italica
  Peptide Sequence Number=SeqID_74542
tagttgttaccttagcccaaaaggtgaaccacttcaaaacgacagtaatactctacatcatgtacatgctgttgggtcatttgatggccgcatgggtcagcactcagcagtcagcacatgatgtagagtattactgtcgctcaaaaggtgaaccacttcaaaacg

SEQ ID NO: 8569 - DNA, 587 bp, Setaria italica
  Peptide Sequence Number=SeqID_74543
aaagcgagcagcattgagaaattcagagggtgagacaacaccatcgaattcattcaagaggcgtaggcagtcacttatggatgattatgtgggctcggggaggcgtaagagagggtgatgcgatatatgcagtatctgcaatgcttttaaacccagctgcgtgttgctcaattccttgtgcacctgagctcagcctggaacggaggctcgactttgtagtgtaatttatgcaatgacataggttagtttattcctaaatcaagtggcatgtacatgctgttgggtcatttgatggccgcatgggtcagcactcagcagtcagcacatgatgtagagtattactgtcgttttgaagtggttcaccttttgagcgaagtttatggaactgttaccttagcccagctgactgagatctgtggctcctggggccatagtctttgaagtgaactggctcatcgatacatcagcttcatattctgattgcatatttcagttgtactttctccgtcacaaattgtaggttgttttggtatttttagattcatagttttcactgtatatctagatacagtatatatttagattga

SEQ ID NO: 8570 - DNA, 2090 bp, Setaria italica
  Peptide Sequence Number=SeqID_74544
tccgacgccgccggctccgggatctggcggatgaggggggacgaggacgaggaggatgccgcggcgcgccgcgggggatgtggaggaggaagaggctgagggggaggtgcagcagcaggaggaggaggaggtcgacgaggaggagattgaggccgtcactaccggcggcggcgccgaggaggaggaggacgccggtgccgacgccccggcggagggcgacgacgagtcccagtccaccgaggacgacgaggccgtggcgggcgacgacaccgatgagactgatgcagttgttgggaagcgtgagaaagctaggctaaaggaactccagaagaggaagaaggaaaaaatccaagaaatattggatacacaaaatgctgccattgatgcggatatgaacaataaagggaaggggcgactgaaataccttcttcagcagactgaaatatttgctcactttgcaaaaggcagtcaatcaaaagagaaaaagccgcgtgggaggggacggcatgcgtcaaagatgacagaagaagaggaagatgaagaataccttaaggaggaggaagatgccctagctggtgcaggaggaacacgcttgctttctcagccttcatgcattaagggaaaaatgcgagattatcagttggctggacttaattggctcatacgtttgtatgagaatggtatcaatggaattttagctgatgagatgggtcttgggaaaactcttcaaaccatttcactgcttggctatctgcatgaattcagaggtataactggtcctcacatggttgttgcgccaaagtccacgcttggcaactggatgaaggaaatccaacgtttttgccctgtccttcgtgctgtgaagttcttgggaaatccagaagagaggaaccatataagggacaatttgctacagccggggaaatttgatgtgtgcgtgactagttttgaaatggcaatcaaagaaaaaacttcattgaagcgttttagctggcgctacattattattgatgaagctcaccggataaaaaatgagaattctcttctgtcgaagacaatgaggatttacaatactaattatcgtctcctcatcacaggcactccactgcagaataatcttcatgagctttgggctctactcaacttcttgctacctgaaatatttagctctgctgagacctttgatgaatggtttcaaatatctggagaaaacgatcaacaggaggtggttcagcagcttcataaggtccttcgcccatttcttcttcggaggcttaagtctgatgtagaaaagggtttacctccaaagaaggaaaccatacttaaagttggaatgtctcagatgcaaaagcagtactatcgtgcgctgcttcagaaagatttagaggttatcaatgctggtggtgaacgcaagcgattgctcaacattgccatgcagttgcgcaagtgttgcaaccatccatatctatttcaaggagctgaacctggaccaccctacacaactggtgaacatttaattgagaatgcaggaaaaatggttctgctagataaattgctgcccaagctaaaggaacgtgactccagagtccttattttttcacagatgaccaggctcttggatatcttggaagattatcttatgtacagaggatatcaatattgccgcattgatggaaatacaggaggagaagatcgtgatgcatccattgaagcctttaacaagccaggaagtgaaaagtttgttttcttgctttcaactagggcaggaggcctcggtattaacttggccactgctgacgttgtggttctatatgacagcgattggaatccacaagctgatctgcaagctcaagaccgtgcacacaggataggtcaaaagaaagaagttcaagtttttcgcttttgcacagagtatactattgaggaaaaagtgattgagagagcgtacaagaagctcgcgttggatgctttggttattcagcaaggacgattggcagagcagaaaactgtcaataaggatgaccttctgcaaatggtgagatttggtgctgaaatggttttcagttctaaggacagcacgataacagatg

SEQ ID NO: 8571 - DNA, 1671 bp, Setaria italica
  Peptide Sequence Number=SeqID_74545
cttgtgaattccaatcgctgtcatatactgacgttgtggttctatatgacagcgattggaatccacaagctgatctgcaagctcaagaccgtgcacacaggataggtcaaaagaaagaagttcaagtttttcgcttttgcacagagtatactattgaggaaaaagtgattgagagagcgtacaagaagctcgcgttggatgctttggttattcagcaaggacgattggcagagcagaaaactgtcaataaggatgaccttctgcaaatggtgagatttggtgctgaaatggttttcagttctaaggacagcacgataacagatgaggatattgaccgtattatagctaaaggagaggagacaacagcagaacttgatgcaaaaatgaaaaagttcactgaggatgccattaaatttaagatggatgataatgctgaattgtatgattttgatgatgagaaggatgaaaacaaggttgatttcaagaaacttgtcagtgataactggatcgagccacctagaagagaaaggaagaggaactattctgagtctgagtactttaagcaagctcttcgccaaggtgcaccagcaaagcctagggaaccaaggattccaagaatgccacacttgcatgatttccaattcttcaacaaccaaaggctaaatgaattgtatgaaaaggaagtgagatacctcatgcaagcaaaccagaagaaagataccatagatggtgaagatgaagatcagttggagcctttgactgctgaggagcaggaagagaaggagcagttattagaagagggttttgcatcatggacgaggagagacttcaacacatttattcgtgcatgtgagaagtatggtcgaaatgacataaaaagtatagcctctgaaatggaggggaagacagaagaggaggttcagcgttatgctaaagttttcaaggagcgatacaaggaactgagtgattatgatagaattatcaagaatattgaaagaggagaagcaaggatatcccgcaaggatgagattatgagagcaattgggaagaagctagaccgctacaagaacccatggttagagttgaaaattcaatatggccaaaataaagggaagttctataacgaggaatgtgaccgttttatgctttgcatggtgcataaacttggctacgggaactgggatgaactgaaagctgccttccgcatgtcgcccttgttccggttcgattggtttgtgaagtccagaactacacaagagttggctcggcgatgtgacaccctcatccgactggttgagaaggagaatcaagaatatgatgagcaagaaaggcaggcaagaaaggagaaaaggcttgctaagaacatgactcctacaaagcgagcagcattgagaaattcagagggtgagacaacaccatcgaattcattcaagaggcgtaggcagtcacttatggatgattatgtgggctcggggaggcgtaagagagggtgatgcgatatatgcagtatctgcaatgcttttaaacccagctgcgtgttgctcaattccttgtgcacctgagctcagcctggaacggaggctcgactttgtagtgtaattatgcaatgacatattgtacttaccttaactaaaagtacgtaagtactaagtactaatttagtaagtaaaa

SEQ ID NO: 8572 - DNA, 532 bp, Setaria italica
  Peptide Sequence Number=SeqID_74546
aaaactttaaacccctgtatctcggatggtaattccacgtagatttgacttgaaatcttcaaatatctcagcaggcataacccacggattcttgataggttgatactagtgcaatcatccttattgccccaaaattcaaggattagaacccgaagaagcttaaattctatgacagaaggcatacacctggggagtccaaaaaaggcaagtgatcgaacttgtgacactcttataccttccggttcggttgcatactgggcgcaactatagtgtagggacaatcgacgagctttcattaaaaacatagcattagtccgagagtaatctactgcagtgataaaattctcttctctagacttatatgtaataagatcaagtacaacatggtgtactgtacaagatagcacctcattattgtagttaattttctcaggttgaatcattccccttttgaccagctcattaaaataattctctgcaactccctcatttccttttgttgtagtaataaaaccttcagctgcccattgta

SEQ ID NO: 8573 - DNA, 1090 bp, Setaria italica
  Peptide Sequence Number=SeqID_74547
ggcagattcgctcgcgatacccatcggccatcctcctccatcgaccacacccccgccggccgctcccttcggatccatccatcgcgtcctctgctctgctctgctcatggccgacggcaatcccactctcggctctcttgcaacaactgttccagttcaggccgttctgttcgacattgatggaaccctctgcgactctgaccctctccatcatgtggctttccaggagctgcttcttgagattgggtacaacaacggtgtgccgatagatgacgagttcttcataaaaaatattgctggaaggagtgatgttgaggctgcccagaatctgttcccagactgggaccttgagaagggcctcaaattcctagaggacaaggaagctaaatacagaagtttggcaaaagagcgcttggaacctgtgaaaggccttgggaaagtggtccaatgggtcaaagatcatggctacaaacgtgcggcggtaaccaacgcccctaggattaacgcagagctcatgatctcccttcttggcctctcggacttcttccaggccgttattgttggagatgaatgcgagcaaccaaagcctgccccatacccatacctgaaggccatcaaggagcttcaagtgtctgctgaacacaccttcatctttgaggattctccttctggcatccgtgctggtgtcgcagcaggaatgcctgttgtcgccgtggcgacgaggaaccctgagaaatcccttctggaagcaggagccagcttgctgatcaaggactatgaggaccccaagctctgggctgcacttgaagagatcgacagagaggaagcgaagctaaagaaggctggcgcatgagatgggatgacgatgaacaattgtctagatttattagcaaattaaatttacatgatgcagccgagaggaacggcaaatggctcaactgggtatatttttgagcttctagtttggtattatttttgttcttaatgagaattcagaccaaataagaactcagaaatctcgccttcggtggttatgattgtttgatggatgggaggctgtgagtcactccgtggaaatgacaaatctgtt

SEQ ID NO: 8574 - DNA, 847 bp, Setaria italica
  Peptide Sequence Number=SeqID_74548
acctggtacggcgtgccccgagacgccatgctcgccttcgaggacgccgtccgtgtgcacggctacgccgacgacctcaacgccatcatggcctttcaaacactaaatgagaagacaactgtcttgtctcctgaagttcttctttctgctggagttccttgctgcagattggtacaaaaccctggtgaatttattatcacgttccctggagcttatcattctggttttagccatggatttaattgtggagaagcaacaaatattgcaacgcctcgctggttgcaagtggctaaagaagctgcgatcaggagggcttccacaaattgtggtccactggtgtctcattatcagctgctctatgagctagcactatcattacgtccaagggaacttaaggattctcatggtgtgcccagaagctctcgtctaagggacaagaagaagaatgaaggtgaaataatgatcaaagaaacatttgttggaagtgtgatcgaaaacaacaattttcttagcatccttcttgataagagttcttgtgtaattatcccggagattaaatttccccttccatcatttcctacaagtatggcacctgaagtcactgttaagcaagggttgattgctggtacctgtagtattagccagaaaaaggctgaagatatgcttgcttatggcaatgcaatagatgaaatcaaagggtttgaaaaaatgagcgagtcacaatcatcaagtgcaaccacatcctctgcatgtaacggaagaaagctctatgaaacaaaatttggaatggttaacagcagcgctctcttattgaattcagagattcagagttggagttaattgaaaa

SEQ ID NO: 8575 - DNA, 269 bp, Setaria italica
  misc_feature (253)..(253): n is a, c, g, or t
  Peptide Sequence Number=SeqID_74549
tacattatgcgactatgactcatattgtggaccttacggtctctgcacaaggtcgggctcttgtatatgccctgttggttttgatccaccatatacccaagaatggaatattgcaggttgttcaagaaaggaacctctgaattgtgaaaaaagcattgttgcacgtccagaagtgacattttatccaatacatggcattcatagatatcctcagcatgctttcatgctgaacgtttcagacatgagtgagtgngaatcctcttgcttaa

SEQ ID NO: 8576 - DNA, 775 bp, Setaria italica
  Peptide Sequence Number=SeqID_74550
ttttacaaactacaagggcaattggtggactgccagcaaattatttgacatgggttgctattttgaggctggaggtgtgcttaaactgggaacttccattaatgctgctttcaaaatggcactggaaacttgggcttcatgggtgaaagaaagagttgatttaagacgaacacgtgtgttcttccggacatatgaaccatctcattggagtggcttaaatcaaaaggtttgtgaagtaacagaacaacctacaactgaggccaaaggaaatgacaggagagaatttggggatatacttgctgatgttgtagcgaatacaagtgtccctgtcaccgtactaaatgtgaccttgatgggggccttcagaagtgatgctcatattggcctttggagtcatcctaataccatacttgattgcagccactggtgccttcctggagtcccagatgcttggaatgaacttgtattttcccacctgttgacaaatggttggcgagggctggttagctgactgttgacatgatatacccattttctttctgtttcataatttctgttttatttgctgcaagaagcctctgagacagcggcatcttcaggcaagctttgctatattgatctttctctttttccccgtcacttgctcactcaggaatgcacatctcctgagtcctgagacatagattttagtagaacaatctcaataggctgtttaggcatagacacagagcagagagcacatgcaacctgcaagtgaactattgttacatacagg

SEQ ID NO: 8577 - DNA, 406 bp, Setaria italica
  Peptide Sequence Number=SeqID_74551
agggagaggctgctggtggtgctggacagactgccggcgcgggaagggcacgtgctgaagctgcggcacgggctggaggacggcaggtgcatgtcgctggagcagatcggccgcatctaccgcgtctccaaggagtggatcaggaagatcgagaagtccgccatggccaagctcaggaaccaggacgtgcgccgcgacctcgacgacttctgcaggttctaaatgctcccgtgagttatatgctgtgcacggtagctgtatatatcacactttctttccgaggcggcgtatacacatactctcagtattcattgtactagcatcaacaacttcttgtagctacgatgcgcggatacttgcgaacgctcatgtatcagatactcatttgatactcagcccggaacaa

SEQ ID NO: 8578 - DNA, 838 bp, Setaria italica
  Peptide Sequence Number=SeqID_74552
cggcgccggcgcacctgttcccgacggagcacgatgagatcgtggtgctcgcgtcgggcggcgccgtgttcgaggcctccgtctgctgcgacgaccgctccgacctcctcccggagctcatcgagacgctgcgcgcgctccgcctccgcacgctccgcgccgagatggccaccctcggcggccgcgtccgcaacgtgctcgtcctggcgcgcgacgtcgatggcagcggtgttaccggagacgatgacggttacggcggccgtactgactcggctggctccgtcgagggcaacgccggcggcggcggcgacttcctgaaggaggccctgagggctctggtggagaggccgggagctggaggcggcgaccgaccaaagaggcgacgtgtctcgggcacgaacatgcaagcggcggcgtagcacgccgccggccggccggccggctgatgatcatcggccaccgtagcccgatcaaatagctaattgcatgctcatgtcatggtactctagcaccatatctccatgtttagttttgtgtgctgatataatgagttgctagatctcttcttctcctcatgcatggctctcttcttcttgatgagatgccattaggaagaaaaagtatactagtatggtggtactgctagggtttgcttgagcttgaatcaatgttgttccaaagccatggcaaatccccagccctagaataacaacaagagtcaggcagcacaatgcaaagctgcaggacttgttacccaactagttattaagcacaatatatatatttcagtattggaagcttaatatataagatcacaagctcttttatttaaaaaaaa

SEQ ID NO: 8579 - DNA, 240 bp, Setaria italica
  Peptide Sequence Number=SeqID_74553
cggacgtggccccccggaggccgcggaacgcggaggtggagggcgtgcagaggagcgcctgcgcgcgggccggcgagccgcgcgacgacgatgcccgccggggcgccagcagcagggagggattgcagcaggccgtggcgggcgtgaatgccatggcggatgggggcgtcaggtgaggcctctgctgccgctcgcgacggctaccaatggcctctgttctccaatgtccgtcctcccccg

SEQ ID NO: 8580 - DNA, 340 bp, Setaria italica
  misc_feature (4)..(4): n is a, c, g, or t
  Peptide Sequence Number=SeqID_74554
cggnacctgctcaagtcagcccgccgagctagctgcctccgtgccggttacgaaacctcccccgtccagatgaggatacaagaaggtatctgagtcatccaccggctgcccgtggctgcctctgccttgtcggccgccgcctcctctccgtttccatttgggccttcggcggtttccttccttaattaagccagagccgccgccaccgtcccctaaacccccgtgctccccacccctgagtccgccgacgagacccaccccgacgaccatggcctccgccgctaaacccttctgctccacctcccaaacccccacccccatcgccaaccgcttcccatcc

SEQ ID NO: 8581 - DNA, 411 bp, Setaria italica
  Peptide Sequence Number=SeqID_74555
tgaattcgtggaggaaggtgggaaagagtaacatttaaaattgtcctttcataccacgtggggtcgttcgatggctggcaaaagcagcctggcctcaatactgttcaggggttagtggagaaacatcttggacaatttgttgatgagcgaaaagccaaacagcttgaagcaagatctttgccaattgaaggcggtgccattgttgctgggcgcactgacaaagggatacatggagaaaggatgtgaaatctgaagatataaaagatgctataaaggaggctgctccagataaacttaaacctttgcatgtgtcagaggttgcacgtgagtttcatcctaattttgcagccaaatggaggagatacatgtacatttttcctcttgatgaggatgctaaatcgatcattgggg

SEQ ID NO: 8582 - DNA, 946 bp, Setaria italica
  Peptide Sequence Number=SeqID_74556
ctcaatactgttcaggggttggtggagaaacattctttggtactaattttgttgtatgtagcgaaaagccaaacagcttgaagcaagatctttgccaattgaaggcggtgccattgttgctgggcgcactgacaaaggggtgactgctcttcagcaagtttgctcattttatacatggagaaaggatgtgaaatctgaagatataaaagatgctataaaggaggctgctccagataaacttaaacctttgcatgtgtcagaggttgcacgtgagtttcatcctaattttgcagccaaatggaggagatacatgtacatttttcctcttgatgaggatgctaaatcgatcattggggaaggacactctgaagtgttaaagaattctgagcacatcataaaacctcagagctttgatgtggcaaaggttgacgaaattcttagaaaacttgctggaaagacattatcctacaagatgtttgcacgtgacacgcaagcttcacgcagtgttggcccacctacagaatgtttcatgttccattctcgagctgcagcggccaaactatattgcgctaatgaggattacaaagaaggcttgagtgtcatgtgcgttgagctagttgcaaacaggtttctacgcaagatggttagggttcttgttgctactgccatacgagaggctgctgctggtgccggagaggatgctctgttgaatctgatggaagccactgacaggcgtgccacagctcctccggcaccaccggagggcctctgcctcgtcgatgttggttacaaagatttcagtaaacagaggtgcttcatagttgattaaaagaagtcatatctttttgttggagaaaaacacaagatgcacgattgaacaattgacgtcaggctgtggagcggctcgtttagcttcattggtcattttcatttgcgtacaggcttc

SEQ ID NO: 8583 - DNA, 230 bp, Setaria italica
  Peptide Sequence Number=SeqID_74557
gcaaccaaccatggaataaattgaacccggacgattatggtgttcgttatctcagcttaatctctcatctatgcagtttatggcggagaggcgctgcacgagcatgtcgaacacttggtccctgtccagcatgttgatcctgacgcaccgcgcgtctcctccgaactgcttcccgccgcgagccacgatcttgtggccggcgaggaactcggcgcagtcctccacgtctt

SEQ ID NO: 8584 - DNA, 1484 bp, Setaria italica
  misc_feature (1)..(11): n is a, c, g, or t
  Peptide Sequence Number=SeqID_74558
nnnnnnnnnnntttttttttagaagcacattgtgagtagattttatttttaatatataatactaatgattggcagtattctgtccaaattgtagaaacaaaccaaaattgcatagatgagagattaagctgagataacgaacaccataatcgtccgggttcaatttattccatggttggttgctaccactccatgcatattattcagtctatgtctattcagtttatggcggagaggcgctgcacgagcatgtcgaacacttggtccctgtccagcatgttgatcctgacgcaccgcgcgtctcctccgaactgcttcccgccgcgagccacgatcttgtggccggcgaggaactcggcgcagtcctccacgtcttccttctcgcaccgaagccacgcgaacgcaggacaagctgccacggtttgcttgttgaagtcgcagtagccggcgatctcctccggcaggctgaaggcgccggaggccgccacggtggcgcgcagggtgcgccagcgctcctccatgcgccgccgcgcgaagtcaaagaggcggggcacagcagcgccgccgtcgccggccggtggggcctcgtaggcgtcggagacgacgctgaggatcttggtggcgcgcagctgcgagtccttggacacgccgatggtgctccggtcgacgaagtagaccatcttcttcgccacctcgcggtccttcaccagcgcccacccgagcctcgtgccggcgtggccggtgatcttggacacggtgaagagcatgatgtcgtgggcggcgcgcccggtgatgggcgtgtactgcggccagtagtagaccaggtcgtggatcggcttggcaccggcggcggagctcatgacggactcgcggacggcgccgtcggggttgttgggcgagcagacgagctcgatgcactcgccgccggcgaacgtgctggcgtcaccggcccagcggtaaaaccccgagagctggagatccgtctgcggcggatacgaggagtagtacggcgccggcgagacgacggggacgggcttgtccccgcgcgccggcgagctgagcgcgtacatggcggcctggtagagttgggtggcgccggtgccgacgacgaggtggtagccgtcgaccacggcgttgccgacgacgcggtggagccggcgcacctcgcgctcgaactccggctcgaggaaccagcagagcgcgtcggggtcggagaagtagctcatcgcctgccacccccggatcaccgtcgccgcgcggtccccgacctcccgccagaacgcctcatacatcgtcggatcgccgagctcgaggttgaggacggcgtccggcgggagcgcgacggcgtggtccggcgcctcggtctcctcgtccgccagcagcgcgccgtcgtccgcgcccgacctcgccgcgcaccctttggcggaggacggaaattacgtaccgtaagtacttacgtaaggtttagtaaggtaacggtacta

SEQ ID NO: 8585 - DNA, 224 bp, Setaria italica
  Peptide Sequence Number=SeqID_74559
cggtgattactgaactctgaagggagatgtagtcgtggatataaaatggtagtgctagtgcttaatgttacgactgaaaactattagtcgaacataagtaagcttgtacaaatcttatgcggtcattagaccacgcttgttgtgtagttaaattgtgtttagttcatgttcgtacactatttgaattttatcctagagatcaagagtttctgtaaaaaaaaaaa

SEQ ID NO: 8586 - DNA, 458 bp, Setaria italica
  Peptide Sequence Number=SeqID_74560
agaggtgtctgacggtgaggatgatgagaatcctgctgcaggttccctaaagcaccacagtgagagattagctgttgcgctgggattgctgcaaacactccaggtgcaacaattcgcgtcacaaagaacattaccatgtgcagggattgccacagttcaattaagtcttttcattacttgcaaacagagagattgttgtccgggacagtaaacgccttcacaagttcaaggatggccaatgctcttgtggggattttagtgcactattgtgagcacaggaacctggaaatttcagcaatatcctactccctagcctcacaagttttgtcctgggagtaggtcacagctatcatgggattttggttgatgcaaggtactctgagctggtcactctgaagtcagttttgtagattttcgtcttaaagtaagtttgttcagacagcatctgtaacatataa

SEQ ID NO: 8587 - DNA, 1454 bp, Setaria italica
  misc_feature (1428)..(1454): n is a, c, g, or t
  Peptide Sequence Number=SeqID_74561
caaatagcccgcagaaacaactctaccttgcactgcccctgaatcacgatcgccttccagtacaagctagtcgccaatttcgcgctgagaaatggcatcacctcgcagcagcagcagcagcatacgcgttcggcacggcacgagccacgtcgcacttgcgctgctctccgtgctgctcctgagctcggcacgcctctccgtgggcgccagcaggatgctgctggagctgtacaagccgccggccagcgcgcgcctcacgtaccacgacggcgccgtgctccagggccgcatcgcggtgtccatcatctggtacggccgcttcacgccggcgcagaaggccgtggtcaccggcttcctccagtccctcacccccacctcgcaggcgccgaccccgtccgtgtcccagtggtggaacgccatcaaccagctctacctgtccaaggcgcggggcggcaacggcgcgcgccccggcaccgcgcaggtggcgctcgccggccaggtcgccgacaaagggtgctcgctggggaagcgcctcacgctggcccagctcccgcagctggcggcgcgggccgggcccaagaagggcgggatcgcgctggtgctcaccgcgcaggacgtggccgtggacggcttctgcatgagccgctgcggcctgcacggctcggacgcccgggccggcaccgcctatatttgggtcggcaacgccgccacgcagtgccccggccagtgcgcgtggccgttccaccagccggtgtacgggccccagacgccggcgctcgtgccgcccagcggcgacgtcggcatggacggcatggtgatcaacatcgccagcatggtcgcggggacggtgaccaacccgttccggaacgggttctaccagggcgacaaggacgcgccgctggaggccgccaccgcctgcaccggggtctacggcagcggcgcataccccggtttcgccggcaacctggcggtggaccgcacgacgggggccagctacaacgccaatggcgcgcacgggaggaagtacctgcttcccgcgctgttcgaccctgcgacgtccacgtgttcaactttggtgtaacggctaaggaaacaaatcctgccagaattgtgtactgtatatatgcgagtgacagggggtgtatggcaatttgaagtatcaattgcttatcggggaaactgcgccagaccaggaaacaaaaactaaagctaggattgtaaagcatgcgaagtaaataaatgcaaaaaaaaagtaaataaagagaagaccttccgttgagaatggtaacttcaaatcacctttcacttcagttgcagtaatcctgtatctataggaacagaccatctcaatggacaatgtgtttctcacccttcaagagttagcacgttaagtttctaagaattttttttaaaaaaaaaaaaaaaaannnnnnnnnnnnnnnnnnnnnnnnnnn

SEQ ID NO: 8588 - DNA, 885 bp, Setaria italica
  Peptide Sequence Number=SeqID_74562
cgccttctcccctcccctacaagagagattggcacccacccgtataagtacataggatattgcctccgtcctcccctctcctgtcctctgccaagcagaagcacaagcgcagggaggttgctgcggtgcggaggcgtcttcttcctccctccctgcctgcttgcttgcctacctgcccgccctggagtaaggaagcagacagcactttggagttgctgccaacaaccgggctcggctgtcaaattctctatttggtagccagcccgtgtcaaactccatcctaattttacctcaccggcctgggcgcaaggtgcaggcagataaataacgtgcacaagtttcctcctctgcgtgtcacaagaatctcgttgctgctgagaaggctccacaacccatcatggcttccttctcaggacccctccaccgccccctctccgccatggcagtcgccgcctttgctgccgtctcctccctcgagcttcccgacaaattgtcccaccacaagctttctgatgcaagctcaaatgcggacgtgcttgggtcagtcccggccaccagggcagatgctccagcagggccttcagcctctaccctgtctggcatgcagctattgccgtgcaatctccagaatttgcatccgttgaaggctccgttcgcgtctttgccggtcatccagaccgcgtaccagtatgcaaagattgccaagacctcggaacaagatgaagcgattcctgcaattccttcctcgtcgtccgatgtgctgtaccgctggcatctgccagaccccagggcttgtgccgacttccccgacaagtctcagacagtggtggttcttcttgggtggctgggctcaaggcagaagcacctcaagagatatgttattgt

SEQ ID NO: 8589 - DNA, 587 bp, Setaria italica
  Peptide Sequence Number=SeqID_74563
ccggaactgattgtacacttgattccaggcatgctttgtggtttctttgaggacatgaggctgcccatagatataattgccaatggctaggcccttacacctatctactatagaagtagccacatcctcgagctctggggggcacttccgctctgctgtgttattaaaggcccttctgcaaaagaggttgaatgcatcagagctttccaaaggctgtatctgaagatggtgttctgaagatgcaagagatgcaacatcatatctccgtgttgtgatgatgatacggcttgcttggagactattgaaagtgtcttccatttgatgatacacttccttattccaaacatcatccaacacaaccaaacattttctggtacctaggtgacttttcagtttatctctcaactcgtggttatccattttttccatactatctttgtacccgatctttctgaagtaagaatctctcagcaagccatctattgtgtaggtctgtgacaccgtgacccatgcatgaacagggaatttggttttctcacgctacaaaaacattcataaccagagtggttttccccaagccacccatt

SEQ ID NO: 8590 - DNA, 603 bp, Setaria italica
  Peptide Sequence Number=SeqID_74564
gtccgtacctagtctacccggttcgtccctcctcgtcctcgtacaccagtgtgtactcgccgctgatcacgggctcctcggcctcctcccccgccgcctcctcgccgcagcaccggcccaccgcggcggcggccgggtccctctgggcggcgagcaggccgcggaagagcttgccgacggcggcggagagctcggcgtagccgccgtacgccgtgaggtccaccttccgcccgatgggcactccgtccatgttgatcttcacgaacagaccgccgcccttgtgcccgccctcgccggcgccgcctcccttggcgccgcggcctcccttaactccgccgtcctgatgatgagccgacgacgactgcggcgactgcctggtggacgccaggttcctcctgatcgaccgcaccggcggccaccccaccaccgggcggaggggccggcgggggctgccgccgctcaccatatcccgtggcggcaggagggggcgggagggcggaggtgggcccgactccagatcggcatgggcgagggagggggacctgcccggagttgggagcgagattttgggcggcgactgcgtgcgtgggggcgggcgggatg

SEQ ID NO: 8591 - DNA, 273 bp, Setaria italica
  Peptide Sequence Number=SeqID_74565
caaatcacccttgaccatgctcctcttgatgctcatcgagccagccacaggacctgctttgcacagcgcctgcgttttcggcgtgcgagcctcagtcttcagtgtggatctcgcgcatgttgaaaccacaggtgcaactttgatggtaggaggaggaggaggcctctgcatcttaggcgtgctggccgaagcaccatccgattttgccgcagggtctctgggcgggagaaactcgaaagatttgggcgactcctctttctcttcttgagacgg

SEQ ID NO: 8592 - DNA, 423 bp, Setaria italica
  Peptide Sequence Number=SeqID_74566
tggaggatctcaggtgatcaccacggccgagttccacccgtcgtcctgcagcctgctgggctacggcagctccagcggcctcgtccggctggtcgacctgcggcggtcggcgctgtgcgaccagagcgtcagaacattcaaggatcgccagagccgacctcagcccagcacatttttcaccgagataatctcttgcaccaccgatctgaagttcactggcgagggaagatgccttctaactcgagactacatgaacctcaaggtgctatgaaactccatttgttccaagcataccaactatgcagctacctgttgttagcaagcagcaacgcagcaacggttcaccctgaagcctcactgtttgcagctctgggacttgcgggtggagacctcacccatcgccacatacaaggtgcacgagtt

SEQ ID NO: 8593 - DNA, 705 bp, Setaria italica
  Peptide Sequence Number=SeqID_74567
gcggacatggaggatctcaggtgatcaccacggccgagttccacccgtcgtcctgcagcctgctgggctacggcagctccagcggcctcgtccggctggtcgacctgcggcggtcggcgctgtgcgaccagagcgtcagaacattcaaggatcgccagagccgacctcagcccagcacatttttcaccgagataatctcttgcaccaccgatctgaagttcactggcgagggaagatgccttctaactcgagactacatgaacctcaagctctgggacttgcgggtggagacctcacccatcgccacatacaaggtgcacgagttccttcgcccaaagctgtcagagttatacaccgaggactacatttttgaccggttcagctgctgcgccagcaaggacgggagctacttcgccactggatcttacagtaatacgttcaaagttttctcccgtactgctgcgcagacctctggcactacgttggaagctagcaccaacccttacagggtacaatcacatgctcctacaaagattccggtgctcttcagcagtttctctcttggagttggtagaaaaggtcaggatggtccgaggtcagacggcaaggaggaaatgccatgcaacatggcatcaagggtcacacatatagcgtggcacccgatggaaaacttcatcgttgtgcagccaataacagcttgtacat

SEQ ID NO: 8594 - DNA, 1610 bp, Setaria italica
  Peptide Sequence Number=SeqID_74568
tgcttttgttcagctccagtatatttgatgatggaacaccattggtcaaagaaggactcgtcttgaaataacgaaagcaacaaatcaatctttgagttacaggtgctatattttccattaaaacaccaagggagaaggtcatcattgaacaactccagataagacttcacatctgaattttcatcatgattctgattattctttagaaataggggaatgggtctaaatatttcaaccaaaactgaaagaagcttaaccaagcttggagtgtccacgaacttgatggctggcaaagattgttcaaccagcggtcttgctaatctttccagtggccatgtttcacctttgtgtacaacaagttgatccaaagataggaagaaagacacaagttgttctacatgatcctcaaactttgaaagcttctccccctgttgaattatgtccaaacagtccctcacaaacaactcacaagaaatattgagtaaatgattttctgtatccgcaatcacatccagtatttcaacaatacatttctccaaaccctgaagatagtacattgggtactgcgtgttcgccgccgctgaccctgaatttttatgagacaactggtcactgtgtccagttatgtcaccagacaataaaagatagtcacgccaaactattttggcaagtatatctgttataagcttgatgggggtatcaacagaagaatcttctccagaatatcttgacacattttctagaagccacaaaaaacactgtttaaaggcaatacagaaagccaaactgtcaccagctgataactgcctctggttccttccagcccagagattatgcaaaaaatcaaaaataaattgttgtcccatgactgctttaggtggtatagagtccaaaaattgaactagaagaggatatgagacttgtttggacccatagcatccattttgtaggaaattccaaaaccgactgaggacaactttgtgaatattgcaatatgaccaagcctctggaaactttctagagaaaacaagaattgcatcccacatagaagagtgacatgacgcatccttttcatggaatgcaccaagtatagtaggagaaagtttcttcatggtttcttcatcaaaaacatgagggatatgtttgatataacttgtaagcagtgagtatgtagctgaccgtataacagcacttttcgacttgagggcatcaaggaaacatttatgcatacaaaatgcagcttgagcagacgaaagtgtaatagatcgaacttttgacagactcctgttttctgtactggtactatcaacatcacaattttgcaatttccctcctagtaaaatgtctacaagagttgccatagctaggagtgatgatgatatcaccctctggtgcatatcttccagttcatccataggtgtagccttgtcagacaaagcttgtgttgttagcttcaagttgtcacttaagtagtgaaagtaaattgttttcctaacattaatgcatccaatcttctctctgactgtgggaatgctgcctcgaatgaacgtcgagcagcctgtgcaacctcaggagcaggatcaaattgagaaaaccaccaaggacccatc

SEQ ID NO: 8595 - DNA, 196 bp, Setaria italica
  Peptide Sequence Number=SeqID_74569
aaagtgctataacgaaaaccagatacttgttaaagcatgtcctgaatacaagtcatactacccagtcataactcataacattctattctactacataaacaactttaattagacaagacacaaacatcatggtagcaagctaccccgtttttatcaaacggttaaggagatagtagatcactcagtagcccagcag

SEQ ID NO: 8596 - DNA, 539 bp, Setaria italica
  Peptide Sequence Number=SeqID_74570
gctcctgctcagtctgatgctcctgctcttgatgacaacgacttcattgaggctaaggacaagaagaataaaaagaaaggcaacaaaaaacaaaaggcttctactgtgaaagctccatcacctgttggttcctttgacccatcagctatttccatgcctactgagaaggggaaggcagccaagcaagcacaacaggagtcagaaatattgccggctccaccaagtggtccatcctttggagatttcgttctttggaagagtgatcaagcgagctccgtgcctgctccagcatggtctaatgactctgcaaaggtgcagaaacctttgtcgttgagagatattcagagagagcaagagaggaggtccgctgctatgcagcaacaagcaccctcgccaattccagcaaaggtcgccatgaaccaaaaaaatcatgggaatgcttcttcctggcaagcttctggatcatctccatcaaaggcagttgcccctgtccaaatgagttccaatactcccggtcgttccaagtcaagtgctgaacg

SEQ ID NO: 8597 - DNA, 2507 bp, Setaria italica
  misc_feature (2480)..(2507): n is a, c, g, or t
  Peptide Sequence Number=SeqID_74571
tgcaaatgacgatgcacaattgaaatcaaatgtggtaaactcaaagatgacggaagttgcagttaggaacaaggatgttaaatctcatgaaatgggccctggagcagcaaaaaccgaaatgtctgaaaaggttttggattctggatctactgttgtcccaggtcgtgcttccaatgaagctaaggactcacatgcaccaaaggcagaaaatgcattatctaatatttccagacaagtccaagaaatgaagctttcttcagaaaatacctcttctgacatcgcgacagctgtggcaactgaagttaaagttactgatgcacaggagacaaagaaatcagaaaagaaaaagaagcaaaagaaaaagcaggctgctgcagatgctaacaaaggagcatcaaaggcggtttcttcccagcaaccaaggcacgaagctgaggttgacccttctgaacttggtggaaataagcatgatttaccagatgatacagaagaactgttttggggtgcacctgccagcgtgcaaaatgaggaatatgacactaacaaagctgaatcagaatttagttctctatcatctgatcctcatacagcagcaaaccagcgtgcatggaaacaacctacccagggactcaggcccaaatcacttctggaaattcaagctgaggaacaacagcgcgcacagaaaggattagctatggaaagtgctaagccagcagcttcaataccttcaattccttggaatggcatggcaacatcttctgagcaacattatgggggttcaagtaaatcattgggaggcatggaaactgctggtgaaagaaataaacgaagccagttgcatgacttgctggcagaagaagttttggcaaggtcaagcattgcagataatgagaatataggtaatgccaatgatgcattttttcctcctctgtcacctgctcctgctcagtctgatgctcctgctcttgatgacaacgacttcattgaggctaaggacaagaagaataaaaagaaggcaacaaaaacaaaggcttctactgtgaaagctccatcacctgttggttcctttgacccatcagctatttccatgcctactgagaaggggaaggcagccaagcaagcacaacaggagtcagaaatattgccggctccaccaagtggtccatcctttggagatttcgttctttggaagagtgatcaagcgagctccgtgcctaatccagactaaatagaactacttgcaaaggtgcagaaacctttgtcgttgagagatattcagagagagcaagagaggaggtccgctgctatgcagcaacaagcaccctcgccaattccagcaaaggtcgccatgaaccaaaaaaatcatgggaatgcttcttcctggcaagcttctggatcatctccatcaaaggcagttgcccctgtccaaatgagttccaatactcccggtcgttccaagtcaagtgctgaagacgatttgttttggggcccttctgagcactccaaacaagataagaggcagacggagtttccaactctttcaagtcagagcaggagttccgtgatgaaggatcaatctccagcgaatcgtcaaaagtctcaggcaggcaggttgccggtttcttctgctgctcctgccaaccaatctgggaaagggaaagcagaagcttcaaacaagcagacagaggcaatggacttccgtgattggtgcgagggcgaatgggtcaggctcactggaacaaatgacataagcctcctcgagttctgcataaaacaatcaactgttgaggcagaaacactccttcgggagatcattggttctctcgaccgcaaccatcagttcatcgacaagttcctcaactacaaggccttcctgtcatctgaggtgatcgacatggccttccaagctcccagcacgcgtggtacccgcggtgacggtgcagcacgggcaaaccctgcaactgcagccagaggaggtacgggcgtggacatggagctggacggcggagggaagaagaaaggcaagaaggggaagaaggtgagcgccgcagttttggggttcaatgtggtgagcaaccgtattatgatgggtgagatccagaatgtcgaataggaggttctgggcgatggcatcatgtatatacatgcttttgtttcccgggacatccatcaccgcatgacttgtgtacatacaatagtttacctgaccctccggtgacatgcttcggcgttgccgtgtttttgctctcatgggatgagaagttagcgtgtcctggtgagtgctctgcaatggagcagtattttgactcgtttttgcttggaggtgtggactgggcttacattcagggtcatgtggtggtgattttgggttcctgtaacattttgttggaacttacctttattcttaggttcgtgtaccagacagaagtacttacgctcaatggaaacttacctgagaaagaaaaaaaaaaaaaaaaaannnnnnnnnnnnnnnnnnnnnnnnnnnn

SEQ ID NO: 8598 - DNA, 312 bp, Setaria italica
  Peptide Sequence Number=SeqID_74572
tcgcaaaaccatcgagtagccagagcagaagccgccgcggcgcccgtgccaggcgggcgccgcaacgacccaatggagcgcgcggtgagagagctgtgggcggaatcccgggaccttctcggcctcggctccccatcccctgacgacaccgccgccaaagcctccgccgtgccgcgcgcggacctgcccccgacgccgctcgccttcctccgcgaccacgtctccccgggccgcccgctcatcgtctccgccgcggccacccgccactggcccgccgcgtcgctctggcccaccgcctcctacctcaccgac

SEQ ID NO: 8599 - DNA, 255 bp, Setaria italica
  Peptide Sequence Number=SeqID_74573
taatttggggcgaggtgggtatggctcagcaattcccaagtggagaaagatggaacaagatctgatcgaacggggaatcatacctgcaactattgaatggcccgaacgatcaaagaactggtactacgctcatggaggctccctaagccaagaggatgggacgctgattttcaatgacagaatacgtgagaaggccgaacatctcatgaagaacattgaagattccaaggctgggaggttgaggatggaccgaag

SEQ ID NO: 8600 - DNA, 474 bp, Setaria italica
  Peptide Sequence Number=SeqID_74574
ggccttgggcgacaccacgccgtgctcaaggtactccggcgcgatgtacccgcgcgtccccgcgatgcgactcgtcatcgtgaacagcgctgcctcctcgccgccggcgccggctgtggcgcccgtgatggcccgggcggcgcagaagccccggagcttggcgcggggcccgtcgccggcgaggagcacgttgccgctgctgacgtccatgtgcacgcacgccgggcgcgcgtactcgtgcaggtaccggagcccctcggcgacgtcgagcgcgacctgcacacgctgcgcccaggtcagcggtggcgccgcgccagcgcccgcggcgaggaggcggtcccggagcgcgccgtgctcggcgtactcggtgacgaggtaccaccgcccgtggtggtggcagaggccgatgaggcggatgaggttgaggtggttgatcttccgcatgatctccacctcagacgacacgttccggtc

SEQ ID NO: 8601 - DNA, 465 bp, Setaria italica
  Peptide Sequence Number=SeqID_74575
agcagcaagcacaattcctcatgtcgggctgctggattctgtgcattgtgtgccctccaagatcatgttacgtctgctttacggtcaactgggaaaattctgacaccactgctgtttgtcaagaacttaagatgcatttctcgtagttttcgtaacactaggcaggaagatgctcatgagctaatggttagcttgcttgagtcaatgcacaaatcctgcttaccatctggtatatcaagtgagtctccaagtgcctatgagaggagtctagttcacagaatatttggtggccgcttaagaagtcaggtgagatgtacaaagtgctcacactgttcgaacaaatttgatcctttcctggatctcagccttgaaattggcaatgctgccacattgatgaaagcactttacaattttaccgaggaggagctattagatggtgggaaagcactacaactgccagcagtg

SEQ ID NO: 8602 - DNA, 402 bp, Setaria italica
  Peptide Sequence Number=SeqID_74576
gatcgccatcagcggaggcggcagcagcgacgaggccgggagcggctggtaggtggtgaccgacggcgcagcggagccgccgccgccgccggacgcctcgcggagcacgtcgaagaggaccatgtccagggagtcgttctcgttgagggggaggtactggccgtgcccggcgccggccagggagagggacgtgtccatgcccgcgaccgcgcgcggatacggatgcgcggcgctgtcgccaccggccggaggcgccggcgtggcgacgtcgcggctgccgcgctgcagggggagagacatgtacgtgctgctcatgtgtcgcgccaccacctgctcgcgtgggtgatcagtgtggcctttgggcatgagacgacacacacgagagcgcctggctgacctgtg

SEQ ID NO: 8603 - DNA, 827 bp, Setaria italica
  misc_feature (1)..(45): n is a, c, g, or t
  Peptide Sequence Number=SeqID_74577
nnnnnnnnnnnnnnnnnnnnnnnnnnnnnnnnnnnnnnnnnnnnntttttttttttttttttggtcaaaagaggaagaagcatgttgattaattcagactccactgatcggaaaggaacaggagagtacaccatcgacaaaccagctgcagtcccttcctgattcattcattcagctatgaacagacaacgaaaaagaaaagctcaacaattcctatgcatcccgaaacaatctaggctcctcctcctccgtgtctctagctggtgaagaggaactgggacgcctgcgcgacggcgtcgtcgagccaccttcgcggctcgtccatgagctccgggctgagccgcaccatgaggacgcagaactccatctcgctgagcgcgccgtcgccgtcgaagtcgccctcggcgagcatcccgcggaggtcgtcgtcggacatgggtcccaggcccagcagcggcgcgttgcggcggaggctgtcgaaggtgatgagcccccgggacgggtccatgagcaggcggaacccgctcgccagctcccgcatgaggccgtcctcccccagccgctccgccatcaccggcaggtagtcctcgaaccccaccgccggcgccgacgccgcctgctgctgctgatgcatctgcctctgctgagacgccattgcgtacttgcggttgcggctgtagaagaagatggaggatcgggagtcggtggcctctgtgctagtgccgctgattgggagctccggtggatggctggatgctggttggagaggaagatgacgaggggaagcgatggatggtggagcaggatggggagggggagggataaat

SEQ ID NO: 8604 - DNA, 851 bp, Setaria italica
  Peptide Sequence Number=SeqID_74578
cgccggcagccgcgcggcgcggcggcggaggatggagatacggcggctcagggtggtggcggaggagcaggccgcgaagaggcggaggctggagggtgacgacggggaggaggaggaggacgcggtgagggacccggcgccgaggtacggcgtgacgtcggtgtgcgggcggcggagggacatggaggacgcggtcaccgcccgcccggggttcatccacggccaccacttcttcggggtgttcgacggccacggctgctcgcatgtggcgacgtcgtgcggggtgcggatgcacgagatcgtggccgaggaggcggccgccgctgcggcgggctcgtcggcgtcggacgaggcggcgcggtggagggacgtcatggagaagagctacgcgcggatggacgccgaggccgtcggctcaagggacactaccggcccggcgcccacctgccggtgcgagatgcagatgcccaagtgcgaccacgtgggctccacggccgtcgtcgccgtggtagggccgcgccacctcgtcgtcgccaactgcggcgactcccgcgccgtcctctgcagcggaggcgccgccatcccgctctcagccgaccacaagcccgaccgtcccgacgagctcgaacggatccacgcggcgggagggcgcgtcatcttctgggacggcgcccgcgtcttcggcatgctggccatgtcgcgagccattggcgacagctacctgaagccgttcgtgatctccgacccggaggtgagggtggtggagaggaaggacggcgaggacgagttcctgatcctggccagcgacggcctgtgggacgtggtgagcaacgaggtggcgtgcaaggtcg

SEQ ID NO: 8605 - DNA, 389 bp, Setaria italica
  Peptide Sequence Number=SeqID_74579
atcttaaaaaaataaaagtcaaacccgtgcagtccgctcgctggctcgctgccgcagcgatctgtacttctccactccacacttgttcgccagatagtcaacgcaattctccctccgtgcccgtgcgcgaatccgaagatggaacggagcgaaatgcccagggtgaagctcggcacgcagggcctcgaggtgtccaagcttgggttcgggtgcatgggcctcaccggagtctacaacgccccagtccctgaggaagccggaatcgccataatcatgcacgcgtttgaggctggtatcaccttcttcgacactgcagatgcgtacgggccacacaccaacgaagtcctgcttggaaaggcacttaatcaatttccccgtgagaaggtaca

SEQ ID NO: 8606 - DNA, 1295 bp, Setaria italica
  misc_feature (1224)..(1295): n is a, c, g, or t
  Peptide Sequence Number=SeqID_74580
tattctacctttctttcgtactacttgtctagtattgtcgttacgggcctacacaccaacgaagtcctgcttggaaaggcacttaatcaatttccccgtgagaaggtacaagttgccaccaaatttggcattgctggatttgatgtcagtggcatgcgtgtgaagggcacaccagattatgtgcgagcatgttgtgaagcaagtcttcagcgccttgctgttgattacattgatctctactaccagcatcgcattgatcagtcagtgcctatagaggaaactatgagggaactcaaaaagttggtcgaagaagggaaagtgaagtatgttggcttgtcagaggctagtgcagataccattcgtcgcgtacgggctcatgcagttcatccaattactgcagtacagttggagtggtcgctatggaccagagatatagaggaagatataataccagtctgcagggagcttggtattggaatagttccatacagcccactcgcccgtggcttctttgctggcagggcagctgtagagagtataccatcagaaagtttattgtctaaacatcctaggtatactggggagaacttggagaagaataaagttatgtatacacgacttgaaatgttgtccaagaagtatggatgcacccctgctcaacttgctctctcctgggttcttcatcaaggagaagatgtagtcccaatccctggaacaacaaaagtgaagaaccttgatgataacatgggtgctgtaaaggtaaagctaagcaaagaagacctcgaagaaatctcggctgcagtcccagctggtgaggtggccgggtccagacttctgggaatcctggagccttattcttggaggcttgcaaataccccacttccaaagtagccacatcacatcttcaagtgcaaattcatggccgtcctatcattggcagtgcgttgtatttattcatatctacatgaaagaaacagcaaaatgcatttgcttgtgaaaggagtgtacctggagcaagacatgccactggcattctgtgtgcagtgtaccatattgctatactagatcaaagaaacaagtcagatataagtcgaagtttttaatggggcacaatttctgaatgaatatgtttttcatgacattctctaagtaaaattgtatctaatttctacaggagtgaatctatgttcatttgccatcatttgttttaatgaaaaaatattnnnnnnnnnnnnnnnnnnnnnnnnnnnnnnnnnnnnnnnnnnnnnnnnnnnnnnnnnnnnnnnnnnnnnnnn

SEQ ID NO: 8607 - DNA, 355 bp, Setaria italica
  Peptide Sequence Number=SeqID_74581
ctaagtataatttgatctcctggtctcaaatttagagctttagagtagaaggatattgcctcgtcgaagtggccgtccctgaagacctgcgtgccgcgctgcgcgaggtcaaacacctcgcggtacttgtccggtgccatccccatctcctcctggctctccacccatgggaagtcctcggcggcgagcgcggcggagaaggcggcgcccggcgacgccattggggggaggcgagggagtcggagtgggattcggattggggggagcggaggctgcgctgagcagagaggggattggttgagggctttggagttttggagggagggggaggggaggtggtggtggggggagcggc

SEQ ID NO: 8608 - DNA, 311 bp, Setaria italica
  Peptide Sequence Number=SeqID_74582
taaccttctattctattgtattccttctttcttttgtccttgccatcccacctgtcgccccgtcgattgcagtttgattggtcatgactgttttcgtgctgtggcttcctcaattggtttgtttctgccactatttttgttgaaccattatcaccaatgaaggttgggaccttcttactaatgtcttcacatttgtgctctgtgtattgtaagtatggctgaggcaacaaccatgcttcttgagaaacatgaaatggctcatacttatgcatgaatattcggtctagttgattcaattcaggtgaattttg

SEQ ID NO: 8609 - DNA, 523 bp, Setaria italica
  Peptide Sequence Number=SeqID_74583
ctctcttgcaatatacaatcacttcacagttttgtatctgctatctatacccagaaaaagacaacaactatattgctatcacaaaaagataattcaatcacctgcaggggttaaaattgctacaagataaacggacaaggatattgtacagcggggaaagaataatgtgcaggaaaacaggtcgaattcagattgccataacttctgatctaccacacaaaatctttggaacctttatctttctgggaaggaatgaaattatctaatatttattaatacatcgatttttgaatatagagtggaatctactcaactaatacatcaattttcgaaacatggttgggaattgatcaaatctaccaatcagatctaaaagaataccacaagcaggatgtggcaatgtgggtttaatttttttcctgtgttccatcatttctcaccagttaggctggaagctaaaatacaaacaacccagattattgtgacagagaacacaaattagtgctagctgaattgttttttt

SEQ ID NO: 8610 - DNA, 761 bp, Setaria italica
  Peptide Sequence Number=SeqID_74584
aagttggttacaatgaaggcagccaaaaggtttgtctgcaaggagcagaacataacagatggggctggtggagcaaataatggatgtcatttcttattcaagaacaacaaaagtggagcagctaaacaactttcataagtagattatgaataatgaaaggctgcagatagtacggatgaaattgaacaggctgtcatgaccaaacacatgttggtggcttcatgtctcctcactggtaaacaagactcgacggacgaactgaaagactggtcgacaaggatccttgccatcgtgaagctaatgcttattattcatttttccaaaagaaagtctgtattgaagattagtgtgggacgattgggatgtgcgccaagtaagctccgggttctggcctccagatctttgacggctcctctatgacgacaccaggcatgggtatccacatcgaccctggtgaggctggcgaggtgctggatgccaagatcgctgtaactatttgtggtgaaggtaagtccaattttgaggtgcttcaggttaggcatagcaccaggcataaacagaatttggtagggtaggccgaccctgaatgatttgagacgctggaattcatgtcctcggatggtgaaaggacctgcatctgtgcctgcaagatacagtgtaagagtccaacccttttagtgaaatagctaatttttccaacccttttagtgaaatagcaatcgtccagaaagtttgtattgaagtttacttgacacacatcc

SEQ ID NO: 8611 - DNA, 485 bp, Setaria italica
  Peptide Sequence Number=SeqID_74585
aaacaactttcatatatggattatcaataatgaaagtctgcaaatagtacggatgaaattgaccaaacacatgttggttgcttgatgtaccctcactgataaacaagactggacggacgaaccgaaagactggtcgacaaggatccttgccatcgtgaagctaatgcttattattcatttttccaaaagaaagtctgtattgaagattagtgtgggacgattgggatgtgcgccaagtaagctccgggttctggcctccagatctttgacggctcctctatgacgacaccaggcatgggtatccacatcgaccctggtgaggctggcgaggtgctggatgccaagatcgctgtaactatttgtggtgaaggtaagtccaattttgaggtgcttcaggttaggcatagcaccaggcataaacagaattttggttagggatagctacctaggtctattaaactagttaatttttggtttagggttta

SEQ ID NO: 8612 - DNA, 856 bp, Setaria italica
  Peptide Sequence Number=SeqID_74586
taacccttaggttagtaggtcttggtcgtaggttgtcttggtattgtccaagatcgctgtaactatttgtggtgaaggtaagtccaattttgaggtgcttcaggttaggcatagcaccaggcataaacagaatttggtagggtaggccgaccctgaatgatttgagacgctggaattcatgtcctcggatggtgaaaggacctgcatctgtgcctgcaagatacagtgtaagagtctcaagagccggcatgcctccaagcactcgcaaatcctcctgagtgaatcgattagttctgagttctaacagctcgaagattaacaagtaagcccatccagatagggagattgctgatgtgcgaaatgacaaatgtccggaggctttgcagagcagggaacgaggaatccatggggacgggaggcgaatccgccatagatatgttaacatctagaagtttatggccgcacagtgcttggagtgaagaagtgaagattccccacccgctaccttcataatcgacatcatcgcaatcagcttccagggttctcaggttggtaagctggcctagctcttttagaaagctgagtggttgcctgtggattgagaaacattttagttgttccaatcctttcatcttgctgaagccttcagctgggaacttgacattcggaacttgacattcggactgacaataagacgtgccagcttttcaagtagaacaatagttgatggcaatttttccacttgagtgaatcttatatctaatgtttctaaattcttgacttgtccaattccagcagggagctcattgacacttgttcctttaatgttcaaataccgcaactgaagtaacacctc

SEQ ID NO: 8613 - DNA, 1078 bp, Setaria italica
  Peptide Sequence Number=SeqID_74587
aacaaagtaaccaaacaaaaagaacaatagacaaactagaaccggaacaataaaggacttaaatagaatcgtgtagtttgagttctaacagctcgagattaacaagtaagcccatccagatagggagactactgatggctgaaaggacaaatgtccggaggctttgcagagcagggaacgaggaatccatggggatggcgggacaatcccaagtatatatttcaacatctagaagtttatggctgcacagtgcttcgagtgaagaaatgaagatcccccacttgcttcctaaattattgacatcgagatagtcatcacaaacagcttccagggttctcaggttggtaagctggcctagctcttttagaaagttgagtggttgctcgtggatcgagagatatgttagttgttccaatcctttcatcttgctgaagccttctgctgggaatttgacgtacggatcgacgaaaagacgtgccagcttttcaagtccaacaatagttgacggcaattttttcactcgagtgtatctgatatctaatgtttctaaattctggacttgtccaattccagcagggagctcactgacatctgtttttgaaatgttcaaataccgcaactgaagtaacacctctatatttgcaaggtgctcatttgtcaatggcacacagtgttccaggtctaacacacgtacaacttcattccgtaagaggaaacaattcttgcagtccacaaagcatgcaagtgaccggacataaaggcttaatagactttatccatgaaactacattctcttggtagctattctggagagataggcgacgaaccttgctatggagagaagttggatcccagatgagtccgacaaagtaagaaagttctcctcaactgatttggatacaaggaaattaaggatgacatcgtgaactctacagccccagcaccacatctatcagctgatgccatggttggatcaagctccggtttaccagatcattgaaataccttagccctgctttcatatagactctctcctagttctgcattaacaaatccttctgcaatccatttgcctatt

SEQ ID NO: 8614 - DNA, 3195 bp, Setaria italica
  Peptide Sequence Number=SeqID_74588
tttttgtgcaactaaattctcaaataaatgtttggttacaatgaaggcagcccaaaaggtttgtctgcatggagcacaacataacagatggggctggcggagcaaataatggatgtcatttcttattcaagaacaacaaaagtggaacaactaaacaactttcatatatagattatgaataatgaaagtctgcaaatagtacggatgaaattgaacacgcgtcatgaccaaacacatgttggttgcttcatgtctcctcactgataaacaagactggacgaacgaaccgaaagactggtcgacaaggatccttgctatcaagaaaagattattgtgggacgattgggatgtgcatcaagtaagctccgggttttggcctccagatctttgacggctcctctatgaggataccaggcatggatatccacatcgaccctggtgaggctggcgaggtgctggatgccaagatcgctgtaactactcggggtgaagtcgagtccaatttcgaggtgcttcaggttaggcatagcgccaggcataaacagaatttggtggagttcgcgaaccctgaatgatttgagacgttggaattcatgtccgtggatagtgaaaggacctgcatagatgtcgtcaagatacagtataagagtctctagagccggcatgcctccaagcactcgcaaattctccggagtgaatcgtgtagttttgagttctaacagctcgagattaacaagtaagcccatccagatagggagactactgatggctgaaaggacaaatgtccggaggctttgcagagcagggaacgaggaatccatggggatggcgggacaatcccaagtatatatttcaacatctagaagtttatggctgcacagtgcttcgagtgaagaaatgaagatcccccacttgcttcctaaattattgacatcgagatagtcatcacaaacagcttccagggttctcaggttggtaacctcgtagttgtaagtaaattgttgtaacgtctttccttttgtcctagctcttttagaagctgagtggttgcctgtggattgagaaacattttagtgttcaatacctttcatcttgctgaagccttcagctgggaacttgacattcggaacttgacattcggactgacaataagacgtgccagcttttcaagtagaacaatagttgatggcaatttttccacttgagtgaatcttatatctaatgtttctaaattcttgacttgtccaattccagcagggagctcattgacacttgttcctttaatgttcaaataccgcaactgaagtaacacctctatatttgcaaggtactcatttgtcaatggcacacagtgttccaggtctaacacacgtacaacttcaaattccgtaagaggaaacaattctttgcagtccacaaagcatgcaagtgaccggacataaggcttaatagactttatccatgaaactacattctcttggtaactattctgaagagataggcggcgaaccttgctatggagaaaagttgggatcccagatgagtccgacaaagtaagaaagttctcctcacctgatttggacacaaggaaattaaggatgacatcgtgaactctacagctctgcaccacacctctcagctcatcccatggttggatcaagctgcggtttatcagatcattgaaatgccttagccctgcttcatatagactctctcctggttctgcattaacaaatccttctgcaatccatttgcctattaaacgatcccttctaatttctgaatcttctggaaatccactcaagtacaacaggcaagttctcagatgttgcgggagattaaagtaactaagtgataatactgattgcatggtctcaacagacttatttccaggaagtggtgaacttatagattctttcaccttgttccagtgatcagcagattgtggtacatcatttgccaagaagctggatatcgaaattattgcaagtggtatgccatcacactttttcagtatatcttcagaagctctttccaattcatgaggacacttatcttcagagtcaaaaattcttttgaaaaacaacctcctagagtcattgccatctagaggtctcatatcataaacacgaccaccgtgagaagaacaacatgactcggccacatttttcagacgtgttgtcacaattattatgctaccagggctagttctgaccaatgcttgtccaatgatcttccacggatcagagtgccatatatcatccagtacaacaatgtaccttttgtactggagtcgctctcggagcttgttgacgagaaggagctcatcatccgccatgcttggggttgctccaacttgagaacaaatcttcatcagtatatccttaatgtgagggttctgagacaccgatacaaaggctttgcactcaaaatggccttgaattttctggtacacctgattggcgagagtggtcttgcccaagcctgcacacccaatgatggacaaagtcctgacatgctgcgagggcacctctccctctccaggcatcaacaagcggatgatctcatctctcggtctgtcaagtccgacgagattcttcgtctcctcccaaagcgcgcacatccggaggtcaaccttattacgagaagcaccaaacctggatccgatgagaccatcaagcttgtatcccttctgtcgatagcactcctcaatgacacgagccttgagctcttgtatcttgtaagcgatctgaagagacactctgattttcttgagcttccgtgctaactgcttgatggacccgcctttgctggcatcgccgccggcacgatggaaccgggccacagagagatcgatgcaatcctcgatgtcgtaggccagctcccgcaccctgtcccgccaccccttgttgagggcgttgagctcctcgatgtctgccatcacatacagcaggtcattcatgacgctgagctctgacctgaggaactcgatatccttgcggaccctgttggcaagcttgtacttctcatggagcagctccgccagctttgcgaggacggagctcatcgctccggtcgccgcgctcaccatggctcgctccatggcacatgaacggaggtggatcgagggttgttgtgtttagatcgagatagagacctcaagaggttgacagatacgccatgtccctcccaatc

SEQ ID NO: 8615 - DNA, 447 bp, Setaria italica
  Peptide Sequence Number=SeqID_74589
gtacggagagggggagagaaagatcgagaaaaccacgtacggaggaggaggagagccgcgacgcgaatccgcgatgacatccccggcgaccctcgcgccgccgctggacaacgaggatctcctctccttaatcctcatccgcctcccaccgctaccatcgtccttctccagcgcctccctcgtctgtaagcgctggcaccgcctcgtccgcggcccggatttcctccaccgcttgcgcgcatttcatcgaacacctccggtgctcggcttcttccacaactccccggactccccccgcttcgtcgcaattcagggatgtccggcatccgcatcgccgctgcggtgcgggatctacgcagggacggcgccggcggcatgtggtggttcgtcgactgccgccatggtcgcgcccttctccgcagccgcgattgggtcgatctgctttgg

SEQ ID NO: 8616 - DNA, 433 bp, Setaria italica
  Peptide Sequence Number=SeqID_74590
ctgatcattgatcatttaactgaaaagcataacaagcagcacccaatgatactaacacaacacatagtcgatgaaactcaagcgagacatggtccacaaacccacacacacaacctagcagtcacaattgatggtgaagtgaaccaacgaatcaaccaatcggtcacactcgtccagacgcaaccgctgctagcagagtagtgaacacgagcgtcgaagcgacccatccgcgcagtggccagactggagccgaaccgcttgtctgatggccatcgccgccgtcggaccgtcggagacccggtggcgatgacgctagccccgggaagctgaacggcacaagcaacgcatcgatcatgtacacggcgacggggtccgcgtcggcgagagtgcgggtgaccctggccgtgttctgcgttcgtcggtactaccagcg

SEQ ID NO: 8617 - DNA, 1013 bp, Setaria italica
  Peptide Sequence Number=SeqID_74591
gatgatcatctccgcgaactcctcgtcggtggccttgagcatgtccggcagcggcagcgcgacgccggcctcctccgcggcgcggtggcgcggcatgatacgcttctcgaggctgaaggcgaagtactgcgggaacgccttgacgtcctcgacgccaccgcccatggcgtccaccaggtactcgaacttgggcttgtagttgcgctcgatgctgaaggtgaagagcgccgggcaccgcagcaccatggcgatggcgtcgtcccgggacatgccgagcccagcgaggaactccagcttgggcgccagggtccgctccacgctggagacgaggaggatcgggtcctgcagcgccagcgcgcggccgtcccggaagcccaggcggcggaggtagatgagggccgggcggagctggtcgcggacgctgcaggcgagcacgcgcgggcacttgatcacgacgcggcggtgcgcggcctccggcacgccgaggtcgtcggagaggaaggcaaagatggggcggaggtgggcacggacgctggcggtgagcacggacgggcacatgccgaagacgcggccgaggtccttgaactggagcccccgggactggaggaacgacaccaccgcgtggatggactccggcgccgcgtcgcggagcgccgggttcagctccagcgcgcgcccgtagtcaacgcccatcagctcaaggctcaggatcttgtccttcacctgcgacggcagctccggcaggtgcagcaacagcgccgcggtcgccgtgggcacggtcgtcgtcaccgccgccgcggcgctgcgcgtcggcacggttgtcgccacggaggccgcggcggtggagtggggcttggaggacgcgacggactgatgcggcttggcgacggggagggaggtggaggcgtagaagctgcagagcggcattgctggggtgtgattccgctcccccgtctgatggatttggagaagctccgactccgaagtaggggaaccggggaagacgaggatgc

SEQ ID NO: 8618 - DNA, 336 bp, Setaria italica
  Peptide Sequence Number=SeqID_74592
gccgtgaccaaaagcttcagctaaaagcgaggttgccaacaggcatccttcgcttctccagcaaacgcttcctgggccagccaatggaacttttcctagaagcagcttttggaaaagctgaaactctgacctttatcataggaaatgtcccattcttcttcgtatctcaacaactctacattcaccgtcctcaaacaaaactaagtcaacttatgcaaccaacaagaacgattttagacaagaatctcgaatttacagttatgttcgcatgaccatataggcctaggtattttggcgacaaaaaggatttcgaaggcccaagtgaccgaccagtgc

SEQ ID NO: 8619 - DNA, 263 bp, Setaria italica
  Peptide Sequence Number=SeqID_74593
ctttcatactgcatatagtgactaattgttgctcaaaacttacgcagtttgaccttttatagaattatatgcctactagttccaaacggatagaatagcttacagtaggtaaagaaatgttggttccatcgaaccaaaagtcggaatatgtgggttacaaaaatgtctgagaggataagaaattttaaatggatttgagttcctcaacgcatttggatgttggattatctagcatacttaatctgtattggcatacaatgcaa

SEQ ID NO: 8620 - DNA, 449 bp, Setaria italica
  misc_feature (405)..(405): n is a, c, g, or t
  Peptide Sequence Number=SeqID_74594
cgttgttggtggatctgaggatggttatgttttcttctgggagttggtggatgcgcctgttgtagcaagattcagggcacatagttctgtggtaaccagcatcagttaccacccaacgaaggcgtgcatgttgacatcttctgtggatggctctattcgtgtttggacctgaagacttgtcattgatgtgttgcacgtactgtttctccaaatcatccaattatctagcagcaaggattaaccaaacaaaggtggacgcatgttctaacctagctaatgggattcctgttagaccgtgttcctgtgccattaagacggtgtttggatggctatatatgaagcacagaacgtttgaaggcggtattctcacatgtacacacttcgtgagccttaaaaaaaaaaaanaaaaaaaactgagacacgacaacgagggtagtaggacgaaggac

SEQ ID NO: 8621 - DNA, 502 bp, Setaria italica
  Peptide Sequence Number=SeqID_74595
cactcatgactcatccacatgttgacagtgcatattgccgttacctgttatccaattctcatatacatctgatttttttttgtatattcactttgcgatgttttgtcagaaaaaagagagatatttttagcctttttcctgattgcattatggtgtgagtcaggccgcacttgatgtatttactgaggagccaccgccaagagacagcaagttggtgcagcatgaggatgtcactgtcacaccgcaccttggagctagcacaacagaatctcaggtttgctggtcttttcatcatactacctttatcatctttactaaaagactgcttgtactgtacctgtgcaggaaggtgtagcccttgaaattgcagaggctgttatcggtgcactgagaggagatctggctgccacagctgtgaatgccccaatggtccctgctgaggttctatcagagctatcaccctatgttgtccttgccgagaagctgggccgacttgttgtgc

SEQ ID NO: 8622 - DNA, 947 bp, Setaria italica
  Peptide Sequence Number=SeqID_74596
ctataaacgtcggagcacggggtggagttgttgatgaagaagcattgctgagagcacttgacaatggaacagttgcccaggccgcacttgatgtatttactgaggagccaccgccaagagacagcaagttggtgcagcatgaggatgtcactgtcacaccgcaccttggagctagcacaacagaatctcaggaaggtgtagcccttgaaattgcagaggctgttatcggtgcactgagaggagatctggctgccacagctgtgaatgccccaatggtccctgctgaggttctatcagagctatcaccctatgttgtccttgccgagaagctgggccgacttgttgtgcaacttgtagctggtggcagcggggttaaggttgtcaaggttgtctactcatctgctagagaccccgatgacttggatacaagaattcttcgtgccatggtcaccaaaggcattgtcgaacctatttcaagtgcattcgtcaacatcgtcaatgcagactatgttgccaagcagagaggcctccggatcatcgaggagagaattctccttgatggttcacctgaaatccccctagattccatccaggtccacctcaccaatgtggagtccaagtttgctggtgccttgtctgatgcaggcgacatcagagtggaaggaaaggttaaggacggctccccgcatctcacccttgtcgggtctttcagtgttgacgttagccttgagggaaacctcatactgtgctgccaagttgatcagccgggcatcatcgggaaagtgggatcgatcttgggaaagatgaatgtgaatgtgagcttcatgagcgttggaaggactgctcgtgggaagcaggcggtaatggccattggagttgatgaggagcctgagaaggaagctcttaagttgatcggcgatacaccgtctgtcgaggattttgtcttt

SEQ ID NO: 8623 - DNA, 279 bp, Setaria italica
  Peptide Sequence Number=SeqID_74597
cgggtcgccgccggggctgctgcacgggttgccctcgtcgcccttcttcacccggtacggcacgcacccggcgacgaggcggaactcgttgtcgtagcgctgcttgaggcggcccttcctcgccgccgccaccgcgtcggacgacatggccgctttgccttataaatagcgagcgatcaacagggacaggacaagcggggaggaggaaggcgacgctgttgccggtggcagcaagcccgcgacgcgaggccgggcggggggcggggggcgggtggtgat

SEQ ID NO: 8624 - DNA, 491 bp, Setaria italica
  Peptide Sequence Number=SeqID_74598
ggacgctggagaaatattatgcagttcaaaaggacttgtattggatttggacatgcagaaattggcatactgtgaatgtctttcatattaggaaatgtgttttttaatgatcatctgttataatatccaactgcagatgttcctggtgcaccaagacaatggtggtttggtggtggtactgacttgactccctcatacatcattgaagaggacgtgaagcatttccattctgttcaaaaacagagcatgcgataaatttgatccgagttttcacccaagattcaaaaaatggtgtgatgattatttctatattaagcatcgtaacgagagacgtgggcttggtggaatattttttgatgatcttaatgattatgatcaagaaatgcttctcaactttgcgacagaatgtgcggactctgtacttcctgcattactatacctaattctattagtagtcggtcggtaaggtactacttccttatttctaacgt

SEQ ID NO: 8625 - DNA, 683 bp, Setaria italica
  Peptide Sequence Number=SeqID_74599
ggaatattttttgatgatcttaatgattatgatcaagaaatgcttctcaactttgcgacaggtgaggcgttttgttagaagcctagaatgacaggatgaacttatttgtactcaagtagcttggcacagtggtttctgaattgttctgtgggatagagtttccagacattttatgtgagataagttcaaattgaaggttgctatagctttgaatcctgttctgttttttataagctatgtagttaaagtctatgtagcatttcagtgtttaggttgcattgcgatttgaggtgagctcaagttctagttgtaacaaccaaggtgatttctttccctacagaatgtgcggactctgtacttcctgcatacataccaatcatagagcggcggaaggacactccattcaacgaggagcacaaggcatggcagcaactgcggagaggtcgctatgtggagttcaaccttgtaagtggtcgtagatcaacattcggcctaaaaactggaggtaggattgagagcatactcgtgtctcttccacttacagcacgatggcagtatgatcataaaccggaagaagggactgaagaatggaaacttctcgacgcatgcataaacccaaaggattggatctgatttagtccgtaagttttgttattgtttctttctagttattctttttgttt

SEQ ID NO: 8626 - DNA, 538 bp, Setaria italica
  Peptide Sequence Number=SeqID_74600
gcagacaaacccggtgccggaggccctgctttcgcagtcgccgtcgttcgcatcatcgaacggcagcggtgttgcactatctgacggcttcgggtcgttgttaagctcgtctggtgttatgccggatgttggcttgactgattttgttgtgcagagccagcaggctatgcagttctgccgcggattggaagaggcaagcaggtttctgcctgacgagagtaagcttgtgattgatcttgagaagccagcatctgttacaggcttggtggctaatgtcaaagaggagaagaggtttgcagaggtgaagacagagaaggctgatgttgaggcagcaattcaccgggggaagaagcatttctacggtgatgacttggatgcagaggaagggaggtgcagcaaacattcagcatctgctatcgacactgatcaccttgtgcgagagatgatggacaaggtcttgctgtgcaatggagagacgtgctccaaaggtgtcaaggagctgcgtagagcctgcagcatgacgttgcgaggcattcgc

SEQ ID NO: 8627 - DNA, 257 bp, Setaria italica
  Peptide Sequence Number=SeqID_74601
taggtaagctgtgaattgcccttcatagattttcagtttacgttctactccccccgtttcaaattgtaggtcgttttgacttttctaggttcatagatattgttatgcacatagacatacactatatctagatgcataataatatgaaactaaaaaagctaaaatgacctgcaatttgaaatagaggaagtatttgttattttaaaactgttttttacttcaataaacagttgatcactgattctaaaaaaaaaaaa

SEQ ID NO: 8628 - DNA, 912 bp, Setaria italica
  Peptide Sequence Number=SeqID_74602
tttttaagtaacaacataaatacacactttatttctcaagtatcatcatacaggattagttcacaaatgaaacaaatattcgagttcaacaggcacataatctgacatcgccatttacaagaacacagaattgatttaaccacttttggaggggggctgattgcacttcatattgcattgtgatgaatttgatgttcccagttgatccattagattgatcaattcagaacgccttcttaaaggatcagcagagacagatgttaggatcatcttcatccgagtcaaattcaacattttcatctctgtaccatcttccatggccatcccgtttccagcccgatgcagtgaaccgaagttcttgctcctggcgtttttggacttctgtttgccaatctgaaactaagttgccttgaatctgatttccagcaaaagattctccttttcttctattacattgtattgatccagtatctccagccaatttttccattggaacatcagaaggagcgacaagggggtcccaggatgaagtatttgtcgtccccttcaaatcatgagataccttcttgccattgaaattgttgaacctgcttgactgtgcttccagaattgccctccgtgtctgctcaattaacggctttcctttcatattggtaggcctaatactggtgctcggattaccagagtttgaatgggaagcatctgacgagagagccagtctcttgttaatttcgtgcttcctagataattctttctccctcagcctagattctgctgcaatgtgccgtgcacctttattatggatctgtagatttgttgatattagaaacgcaataataacagaagaaccacggctgcaatgtctaacaagacaaacaaccaaaaaaagtaggaagaatgagagctagcttt

SEQ ID NO: 8629 - DNA, 356 bp, Setaria italica
  misc_feature (1)..(1): n is a, c, g, or t
  Peptide Sequence Number=SeqID_74603
naaacccgttgctgctttggacctggacagcaggtgattgcatcccattaacttggtgaatcggcaaaagggcaacctcatgcttcggaacttgcgtgctgtggtcgctttcccttggcgcaagcatggaaaaaccagtggcttcactcttgtgagaaggcgcctcatgcgctatttgaagtttgcttagttcgttcggagtctcagctaaatcttgcctgtcctgaaggatctgcacagatttgtggacctggcgaccaaaatgtagatctaattatatataaaaaaagatgctaattaaaataatcccatctccagggacagtggggttgactccactgctgattgtacaatct

SEQ ID NO: 8630 - DNA, 418 bp, Setaria italica
  Peptide Sequence Number=SeqID_74604
atgcgctatttgaagtttgcttagttcgttcggagtctcagctaaatcttgcctgtcctgaaggatctgcacagatttgtggacctgtctgagattcttgtcgatgcacctgaagttggcggtgctctcgccgtggtagtccatgacgtcgctgcggagctccccgatggacctctcgagcttgtagcagtagagctcgagctgcgagaggcggcccccgatgccgtcgagcgagtggagcagcgcgtcggcctgcttccgcatgcactcctcgacggccgccatgacggcgtccttggggtagaaccctccgtcctgctgctggttctgctgcagctgctggtggtggtgctggtgcaagcaagacggactagacgacgtaagaacgaccaaacgaaaggtacctagttacgaccca

SEQ ID NO: 8631 - DNA, 1725 bp, Setaria italica
  Peptide Sequence Number=SeqID_74605
actgattctgtgagatgctgtgagaaagcagcagctgttaaaaccaacggtaacagctacctagctaacatctgacaacttatgtaaacccgttatatattcatataaggaaggcataaaagttcaccaccggttacaaggagatatgcccattaaaagtgaggacatatgccgaaaatcaaactcaactaacctagcttttttatttcagattgaccttcagctaaaaaagacagaaggatctatttcaatctgctggctgatgaaaaaaaggagccagatgaaatactcgtagacctgatgagcttccgactgcaatatgtatggtagtaagttctggaagcagtggaatatatgattgcccattatccactatgctgaccattcacgtggggatgttacattgctgccagcattaagcttatcaaccatggcaggttgggctgctgtcaccaccggaagtatctcgacttgatcccgtggataccctactacactggctgtttcaaccatatttccaaactgatgattgtgcacggcttgcggtcccaagtgatgaaacgccatcggagcagtagcttgaggctgaggcagaatagcaacaacagttgcagggcagttagaagggttcttgtacgtggagctataggtctgcccatttccttgaacagcataagatgcaacactacaatggctgggctggcttggttgaggacaggggccctggctgtgtggctgcagtgactgtggctgctgctgctggatattatgatcagccactggaagcaaaattgtgttgccttggccataaaatgaatgagcaacttcatgatgcttctgctgcggcgaagagtatggaggctgcacagccacacttcttgaaattggctcagagttagcattggcaggcttctgggaacagtatgaaggatacaagggtgtgacttgaggagcactctgcgactgaggagatgacgattgttgttgagccatctgtcgcgaaacatgctggataatgtattgctgctgttgcaccatgtgctgttgggaatgccatgcgtgcgaatcaacctgctgggtaggcatctggggcctgtgattctgtggttgagggtacaactcagttgcgtgactagatttttgaggtagctcaaccgcaaccctggcttcagggttctggacaagtggctgcacaacttgaaccaaaggttccgccgtcttgctctcggtggatttggcatgatcctggctttgcacatagtacacaggagcttggttcagctgctgctgatcatgctgtgcgctcaaagagaccggcaccaagtgctgcagaacaaacccgttgctgctttggacctggacagcaggtgattgcatcccattaacttggtgaatcggcaaaagggcaacctcatgcttcggaacttgcgtgctgtggtcgctttcccttggcgcaagcatggaaaaaccagtggcttcactcttgtgagaaggcgcctcatgcgctatttgaagtttgcttagttcgttcggagtctcagctaaatcttgcctgtcctgaaggatctgcacagatttgtggacctgtctgagattcttgtcgatgcacctgaagttggcggtgctctcgccgtggttagtccagacgaaccaaaaatagtaagaatactaaattaataataataaaaaaaagaaataagaataaataagtaaaaataaacaaaa

SEQ ID NO: 8632 - DNA, 461 bp, Setaria italica
  Peptide Sequence Number=SeqID_74606
gttcggagatctattgcagcaacagacgagtgaagcgattcccaacacttcaatcagatatagctgctgctgcaaatgaaagcctggaaaggttccgcgaggacggtcgaaagactgttctccgtctagttgagatggaagccagctacctaacagtagaatttttccgtaaacttcctactgaaccagagaaagcagctgataagaacactccagatcaaatgtgtcatcttatattaacatggtctgtgagacgttgcggaacacaattccgaaagccattgtacattgtcaagtgaaagaggcaaaaagaaatttgcttaatcgtttctacgctcacgtgggaagcaaggagaagaaacagctcagcgcgatgttggatgaggatcccactttgatggagaacgagggatgccttggtgaagaggctagagctgtacaaatctgcaaggaacgagatc

SEQ ID NO: 8633 - DNA, 786 bp, Setaria italica
  Peptide Sequence Number=SeqID_74607
cgtctgcgattttcccctcttcccactcgttagatcccaccgcctcccgcccgctcgccgccgacgaccgccgcagcctgacacagagccgccggcgaaccttcgcgtgcggcctcgcccgggatggcgaccatggagagcctgatcgggctggtgaaccggatccagcgcgcgtgcaccgtcctcggtgaccacggcggcggcggcgagggctcgctctgggaggcgctcccctccgtcgctgtcgtcggtgggcagagttccgggaagtcgtcggtgctcgagagcatagtggggagggacttcctgccccgtggatctggtattgtgacgaggcggcctctagtgctgcagctgcacaagacggagggtgggcaagagtatgcggagttcctccacgccccgaggaagcggttcaccgactttgctgctgtgaggaaggagattgctgatgaaacagatcgcataactgggaaaactaaagctatttcaaatgttcccatccatttgagcatctattcaccgcatgttgttaacttgacacttattgatcttcctggattgacaaaggttgctgtagagggcaggcagaatctattgttcaagatattgaaaacatggttcgatcttacgttgacaagccaaattgcatcatcttggccatctccccagctaaccaagatatagcaacatcggatgctatcaagcttgctaggggtgttgtaagcgatactgcctcccttcaagtacatcaacggcattggtacccttgtccatcaaatcaag

SEQ ID NO: 8634 - DNA, 2044 bp, Setaria italica
  Peptide Sequence Number=SeqID_74608
tcgttcggttgggtctagtagtttccgggtaagttcgttcggttgtcttcgtagtagtctattagttggggagggacttcctgccccgtggatctggtattgtgacgaggcggcctctagtgctgcagctgcacaagacggagggtgggcaagagtatgcggagttcctccacgccccgaggaagcggttcaccgactttgctgctgtgaggaaggagattgctgatgaaacagatcgcataactgggaaaactaaagctatttcaaatgttcccatccatttgagcatctattcaccgcatgttgttaacttgacacttattgatcttcctggattgacaaaggttgctgtagaggggcaggcagaatctattgttcaagatattgaaaacatggttcgatcttacgttgacaagccaaattgcatcatcttggccatctccccagctaaccaagatatagcaacatcggatgctatcaagcttgctagggatgttgatccttcaggtgacaggacttttggagtcttaacaaagcttgatttgatggacaagggtaccaatgccgttgatgtacttgaagggaggcagtatcgcttacaacacccctgggtgggaattgtcaaccgctcacaagctgatatcaacaggaatgttgacatgctctcagcaaggcgcaaagaaaaagaatactttgagagtagtcctgaatatggacacttggcacataaaatgggtgcagagtatcttgccaagcttctgtcacagcatttagaggctgtgatcagagcaaaaattccaagtattatagccctgattaacaaaacaattgatgaaatagaagcccagttagataaactgggtaggccaattggtggtgatgctggggctcagttgtacacaatattggatatgtgccgtgcatttgatcgtgtttttaaagagcacttggatggcggtcggccaggtggagatcggatttatggtgtctttgacaaccaattacccgcagcactgaagaaacttccatttgaccggcatctttcaatgcaaaatgttcggaaagttatttcagaggctgatggttaccagccccacttgattgcccctgagcagggttacagaaggcttatagatagttctctaagctactttaagggtccagctgaagcttctgttgatgcggtccatttggtcttgaaggagcttgttcggagatctattgcagcaacagacgagttgaagcgattcccaacacttcaatcagatatagctgctgctgcaaatgaaagcctggaaaggttccgcgaggacggtcgaaagactgttctccgtctagttgagatggaagccagctacctaacagtagaatttttccgtaaacttcctactgaaccagagaaagcagctgataagaacactccagtgagtgataggtatcaggacaatcatctcagaagaatcggatcaaatgtgtcatcttatattaacatggtctgtgagacgttgcggaacacaattccgaaagccattgtacattgtcaagtgaaagaggcaaaaagaaatttgcttaatcgtttctacgctcacgtgggaagcaaggagaagaaacagctcagcgcgatgttggatgaggatcccactttgatggagaagagggatgccttggtgaagaggctagagctgtacaaatctgcaaggaacgagatcgactcggtcgcatggaaatgatcggctagtgacagccgcagctggaacatagaatgtacaaccgccgcacacgtgcgactgcagtagaatggtcgattctttttatatgagttttattggggggtttgtacacgatttttcaaacgcgagtgatcttctgcttgtcagacattcctcatcagccgtcatggccttttctatgactatggatgacctgatctgtagggtcccatcgagtatagatgcattcttttgttgattttactgcctcgatcaatctcttgatcatttgtgatgaccaatgcacaagcacgtcttgataagtcgttgaacag

SEQ ID NO: 8635 - DNA, 296 bp, Setaria italica
  Peptide Sequence Number=SeqID_74609
cccgcccgcgcgcctcggcatcgtcggagaggacggcgcgatgcgggacgactttgacgtgggcagcattggcgccaacgacaccgatctggccaccgacgaggccgcgccgcaggagcctggcgaagcgggcggcggcggcggcgggcccagggtgcggattgggaggttcccggtctgcccagagagcatgagggagtacataccctgcctcgacaaccaggaggagatcaagcggctgccctccacggagcgcggcgagcgattcgagcggcactgccctgccaaggacaagg

SEQ ID NO: 8636 - DNA, 2089 bp, Setaria italica
  misc_feature (1)..(117): n is a, c, g, or t
  misc_feature (128)..(128): n is a, c, g, or t
  Peptide Sequence Number=SeqID_74610
nnnnnnnnnnnnnnnnnnnnnnnnnnnnnnnnnnnnnnnnnnnnnnnnnnnnnnnnnnnnnnnnnnnnnnnnnnnnnnnnnnnnnnnnnnnnnnnnnnnnnnnnnnnnnnnnnnnnncgtgtcacgtntttttttttttggtttgaaaatactcgtgaatttccaagtcaccttgaatcagttttgttcagagttttcaaacatagtttcagttccattcggatgtgtatatatcatcagaatcctacctcaataatgtgcagttctactacactagcagcccaatgtcttcagtgatctgtacgcacgttgttctagaaactccaccacaaccgtcctagaggctagagcactagtactgtcatgtctgtcaactgcgtgtcacaatcttcagtgatcggcagcgcgtcacgactcgtcatggctcgtgcgcgtcggcgtgcccgtgcccgtccgcagcgaggcgatcccgggcatggacgccgacctcgtcacgttgcctccccggtacgacggcgacgacggcgccgaggccgaggacgactgccggaggagcatcggttggctgctgccgccaccgtgggtcgagctgctgcccggcacggccacggaatggaagcacggcgtgccggccctgaaggggccgtgctgcgtctgctgcagctcgaccttcaggtacggcggcggggccctggaggctctcggggtctcctcgaacggcccatgatggtggtcgtccaaatcgtcctcgtcctcgtcggtgagggagcacacggtgctcgtctccgtgcggaccgtcgagtcgtcccaggcgccgcgccgccggcgccgcttcttcctcgtggcctttccccagccgtgtatggtttctctgatacgccgagggatcagtgccgccttgtacttggaccccatctgagtcactaatgcataaacaggcaatgtactgtaactgcaaaggaactgtccggcaaaccctagtataaggcggcaatacaccaaaaggtggtttttgataaagcatgaatcataaccgaattgccaccagaaccagaagaaagaagccaactcaaaagcattctgaaacagaacgaagtgtattaaccaaaggagaaagtccggtttcttgaaccaaaagagatcatcccttggctgtatccttggaccgtaggtagtcaactttgcaccctctgctgttagagttgcaatgacatgctgcagcttcgcaccgactagaagaacaagagctacaggaagaattgctatccaaaagtacaggttggatccatcaacattgaatagcataaaagcaacaacgaagccccacagcactccactcactccaacaatcttctcaaattcctcttccattgagcgtatcatgtaattgtggaagtcgtatgttggcgacagattatggttcattatgaaacccttgcggaggataaggtagtctgctcgaacaacagactgaccaaattgtgcaataaagcaaacaatccacatgaccgcattattttgactccatgagcggaacgaataggatttggtgagcgctggttgccttctagttgctgactcatatgcgatctgagaaaacgattcgtgattatccctgaatgcttcatcctcccattttctccacttatggatcttgagtattgctagtagcatcgtcaagcagctatatgtcacatgagttacagccatcacaaatataaaccggtgcagctgctccagaccttcatgtgaaacaaatgactcgtgtccctcagggcagccttgatggttatggtaactagcttttagatttctcctgagtgaatggtgcagaatgacctcaattagacgcttgcgcgcgtgagcaacggcatgctctgcatttaaagattcttcaacctcttctttggtgcacggagagaatctgctgttgtagtacttggaatcgatgcagatccctgagataattcttgatgtagcagccagaagcagagatatgaatccaagcaacatcatttcttctttcatcttctccattgctttgtaaagtggattccggtgggttttcttcaaccaattgctgagtcgt

SEQ ID NO: 8637 - DNA, 435 bp, Setaria italica
  Peptide Sequence Number=SeqID_74611
ctacattttccatgacactaacaaaaatactgtccaattgagtgcctcaatctcagccacaactcactttagaaccaaatggagacgtgtctttcaacaaattgacagggaccttcccaattctattggttctttatcaaatctttcaagtctctatatgcagaacaatcagttcacaggttctgtcaatgttctccgtggcctaagctctgcccttactacactaaacattgcaaacaacaatttcagtggttggataccaaaagaattcagctccatcccagatctaaagtatgttccaaacttgtttaacttcacttttctgtgaaactgtctgacattgtaacgacttgctgtaactgcaatcatagacttggaggaaactcatttgccaatggacctgctcctccaccaccacctttttattgtccacta

SEQ ID NO: 8638 - DNA, 810 bp, Setaria italica
  Peptide Sequence Number=SeqID_74612
tacaagaaggccaacggaatcgccctaaacatcctcagggtcaaggagatgctccaaaagggtccgaaagccccaccattcaaagtgacaagaagcaaggccttgggacaggtccgcttgtggggataattgctggctcgatagttgctgtcttatgtgtccttttgcttttggtatgctgcatgcgcaatgcacggaaaagaaaggatgatgccagcagtgaatcaaaagattttgtaggtcctctaacagtgaacatagagagaggtatggcatttcttatgcttcttgcggtactcttcttggttgatgctagataaatatttattcttctgttagctaagatgctatttgttaaagaggtaacttttgattggactactgcttgattgatctggaaaccacacaaggcactggtgatataggatcatttattgtaactgagttatggcgagagcttgaacaattggaatttgcttcctttgcgtgcatgtgcctgatctcaagcttggtataattgtgtaataatgtaatatataggtttgtagttaggagagagataatacagtagcagaaaaactgggaagctgtcgtttaattaatagatttagtggtctgattgagctataatgatattaagtttcttgttctaaagatattaccagcacaattgcagaaccccaatgttccggtcccttgataattgttattttagttcttctttattttttggctttgtagcttctagcagggaaaccccagagccgaatcttgaagacacctctattagtctaacttgtgaaactgcca

SEQ ID NO: 8639 - DNA, 2560 bp, Setaria italica
  misc_feature (2485)..(2560): n is a, c, g, or t
  Peptide Sequence Number=SeqID_74613
cctcctggaacggtccgtcgcagctggccggctggtcggccggcggcggcgacccctgcggcgccgcgtggtctaaggttgttctaccttgctccggcgccggcgtcaccgaaatcaagcttccagggatagggctgaatggttctctgggatacgaactctccaacctgttttcattgaagacattggatttgagcaacaacaacttgcatggttcgatcccttaccagttgcccccgaatctcacatatctgaatctagctagcaacgatttctctgggaatcttccatactctataacaaatctggcttcaattgagtacctcaatctcagccacaactcacttttgaaccaaatgggtgagctatttggaaacctcagttcactttcagaattagacgtgtctttcaacaaattgacaggggaccttcccaattctattggttctttatcaaatctttcaagtctctatatgcagaacaatcagttcacaggttctgtcaatgttctccgtggcctaagctctgcccttactacactaaacattgcaaacaacaatttcagtggttggataccaaaagaattcagctccatcccagatctaaaacttggaggaaactcatttgccaatggacctgctcctccaccaccaccttttatgccaccaccccctcagaggccacggaatcgccctaaacatcctcagggtcaaggagatgctccaaaagggtccgaaagccccaccattcaaagtgacaagaagcaaggccttgggacaggtccgcttgtggggataattgctggctcgatagttgctgtcttatgtgtccttttgcttttggtatgctgcatgcgcaatgcacggaaaagaaaggatgatgccagcagtgaatcaaaagattttgtaggtcctctaacagtgaacatagagagagcttctagcagggaaaccccagagccgaatcttgaagacacctctatagcaactgtgaaactgccaccgccggagaaaatgactcctgagagggtttatggtaaaaatggttctatgagaaagacaaaggtccctataactgcaacgccttatactgttgcttctctccaagttgctactaatagcttctgtcaagattctcttctaggagagggttctcttggtcgtgtttacaaggctgatttcccaaatggaaaggttcttgctgttaagaagatagacagtgctgccctctctttacaggaagaagacaacttccttgaggctgtatcaagcatgtcgcgactaaggcatccaaacatcgtgccactaacaggatattgtgttgaacatggacaaaggcttctcgtttatgagtacattggaaatggaacactgcatgatatattgcacttctctgatgagatgagcaggaagcttacatggaacatccgtgtaaggatagcactaggcactgctcgagccctggaatacctgcatgaggtgtgcttgccatctgttgttcatagaaactttaagtcttcgaacatcctactggatgaggagcataatccacacctatctgactgtggacttgctgccttgacacctaataccgagagacaggtttcaactgaagtatttggatcatttggatatagtgcccctgagtttgccatgtctggaatttatactgtaaagagtgacgtgtacagttttggagtagtgatgttagagctattgacagggcgaaagccgctagacagttctagagagaggtcagaacagtcccttgttagatgggctaccccgcagcttcatgatattgatgcacttgctaagatggttgatccagcattaaatggaatgtaccctgctaaatcgctatcccgttttgcagacataattgcgctctgcgttcagcctgagccagagttccgtccaccaatgtcagaggttgttcagcaacttgtgcgcctaatgcagagggctagcatagtaaggcggcaatcaggagaagagctagggttctcatacagagcccccgaacgcgaaggagacatgagagacatatccttctgagttcaaagcaaatccttccatgatacaagcgcaaagcagctccgtggctcaacttgcacaggcaagatctggaacatgcatatgaattggagaagttgagctgatgatgacaactcagaatcgaatgaatttgagaagataattttggtacttattgatcaactttgttcattcttctacattcctcccgttttccagtcagtgtacttgctgctggatctaaactgaggctcaaattgatggtggtgtatagctggttattggtagagaagaaggaaaagaaatgtaaaatgattcctgctcggctctttcaagttttaatgacactaatctcgttgacctcattgaagccattctcatatactggaaaaaaaacaaagaaattttattactatatggtacgaatctttagcctcctaaaaaaaaannnnnnnnnnnnnnnnnnnnnnnnnnnnnnnnnnnnnnnnnnnnnnnnnnnnnnnnnnnnnnnnnnnnnnnnnnnn

SEQ ID NO: 8640 - DNA, 1174 bp, Setaria italica
  Peptide Sequence Number=SeqID_74614
aaggacaacttacaaagtttggagacattattagatacatcacacaacaatcacaaaggttctgccatctctgatggtgataaattttttgatgatgttctggaggaaggtcatgttgatacttatggatcttgtacgtccataaaggatcagatttcagagccgattaatcaaactactgactgtggcatagttggtacatcttcaactcggcatcatagaagttccaagaagaaaaacataagctcttttgctcagatacctgaagaaagccgcatgaaggataataattcgctgctaaagcagtatgaagggacaataaaattggatggtggtgtctttaggcctactgaacttgaggatagtatacgacatgcaactcctgagcatgaagaatcctctgaaactataagcaaccattcaaactctgagaagggcacaacatcattaccatattatgttccactgcaagtactaccaccgcttgaaccgcagcctgatctgaaacctccaagatgccctgtaacgaggccgccaaccaagagagcgcgtgcagaccatagattatatgatgttgagctgactgtccgaagaagccagaggggtcatcccgtgccccttgtttccctcatgagtaaatggacaggtaaacaaattgttgggtaccctgtcactgtggaggttttggaggatagtcgtcccgcagcaagtagagatgagcactgcccagcaatgagcagtctcgactccttactgaagagcagagttacagaaccacggcaagcaagatcttcaaatgcatcacgatcaaaatctaagtctagttgtcggaaaaaggcctcggagcatgatttggacaagtcctggcggccccatgccaagaaaccagcatcttcaccgaggaaaatgcggaggctctcatcttttgctggcagccggagggagagcggagacaggaagcctgtggtcgtgaaaactggtggacctactgttgcatgcgttccacttcgactcgtcttcagtaggatcaacgaagcactaagcttctcagtgaggcaagaaaaccccacctgaagatgtggtgggcaggagagcacctttgcatggcagggatagtatgtgggcaggcatatacatttgctaggttttcttttgtacattagttaccctataa

SEQ ID NO: 8641 - DNA, 270 bp, Setaria italica
  Peptide Sequence Number=SeqID_74615
cattgcatgcgcttttttttttgacaagggcttctcatgcgcttgttcacgcccgcccgcatccgcgcatggacgacgagtggtcgatcaggtcgggcactggaagccctgcgggacgttcttgccgcaggagttgacgacgacgctgagctggacggggatgctcagctggacgaggcccagcacgttggctcgcagcgccgtgcacaggcacacggccgcgtccaggtcggccagcccgcccaggagctggcagcacggctgctgctg

SEQ ID NO: 8642 - DNA, 290 bp, Setaria italica
  Peptide Sequence Number=SeqID_74616
acctgcccggcacctccctgtcctccatcagcgagccactcagatctgccgttcccgaccagagccagcgaggcgaaggcgcgaggcggggacgccagccatctgccatggagcccgggctgagcatcgagtccggctccgccatccgcgtcgcggtgctccccgtgggcggcacgatcccgccgccgcgcctgcgcgagtacatggcgctggtgtcgcgccacgcgcgcgtcgacctcgcctcgctccgcacctactacgcggagcaccagtaagtagtccccttacga

SEQ ID NO: 8643 - DNA, 1616 bp, Setaria italica
  Peptide Sequence Number=SeqID_74617
ccttcatagaacgtgctaaatttctgctaacttgtaactgtattgctaattcccagtacctcatggattcctcgttaaatggcctcatgaaatggctaaatctttgctaacctgtaattgtattgctaattcacaataatgctggtaatgacatgtgacttcctgtgcaaatgtacaatgcagcatccacgcccttctgcttcattattccctaacctacgtcagatttgtatgtacaaaccacaaagcactgcccggtcgtgtaactaatcagaatccttggattatgaataggacctgatcagcctgagaccctggaacgagcccttcagcaggctgcccaggacggacaccgcgccgccctcggccacgggcgggccgcggccaccgccgccgcgcttcacccgcagcacggcgtgcccgagctgctcgcccaccgcgtccacggtccggccgtcgacggggttgccgtacgcgtccgacacgtagaacgtgtcctccgccctgccgtccctggtcgcgatcgccgcgcggatgatggacaggctattctcccggaacacgcgcgtgatctccgacagcaggcccaccctgtcctccgtcctcacctccagctccaatccgtcggaagctcgccgctcgacggcggcctcgaggcaccggacgaggcgggtccgctcggcgtcggagcgcaccgggtacccgtcgacgtgccgtatgtagtactcttggtaggcctccttgctccctctctcggcgtcgacggtgccgtggaacacgacgtactgcaggtcggtgagcgcgcacagcgtgtcgaacagcagcttcggccggtcccggcactgcaggatcaccaccgtgtactgcctctccgtgcagtccatcacggcgaccttgggcctcgccttgccgcaccggtcctcgccgtcgacagcctcctcgccggcactaccaccggcaccgtcgtcgagcatcagcttatgcaggcgcctctccgcgcgcgccgcgcccacggacacgccgcctgtgcacgtgctgccgcctcctctccgggcggtgccgtcgccctgcatcacgttgcggagaagctcctgcaccttggacagccggcccgcgtcgcggatggcgagcccggtggcctcgtcggtgatctggatcaccgcggcggcgcgcctctcgtgcgtccacacctcggccttcacgatgttgcagctcagggaggccagcacggcgcacacctccgacagcaggcccggccggtcagtgccggtcagctcgatagaggtggactgatcctctgacggcgcagctccatcctttagcccgattgccggcaacgcaaggtagtcttctgattctaggcatttctgaatatgttcaatgacctccctattctgaagcttactcccgtcctgatcagtcacattgaacactgaacgcgacatgaacaaagaaaccaaaaattttcatcatgacaagtcaaacaaccaaacatattccttgcaagttgcaagtcaaattcagaaaaactgggaggcttttaactactactagtaccatccatgaaccagttgccatccgaagaaatatacgccttcgtgatgacgaggttagaa

SEQ ID NO: 8644 - DNA, 398 bp, Setaria italica
  misc_feature (297)..(398): n is a, c, g, or t
  Peptide Sequence Number=SeqID_74618
ttggctgccagcccttgcgtggcgagaaggcggctcctcatcgtcagcgggagcggccggaattgctttgggaattcaatacaggattggagcatgtaggatgaggacgtgaagcatattctttttagccttttgtcttgtggatagaggggttgacaaggtggcaactacaccttctagtgctactgcaattgtgtctgtcaacaaacacgccctgcattagtttattttcgatctcttaagcaacacatgtcacccagttcccctttttttgtatatatacattgtttctctttnnnnnnnnnnnnnnnnnnnnnnnnnnnnnnnnnnnnnnnnnnnnnnnnnnnnnnnnnnnnnnnnnnnnnnnnnnnnnnnnnnnnnnnnnnnnnnnnnnnnnn

SEQ ID NO: 8645 - DNA, 539 bp, Setaria italica
  Peptide Sequence Number=SeqID_74619
tgtacagcacgcatctctaaacatcatctatttcagaacaaagttagcagatctatatacatgtgcagtggaggcatttgcatttctagcaatctatgttagctagtaaactacattggaaaacataaattgttatcagttccaaactgacatcgatgttggtttttgaaataatgacattgaatacatgaaggccatagtcagaggttatcgatgttggttttagagcagtcggttgtacatttcttgaatcctgttatttcaaatcaagctagttcgcattggctcaagtttaatcatgaatatatttgaacgggaggtggatgagaaatattgttaatttgatactttccataggagaggtgcctaagggaaaatatgccaaataacaaacaaaaatacatgcagatggagaccaacacaagccttagtggtaatcagaaataacaccggcatgccaattcgaacaaagcttctctgtggaaatctctttggtgaatgagtaagaaaggaagaaatatgtgaaaatcagagataaa

SEQ ID NO: 8646 - DNA, 740 bp, Setaria italica
  Peptide Sequence Number=SeqID_74620
tgcgacatggatgaggctgtgaggagtgggggcccggtgtgctgcgcgtcacagcggcggcgagcaagcgaaggcgaaggtacgatggcgtggtgcgtggaggtgcggcggcgatgctgccccaaatgggctgctgcgacgatggttcgggagtgccgagccgtaagcgtgcagcgaggggttgggatgctcagggcaaaaaaccctcgccgacatttgctggtggagatgacggcggcaccctagggcatcgttctccccgttgagggcgtcatgcctgagctacaatcctgctgcacggggtactctgggtgaaaaccctgtccagaccttggacgagcgacggcggcaccattagcatcgtgccctctttggaggtgtcgtctctagagacccatctcggtttgtgacattgatggtccgttggtcatgggcggccatagctggtggcagcacttccgccgcgtggcaagctggacggatgttgtcgaggtcatgtggaggcgatcgcaggtaggacggcggtcaggggttgtcgtatggttgtcggttttggctgcttgcagcggaccgcgacgactggcgtttcttggcaacagtcaatgcgacgtgggactacgtcagaggatggcgcttgcggtaacagcatcatgggacaactaggcttgcagcggatcgcggcgggttgcttagcttgactgagctacccggtgaggtacattgtcggaagacggcgcaag

SEQ ID NO: 8647 - DNA, 452 bp, Setaria italica
  Peptide Sequence Number=SeqID_74621
gaaggtgtgttctctgatgagtaccaagccttattcttgaacgttagtatgtggctgtcatcttctgataaccagagatcagaaacgtagtggactacaaaccgagttgtataaattcctgctatatcaatcattttggcccctgtaaaataatgaaattcgggcgagccacgcttttgggggggggggaaatgctgctatatgtagtgaatgctgaccgatggatcgattgccatgtttagttagtcagtctcgggttgatttggtaggtatttgaatttgtattattggttgagaagctcctaagccttggtaggtgttttaattctgaaacaccacgttggtgtccagtcagagagagccaatccattgtgtgccgatgagtgaatcagattgatcccgcatgagatgtttcacctggattgaatgattctgaattggatggtacaaaa

SEQ ID NO: 8648 - DNA, 2190 bp, Setaria italica
  misc_feature (2108)..(2190): n is a, c, g, or t
  Peptide Sequence Number=SeqID_74622
aattgctatacgtgatgttattcgccaacttgatgtgtgtaattccactgggagcgttgatgacccagtgatgcctccagctgagtgtactgatcctgaacatatcatgtgttcaacatgcaagtctcatgaatcatttcccaacaataaaattatcttctgtgaaggggcctgcaaaaggacatatcatgagaaatgtttggaacctcctttagaaaaaagtgctcttccaacaagtagccatggttggctttgcaaattctgtttgtgcaaggtgaaaattttagaagctattaatgcacatctaggaacaaattttacagtgaagtgcccttttgaagatgttttcaaggaagcaactgaacaaatagactctgaggatgcactagatgaagattggctttctgagtattcaggtgatgaggactatgatcctgaagaaaatgaggccagcagcagctgcatgaacagtggggaagaaattatgtctgatgattccaatggttcaggaagtccactttattcaccaaatgatgatattccggacttcatatcagcagacttcaatgacgttgaagggttatgtcatgccaatttagacttaggcatagactctggtgaagatgatggtgcacagatccttacctaccaaaggccaagaagagatgttgattatagaagacttaacgaggaaatgtttggaaaaataattgagaatgaagaacagagtgaggatgaagattggggtcatgacataagaaagaaaagaagaacacgtgcagccagtgtacaggataattctgttgatggtttctcgaatgttatatctgatgaaaagactgagaagaaggggagaaaactcttcaggattcctcccacggcagtcgaggtgcttcgcaaatcttttgctgaaaatgagctcccaccccgagatgtcaaagaaaatctctcaagagaattggacatttctttcgaaaagattgataaatggttcaaaaatacgcggtgtgctgctctcagagatcgtaaggctgaagggaacagtcataatcccgctcccagcaaaagctcaagaagtaaaggaaaagctggaatctcaggcaagactgaaagaaatgatcggattgctactctctccaataacttgaggacaaatgaagaaaaagctgatatctcaggcatggttgattcaggagacaattcatgctttgttcccttgtctgaaattatcaatgtgcctacacgattgcaacggaatcttgagaagaggaagatggaatcaactagcagccctctgaggctacacaataaaggagcttgttctccaacaggccaagtgaaggagagtacgtcacctacaagcaagtcttgtttgcagacagatttgagccatccaacaaacaatgaagtcagtgctgaagagcaagctgcttctcagatggatactgatgcctgccctgaagagcaagctgcttctcagatggatactggtgcccgcgctgaagagcaagctgctcctttggtggatactggggcctcggattatcagcctttcctggatgtgatcgatgagatgtgtggactcgagtgtaggctgcagaggctgaagaagaacatgctgtcattaggagcagaggggtgcgctactggtgggagtgacatgaaaaaccaagctgtggtgctcgtgccatctgccgagctcaaggaaaaagcgtagcatgccgcttttatctgggcattgcccataggttttatatagcaaataactgtatagagaaccaagaaaaaaagaaacaaaaaacagacaagtgccggcttacataacatactgtcaggccagggtatcaggtagttctcctggggcctcgacattaccaacaggcgtcaggtagtctaaacatactttggtgtcttggaagtttatatgttatagtccagagttgggattattaattagcatagctgtagcatccgaatctaaatctggagtgtgaacctagattagggttatgcttaactagtgatggttgtaccaggcacattgatctcaactagtcatttgattttattttaaagaaaagaacttaacatgccaaaaaaaaaaaaannnnnnnnnnnnnnnnnnnnnnnnnnnnnnnnnnnnnnnnnnnnnnnnnnnnnnnnnnnnnnnnnnnnnnnnnnnnnnnnnnn

SEQ ID NO: 8649 - DNA, 665 bp, Setaria italica
  Peptide Sequence Number=SeqID_74623
gtctccatcgtcctcgtcgacaaggtcggccgccggaagctcctcctcgaggcgtgcgcgcagatgctcgtcgcccagacggccgtcggcgggatcatgctggcgaaggtgaaggcggacacgagcccgagctccgggtgggcggtggccatcgtcgtgctcatctgcatctacgtgtcgagcttcgcgtggtcgtggggcccgctggggtggctgatcccgtcggagacgttcccgctggagacgcgcactgcggggttctccttcgcggtgagctccaacatgctcttcaccttcctcatcgcgcaggcgttcctgtccatgatgtgcaccatgcgcgcctacatcttcttcttcttcgcggcgtggatcgtcgtcatggggaccttcgtgctcgtcctgctgccggagaccgagggggtgcccatcgacgagatggtggagagggtctggcgccgccactggttctggaagaggtgcttcggcgacagcgccaatgaggccagggtcaacaactgctagccagatgaggatttttatttacttagatgaattgattactatatttttcttatttttaagaatctgccagattctgatgatgatgataaccgcgatgtgtacctattaattgttgctctgatagaggatgtttgggagcaaaa

SEQ ID NO: 8650 - DNA, 277 bp, Setaria italica
  Peptide Sequence Number=SeqID_74624
ccgctccggctgcaacttcgacgcctccggcaagggctcctgcgccacgggcgactgcggctccggcgcgaagcccgtcgtctccagcggcggcgtccccgagcccgacagcaggcccggccacaccgtgtcggggcaccggttggtgaaggtgaacgtgatgccgcgcaccgacccttggaggaaggagaggatgaggacggcgatcgaggccggcgagccgtgcaggcgcgaccgagaagccgccattggagccgcggtctttggagggagaggg

SEQ ID NO: 8651 - DNA, 778 bp, Setaria italica
  Peptide Sequence Number=SeqID_74625
ggccgctccggctgcaacttcgacgcctccggcaagggctcctgcgccacgggcgactgcggctccggcgaggtcgagtgccgcggcgcgggggcgtcaccgcccgccacgctcgccgagttcacactcgacggcgccagcggcaaggacttctacgacgtcagccttgtcgacggatacaacctgcccatgctcgtccaggccgccgcgccggagtgccccgacacgggctgcctcgtcgatctcaacgagcggtgccccgacgagctccgcgccgacgacggccgcgcgtgccgcagcgcctgcgaggcgttcgggagccccgagtactgctgcaacggcgcctacggcaaccccaacacctgccacccctcccagtactcgcagctcttcaagtcggcgtgccccaagtcctacagctacgcctacgacgacgccacctccaccttcacctgcaaccacaccgactacaccatcaccttctgccccaaatccaccccgtccagcgataaatccaaacactcatcgcggaggccaagccatgagcagctcgaagattcggtgtggcttgcttccttgagaaaaagcgacgctggtgctctgaaagtagagttatggtcggcgtccattatactccagtctgccctggcaatcgctgtggtgatcgcacttgttgcactggagcaacctctgttcagcttgctatgattcggcaaggttacagttcttgatccataggagtgatccacgaaagaggattagagcagtagtgatcagc

SEQ ID NO: 8652 - DNA, 705 bp, Setaria italica
  Peptide Sequence Number=SeqID_74626
actaggaagttgcaattgccttgtgggaacttgcaactgcgataaacacatcacactgacggagagtctaacatctgttgcttaaattggcctaacaaagttcatggtattagcttttttattaggaacataggagtaatgtactatgcaaacccgatcttatatgagcaatcctttgtttccttgaaacttttgcagcgataaatccaaacactcatcgcggaggccaagccatgagcagctcgaagattcggtgtggcttgcttccttgagaaaaagcgacgctggtgctctgaaagtagagttatggtcggcgtccattatactccagtctgccctggcaatcgctgtggtgatcgcacttgttgcactggagcaacctctgttcagcttgctatgattcggcaaggttgcagttcttgatccataggagtgatccacgaaagaggattagagcagtagtgatcagcaatgggaagagaatattgtgtaggcttttgcttgtggataggtgctagagaaggaatcatgaattacaagttggcaattgcagttccgtaaatgcattgcattggttcattgcctttcagaaacattgctccttgcattatatccttctttgtgcatcaactgtttttcttgggcatgatcgagatgcagcatgttgatccggctgcgaatgatccggctgcactttggaatgag

SEQ ID NO: 8653 - DNA, 368 bp, Setaria italica
  Peptide Sequence Number=SeqID_74627
tgtacggcatctcgccgccgcccgtgagcacggcgccgtcgacgccgacgaggatctcgccgtgcgcgaactcgacgagcaccgcccacgacttgagcgggcgggtgccggagttgagcacggtggcgttggcgcggaaggcgtagggctgcttgttcttgtcgctgacgaagggccggatcttggtgcggccctggaagttgtaggtgagctggataccgttgcagccggggtcgggcgcgggggcgggggccgccggggtcgtccccctctgcgccgccgcgaggcccgcgagcaggaggagcccgaggaccacggcctggggagctgcggagccagccatcgctggatcgggagcgcgcgcaaga

SEQ ID NO: 8654 - DNA, 1865 bp, Setaria italica
  Peptide Sequence Number=SeqID_74628
ttcccgtagaatgagaagtccgcaggaaatatttctcctgacttaccttcctgcttctattgtgaaatgtgccgaattagcagggctgatcctttctgggtcaccatcaacagtctgttactccctgtattaataggaccctctaccatagcagcagatgggtcatatactgcacagtacactgcaaaaagctttccgctatcgagagctaatagagaaatgctacagaaagctgaatatgatattcaggtttggtgtatccttctgaatgaccaagtaccttttaggatgcactggcctttacactctgaaatgcaagttaatggtattcatgttagggtggtcaacaggcaaccctcacagaagttaggggccaatggtagagatgatggtccactattaacagattacctgtgggaggggcttaacaagatttctctgttgagaaatgactcacgtactttctgtttgggtatcagacttgccaagaggagatctctagaacaggtcctaaatttggtgccaatggaacaagacggtgagaagtttgatgatgcccttgctcgtgtccgtcgctgtgttggtggtggaactgaggcaaataatgcagacagtgatagtgacattgaagttgtggctgattctgtctctgtgaatcttcgatgccctatgactgcttcaaggatccagattgctggtaggttcaagccctgtgctcatatgggttgttttgatttagaagcttttattgaaataaatcaacgttcccggaagtggcaatgcccaatttgcttgaagaattactctctagagaacataataattgatccttacttcaaccgcatcgcttctttgatcaaaagctgtggagatgatacgtctgagattgatgtcaagcctgatggttcctggagagtgaagggcagagctgaactgaaggatcttacacagtggcatctaccagatggtactctctgtgtgtccgcagatacagcagccaaacccaaaatgtgtattgtaaaacatgaggttaaagaagaaccatcgtctgaagaggtgggctggcgtcttaagttgggaatcagaaaaaacagcaatggccagtgggaaattagcaagagaggggatagtgattcggtgctgtcttctgataactaccaggcaagacacatggaaaataagaactgcatcaatctgacatgcagtactgatgacatggacaatggagatgaagtttataattcagaaccagcaagaactgattaccctatgacccatgtccatgatcttgattcttcaccctcagataaaaatgctcctccaccatcaatggagcaggatgtaatagttttgagcgactcagatgatgatgctgtcacggtgttgtctcctagtactgtgaagtgtggctcagcgcatgacactggaaatctgtttgcacccaacccacctgaaacttcaggagcgtgtggggaacagctgggtggatgcccaaatgaaacctcgtttcttgcattaaaagaaggttttgatgatctggggttgtcattttgggagcgtcctctgagtccccgagatgatcctacttaccagatgtttgatccgggtacccgggtgacagataatccagttgaagttgatgagccagttcatggtggcgatttgggagtaacggcagtggcagcaaacccactggaagatgggcgtgatggtgcgttgcaagcttgcacgtctaatgaaagagatggtgtcattagtcttgctaacttgggtgacccgactcaaacgtggggtgatggccatcgtgagaaccggacagctggcactgacgattgtgtaactaatgacagaaatgcgctcagaaa

SEQ ID NO: 8655 - DNA, 523 bp, Setaria italica
  Peptide Sequence Number=SeqID_74629
ttggttatttctattgttgatagttggttctaactaggtctaacccttccactagtgagtttaggggccaatggtagagatgatggtccactattaacagattacctgtgggaggggcttaacaagatttctctgttgagaaatgactcacgtactttctgtttgggtatcagacttgccaagaggagatctctagaacaggtcctaaatttggtgccaatggaacaagacggtgagaagtttgatgatgcccttgctcgtgtccgtcgctgtgttggtggtggaactgaggcaaataatgcagacagtgatagtgacattgaagttgtggctgattctgtctctgtgaatcttcgatgccctatgactgcttcaaggatccagattgctggtaggttcaagccctgtgctcatatgggttgttttgatttagaagcttttattgaaataaaatacaaacgttacccggaaagtaggacaagtagtaccaaatttagacttagaaagaaattaactactacta

SEQ ID NO: 8656 - DNA, 250 bp, Setaria italica
  Peptide Sequence Number=SeqID_74630
agtggggaaggagaggcgggccaagaccatcgatctcatcgacaagctcgtgctggcgctcacctcgacgtccgcgccgaagctgttcgccgtcgacaacatcacctcctcctgcggcggccggcggcgcagccgcagcatcgtctgcgaccaggctggcagcctgtgccggcagctccgcttggcgtctctcccctcccttgcgcggtgggcttttccgccgccgccgagtacgccaggcgagcggcgg

SEQ ID NO: 8657 - DNA, 926 bp, Setaria italica
  Peptide Sequence Number=SeqID_74631
cttactaatccttgttttaatatttatgtaaaacctactttgtaacttttacatggtcggcaagtaaagtagcctcttattcatggagttcgaaaattcccaatcaaacatcgtatctcacatcccagcatgcaggcaaaaagaatgaagaacctaactaaagcgcaagtgaacatacacgaatcttgcaatagacccaagcaagtacgaaaacagagtgtaccactacactacatgtcagggctgtttcgtcgcccctggacgccccttgcaacgccactccgcacgcgccctgacgatctcggctccgtcatcctgctgccgtatcaggtgcgtgctgttcaggtcggagcagcaccggcttgacaccggaaccgccggtggctcgtcggtcgccggcgaggtcgtggtcgtcatgctggtgagcgactcgaggagctgcgactggcggcactcccggcggtagtccagcgtgatgctcgtcaggtggtaatcctccagcacgtccagcggcacactctccaggatccaaccgatgtacttgacattgttcacatgctggttgacatccatgtcgctccacctgggagctagtcctgatcgtatgtgctccgccgtcgagtcggtgagcttctcgatcttgcggccgccgccgtcagcgtcggcagtgatgatgctccggtccaggtagaaggggagcacctcctgcctgacctcctcggggatcttcgacagcctccgggtctctctgttcatcatcacccagttgcttgtggctcttgcaatcatgttcttggtgttgcggtcccggatgatccagtcacggcgcatgccgttcttccctgacgacgcgacccaggtgtcgatctcgacgacatctccccatctgctgtacttgttgacctggatgttgattctcgtgaccg

SEQ ID NO: 8658 - DNA, 811 bp, Setaria italica
  Peptide Sequence Number=SeqID_74632
ttccgcagagaaccagacttgaatgcagagctggttaaccaagttgagaagcatctcatcaatattatgcatggagtatctgtcagtatccttttggttggtttgattcgctaaatggtagcatgtattgtggtctagcagctgaataaaatggtgcataatttcttttgttcgtaggctttctcactattttttctgtactaacgatagttgacaaatggttcttctacatggagttccctccctctttgacaaggataattatgtcattctttgaatcttgccattattgtagtttcatacagatgtttgaaggctatgctgcaccaccagttttacctctgaattggatttttaaattgacatccatcaagattatttacattcataataaaaatgtcgtagttgtattgaccactagtttttatgactgtgtgtggttaggttgaaggactctgtcatatatacatcaaaggatgttactctgttatatctatcagtcaatatgcattgttttgttccttaacttgtcaatagaccagaatgccagtgtaataggaggtgaggaaggtggtgagcgtaagaaacctccagtagcccgtgcacccaagcagcctgatgttcaagagccagctgcaaatggtgaggaagctgaacctgagagaagcgattcggaagagtctgataactgaagtggacctgaatagtgcagcagcagtggcccaaatgacccaggttaaactttgcattttaaatcagagtgtatatctgtaacaatgatggctgttgtctatgtatgttgtggactatt

SEQ ID NO: 8659 - DNA, 454 bp, Setaria italica
  Peptide Sequence Number=SeqID_74633
cctgcggtggtggagtcatacaagacttatgatgactctgtactaattaaactgctgatattggtcagatgattatggtaagagaagaaagatgcaggaaacctttcattgtcaatcataaatgtaccatttcttccatcctctgagaaggagaggtcgagggaggcgtcgtcagggttggaggcggaggcggcggattcgttcatgaggcgctcgatccgctccgccacggacggcggcacgcggaggatgaactgctcctccattgcagctctaaccccaagaaagcatgcgccgccgtgcgccatgcctagaaatccaagcttcctcccccgtactgttcttgggatccgatgctgatgctgatttaggattagattatctcatcccatcccatcccatcccaaccaaaagaggttgtagcctagccttcttggttgttgttcttgtcctc

SEQ ID NO: 8660 - DNA, 907 bp, Setaria italica
  Peptide Sequence Number=SeqID_74634
aacggaactctccagtttcgccccgaacgataaaacgccgcaagggggggtggttgggggatttggccctgtcctccgcgcgattcagcccagcgaacgctggcctgaagtcggagacagtctcttcgattccccccgtccccggtggaattggagctgcaatggaggagcagttcatcctccgcgtgccgccgtccgtggcggagcggatcgagcgcctcatgaacgaatccgccgcctccgcctccaaccctgacgacgcctccctcgacctctccttctcagaggatggaagaaatggtacatttatgattgacaatgaaaggtttcctgcatctctcttggatttacctgcggtggtggagtcatacaagacttatgatgactctgtactaattaaaactgctgatattggtcagatgattatggtaagagaagaaaatgaccctgctccagagggagttgaatacaagcatgggcttactcctccaatgagggatgcacgtagacgccggttccgcagagaaccagacttgaatgcagagctggttaaccaagttgagaagcatctcatcaatattatgcatggagtatctgtcaaccagaatgccagtgtaataggaggtgaggaaggtggtgagcgtaagaaacctccagtagcccgtgcacccaagcagcctgatgttcaagagccagctgcaaatggtgaggaagctgaacctgagagaagcgattcggaagagtctgataactgaagtggacctgaatagtgcagcagcagtggcccaaatgacccaggttaaactttgcattttaaatcagagtgtatatctgtaacaatgatggctgttgtctaatgtatgttgtggactattatcaattaaaatttttctagacttcagcattg

SEQ ID NO: 8661 - DNA, 531 bp, Setaria italica
  Peptide Sequence Number=SeqID_74635
tagttgggatgtggatcagtgatcaaagaaccagacaccagttacagatccacaaggaaagttacatgggtgcatgaatatattattccagtacacagtgaatattagggatcttcaacatagtttttttttgtttaattgttcagtaatttgaatttggcatcaatatgcacgtccagaaagtggattatcgtttgttgaatttgtatagtcaaacctcttccagaatataggttttttcttgattgcaagagttgccgtatttactacctgagttatattgttgagaatgacaccgttcagcttgttgtccttggaagtggtattgtaccacaccatgccaataaatggaaggcttagaattggcaggatatgagaaacaccaaaggtgtcgatggaaagtagaagaccttgtcgaatgatatggaaatgatcaaaaccaatgaaagctgcaccatatcggaggccatcaaacgtacaccagtgacctgtcagataaaattaaacaaacttgtcgtaggtaggtcttct

SEQ ID NO: 8662 - DNA, 702 bp, Setaria italica
  Peptide Sequence Number=SeqID_74636
acaataccacttccaaggacaacaaacttaatgtatgcagttaaactacaaaatcactatagtaacaaataagaaagaacagctctagctacaatgaattcagaaaaaggtaatgccagttctgtgttatcggttagcagtcttaactagagaagtgaagcaaaatcagctgtagtagagagatgccaaacaaattaacaagtctgtcagcagaagcccaatcgcatcaaatacatattttggagcaaacaaaccccaaaccattaagtgacgcctttgaatagtgacgcatatgattgtcaatgtagcagggattgctgttataagaccatacatcaaaagcacctgagttatattgttgagaatgacaccgttcagcttgttgtccttggaagtggtattgtaccacaccatgccaataaatggaaggcttagaattggcaggatatgagaaacaccaaaggtgtcgatggaaagtagaagaccttgtcgaatgatatggaaatgatcaaaaccaatgaaagctgcaccatatcggaggccatcaaacgtacaccagtgacctgtcagataaaataaacaaactgcgaggaggctccactgagtcactgaaacagggtcagccacacagagttctgattctctctgatgtttctgctgtaactttatgatacaccaagctcctgtcatgcaaattatgcc

SEQ ID NO: 8663 - DNA, 424 bp, Setaria italica
  Peptide Sequence Number=SeqID_74637
cccctccgatccaaactcccggcgaacgccgccatccgaattcgaaaccctaggcggccgcatcggcctcagagtggcggccgctttagagcgcgcggggctgtagtgcctctcgttcggcggagccggcccgcggcggcaacggcggcggcggtggccggccatgtcgacggaggacgagaagctcctcaaggaggcgaagaagctgccgtgggacgagcggctgcagcataagaactggaaggtgaggaatgacgcgaacatcgatctcgccgccctctgcgactcgatcaccgaccccaaggacgcccgcctccgcgagttcgggccattgtttaagaagacggttgctgattccaatgcgccggtgcaggagaaggcgctggacgcccttctcgcattccagcgagctgctgatgccgac

SEQ ID NO: 8664 - DNA, 1080 bp, Setaria italica
  Peptide Sequence Number=SeqID_74638
ccccctccgatccaaactcccggcgaacgccgccatccgaattcgaaaccctaggcggccgcatcggcctcagagtggcggccgctttagagcgcgcggggctgtagtgcctctcgttcggcggagccggcccgcggcggcaacggcggcggcggtggccggccatgtcgacggaggacgagaagctcctcaaggaggcgaagaagctgccgtggacgaaagagactagaccggggacgagcggctgcagcataagaactggaaggtgaggaatgacgcgaacatcgatctcgccgccctctgcgactcgatcaccgaccccaaggacgcccgcctccgcgagttcgggccattgtttaagaagacggttgctgattccaatgcgccggtgcaggagaaggcgctggacgcccttctcgcattccagcgagctgctgatgccgacgcttcaagatatgccaaggaggtttgtgatgcgatcgtggccaagtgcctcactggccgaccgaagactgtagaaaaggctcaagctgcattcctcctatgggtggaactggaggcagcagaggtcttccttgaatccatggagaaggctgtgaagaacaaagtggctaaagcagttgtacctgctattgatgtgatgtttcaagcactcagtgaatttggaactaaggtagttccacccaaaaagattctgaagatgcttcctgagctgtttgatcatccagaccagaatgtccgggcttcttctaagggtttgacactagaactttgtcggtggattggcaaagagcctgtaaagtctattttatttgagaagatgagagatactatgaaaaaggagttggaagcagaattggcaaacgtctccggacttgctaagccaactcgaaaaataagatctgaacaagaaaaggagctcgaggaggaggctgtggtggagacaaccggggctaacacttctgaagaggctgcagcagatgcccctgtggagatcgatgaatacgaccttgttgatcctgtagattattttaaccccactaagaaaaatctggattctgggatggtgtgaaagcgaac

SEQ ID NO: 8665 - DNA, 155 bp, Setaria italica
  Peptide Sequence Number=SeqID_74639
tccagctcaagagccagatgtatatgtacttactggtactgataatgtgtaccgcattaatatgtgtgatgttgagtaattattagtaaatatgtaaaatctaccggagtgcaatgtgtctactcttgttgttaaataatgaagtttgccaagtg

SEQ ID NO: 8666 - DNA, 437 bp, Setaria italica
  Peptide Sequence Number=SeqID_74640
ccatgtataaggagcatcatatcaaagaaagtgggaccttttgagcaggtactagtcacgagtcaatcactggcagttgatagtttctgtaaatgtcccagtatatacttgacacaaatggagtttctttccaaatcaaatggaagctgcttatttccaaacatactaatggctccttttgcatgagttaatttttacttctattcaagggaatggtccaagggtgcatcactggaataagctcaattgcaaacgtgatatctcctctcgtttttactcctctcacagcctggtgtctttctgaagctacgcctttctacttaaaaggtttcagccttgcctgtgctggatttgcaacgctggtagcgcttgcaacaagcataagtatgaggccagctgaagtacagcccgattaggtaaattagtaagtagtctta

SEQ ID NO: 8667 - DNA, 1136 bp, Setaria italica
  Peptide Sequence Number=SeqID_74641
cctccccgtctcaaccacgtgccaggtctccgcagtggcggcggtggtgacggccgcgtacatgaaggccttcctccaggagacggacggcggagcctcgtcctgcagaagcgaggaggcggcctccctgccgctctgccttccctcctccagcagcgaggagtcgtcgccgaggctcccgccgcttcggaaagcgccgtcactgtcggagatagccacccttcttaccagcagctcaaccttctcgagagcgaccgttgtcacatttttccacggccttggtgagacaggcctgctaaatacactactgtactttctcaaggcaaaattccattacagcaagaaccagtatgccaatttgctactaattatgggcattacaggaagtttctcacagctagctgtgatgcccctcctagtgccaaagctaggtgaacagaagctacttatcatagcacttatagcaagctgcgggcacgcattcctatacagcatcgcatggtcgtcttgggtcccttatcttgctgcaagctgtgtagtattaagcacgttggtgaacccatgtataaggagcatcatatcaaagaaagtgggaccttttgagcagggaatggtccaagggtgcatcactggaataagctcaattgcaaacgtgatatctcctctcgtttttactcctctcacagcctggtgtctttctgaagctacgcctttctacttaaaaggtttcagccttgcctgtgctggatttgcaacgctggtagcgcttgcaacaagcataagtatgaggccagctgaagtacagcccgataggaaatagaagagctattgaccactatgggtaaaaggaggtggatacatgcatgtacatagtttataccgaccttctatcatctactaaccactgtcaatagccattgtgaaggtttatgtagtaagcattatataacttgcacgctgttccatcactgttagttgattaacaggacagcaggtagtgatgaaaaatatcagaaaaaattatgatgcttcagtacactcatacttgtcaccttgttgggaacataaggctgaaatacctgagtcaaagtttgtttaaaaggttgttgccgaaacaagtttacaacttaaaaaaa

SEQ ID NO: 8668 - DNA, 1221 bp, Setaria italica
  Peptide Sequence Number=SeqID_74642
ttttaaacttaaaaaacaacatttactgcagtcagtataaaatgtacattttgaatttgaatacactcagctcgattggcacaatacagaatgcataaacattcattgttcagacaacttatttcatgggcactggtactattttctacagactaaatcacatgccaattgaattgggtattgcatatagcttatggtttgcatccatggctgtctccgattcttgcatgggtttgacggtgaaagatgaccaacaatgtcaagcactcgtatacatgacgcagaactctttgatattcttagtttccatggatattgggtgcaactgagctcatagctggcatcctggcagctgatcctagaagaacctctcagcagatggatcggactccagcaagctgccatagaaattcaccttacaggtactaggaaactgtactccagcttgctcgcaactgtcccttgtaacctgaggacatgaccgaacatccaggtactcaagagccttgaaggatttaatcacactgctgacccctgcaactgtgagctgaacacagctgctgatcttcaaaactctcagttcagactgaaacccacttccttccccgtcctgaaatgcaacgtcggttatttggtcacagcacccaacatcaatcgccacaagaagtttacagttagacagcaggcatcgcaatgacgtgtctgttattttcaagcaccagtccattctcaggctccttaagctgctggagcaggcaagagcaagagcttgtatggatgaatcgctaatgttccgacatccaccaatgacaagagtctctaggttatggcagaacttagctaaagaatagatggacttatctcccaccttgctgcagtccaaaagctttattgacaccaagtgtgatgaagaaacctcagcgatttcacagactccaggatcaccaactttattgcatttacttatgtcaagcaattttatatgatgacagccatcagctagagcagatataccggcatctgttatgctgttacatcctgcagctccaagatcttccaattgtagacagctctttgatagaacaatcaatgaattatcagttattaatttgcaacccgtgatatgcagctgcctcaatttttggcaccctagtgcaaccgccttcaaacctctatcgctcagctttatgcagcgagaaacatcaagggactgcagagatg

SEQ ID NO: 8669 - DNA, 256 bp, Setaria italica
  misc_feature (251)..(251): n is a, c, g, or t
  Peptide Sequence Number=SeqID_74643
gttccggattacttcaccaagcgggaatgaggaaacaaccgttaccgggtgggaggtgaagtagtgacgcagcttcctcttcgtgatgaggatggcgtagaccagcttttggatctgcgggtatcgtgacttggactcggacaacacctcgctgatgaagtacactgtcctcctccagtcagcaaggaggacagcagtactgtcgttgtcaagatcagcgaatcaggacttagactagtgaatttctttangcgcg

SEQ ID NO: 8670 - DNA, 651 bp, Setaria italica
  Peptide Sequence Number=SeqID_74644
gcagtccgctattgatgaacttcacaatactgatgtagttcctgcaaagctcattaatagcgtgccacacatgcctatagaagaacaaaaggatcatgttggccaaagtactttggaggctactgggagtaattcaaagaatgcatgtgagacaggccagcatgatggctactgttcaacttcaggtgaaattggggatcctcttggagctagtgggtatttatccaggagcagcagcacctctttgtcatgtggtactgaatacgatcatgatacccatcatgtggaagaaccatgtgttccccgtgatgacaatgtggttaatgatcctgatccactccctctgcatggagtagaactgatgaagtagcaaccacaatggatcgtacatctggaatagcagatacccatccagttcaacaccaaaatccaactatagctgaaggtggccaaaggaaacattggcaataggttcaatttcaaatgtgtctgataaagagttaaccagaacattaagatctctcggtgaatcaatggttgagaacattcaggctatcgagtttttggtggagatacttgagaaatctatgcctagaagcacagagcaagctaaggcggtagcagctctaaaagaactaaggaagatcagtg

SEQ ID NO: 8671 - DNA, 1441 bp, Setaria italica
  Peptide Sequence Number=SeqID_74645
agactacctcttctctatgtccttcatgctgatgtgcagcacttcaaacaagtcagggaccttcatgaagaacttttggatgatgattttgatggccaaacttttccagatcggtcaaagctgaacagaagtgacaggaaaaacaatgttgaaggtagaacaaataaaattagaagtttggctgaccttgatccagatactagggatcttttctcaataaatgacgcatacggagcagagggtgagctgggcattattttatcagaaaagtttatggagcatgacgcatactctatgtttgagaatttgatgaatggtgcccaaggagtggttgctatcactgacttctattctctcagtccttcaccagaatcgagcagcggtttaacaccagtaagggaggcatcatctgcaatatatcacttgcttgctagtgtggattcctctcttcatagtcaccttgtggaattgggagtggaacctcagtactttgcattgcgatggctccgtgtcctatttggtcgtgaattctcacttgacaatcttctgtttatttgggatgagattttctcttctcctaaccattcatattgtaccgacatcaggagtagggcagattatcagtttaaagtcttatgttctcctcgtggtgcactaattttgtcaatggcagtctcaatgatgcttcatcttagatcctccttgttagggagtgaacatgccacttcttgcctagtgaggttgttaaattttccagaagatattgacataaagagcttaatcgagaaagctacgttattgcaatcttttgcccttgaagcaaatcttccttcatctcctgtgagaggaaaatctctcttgactacaccaaactattgggaagagacatggaagatcctccaatcatcaatagaccaaaagggtggtggtgtgttcaagatgaagggaaggggcttcttgagaagaagctggtctaacactgaatcaaatgtttccagaagcaaggctgctaatctccaaaacaaaaatttgacttcaactaggcagtccgctattgatgaacttcacaatactgatgtagttcctgcaaagctcattaatagcgtgccacacatgcctatagaagaacaaaaggatcatgttggccaaagtactttggaggctactgggagtaattcaaagaatgcatgtgagacaggccagcatgatggctactgttcaacttcaggctatcgagtttttggggagatacttgagaaatctatgcctagaagcacagagcaagctaaggcggtagcagctctaaaagctaaggaagatcagtgaccttcttcgtcaaatgtacagctatacggtatatatatgagagtgtctttacttttggtaggtcttacttgggtagttaatttcttaaagttaatttgttctttattttgtttta

SEQ ID NO: 8672 - DNA, 809 bp, Setaria italica
  misc_feature (758)..(758): n is a, c, g, or t
  Peptide Sequence Number=SeqID_74646
cggggagggccgcgccgcggctcgcccgcgcggccgggctggcgctgcagggcacctggatggtgcagatggggttctccttcttcaccagcgccatcgcgcagggctgcgcgctccacgccgccagccgcgccgactacactatcaagtgccgcacccacgaggactaccaccgcgcgcggtccgtcgccacgctgcagttcaacggacacctcgcgctgctcgtcatcgctggcgcggccgcgtacgctgccgtcctatccagggcgaaccggccacccagcgggtacaggattctgggtaaggaggtgcagatggagggggtgccgatcatgtcgcagttcacactggattcggatgaggagaaggaagatgaagggataaccaacacagcggcgccagcggcgaatggggtggagtcccatgacgagatcccgctgcacgctcctggttccaagtgatgcagctggaattggggtgcttttgatgtagattattgcagttgaggaaggcatctacagagctgcagaatgatgtggcgagatgtttgtgtgtttctgtacctcatttcaatacagtcttcactttttgatgcttggataatggttgttctctgtccatgtggaaagatatcttgcttagtttgatctgcatacaatagagttaacatctgtataatattgtaatttgttgggttcagatagatctttgagaaataaagttaacccatgttccactttgagaaacaaaaaaaaaanaaaaaaaaactaaaaaaaaagaagaactagccaacggacgacacaggagta

SEQ ID NO: 8673 - DNA, 375 bp, Setaria italica
  Peptide Sequence Number=SeqID_74647
tgtcagcgtagtggctctcgtcgatgtgatcgaactcgtcgtcgaagtcgtccatggccgcgtccgccgcggacttgaggtcggcgatgttgctcagcgacgcgaacacccgttccttggggttgaggttccccatccgcgccgactgcgagaagccgccattcagcttgcccggctcgccgatcgagtacctccggctgctcggcgtcctgggcttgtccgccatccaccgctgcgacgctgactgcggcgtccctttcttgctgccgccgttcggcaggcggtggtcgaagccgtagtccggcgcgggggcggtcttggcggacgcgggcgtgctgcacgccgtggtcgtggtcgtcgtcgtcgtcgcggcga

SEQ ID NO: 8674 - DNA, 614 bp, Setaria italica
  Peptide Sequence Number=SeqID_74648
cggcggcgcggaggcgatcggtgggcatcgacggccgccgtggcggcggcgtggtcggccgagatggcggcgcggcacggagtgggcccgggagaacgcgacggcggcgctggtgctcctgtgccggcggctgggcgcgcgcgcggtgacgcaggtgatggccgtgcccggcgtggagtgggccatctgggagctgatgggcaccgggacggagcgcgcccggcgcaaggccgcgtcgctcggcaggatatgccggcggtgggccgccgcctcggcagccgacggcgagcgcggcaacgggtgccccgccgccagcgtcgtgccgccggccatgatggcgtcatgatggagccgcaatgccagataggataagctcagaaacaaaggataatgattttttcccctcttcccttccatgtacaaaaagtttgcttaggctgtcaggattctttgatcagagaaagagagagataaatggtgagtggttgatcaactgtgcatacggagctctgtaccaaatgtaattccctccattcctacaaaaatcttagtctacggcggttcggtggttacgaaatgaaaatgggattagtttgagactaccaaaaaaaaaa

SEQ ID NO: 8675 - DNA, 441 bp, Setaria italica
  Peptide Sequence Number=SeqID_74649
ggacgccggcctgggccccgtgccggcgcggtggcgtgggagctgcgagaccaatgccacagacttcccgtcgtcgatgtgcaaccgcaagctcatcggcgcccgcgctttcttccgcggctactcgtcgggcggccggaacggttctcgcgtcagctccgacctcatgtcgccgagggacgacgacgggcacggcacacacaccgcgaccacggcggccggggccgtcgtggcggacgcgagcctgctcgggtatgcgtcgggcacggcgcggggcatggctcccggggcgcgcgtcgcggcgtacaaggtgtgctggaggcaggggtgcttcagctccgacatcctggccggcatggagaaggccatcgacgacggcgtcgacgtcctctcgctgtctctcggcggcggcgcgatgccgctctcgcgcgaccccatcgg

SEQ ID NO: 8676 - DNA, 1064 bp, Setaria italica
  Peptide Sequence Number=SeqID_74650
acagatgacatcaaattttggtgtgcatagcataaccacaccagccttagctgtgttcttcatgcgtgtctttcagagaaaacttcataagtatcgactattttcaacaggcaggtatgactgggtcaggcttgaacacgccaaatggcaattaaaagtcgccgtattacaaaattatgtatcttcctccccaaattcatcctgatattccaagtcatctagaataatgtacttggcatcaccagtaaattgaggtgaattgatgtcatcctcacttgtctgaccccttttgaatttgtcgtacctgtaccaattgaataggctaacaccaaccataatggtgaaaagaccaacccctttcaaccaagtaaattcatcatggaaataaaataccgcaacctgaaagatcaaggtacaaagatcatttataagaggtatagaaaccaaatgcctattattttatggagcctaggaataacaaactactccgtccgttccacacggcttgtagttcgggacggagggagtacttcctaatctctggggttatcaagcttcatactagtactagcagacaagccatgtgtttagcctttctgtgatacaactctgtcgatacttgatagcttccctctaatattgtatgccaaaaaaaatgaaggtacttgttggattttttctctcgttggatgatttgtatagacaacaaatgaaccgtttccattttttgttgttcaagacttggtagctactctatcatgtgccactcaattgtcaaccacctgtattgttcttttctttttccagatgaagtgtagttcatggttgatagcagtatatgcaaaaatatttggtaaactaggaacaataattcttcagaaggggttcatgaagtctagattcaactgcaaatgaaagaatataaataaaagaaaatgttcagaaaggatcatattttcaatattaccaaaatggttacagcttcttttactaccccagctatagtcacggttatggcactcgttgctgaaataagtatatactctgttaacacctgcagttag

SEQ ID NO: 8677 - DNA, 573 bp, Setaria italica
  Peptide Sequence Number=SeqID_74651
cgtgaagtgttgttccttgatgctccagaagctaaagatcaacatcatctgatgttgtataacatttgggctcaaatcatatcaactgctctgccacttgattcactcataatggctaaacaatggcttcagaaaagagaggatagagctctcatctaattcttaggttactaacttttgagtgcactcccatttggtaggaaaaggtttagtcaatacgcataaaacaaatcaatcgaataatcagatatgtagaagaataaaacatctgcacgacctaatgctcctctccaatcgttggaattgacattcaagaataaagcaaagcttacataccataagcatctttctgcaacagaatctgagtcatggaccagcggaatcctgacataactgcagcaagcgtcacaaaaatgaagccccagaagtcaaactcggtctccttggcaactgtcattagaactccaatagagataacaaatatgattcctagaagcttgatgctaggattttccaacctaaatgcaaacgcgaagagcaaaaggaatatcggggcggctgatttacacatag

SEQ ID NO: 8678 - DNA, 1526 bp, Setaria italica
  Peptide Sequence Number=SeqID_74652
gcacgtgttgggttcctacggtcacgcttacaaagagacgtctgtagagaatgaatacacctgggcaccaaaaatgtagatgctcaagaatgaatatgtgcatactgcaataatgcaaagagaggaataagaattcagatgtcgatcatcctcagcaatttccactataagcatgcatatcaatatgtaacgaccgccaatcttctccaaacaggaattctgatatgatggagttggctcattgtttgtcactgtagttagcctgactgtttgatcaagatgtgagttatatccatcctgcaatggacatacctcacacagatgacatcaaattttggtgtgcatagcataaccacaccagccttagctgtgttcttcatgcgtgtctttcagagaaaacttcataagtatcgactattttcaacaggcaggtatgactgggtcaggcttgaacacgcctgggaccgcatgcatcgtcttgtgctcaatgcgggggggggggggggcgacaggtttttctttataagagatgctgattcttaccaaatggcaattaaaagtcgccgtattacaaaattatgtatcttcctccccaaattcatcctgatattccaagtcatctagaataatgtacttggcatcaccagtaaattgaggtgaattgatgtcatcctcacttgtctgaccccttttgaatttgtcgtacctgtaccaattgaataggctaacaccaaccataatggtgaaaagaccaacccctttcaaccaagtaaattcatcatggaaataaaataccgcaaccaaaatggttacagcttcttttactaccccagctatagtcacggttatggcactcgttgctgaaataagtatatactctgttaacaccatgaaaaaggccaaggagcctccaataagcataagtaagcaactgcgcatgacatgccaagggttatcgaaatatgaattcttctgaaaatcactccaaggatccagtaatagggacagtatcatggtggctatggccatcactggggtaacatggctcatcaaggtaataggatttttcaggccataagcatctttctgcaacagaatctgagtcatggaccagcggaatcctgacataactgcagcaagcgtcacaaaaatgaagccccagaagtcaaactcggtctccttggcaactgtcattagaactccaatagagataacaaatatgattcctagaagcttgatgctaggattttccaacctaaatgcaaacgcgaagagcaaaaggaatatcggggcggctgatttacacatagtagcaaacgtcaccgagatgaacactagagaggcgttgctcaggtttatgtccagcgccgtccctagagcagttggtacgactctcatgaagtaatccttccaccccatctcgacgccactgtcaggtcccatgggctggtaatgtcgttgttcttttcttagtttagttttaaaactttttttctttttttattttttaagtttttatttttcac

SEQ ID NO: 8679 - DNA, 504 bp, Setaria italica
  Peptide Sequence Number=SeqID_74653
cagagtacaagatgggggtcactactggagctcgtgagatgaggtctctaaggaccctcctcctctggcgtcgcccccttccgagaacccgaggctctaaaggaaacctcagtgtgacttgaagacaacttctgttgaagtgaacttgtatatatctaaggtttgaaacttctaagtctagttcttaagttataaatgccttccacgactatggatgcaatccagaagctttatgaggtttgtaaagtatcattatctgaaaaggggcctctatcttctgaagccattgataaagtccgcgttgtattaggtaagagctacctatcttctactacctaccttctactattgacatgatattataaggaatcagtgctcgtagcaacagggaaggaggtgaattaggcaaacttaaaaccttaacctataaacttccactactttgcataaacataaactagatcattctaatctagatgtgcattctacggttgatctagtatg

SEQ ID NO: 8680 - DNA, 173 bp, Setaria italica
  Peptide Sequence Number=SeqID_74654
aagataattttattgtatatttcatatatatgtaacttgctgacagaatattccgtttccccttttagctttgcacttttatttataggaacttaattattcaatacatacaccagactgtattgaataattaagttcctataaataaaagtgcaaagctaaagggaaacgga

SEQ ID NO: 8681 - DNA, 1283 bp, Setaria italica
  misc_feature (15)..(15): n is a, c, g, or t
  Peptide Sequence Number=SeqID_74655
taaattctattattntatttggtatttgtattaaagtcttgtaaccttctttaattttatttgtaaagttgtaggtccttgtcgtatacaaaggaccctcctcctctggcgtcgcccccttccgagaacccgaggctctaaaggaaacctcagtgtgacttgaagacaacttctgttgaagtgaacttgtatatatctaaggtttgaaacttctaagtctagttcttaagttataaatgccttccacgactatggatgcaatccagaagctttatgaggtttgtaaagtatcattatctgaaaaggggcctctatcttctgaagccattgataaagtccgcgttgtattagacaagatcacaccttcggatgttggactagagtgtgaagctcaagctgcacgtgtttggcggagtccacaagccctgagtaagaaaagagtttttccttccagccctgcgatcagataccgtcacatatatgagtgcaaaagcttctcaattgggatattttgcataccagcatcatccatcattccactccacaatcatcctggcatgagtgtgctcagcaaagttttatacggcacagtgcatgtcaaatcatatgattggattgataaagctgaacctcttaatttattgaaagtgaggcctgcgaaggttgtaagagatggtgaaatgtcagcgccttgtggagcgatggttcttcaccccgaagaaggcggcaacatacatgctttcaaagccatcactccctgtgctatcctggacattttaacacctccttactcttcagaagccgggaggcactgctcctacttccggagatgcccaaagtcggacccatcgggtgttttattgaaccgaacaaagggatctgaatttgtttggctggaagaataccagccccgtgacagctttgtcattagaagggacctgtacacaggacctgctttagagttatgacgatcatgcttggaggtcatgctcagcgcaataattatgctttctttagtttcttaagttataaagaagtacacagccatgcagagcattccgtttccccttttagctttgcacttttatttataggaacttaattattcaatacagtctggtgtatgtatttttaagataattttattgtatatttcatatatatgtaacttgctgacagaatatttatataattatatgaaagtggaaggtatttttgagccttcattgaatacaaactacaaaaaacgacattccagccaaacaaattcagatccctttgtt

SEQ ID NO: 8682 - DNA, 1270 bp, Setaria italica
  Peptide Sequence Number=SeqID_74656
gtaagtgaataatggactgatgaagagcaccaatatgtagctgtataaataaataaagaatataacaacgaacgaatagggaaaggtatacaatcaacctgtttgtcagtgtagggtgtatatattcacaaggctcaggtcagcattgtaactgtatcaggtgctgtatgcatgtatgatgctgccacaaggagcaaacacaacagattgttcactccgagctataggggataaatccacataagggttatctccaggatgccaccagccaacagcggtgtaagtaaagcatattgacccaccagtatgaagcaaaatcaaccgtggttatcaaaacaataaccagtgcttctttctaggtttgtacttgctagggatatctcgagcatcatacagtgagttgtagtgaacttctgaccagaaacttagccaaatctctctctgtggagtttgatattgcggaacaatttcaacaaaacaggtatctctgaatgatgttagaagacagatcttcgcagcaaacttgtcagcagctgcttgaagtgtgacatggtcaccccattcaccagatttcttcattttcttgcaatattgtttatatttcattggaacataaccttcgtacaaggagttacattccttgagctgctttacaatctcctttcgaacatgcttgtgataatcaggtgaacggtatagctggtctgagagtgcacgaaactgacaatttccatcaccagctactctcacctcgaacaagccatatgcatttagcctatcaagaaggcgataatggtccatagtggcatcactatatgtcgggaagaatgtattaatccggggaacatgaggaatcgatgttaaattcgtaagacgcttggccatagcaccatctaacttggcatattcttcggagagaaccattgcaatcatcctatcatcatccgtctcactcctctggctgctcatagaggttgagctagatgaggcacctccccttggaaacatgtgcgtcatctccaaccaccaccggcagctgcagcacgcaagggtaacgccggcgagctcggccgcggtggagggaagaggagggggggccgccgctcccgccgcttgctgcagattgggggggaacgcgcgtggcgagggcccgcccggtgctgaaggctcttgcgcggggtgtggtggcggtctggcggagcggggacgagacgacgacgcgttctcctcctctcgcttgttgttgggaagagaagagagggcgccgcgg

SEQ ID NO: 8683 - DNA, 817 bp, Setaria italica
  Peptide Sequence Number=SeqID_74657
cgtggtctccaaggtggggcacgacttcgcctacgcctccgcgccggggcccgctcggcgcccgccgctgctctgcgcgtcgccgaccacatccttccacgcgcagttctccgacgccgcctcctcggcgcacgcccccgaccgggagctccggcgcgtgcgcgcctgcgacccgatctacccggccgacctccccgatcgccgctttgcctacggcctcgccgtcggcgtcgccggggaggtgctgccggagacgctcgagcggatgatccggctctgccgcgcggtgcttgtggacgcgcaggcgctaatccgggcgttcgacggcgacggcgccgtcggccacgtggcgcttgaagatacgccgtacgcgcggctcctcccgcgggtggcgttcctcaaggcgtcgtcggaggaggcgccgtacgtggggttggagacggcgaggcggcggtactgcgtgatcgtcacggatgggagggacgggtgccggctgtactgggacggaggggaagcgcgcgtcgtgccgttccccgccgttcaggtggaccccactggcgccggagacagctttctggctggttttgcggcggggttgttgtggggcctctctgcaacggacgccgcgctgctggggaacttctttggcgccgccgctgtctcgcaggtcggcgtgcccaccttccatcccaagatgttgcaggctgtcaaggaaatacttgaagagaagacaacaaaacgatctagtccatgtataaacggcactacttttaccttggagaggtcaaatgtgcacgatgagttacacgcagctctc

SEQ ID NO: 8684 - DNA, 825 bp, Setaria italica
  Peptide Sequence Number=SeqID_74658
acttccctgcaagggttcgggccgcgctgcccgccgccggcgacccgctcaagaccaacggcacggtgctcagcttcggcggccacggcccgcctcccgcgctgcatgacctcaccgagcaggtgaaccacctccaggagaagctgctcatcccggccaggaagaccagcaacccgtcgccggcggtgggcccttgcagcgaaggatccagcagcacggacgacatgacccatggcggcggcatcaaggagaagtcgtctaccgtagacaaacctgcaaacggagcgcagtatccagcaggcatgaacggggcagccgtgtggccatacagctgcgcgccacctccggcgtatttctcatcgggcatcgcaattccgatataccctgccgcaccgggttactggggctgcatggttcccggagcttggagcctgccatggccggtgcagccgccgtcgcagggcctctcgtcgcccagcagtgctccttcagtctcatcatcggggcctgattccctcacactgggcaagcatccaagggaggttgacgagggaagaagcagcgcccatggcagtggcaaggtgtgggcgccgaagacaatccggatagacgacgcggacgaggtggccaggagctccatctggtccctaatcggcatcaaaggcgacaagaagcgggacgacgcagaccacgctgtcgggcacaagcacggaacggtgtttgagccgaagcttgaggtcaacaaggcggcgaagccggggatgatcacaaggtcgccgttcctgcacacgaaccctgtcgcgctaacgcgctcggtgaccttcc

SEQ ID NO: 8685 - DNA, 305 bp, Setaria italica
  Peptide Sequence Number=SeqID_74659
gacaacaattccctaaaggagtactccgaggatgtccagattgtgccaattgccaaaaggttattgcaagatggaatccatctggtgcacgcaggcctgttcttgatgaggctcctgttttctatccgactgaggaggaattccaggataccttaaaatacattgagagtatccgcccgatggcagaaccttatggaatttgccgtattgttccgcctgcttcatggaagccgccgtgccttcttaaagagaaaaacatttgggaatgctcaaaattttctactagggtacagaaggttgacaag

SEQ ID NO: 8686 - DNA, 545 bp, Setaria italica
  Peptide Sequence Number=SeqID_74660
tgcgcatctgctctatgtcctgttcttcggttcttccccgagttcatgctgttccttccccaaatctatccaattcccagctctatccgtccaaatctctagctgaaccctaacacaaatcgacctcgcaccccggctgacgcggaatcgcattcgcagcacccgagcaactgcggagccatggaggaccggctcagcagcctcccggacgacctcctccactccatcctccgtggtgtcccgctcaagcacgccgcccgtaccagcgctctctcccggcgatgggtggcccactggatccgcgcgctcgccgcctccccggttctcgacttcaccgacagcaacttcgcctacggccagccgccagcgcgggctgcggccacggtggatcgatgcctccggctacacgccgagcatggcacgccgctccacgtgttccgtgtggcgctggtgtccccgtcggtgccgggcgacggcgcgttcgggcgggacgtcgtcgggtggatcgcggccgccgtgacgaggggcgctagggaggtggaggt

SEQ ID NO: 8687 - DNA, 440 bp, Setaria italica
  Peptide Sequence Number=SeqID_74661
gaaattcttgatatccaatgcattaaccgaaagacaaagacctgccagatgacaatcgaaggagctaaagttagatatatcaagaactggatatgtttacactcttgggctgactaacaaaaggaatagatgaaatcctgcataataatcaatcatggccgaaatacaaagaatgtcatatagtcaatataattctgattggcacaagctcaacactgcaggaaaggaaaaacaagacactgaaaatggattttggcttgtagaggagaagaactgttactcctgtaagatggctgaatgaaccagtctagaagcctgcactttcagagacagatcttgctaaaatccaagtagtcaggatcaaacttttgctagtgtaacgtatcgcaaaccttggcttgggaaaaaaacctgacgctgcaatgtctgagctagatctt

SEQ ID NO: 8688 - DNA, 617 bp, Setaria italica
  Peptide Sequence Number=SeqID_74662
aatcattgcttgcatgcagccaatagctctatggttatttcggtgaacatttgaagtaatgtcatagcttattcctccttgcctacatgctttagctcattggctgctcgtgtaaagtaattaagtgcctatcctttgatgcttagtagtataattcttctatctcctatatgcttgcaagcttatctatttatctcaatttgtactaggagtagcatgtatctatccatgcatgctacagtgtaggacttagttgtgatcattgcttacttagcatgttatgattgtttattttgtacctaccataacatctcatttccttgaccttttcaatcataatgcatgatgcaaagaaactactagaaggttttgggaatacaagaaggccctcaaccttaagctaaagcaaagttaaatatcatgaatggttggagtgatcaagattaaagatgcgtacgaataatataggtttttctaatatttttattattgggagtgatggatgaatggacaagagttcttatatatgcatacgaataatataggttttcagaattttcattattgggagtgatgtggatgaatggacaagagttactttcatatgtcgaatattc

SEQ ID NO: 8689 - DNA, 884 bp, Setaria italica
  Peptide Sequence Number=SeqID_74663
taaaaaagacctaacatgcctatttcctgcgcgtacaaaaacccggcgcagcgaaagaggggcaaatttcacaccaaataatagacaggaaaaaaacacctacttggctacttacatctgtatgacacttctctagagcataagcacttcaaaaccacgtggggatcgaatccatccatcatctgtacacatactcatcggacagtacgatcctaagaagctctctcaggttaccaaatacatgcctcccagagctctctgctccaatgtagttcagaagctgctccgtatccttgtgtaacaaataaatggcataggaggccctagtggagtcatcttcttggcattccatgaaaagggggtattctgttagttctgacccggtgttgttcgtgcttgcgttttctgctgaagcagccgatgtttcagctgaaggcaaacgatcactcacataagatcgggatcctccaaagcgtaggggatatcggaggggaacatcgagataggaggctatgagcaagactgcatgggctgcatatcccagaacagttgcagacctctgaagctccttgtcactgtaattcttttgccttcttttaggcttcataatttgccagccaaaaaacgtccaagcacgcacttgaggagatttaatggcactgggtacatgagttccatatgctcctgaaggtgttctatttcctctgaaagtgttccatgctcccctgaaagtgttctgtcatctcacataaatggtttcgaaaggtgattcttgaatgtttttcctcaatttctcttatagaagaaaaacacataatgcagatgtttaccagtgatccttacataggaatatcctaagcaagctgtatcagaactgagatgga

SEQ ID NO: 8690 - DNA, 312 bp, Setaria italica
  Peptide Sequence Number=SeqID_74664
tttttaaattaatcaaaattcaattatgatgtcattcttcatgacaaatcaccactttcaaaattgtccacagactcgagtgaaacgtcgtacagagcctcgcctagttcctttgtatgttgatgttgacgactgctagaactatttaccttcttttgatcactacacgtatagtgcaataatgatcgatccctctatgcatgcggttgaacgtgaagttgtagcatagtgttttcttgcctcctgctttgcagaatcatgaaacggacagagatacggcagccgatcgtaacttcacaccgtcgtcacccc

SEQ ID NO: 8691 - DNA, 470 bp, Setaria italica
  Peptide Sequence Number=SeqID_74665
caagcccaagggatcaaagatgtaaaaatagccaccagaaagaatagtcaatgtatcgcacacaaagtaactgctaagaagtcccaagccatagttaagcatgtttcccctcaatttccagggaggaggaagttgaaggctgcaaacttcttctcggttcattatggttccttcaaagaccactgtcaacgaagaaccctggaggtcacctagactctgctgcagcaaggactgcttgggatgttctcttttatcatagatcagatgcactttctttgcgttgcaataatctgctagctccataaggtcaaacaaaagaaaatcactctcaccatacaaagccaacaattcacttattttagcatattccatgcatggcaaattcctcattaactcgtcgtccaacaatgatgatccacgaagagatcgtacgccaagcctattagctagatcattgccaatgactaata

SEQ ID NO: 8692 - DNA, 151 bp, Setaria italica
  Peptide Sequence Number=SeqID_74666
aagcctcagtttcaacaatatggacagttgagaaactctcctacatgaagtaataaatatattggagtagagaaagttctaccacagatactgattacttcatgtaggagagtttctcaactgtccatattgttgaaacaaaggtgcagcc

SEQ ID NO: 8693 - DNA, 340 bp, Setaria italica
  Peptide Sequence Number=SeqID_74667
gggccaaggatcatgacattgaagtaccgcatgttctcctccgacggcgaggcactaatccctggcgctgcacgcatgagaagaagaacaaaagcgggatcaagcaacatatacggagagtaacgagtccagaacggtaacgcagactccgaattgcaccaaaattctcaggaaaatctcgcgaagcaaacagccaggcacctggttcgctgaggagccgctgcgtctccttgatgattcggcgcgggaggttgctgttggggatggcgccgtcgtgagtagtctgtcgcccgcgggggcgggggggcggggggcttggagaggaggacgagacgagggg

SEQ ID NO: 8694 - DNA, 476 bp, Setaria italica
  Peptide Sequence Number=SeqID_74668
tttttttatttgtttgtttcctttgttcttagttcttgtatgtacattaatctagctgggctgtgacgaaccctcatacatgtaaagtgttcgtcacagcccagctagattaatgtacatcagactgcaggacacatcataaagaggataaaattcgacacatcactagaccccttcagtttcaaatgtaaccagccaatggttgttcaagttgagctccaccacgaagattattaccaagcaagcattgcatcgtgcaaagctcactctccactggcatatagacgagtccactctttggtctgtcattcaagaacaccattgagcttaataattcgtccaaattctgaagctaaagatgaacgagattaagttactccctcacctgtttccacagcttcagtctcattagatttccagtgctttgcaacattgtcagcaagtggatcgtcaggatttggggcactgagcagcgc

SEQ ID NO: 8695 - DNA, 541 bp, Setaria italica
  Peptide Sequence Number=SeqID_74669
agatatgtttgtcaatgttcaaacaaggaaatcaatctgacttgtagttaaacctatcaccacatatcatatcaaagcttaagggtataaacaaaataaagttatagacaagcatgattagcttaagggtatagaacacaataattttataggcattaagaaattgtgtagttacctttggggcagccattggatattcctcaggtaaaaggagctcaagcttaaaaactccaccttcatagggcgactgcgccgggccaaggatcatgacgttgaagtagcgcatgttctcctccgagggcgacgcgctgatccccggcgctggctcgctgagcagccgctgcgtctccttgatgatccggcgcgggaggttgctgttggccatcggatcggggccggggcgcggacttcctcctctgcgaagttgcggcgccgctgatgccttaaggatcgcgcggtggaggaggaggaggaagcagtcggtcgagggtggggaacggggggagaggcgggttggggcgttgggcgctcgctattgtac

SEQ ID NO: 8696 - DNA, 429 bp, Setaria italica
  Peptide Sequence Number=SeqID_74670
aggcaaccacagggacaacagaaacactactataggctgatttgtcaacttcaatttacctgtttcaacagcttcagcctcattggctttccagtgttttgcaatgttatcagacagagggtcatctggatttggtgcactcaagagagcctggatactgaaagctagaaaaatgtcaagaactagctagcatgccaatgaatatgaaaggtatagggactgaacaagaacaaatgagatacagctccactaggtaggctaaaagtagaaactatgttttttgaggcaaaaacgtatgcaattgtacaatgacacacagtgacagatatagagacctcaaaagaactgttcggatctgaagtgctgggctccatttgtccttgagaatgtcaaggcatatcctaccaagcttgtcaatgttgggatggt

SEQ ID NO: 8697 - DNA, 516 bp, Setaria italica
  misc_feature (481)..(481): n is a, c, g, or t
  Peptide Sequence Number=SeqID_74671
tttttttttcaggcacacacatcttctcagcatatttattatgatatatgtataatcatctaacctcttaaggtcaagtaccagacatgccaaaggaacactttacatgtatgagggttcgtcacagcccagctagattaatgtacatcagactgcaggacacatcataaagaggataaaattcgacacatcactagaccccttcagtttcaaatgtaaccagccaatggttgttcaagttgagctccaccacgaagattattaccaagcaagcattgcatcgtgcaaagctcactctccactggcatatagacgagtccactctttggctgtttccacagcttcagtctcattagatttccagtgctttgcaacattgtcagcaagtggatcgtcaggatttggggcactgagcagcgcctggatgctcaaaagaactgttcggatctgaaagggcaaggaactaccaacactttaaaantcaaggcatatcctaccaagcttgtcaatgttagg

SEQ ID NO: 8698 - DNA, 840 bp, Setaria italica
  misc_feature (8)..(8): n is a, c, g, or t
  Peptide Sequence Number=SeqID_74672
cgacgtcncttttttagttaaagaagcaagttgaaacagaccaaacaacacctgctctgatgcttactgcagtgaagggagctagagccacaagtacaaagcataattcgaactgttgttttgttcgaacatttttccccgttgcaaaatatcgcaatttgctcgctcaagcaagtgatattcaatcgggatcaaactatgacactgttattacaaagataacaacacacttggttgtcatgccccacttgcatacaggcgagtccactctttcgctgtttcgacagcttcagcttcattgcttttccagtgttttgcaatgttgtctgagagaggatcatctggatttggtgcgctcagcagtgcctggatactcaacagaacagtacgtatctgaagagctggactccatttgtccttaagaatgtcaaggcatatcctaccaagcttatcaatattgggatggtaaattttggtgagaaatctaacttttggagcagccattggatactcctcaggcaagaatagttcaagcttgaaaactccaccttcatatggtgactgcgacgggccaaggatcatgacattgaagtagcgcatgttctcctccgttggcgaggcactgattcctggagctggctcgctgagcagccgctgcgtctccttgatgatgcggcgggggaggttgctgtgggccatggtggactgaggaggggggccttcgggctagggtttggtggtccttgggatcgcggtggaggcggagagagattgggggcaaagaggcggcgctggtggagtcgtggagaagagaaatggtcgcttgcttgcttgtgcacc

SEQ ID NO: 8699 - DNA, 468 bp, Setaria italica
  Peptide Sequence Number=SeqID_74673
cagtaaccgtcacatattatataggcataaacgttactaaaactgccagccctttaacatcaataatagaaaaatactaaaagagatgatgatactcatcgacaacaatactgcctgagaaactaaaagttgaagggccaaagtcaccgaccgaccaaagaatacagggttactatgtgttcataaactaaagcaaatatttccgaattcaccccatttctagtggcatcttttgaacagaatcgtctggataataccaatctacgccacgcaacacaaaaagggcgtcaaaattccggattagaagctcgcaccttcatagggcgactgcgccgggccaaggatcatgacgttgaagtagcgcatgttctcctccgagggcgacgcgctgatccccggcgctgcacgcacgaacaaaccaaaccaagccaaaccattcaacaaacagttattccctaaccctttcct

SEQ ID NO: 8700 - DNA, 1017 bp, Setaria italica
  Peptide Sequence Number=SeqID_74674
cgcgtccttctgccggagagggctcgagcaggaccccgctaatgaggagctcaagaaattactgtcgcaagtggacgcaaaactgagcgagcaagaacgtcaaagagccaaagttgcacaagcaatcgccgcagccaaggatcttgctgcttcagtggagaagagaggggtgaagcttggggagcctgcctatcaagaactgacaggggtaaagaagccgaagctggatgagcagggtgtgctccactggcctgttcttctgctctacccagaggtcatgtcgagtgatttcattgaggattttccggagacggacactttttcgccccaccttgatgtcatgttctcagaaagttctccaccattgccatgggatgagaaccacgcttacacaaggtataccattgagttgtattatcagggtggttttggcaaacctttgtccaaaagtgaaagattaagatatcttctagaaggcactgtagactcgaagtctcttccagatggcctacttgatggggaggatgaagaaaatgacactagccagagtagcacaattgtattgtcagctgaaggctctagtaagtggatcaaagtaaaagaagggaaaacccttcaagaagtgctacaggacaaagactttatcattcccgcaatccctgtattctttgttgtctcaagaaagaccaccttctacagagatttcaatgctggaaattggtctttgccataataaaaacggcgcatcaaggttctgttcaacatatttggaaggtggtagtggatatggtcagaaatcggaagatgcccgattgttcatcatcttggggttttaaaggagtgtacttctttcagtctccacaaaaacacctttcggtttaatttatgccaaggagtgtgtaagtgtgttcatcgagatagacggaaaagagaacgcgatgtaatgtgaattttgtcttggaccaattcagcatttggcctgaaggtagtatgatactggggtcatattcaactgaa

SEQ ID NO: 8701 - DNA, 305 bp, Setaria italica
  Peptide Sequence Number=SeqID_74675
ttggcagctgggaacttggagacaagcttgtcgacgacggacttctgcttgatgccgacggggatggcgaggaggcttttcgacagcctgcggtctttcctccggtcagggttgccacccagggattccatctcgaagtttgacatgtcctgcacgatgccccttggcaaggcctcgctgcctgaaggtctgcattggttctgcagagttttcagaataagagttcttcagtaactgctcttttactactctcaggtgttaaatcgccatgaataatatcagcaaatggatatgtttttaacctc

SEQ ID NO: 8702 - DNA, 1643 bp, Setaria italica
  misc_feature (1)..(41): n is a, c, g, or t
  Peptide Sequence Number=SeqID_74676
nnnnnnnnnnnnnnnnnnnnnnnnnnnnnnnnnnnnnnnnnaggggaaaaattcacataatctttttttattcacgcttgcttattcccttggagatcagagagggaaaaaaacaatctgtacatcatatacgagccctgctctgagctctctgaacctgtaaatatggtgtgtataatctatcatctaggcaacgtcaatgtaacagctactgactactgtacctccctgcttaagctatctcgttcccgtcggacggtcagccactcagcctttggttgcgggattcgggtaagggtcggtccagcacccgtcctccgccacggcctccttccacctcctgttgaacacctgcagctcggtgtaggacctctgcctcaccgccagccggtctgtcgctgacgacgtcgacgtggacgcggtcaccgtcgccttgccgccgtcgccgagcgtggggatgccccggtggagcacgtactggctgtcgacgacgccgacgttgcgccaccggtcgccctgcgcgcagtacccgagcttgtagtccatcccccacgcgtagatgaggtcgttctggatcatctgccacgcgcaccgccacgccgcgcgcgagaacacgggcaccatcatctccacccaccccgtgcacggcggccccgtgctgttgccgtagcaccggccgtgcccgttcgtcttgtagaaccgccggtggacgtcgcccttgcgggcgcgcgccgtgagccggtggtggatcagcgaccggcggtcgagcgccggctgcgagatctcgagcccttccctcctcacgatgctcaggtacttgagcgggtcgaagctgtccacctcgatgtcctcgtcccagaggaagatgtactcgtactctgccaccaggtccgggtgcaggaacctcttggcgaaccaccacttggtctggtcgcgcacggcgacgtggatggcgcggtcggaccacttgaggtctcgccaaccgtcgaccatgccgtcgtagtggaacagcatcacaatgaagttggcagctgggaacttggagacaagcttgtcgacgacggacttctgcttgatgccgacggggatggcgaggaggcttttcgacagcctgcggtctttcctccggtcagggttgccacccagggattccatctcgaagtttgacatgtcctgcacgatgccccttggcaaggcctcgctgcctgaaggtctgcattggttctcacagatgttgggttcctctgttggttcagcatgcaactcgctcgtcgctggaggtctgatctcctcagttgcaaacacttctttccgttgcaactgcaatatcgacaagttctccttgtgatcaagcgtgaatattgcgcctgcgacgaatattagcacgaaaaagatcagtgccgcccgtggcgcgatgctgaagaacctcttatgcgacgtatcattggagatcggacccatcgctgaaggatcatgaattcttcgagaagctgctgccgatgatgatgaccatttgcgggctggagtgagcaatccggaacggcgccgcaatcggaatttccgtgacggcgaaacagaagctggaatcggaaacgaagaagaggaagaggaagaggagtttgggatgcgaggcaccgtgagag

SEQ ID NO: 8703 - DNA, 998 bp, Setaria italica
  Peptide Sequence Number=SeqID_74677
gactcagtctatactattttttttgagcaataccaattcaactaaaacttctcaagaaagatgaaaattcacataacaaatggtaagtccaattagataaattcatatccacgatataatagcatatggtacaacagggattgttgtacatttttgtacacgagattgtgtaaaactggatattgtgatgcaaataggaaattttggaaccaattttgagactgctacatgagcacagcagcctactgttcctccttgatagcctcttgaactgctttcagaaccattggcattaaatatctatttgttgcaataatgcctctgtcacgatcaaggtatctacctttggaaaaatccaaatcatttcctgaggcatcttttaccatgccaccagcttctgtgacaataattgatccagctgcatgatcccaaactgtttctatgtaacctttctgtgaaaaacgcaagtaaatggcaccatcaccttgggccagagcaccatattttgcttggctatccattctaacaggaggagcttggacaccaagtttctccgcaatggtgctagttaaatcacgcttggagtgttctaaggattcaaagaatgaggcgtcgactggattgctgatagagcagatagtaatcttttgtggctcagatccctctaaggcctcgacttcagccccacaaccaattgtagcaaaaaagagggaaccgacttgatccccagaagaactgccattgtgcttgtttgttgattttaatggaagatttggacatcccaacacacccaaaacaactttgccctcatcaagtaatccaagtgcaactgcatactggtccccccttatgaaacctttagtgccatctattgggtccaatatccaatgccgcccagataggcctccctcagattttccaccatcaagtgcagcaagcacatcttccttagataacgacatgttatatgaatcatcatttgcaatggtttcatttac

SEQ ID NO: 8704 - DNA, 432 bp, Setaria italica
  Peptide Sequence Number=SeqID_74678
tcctaccgccccacgcgcagcctcttcgccacctccgcgctgtccatgccgccgtgggcaaagcgccccaacacccccgagtggctcacgcagcagtccaactggatcggctacgtcgccgtctgcgagtccgagcgggaggtcgcccgcatgggccgtcgcgatatcgccatcgtgctgcgaggcaccgccacctgcctcgagtgggccgagaacctccgcgcctcgctggtgcccctcgacggcgagagcagcgacggcgccgacgcgggggccgaggagcccaaggtggcgcggggcttcctcagcctctacaagacggccggggagaaggtcaagagcctgtcggaggaggtcatggacgaggtacgccgcctcatggacaagtacaagggcgaggagctcagcatcacggtcatcggccacagcccc

SEQ ID NO: 8705 - DNA, 938 bp, Setaria italica
  Peptide Sequence Number=SeqID_74679
ggggagggcggctgggcggggctcctagacccgctcgactccgacctccgccgcgagctcctccgctacggcgacttcgtgcaggcggcgtaccaggccttccactcgctgcccacggcgtcggcgaggcaccgcgggctcatgctccccgaccgctcctaccgccccacgcgcagcctcttcgccacctccgcgctgtccatgccgccgtgggcaaagcgccccaacacccccgagtggctcacgcagcagtccaactggatcggctacgtcgccgtctgcgagagcagcgacggcgccgacgcgggggccgaggagcccaaggtggcgcggggcttcctcagcctctacaagacggccggggagaaggtcaagagcctgtcggaggaggtcatggacgaggtacgccgcctcatggacaagtacaagggcgaggagctcagcatcacggtcatcggccacagcctcggcgccgccctggcgctcctcgtcgccgacgaggtcgccacgtccatccccgacgcgccgcccgtcgccgtggtctccttcggcgggcccaaggtgggcaacgccgcgttcgtggacaggctcggcagcagcggcaaggtcaacgtcctgcgcatcgtgaacgccggcgacgtcgtcaccaaggtgccaggggtggcgccgcggctgccgcacaagaaggagcagtaccaccacgtgggcgccgagctccggatcgacagcaagaactcgccgtgcctccgccccgacgcagggcccgcgtgccggcacgacctggaggcgtacctgcacctcatcgacgggttcacgggaacggggcggccattccggcacgacgcccggcgcagcgtgatccggctgctgcagctgcagagggggaacgtcaagaaggagtacgtgaaccgcgcgcgcgagactacggacgtacgaac

SEQ ID NO: 8706 - DNA, 956 bp, Setaria italica
  Peptide Sequence Number=SeqID_74680
ggtgctacacttcccctgtgtccggatgcacattcacatcaaagatggagacattggattatcttttctcagggatggaagaacgtatgttggagtctcaggaaagcgctgaggacaacgagcttcttggttctcatacatggcttccaggtgggtggttgattgaggtcagagctggtgggaagaaaatgaataaaatgtacaaggtagattggagattttgttccacattaacatcagctgtataccagttactgcactctttctttatgtccataagttgtgggagtctagtgcaactctacatagtggagatcaaaagagagttctccagtaagatgttgccagcgagacacccccatctaaaagtgagtagaaaaccaaaatagtgagggggttgatatctgcagtggcatgtttggttaggagccaaggtgatggagcatgattgcacctcaatcttggattatggcatcagatcatcctccaattttacaggatggaaatggaggatacatatcatggagggtgaggtgagtgaagccatgcttcgaccgtggatggaatgaaagaagcaatattgtctcattatgtgttgtggagactgagagtgcgaggaggaatttcccactatatggtggctttgttaattcattaaaggaaagtaacattacacacaaaaatggtcatatgggggactgattttataagaattatagaagagatatgggcatattgcatttttttttttgaattagtgtcttttgcagttctattttcacccgcctactggaatgcgattcttgtcaaaagcagaagtattgcactatgttaatgaggggaagatttctgcatccgatatggatgtgctgtgcgacacaagaactgatgacaatatacttgcacatgtggaattcaatccagatggtctaccagatggatgggtgaaagaaacg

SEQ ID NO: 8707 - DNA, 639 bp, Setaria italica
  Peptide Sequence Number=SeqID_74681
gtctgtcgtgacgatggtggctccatctaccggtgctacacttcccctgtgtccggatgcacattcacatcaaagatggagacattggattatcttttctcagggatggaagaacgtatgttggagtctcaggaaagcgctgaggacaacgagcttcttggttctcatacatggcttccaggtgggtggttgattgaggtcagagctggtgggaagaaaatgaataaaatgtacaagatacttgcacatgtggaattcaatccagatggtctaccagatggatgggtgaaagaaacgatatttagaaattgcaatgatggaatcagaaaagacccgtattacacagatcccattagtcgtcgtgtatttcgtacgcttaagtctgtattgagctaccttggcactggagaaatatctaagcatgcctacttgccaaggagaaatgtcattgacatgtattcatttgacaagtgtgtagatctgccccaaagtatgctgaaaagactaagagcagaaggacaaacaaagcaaaaatcgaggagagcactggtcttgtacaaggaattaccgaataaccagacttcaaatcactgaagttctggttatatggtattttacaagtatagaccttgcaggtat

SEQ ID NO: 8708 - DNA, 2136 bp, Setaria italica
  misc_feature (2072)..(2136): n is a, c, g, or t
  Peptide Sequence Number=SeqID_74682
cgccagtcaagggctcaaggccgcggcgtcgcggtcccgggcgcacccgccgccggacggccggcgagcccgcccccactcccctcccgtgcatgtcatccgctgtcggccccgccgcgcattccatggttgtgactcgccgctcagcgcggaggggcggcaacggcccgcttccggccggcggagcgccgtctgagccggccccagacgctcctacgccaccctccgttcccggccggcggtcacgcgatgctttgccgacagggcggcctggctgcgcaagggagaaaggcagctcggttatctctaatggttacaccctgaagcagcctgttgaggcacacaaacaggagaggcaagggaaggagactcttgttgaggaactagatgggatagatgaggatttgaggtcactggaggagccaccaggctggcttcctgatggttggatcatggaggtctgtcgtgacgatggtggctccatctaccggtgctacacttcccctgtgtccggatgcacattcacatcaaagatggagacattggattatcttttctcagggatggaagaacgtatgttggagtctcaggaaagcgctgaggacaacgagcttcttggttctcatacatggcttccaggtgggtggttgattgaggtcagagctggtgggaagaaaatgaataaaatgtacaagttctattttcacccgcctactggaatgcgattcttgtcaaaagcagaagtattgcactatgttaatgaggggaagatttctgcatccgatatggatgtgctgtgcgacacaagaactgatgacaatatacttgcacatgtggaattcaatccagatggtctaccagatggatgggtgaaagaaacgatatttagaaattgcaatgatggaatcagaaaagacccgtattacacagatcccattagtcgtcgtgtatttcgtacgcttaagtctgtattgagctaccttggcactggagaaatatctaagcatgcctacttgccaaggagaaatgtcattgacatgtattcatttgacaagtgtgtagatctgccccaaagtatgctgaaaagactaagagcagaaggacaaacaaagcaaaaatcgaggagagcactggtcttgtacaaggaattaccgaataaccagacttcaaatcactctgaaggtggcacctctgctggattaactcccaagtctgatttgaaaagaaataagtttggcactgagaaagctacagccacaaatgaaaatggatcagagactaccaaacgacgaagaggaaggccaaagaaaatcttgaagcaaacgaatgaaagcatttcagattgtgacaagagacataaggaggcaaagcacaatgaggtgaaagaggaagtggatatttgtgatgaggaagacatgccgaatgggaagactaaaaagcatactgagatgcagaagcgcactccagtaatccaggaagtgggaaacaacaataatatagcagaaagtaactcgttgaagaggaaggaaaacagatctgatttggtggccagcccgggtttgcaaaaccaagagaatggtagatcgactgaagctggtaagaaggcaacatgctcctcagttcacaaattttacaagaggagatgtagcaaccagacagtcagctcgaataaaggataaattagatcaagttgctggtgagtttcgatcctgtctccatacgatcaaagcagagggtaggtcagatgcaaataaccaatcccttgaaaattccaagaactgaaggcatatattgaaaagaatcaagtaggcccttcttcagggaacaaaattgcaaccgaagcttatctgtgtccagcttttcctcttttcctttcatttatttatgcccttatgcaagcttgcagtcgatgtggagggtgtgaagcggaaataaatcaaataatcaatttgattcttgtatcaggggaactgatactgcttgaagcaagcaggatgttaagaattgatagcagggacatcaaacaaattaaatgcaagaagttcctcattggcctgaagcaaattgattannnnnnnnnnnnnnnnnnnnnnnnnnnnnnnnnnnnnnnnnnnnnnnnnnnnnnnnnnnnnnnnn

SEQ ID NO: 8709 - DNA, 241 bp, Setaria italica
  Peptide Sequence Number=SeqID_74683
agaattgcgctccagctgtatatacacctgaactgagatatgtgtgcattgctggaaggtatcttccttcaggctaggattccaggatcttcttttctgcttccacattgatcttattattaaactttgttgtggtttgctcatcatttaccttcctgaggatgcaaaattgctaaatcgaacgtagtatgatgttctggaatgttggtgctgtcaggatcaaatttcaccaaagaaagtg

SEQ ID NO: 8710 - DNA, 1230 bp, Setaria italica
  Peptide Sequence Number=SeqID_74684
ccgggcacggcggcgacatgctcccgctcctctctcctccgcggcttggtgccgcagccgccaacggcaacgccagcgtcggcggcactgcgacgccccgcgtgtcgtcgtagtggcgcaggggctcgggaacaacacgggcgactacgcgcggctcgccgcggcgctgcgggacgaccacggcctgccggcggccgtcgtggcgcgggtgacgcgccccgactggctccgcaacgccgcagggctcttcgacgccaactactggcggggaacgctccgcccgcgccccgtgctcgactggtacctgaagcgggtggacgaatcggtgtctgaggcgagggaactatgcgcttcagatgggaagatatcattgatagggcattcggcagggggctggctcgcacgggtgtacatggaagagtttgatgcttctgatataagtttactgctcaccctaggcacccctcacttgcctcctccaaaaggtgtatctggggtaattgatcagactagaggactactgaactacgtcgagaagaattgcgctccagctgtatatacacctgaactgagatatgtgtgcattgctggaaggtacatccaaggcgctcctcttctggggaactctgcagttgcttcagatgaggtcctagcagtggacactccttcagaaggaggcgaggctgttattatcagtaccaaagacaaatctactccatcaagtgccacatggagagcccggtttgtcggacaagggtacaagcaggtttgtggccgtgcggatgtgtggggcgacggcgttgttcctgaaatggctgcgcatctagaaggtgcactgaacataagcttcgacggtgtgtaccattcgcctgtaggtgctgatgatgaacagaggccctggtatggctctccggcaatcctgaagcagtgggtgcatcaccttctcagctgagctgacgtacgagctagctacccgtgaagaatctgaagtgtgttaacgttgatataccatcagacgtggagctttttctcggcctgaaattgaagtgtcattccatcttgtgtagagtcgttcattggcaatttggcatgacagttacacagatcctgggcaatagagtgtttttggtttatttacacaatttagctgcgatcgtttgtgcaaatacaatggattagtggaatttgttactgtaaagcatcgttctatgtacagaggcttcttgaaaa

SEQ ID NO: 8711 - DNA, 347 bp, Setaria italica
  misc_feature (21)..(21): n is a, c, g, or t
  Peptide Sequence Number=SeqID_74685
ttgccggcgtccttctcgacngttctgtcgccggcgcggagcagaggttcgctgccgcgtcgacggacgccagcgtcggcgagcagcaggaggaggaggacaagggctactggagcagcattctgaatatggtcaactcgtccatgtcgtcgtcgctgacttccgaggctgtcacggacccggcgatgtacttgccggcggtgccagagttctgatcgagtagctgtcgtgcattaacgaacttgtgctaatgttactttgtcaaggatgttcctaggtgttttggttgtagtgggctaatggttgtcgatgtggtttggtttttatgtgcaataaacatgtactga

SEQ ID NO: 8712 - DNA, 423 bp, Setaria italica
  Peptide Sequence Number=SeqID_74686
cttgcattgaaagaagggttgctggttggaatctcttctggtgcagctgcggctgcagccattacgcttgctaagaggcctgaaaatgccggaaagctatttgttgtaagtgttacatctcctccccatgaatttctagcacttgtaggtttacagctctttcaattgcatgggtcagttatggaaatttatctgatcgttaatgaaacacaaatgaacacatctactctacatttgaacattattgccctataggaagacaaacaaaatttgcccatgcaacatatgtacttctcaattcgtgtggcagacaaatgaaatatgaaactaaaatgcttcaataattgaagggaagattttacttgcagcagtttagatagtgtcccattactatggactgtggttcacatttgcatcctatgg

SEQ ID NO: 8713 - DNA, 445 bp, Setaria italica
  Peptide Sequence Number=SeqID_74687
tatttggatagatgtgtttgaaataattatcagatggctaataggtgatgtgaacttgtaaggaagcttatgttttggttcaacaatacaagtaaagataaccttggaaccattttgcactaacaaaatattcttgatgctgcttgttttggactcatttagattaaatgcccataatgcagggccacacaagattcaaggaattggagctggttttattcctggggtcttggatgtcgacctcattgatgaaactctgcaagtatgttctcctctattaaattggatcgtagaaaggacatattaactctgatctcaagtatttaagtccatttgagattgttgattcaacctttttagctttgattatcaatatctaaagaaagaaccatatagattggtatcgctttataagattggtgctgctagattcatcacgaaaaac

SEQ ID NO: 8714 - DNA, 299 bp, Setaria italica
  Peptide Sequence Number=SeqID_74688
gttccagaaaaccccctctcctccccccgcagcaaggattcctgcgccaaatccgtagctgcgtgacccaatgggagaggcctcgtcgccgtcgatcgccaaggatgtcaccgagttgatcgggaacacgccgctggtgtacctcaacaaggtgaccaatgggtgcgtcggccgcgtcgccgccaagctcgagtccatggagccctgctccagcgtcaaggataggtgggctcttctcttcttctacaaagctttctcactccttatcctttttactgtacaacgggtgatggattatg

SEQ ID NO: 8715 - DNA, 1259 bp, Setaria italica
  Peptide Sequence Number=SeqID_74689
tattatttgcattggttaggacttggtcatgtgaaatatttttgtaaatggagatttaaaaggtgctatttggatagatgtgtttgaaataattatcagatggctaataggtgatgtgaacttgtaaggaagcttatgttttgggttcaacaatacaagtaaagataaccttggaaccattttgcactaacaaaatattcttgatgctgcttgttttggactcatttagattaaatgcccataatgcagggccacacaagattcaaggaattggagctggttttattcctggggtcttggatgtcgacctcattgatgaaactctgcaagtttcaagcgatgaagctattgagactgcaaaggctcttgcattgaaagaagggttgctggttggaatctcttctggtgcagctgcggctgcagccattacgcttgctaagaggcctgaaaatgccggaaagctatttgttgtcgtgttcccaagctttggtgagcgctacctctcgtcggtgcttttccagtccatcaagaaggaagcggagagcatggtggtcgagccctagagcacacaattccagcagctattttgagagagggtctccattttcactgaaataaagattcggtgcctcttacttttgctaattaaagcatacatctgtctgtcgatgtccagttcagtgtggccatgttcattgaagaataacatcgtttgagacttctgtttacagttggacattctccctgttctgtatatcgcatcagccagtgtgaaataaagcgttacagtgtgttctagggctcgaccaccatgctctccgcttccttcttgatggactggaaaagcaccgacgagaggtagcgctcaccaaagcttgggaacacgacaacaaatagctttccggcattttcaggcctcttagcaagcgtaatggctgcagccgcagctgcaccagaagagattccaaccagcaacccttctttcaatgcaagagcctttgcagtctcaatagcttcatcgcttgaaacctgtgaaacaattgaaggcacaaaaaggtgatgccatggtagaaggtgaattaaaagacacacgagtgcgtgaaaatgtggatcaaccacaaacttctgttaatggttggggttgggggaggagtagggtactgtaaccaaaatgagtaaaaaaatagtgtgcttgtttacgcatttcatctgatccagaaataggtctctaacgacattaacatggtctccaatttaac

SEQ ID NO: 8716 - DNA, 2551 bp, Setaria italica
  Peptide Sequence Number=SeqID_74690
agacgacgggacccaaccaacgaagaaggagaaggaggagctcgcgcgggaggtcatggagctcggcctccagaatgagtacctcaagtcccagatagccggcgcccggccggcgggcggcgcggatgagggctcggagctcgtcaggggcttgaaggagcaggtggagaagctgaccagggaggtgcaggagcagcggctgacgcgggaggccacggagaaagccctggagcacgtcaacgtggcctacgccgaggccgacggcaaggtgcaggggctcaccgccaagctcgcccaagctgaacagaaaatggaaaaggaactaaaagaacgtgacgacaaatatgttgagctggacaccaagttccagaggcttcacaaacgtgcaaaacagcgtatacaagatatacaaaaggaaaaagatgacctggaagctcgatttaatgaagtcaatcagaaggctgagcaggctgcttctctgcaattagcggcacaacaagaactggaacgtgctcgtcaacaggctagtgaggccttgcggtcaatggatgctgaaagacagcagttgcgggcagtgaacagcaagttgagagctaaccttgatgagacacgtctcaccttggaggccagaaacaattccctcgagaaactgcaacaatcagtgcttgaaaaagagcagttgctagagaaagttcaaggatcccttcaatctgctgaagataagaggatgacaataatttcagagctcactgctaagcatcagaagcaattagaaagcttgcaggcacagctagcagaagtttctgcagaaaggacgaaggcatctgaaaccataaagtctttacaggcggtactaacagagaaagactcagaaatagctgaaatagaagcagcatcaacgggtgaagctgcccggcttagagctactctggaggaggttaaaggggagcttgctcatctaaaggatgaacacgaaaaagaaaggcaaagctgggaggctacttgtgaatctcttaggtcaaagctggaagcatcagaaaatgcgcgccttaaatctgaaatagaatctacaaaacttaagagtcaattggagttagagttgtcaacacaaaatcagctgttacaaaccaaagactctgatctaatggctgcaaaacatgagattagtcgtctggaaagtgaattttctgcgtacaaagtccgggcacatgcacttctacaaaagaaggatgctgagattaacgcagctaaaagttcagatttggttaaagaacatgaagaggcaataagggaagctgaaaaggaggtggcagctgctttggcagaacgagataaagcaatccatgatcttcaagaagctcaatccagacatgatgaagagattgaggcaagagatatggcgcttgctgatgctgagaaaaagctaaagaatgtaatgaagaagttagattctgttacttctaatttcatcgtggaaaaggaatcgtgggagaaaaacttggcaaatgtagaggaaaactggagattgaaatgtgagtctttgaaggctcagaccaatggccatgttgatgatgaacttcaaaagaatttaggggagttgacgctaagatacgagaaactgaaggaagaacatcaatcattccgtgatattgctgatagaatgattgaagacaaggagcaagaaatagctaaactcctcgaggaaaacagggatcttcacctttctttagaggctaaaccagaagttagcaacactgatcatcaaagtcaaggacctgtcaaggatacgatgagtgttgaattggctgagcagcaaattctgcttcttgcacggcaacaggcgcaacgagaagaggaattggctcagtcacagaggcatatcttagcacttcaacaagaaattgaggagctcgagcgtgaaaaccgtcttcatgatcaacaggaagcaatgttgaaaacagagcttcgcaatatggagagatcacaaaagcgagaaggaatagatatgacatatctcaagaatgtgattctaaagcttcttgaaacaggggaagtgggggccttgctgcctgtggttgggacactactacaattcagtcctgacgagctcaagaagtgccagcaaggtgtcctctcaagtgtggcttcttcacaagctgctgcggtgtcagatggcgcaaccacaccgaattcattcttttcaagattctcgttctagcggaggtatgggccattgctttcgaagattcacacaatcaaagccgggggaggggatgttctgagcctacagatccacagttttgctgattgtagaacatgcttattcatttattatttccaggcgttccttccccttgtcacctttgtaaaagtagtgtatatagaggtataactacttgttccacagcgagtcaagataaaaaatgtaacgaaggatgaattgtgggactggcatatatagcatctcatgttaggttgttggggggaatggtttatcgactgttgtataaattttgctgaacattctgaggatccaggaatcatttggaac

SEQ ID NO: 8717 - DNA, 1526 bp, Setaria italica
  Peptide Sequence Number=SeqID_74691
ttcagcaccaaaagccttcaatatgattctcctctccatgctcatggaagcaggcctcgtgagtataagtttgtaacccttggcagcagccataaaggcaagtccaattcctgtattgccgctagtcggttccagaaaaccccctctcctccccccgcagcaaggattcctgcgccaaatccctgcgtgacccaatgggagaggcctcgtcgccgtcgatcgccaaggatgtcaccgagttgatcgggaacacgccgctggtgtacctcaacaaggtgaccaatgggtgcgtcggccgcgtcgccgccaagctcgagtccatggagccctgctccagcgtcaaggataggattggctacagcatgatcaccgacgcagaggagaagggcctcatcactccaggcacgagtgtgctgattgaaccaactagcggcaatacaggaattggacttgcctttatggctgctgccaagggttacaaacttatactcacgatgcctgcttccatgagcatggagaggagaatcatattgaaggcttttggtgctgaactggtccttactgacccactcctgggaatgaaaggagctgtcaaaaaggcggaagagattcaagcaaagacacccaactcatacatccttcaacaatttgaaaatcctgctaacccaaagattcattatgagaccacggggcctgaaatctggaaagctacagcaggaaaaattgacggccttgtatctggtattgggacaggaggaaccataactggaactggccgatacctcagggagcaaaatcctaatgtcaagctctatggtgtggagccagtagagagtgctattttaaatggtggaaaacctgggccacacaagattcaaggaattggagctggttttattcctggggtcttggatgtcgacctcattgatgaaactctgcaagtttcaagcgatgaagctattgagactgcaaaggctcttgcattgaaagaagggttgctggttggaatctcttctggtgcagctgcggctgcagccattacgcttgctaagaggcctgaaaatgccggaaagctatttgttgtcgtgttcccaagctttggtgagcgctacctctcgtcggtgcttttccagtccatcaagaaggaagcggagagcatggtggtcgagccctagagcacacaattccagcagctattttgagagagggtctccattttcactgaaataaagattcggtgcctcttacttttgctaattaaagcatacatctagtactagtacgaatgtccagttcagtgtggccatgttcattgaagaataacatcgtttgagacttctgtttacagttggacattctccctgttctgtatatcgcatcagccagtgtgaaataaagcgttacagtgtgtttcatgcctgaatccttgtttgtagatttcttgtggaaatcctgcaacaatgaactcgtctaagacgtgccaaattgttgaattagttgaaaattttcatcccagaattgcaatt

SEQ ID NO: 8718 - DNA, 314 bp, Setaria italica
  misc_feature (249)..(314): n is a, c, g, or t
  Peptide Sequence Number=SeqID_74692
tcgtccgtctgtcggggggccgaagagaaggccgccgcattgcattcgttcaattccctctctctctaacaccggcaagaaaccaaaaaaaaaagtactgtaacaaatgattcgattcgtctctcgtttaccaccgtatttttccaatggtaaacccgttaccagtgtctgtagtagaagtccggtcgctgcaggggacagtgaacctcaataaaaatgtcataatctttcgtcgtacaaaaaaaaaannnnnnnnnnnnnnnnnnnnnnnnnnnnnnnnnnnnnnnnnnnnnnnnnnnnnnnnnnnnnnnnnn

SEQ ID NO: 8719 - DNA, 236 bp, Setaria italica
  Peptide Sequence Number=SeqID_74693
acttatgatgggaatgcctagaatgtgcctgcctgtattggtaaatgcaaatattgaaattactatatcctgccgtatttgtacattattacatatttgtactgacaactgatatcctgcaatatatggccgtatttctactgataactgatccctcaaccaatactgctggtatttttatgtgcagaaatcatttgaagatgtgatcgagtcgattgagaaggctaaaaaggatg

SEQ ID NO: 8720 - DNA, 479 bp, Setaria italica
  Peptide Sequence Number=SeqID_74694
taactaaattgtaattttttactacatagataattggcacataacctgaaaagttggtacaggaaattgaaaataatgagtggagtataaaaggattgccatttgggaaagacaactacatgatttctatttcatttcactgatacactatggcagggagggagatgtgagtaataggagcagatgcacctgggcacatgaatgctggatgcacaggagcaacagagatggtcggaggagagaatgggttgaagtccttgctgaggaggttgcacacactggtgatgccttcagcagcacgtcccgctgctgcacgacgtctcacctcctttcggagcatagcaatacttggcccttgtttacttccctccaaactcccaactttgacactatattgaagcgattctgtcgcaggctttgatccagatgagctgaaattattgctggaaagcacccagagccgtaggattaccatctga

SEQ ID NO: 8721 - DNA, 769 bp, Setaria italica
  Peptide Sequence Number=SeqID_74695
gtcatttggggacaaacatgtattgagaggtgtcagcttcaagattagacatggtgaagcagttgggataattggaccttcaggaactggcaagtcaactattttgaaggttatggcagggctgctagctccagacaagggtgatgtaatcatttgtggaaagaaaagacatggattagttagtgacgaggatattgagggtctccgtattggtttggtctttcaaagtgctgcactttttgattctctcacagtccgtgaaaatgttggattccttttatatgaaaattcaagcttacccgaggaccgcattggtaaattagtgacagaaactttggctgcagtaggactaaagggtgttgaagatcgcatgccatctgagttgtctggtggcatgaaaaagcgtgttgctctagctcgttcaataatatttgatgatacaaaggatgtaatcgagccagaggtccttctatatgatgaacctacagctgggctcgacccaattgcatcaactgtcgtggaagatcttatacgttccgtgcatatgactggacgggatgctgtaggcaagccaggaaaaatagcttcttatgttgttgtgactcatcagcatagcacaataagaagagctgttgatagattgctgtttcttcatgaggggaaggttgtttgggaaggaatgacacatgagttcacaacatcaactaatccaattgttcaacagtttgcatctggtagcttggatgggcccatacgatatttctgaaga

SEQ ID NO: 8722 - DNA, 521 bp, Setaria italica
  Peptide Sequence Number=SeqID_74696
aagcaattcagcaagccttcgacgtggaacgagcggcgtgtcggtcgcttgtctcgccaaaccggcgatacagcggcgagcagggaggacgtcgcgtggcgccgcaggtctctccccgacgagcggcgccgcccgtgcgccgcgcctcccccaccccccccaccccccaccgcgccgttctcgcggcgcacgagcgcctctaaatacggcccccaggccagccaccgagcgacgccaagccaatccccgcggcacgcacgcacgcacggaagtcaattcgggcggcgcgtgcgggagagtaaggcctgccggcttcggcagctgccagcggggacgagatggcggtggagatcccggtggtcgacctgcgcctcgccggcgcggcgccggaggagtcggcgcgcctgcgggccgcgtgcgagcggctgggctgcgtccggctgaccggccacggcgtgccccttgagctcctggccgagatgaaggccgccgtgcgcgcgctcttcgacctccccgacgac

SEQ ID NO: 8723 - DNA, 484 bp, Setaria italica
  Peptide Sequence Number=SeqID_74697
gtgtgccttggctagttctcttttagtttttttttttttttttgtacgtggaaacattagcactttattaggaaacttatagttccacatttatcgacggtacaatggaacactggaactgagcaacaactttgattgaggtacacttaaaagccactaagcagattcttcttctagatggccttgagaggatcaaatcttttggcaaaggccccagaaggaagatccgcctaatcaatggcaaacgttatgcgaacccagttttccattccaagaacactccctgggcacaaaatcactgactcttcttttgccagcttgcagcaaaaatcaatgtcatcatggatcccctccaaaaagaataataaaattacaagacttacaaccaataacaaacaaaaacaaataaggaaaaccttaactaaggaaacttaaagtaaagaaaaggaaaacaaaagaaaactaaaactaaacaaacaaacaa

SEQ ID NO: 8724 - DNA, 1305 bp, Setaria italica
  misc_feature (1)..(10): n is a, c, g, or t
  Peptide Sequence Number=SeqID_74698
nnnnnnnnnntttggtctagttcccttttttttttttttttttttttacgtggaaacattagcactttattaggaaacttatagttccacatttatcgacggtacaatggaacactggaactgagcaacaactttgattgaggtacacttaaaagccactaagcagattcttcttcttgtgcctttggcaaaaagatttgatcctctcaaggccatctagaagagaagatgaatcaatggcaaacgttatgcgaacccagttttccattccaagaacactccctgggcacaaaatcactgactcttcttttgccagcttgcagcaaaaatcaatgtcatcatggatcccctccaaaagatataaattcagcttcaccatcacaaacatggaaccttctggcttgtgaggacaggtgatgcacttgatgtcctttatttctctataacatatctctgatgtttcctctagcaaaccaatgatcctcttgaagaattcttcctttgtgttctcaagaatttgtggaagtgctccctgaatgaaagttgccggatcagttgaaacattaaggaagtttgtgattgacgtaagaatcttagtttcttgaagaatcttcttgggatcacatgcagcaacccagccaagtcgccatccaggcactatccatctctttgagagtgatcctatggtcaaaacaggggcaatgtgcccaaagacacccattgggataaacggggagtcaccgaaaaccagattgccatatacttcatcagcaatgactaatattccaagcttccttgctacctctgcaaccttggctaaatgttcacgggtgtacacactcccacaagggttgttggggtttatgatgaccattgcggtggtgttcttgtcagcaatagactccaaagagtcgatatctatttcccaccctctctcagggatcagatcaaaatggcgaacttctaagttgttcaacgccgcgcgcgcctcatagttaggatatcccggtcttggaagcaatatgttggtgcccggctgggccaggactgagatcacaacctcgatggcctgagtgcctcctgccgtgagaaagatgtcgtcggatgatagctcgtatggaagatcactcgacaggtgcttcgccaaagcgcggcgggcgtcgggcaggccgacgccgggcggggtagcagttgagcttgcccgtccggagcgcggcggcgacggcggcctcggcctcggcggccgtgcggaacgcccggaacgtggaaggggtcccccgtaagcgagcggcagcacgggccgcg

SEQ ID NO: 8725 - DNA, 1581 bp, Setaria italica
  Peptide Sequence Number=SeqID_74699
ggccgtgagctcccgcagcttcccgggcatcccctcctcatcgcaaggaggatgcggctgccctgctgcgaggaagtacacggggatggtggaggactgctgctgcgaatatgagacagtggactccatcaatgaggaggtcctgcatccgatcctgcaggaactcgtcaagttgcccttcttcaggtacttcaaggttaaattgtggtgtgactgccctttttggcctgatgatggaatgtgccagcttagagattgtactgtctgtgaatgcccagataatgagttccctgaaccattcaagaagccttacagtggactttctccagataatatgatatgtcaagaaggaaaaccacaggctgctgttgataaaaccctggacagcaaggttttcaaaggatgggtcgaaactgacaatccatggacatctgatgacgagactgattttaatgagatgacttatgtgaatcttcaactgaatcctgaacgttacactggctatactggtgattcagctagaaggatatgggactctatttacaaagaaaactgtccaaaatatccctcagaagaactgtgccatgagaagaaggcattgtacaagcttatttcagggttgcactcctcaatttcagtgcatattgcttacgattatcttgttgataaatctactaactcgtggggacaaaatcttcctttgctatatgaccgtgtcctgaagtacccggagcgtgtccaaaatctgtacttcacctacctgtttgttcttcgagcggtgacaaaggcagcagattatcttgagcaggctgagtacaatactggcaatcctgaagacgacttgaaaacacaatctcttgtgaagcagttgctttaccatcccaagttaagatctgcatgtccaaaaccttttgatgaagcaaaactctggcaaggcgagaatggtcctgagctgaagcaagagattcagaagcaatttagaaacattagtgcaattatggactgtgttggctgcgagaaatgccgactctggggaaagctccaagttcttggtctcggaactgcactgaaaattcttttctccgttgatggagacaaccatttgaatcagccattgcagctgcagagaaatgaggtcattgcattgttcaatcttctgaataggctgtcagaatctgtgaagtttgtacatgaaaaaggatcatcaattgaagaagtgattaaggagcagaggcctccaactgttcaaaagggtgcttccaagccgaatcttaaactggacttcctctgagatgttgtaatttgtagttacatgcacatgccggccatgtatcgaaagattaacatgtacatgttggaagcagtttcctatatggttctgtcgcagctctatagaagagaatgagagatacagacccttgggactcgggagctaaatacaatgacggagttaacccagtttttctcgtccattttggtgggctccggcccttcaaattttccatgtatagtttatacctcattggttgtaaggatctcaccgactttgcatttgccatgatcaagagaggataattaaca

SEQ ID NO: 8726 - DNA, 519 bp, Setaria italica
  Peptide Sequence Number=SeqID_74700
tgtctgaaaagggcaggtgattgtgatggcatagagttagtgtcaagtcctgctaccactgaatatgaggcaggtcatgatgtaggtcaccctcttggtcgattatttgtttcctcaaggcgaggagcatacctttccataactgaccctgcagctgggcgctgaggtcccaaggcaaatgtataattcgatctagctccatactctctattgcgcccaccatatgctgctccccgtccttccacgctgacatctgggtgaggttgatatgtgccattgttgctgacctggaaggggggataaatagaggaaggatcaaatcccattgcacggtattcaccatgcatgaaattgccgcgctcatcatatccccgaaagggcaagttgttcacattccttgaatagtctacatcctctggtcttgctggacaataaggaggaccgtgccatccactggtaaaatattcctgatttccagggtcgaaacagggactgttccatccaggaatatcattgttt

SEQ ID NO: 8727 - DNA, 298 bp, Setaria italica
  Peptide Sequence Number=SeqID_74701
ggttggactgagtccatctccctcgacactgacctctcagtgtcgccaaggaacactcggccattactagagttcctgactaatggctcagagcatcacaaaaggtagtgcacaacgagtattcctcctcctaaacctaatccccaatgcaaacaatatacgggggcccaagaatgcagcgcgaagggggagaggttcccaaccttcaggcaagcgcgagacggcaagaggagaaccgagatttgcttcgccgcctagcccccttcttccccccaagcacgaattgccaccggagacc

SEQ ID NO: 8728 - DNA, 522 bp, Setaria italica
  Peptide Sequence Number=SeqID_74702
ttttaattttcaggtttttctatatcatccttcaatctttgtttacaatgcaaacacacaagaaaacaaagaggataaaatgatggccttatcagggcaataaagatatccaatgcatagtctaacagtcacaaaactgaatcgagattacaggagtcaacagtcgatcattcagtatcaccagagtgccggggaaaaagaaaagtcacagtcaaaacaggtataagctcatatccagccaagtgactgtctaatccctgagaaaatcagtcccaatgatcttccaatcatggacacccagaagtaggacactgctgcgctcactttgctgacagcagcccttacgaaaggcattgcaatatctgacaactctaagaacaggctgatgtaatacctccatccagttaaagctcttaattccttcgtccttcttgctggaagggaaaatggactgatgttaacataatccagaagagcaggcgcactaggctttctgaatgaaagcctccaatttgtcctctt

SEQ ID NO: 8729 - DNA, 2317 bp, Setaria italica
  Peptide Sequence Number=SeqID_74703
tttttttttttttttctaatgaattccagcaattttcaggtttttcatatcatccttcaatctttgtttacaatgcaaacacacaagaaaacaaagaggataaaatgatggccttatcagggcaataaagatatccaatgcatagtctaacagtcacaaaactgaatcgagattacaggagtcaacagtcgatcattcagtatcaccagagtgccggggaaaaagaaaagtcacagtcaaaacaggtataagctcatatccagccaagtgactgtctaatccctgagaaaatcagtcccaatgatcttccaatcatggacacccagaagtaggacactgctgcgctcactttgctgacagcagcccttacgaaaggcattgcaatatctgacaactctaagaacaggctgatgtaatacctcctgcagttgaagaggagtacaatgttatttttcttagttctggtataatacaaatgacaatttcttccagtcatctcactgtgaatgtctatctgaaagtttagtcgcaagtacaataccttttgtaacacaaaatagatacgtggcattactctaaagatctcatcttttccttttcttaactacggtgcttctgtagtttcgcaagactaatactacctagttgttctttcaggataactgaaataagttaatgaggtacttgaaaattcacaatccaggtcgcatgtaaaatatttcaaacttttaatgaaacaaatagcatagatcggaagaggctcgggcataccatccagttaaagctcttaattccttcgtccttcttgctggaagggaaaatggactgatgttaacataatccagaagagcaggcgcactaggctttctgaatgcaagcctccaatttgtcctcttagcttgattatctgctggtttttcaccttgttttctgcatagaacatatagctcaaacctgtcttcgtacattgaaacaactgactcgaagtattggtgcaaccaccaattaatcgccacctcattgcgcagcttttgaagttccctggttgacagagaacatagagctaagctggaactaacaacttcagtagacatatcaccatcaactgacataagctccagataaatgctagcaatcacatcagctaaggaaataaccaggtcctccaaaattcgtgctccatgttcagcaagaaatttagcatcaaaacagctgtcggaccttgcagaaccaaatcttaggaaaaagatcagatccaaatagagttcagatttcccaaatctgttaaacctcttgaagatcctatcgtcctcccttattttgctgcttatcatcttcataagtttttcattgatttggccattttccaaggcctgttcttcttcaatccatttcacaaatgctggttcaatcaaaccatctatcaaggcagttgatacttgcaaccacctgattccatcgacaatttcagaacttcctgagatatttcttacctccatttccaggagctgaaatgtgatcagaagaagccgcaacctgggaccaccatgaatggcaagcatactcaaaggatagtttttcctatcactcatgagttcatcctctctgctatccaaacttgcatcttgaacatttgcttgtaaagcttcagaaagtttagctctcacttcactccacatatccctggggtcaagcccagcattcctaccagaatcagaggagcttggctctgtaatatgttgattaacaccctgatttctggcacgaggagatgtgttcccagaaggtacaactccagccaaatacgcaaaaatcatgctgatagtgagaagagcttcatccgaaatcagcattaaacttggtgaaaccatgctctcagaatccatcagcgactgcaagcgaaaacattcaactgaagtttccaccctgtgacccctgccatgaaaaccaaagtgagaagatgcagcacttttcggttcccttgctgcattggactggaagggaaggtgaatcttgtggtcgtaattcctcttcggcattccaatcgaaacactacttgggtacagcttgctgttggactgagtccatctccctcgacactgacctctcagtgtcgccaaggaacactcggccattactagagttcctgactaatggctcagagcatcacaaaaggtagtgcacaacgagtattccttcaggcaagcgcgagacggcaagaggagaaccgagatttgcttcgccgcctagcccccttcttccccccaagcacgaattgccaccggagaccggaccaagctagcaggaagaagactcc

SEQ ID NO: 8730 - DNA, 286 bp, Setaria italica
  Peptide Sequence Number=SeqID_74704
acttttgaaagtagctagtaaaagccaacctgagcttgtttgtgcatcatgaagtgactgttgctgatcatatgcagaagttactgaagaagaagctgaagaaaaattgcaagacacaatcaaagagagattttcatcgtttggggaggattaccatgctgtggatatcttattggcagagattgatgtgtatgaactttttgctttcaagcattgtgttggaagaagggtgcaactttcccttgcaaagacttgatgagaggatgcgtgacctgaaaaatgaatt

SEQ ID NO: 8731 - DNA, 809 bp, Setaria italica
  misc_feature (809)..(809): n is a, c, g, or t
  Peptide Sequence Number=SeqID_74705
aagaacttaaagaaacttaagaaacaaaactaacttaacctagaaccttacctaagactagtactttttagttagacttttggtttcttctaacgaccaaggaggccaaagcctaagatcaactgaacaccggagtcggctcgcctatcggcgactaatgagcagggtagagttcttgtgaatatgcacatggattacaggcgatgctggagcatgacaagggaatttcaaggttcaaaacacagaaaacaactgcaactgcaagacatgtactgcatcaggggttctgcatcttacaatattgccgcgctcccaagatgtagcagggcttaatcgtcgcgattttatgctgcgaacgtcaatttgttagtgctgtaatgtaagtcattcaggcaaacagaaagagacagaaagtagactgtatcgtagcagcattaacggcttagaaagaaacgcgttctaccattttagaaaatggaatcaaaataaagtgtaacttgatacgaatagtacagttagatgtgctcggaagaatgctgcttccggtgggagcacatgcctatgacacctagattagcaccgattcaagctctggcgtggttccgtctcgtctgttttgggcagggatgaaaacggaccatatacgaacagatgtatatggatacgaatacagataacttttttgttccgaatcaaatatggatacagataactttttttttccgaatcaaatatggataggaatagtgtcaagatttatcgaataattcagataacttttttttccgaataacaaaaaaaaaaaaaan

SEQ ID NO: 8732 - DNA, 343 bp, Setaria italica
  Peptide Sequence Number=SeqID_74706
tccatcgggctggacgaagcggccaagagcctcggcgtggagaggcgccggatctacgacattgtcaacgtgctcgagagcgtcgggattcttgtgaggaaggccaagaatcgctacacctggataggtttcgatggagtcccaatggctttgcgagaactcaaggagagggcgttaagagagaagtctggcttggctcctctgcaaactgagcagcaatctgcttccactatgtctgacgacgaagacgatgataagttgggcaatccggatggtgatatcgagaacgagaaactgagtcagactatggacaatccttctgataaacctggtgcaccccgtt

SEQ ID NO: 8733 - DNA, 1340 bp, Setaria italica
  Peptide Sequence Number=SeqID_74707
tcattccaaactaatcaaatcagaccttatggatacaacagttcagatttcagttgtgtatcaacattcgacccatagaaaaagaattattgataactagcacaagtcagaaagaaaccaggatgtatagcccaacaagtcagagagccaagagacataatacatgtccgtgctaagtcaaatagacttgcacagcgcagcttacaaaagcctttccagatcaccttcaaaaattcgatttattcctactcaaatttaatttcagttcacagagagctaaacccggcgttgttttgggagtcggcagccattatgtggaagttgggtgacatcgtggatgtacatgataggagattgatctctaactctttcccctcggaagccttccctaaagcccaagatcaccttcttcttcttcttgaaaaaagaaattcctttcactttcatgacaacggaccttaaacccatcttcctggcagaccgcccgacatgttcggcggttgcttcagcagcatatcgagagagacgagaccgcccttttctgtcctccaaacaaccagcagaggctccagtctttttattgccactagcatctgtcaccgtcacaaaggtcttatttttcttcagtaagacatggataaaatctctcttcttctgtgaatattgttcacgttcactaaacatacgtgaagcaggaaattgaaagcgccccccaaggttggaaggtttctctccaccagctgtcttcgacattgtcccaccattatctgcattattgaagttgacctgtgtattagaacgtagattctgacgcacaaaattgaattcgttcaaattctgatgtggcttccattctgcagcaaagtcacgcccagaaggcgggaaattcttgttcggtccaaatgcatccgaggtgaagcagcgcgggaggagctggccgtggagcagccttcgcgtgacatatccatctgaggcttgccgaaggccctccccaagagatgcagctcgtggcgccgccgctagcgaccggcggagggcgaggtgggcggatgagaagatggccattgtcctcgatctcctcagatcggcgagcagatcgatgcggccgtaggggaagggctggaggcggatccgcggctcgccgtcgtcgatgtcctcggggcagcacgccggcgtctctgtactcgaccggacggaggggagcctcgcgcgtcgggcggggcggggcggggcggcgggcgaacggagcagcggccggaggggagctgcgcgggcctaaggagtggggcggagtgcgcgtaggggggcgacgggcgcggccgtcgcgtgcctggtgcggc

SEQ ID NO: 8734 - DNA, 221 bp, Setaria italica
  Peptide Sequence Number=SeqID_74708
ccgacccactctccttgctgccaaccaagcacgcacagccacagccataccacaccaagtcaaggagaaggtcatggccggcgtgagctcatccagcgtcgtcgggctcaagcccgccgcggcggtgccgcaggccgcctcggcggcgaagcgggtgcaggtcgcgcccaaggagcgggccgccaggccgagcagcgcggcgctgctcggcctggcggcct

SEQ ID NO: 8735 - DNA, 493 bp, Setaria italica
  Peptide Sequence Number=SeqID_74709
aaactaaacctttaaactaaacccgtaagaacgaacttactactaccctaccctactacctactactggccgtgtgggcccgagatgcagtggttctcctccggctccgggccctcctcggcggcgtcctcctcctcctcctcccagccgtcgctgctcgcggactggaactcctacgccgccgcccgctcctccgaggacgcgggcgatgggttcgggatcgacatcgaggccgccgtccgctccgccaacgaccgcgtcgccggcaccttcggcgtggtctcaaaaggtgttaaagggttgcctggcagctttaagtccacaacaagcagtgttccatctggcagatctctcatgtattttggtctatttcttgctagtggcgtattcctagttttcattgcattcacgatattcctgccagtcatggtgataatgcctcaaaagtttgcaatctgtttcacggcgggatgtgccttcataatcggatcat

SEQ ID NO: 8736 - DNA, 551 bp, Setaria italica
  Peptide Sequence Number=SeqID_74710
ctctcgccttcccgaacatcagcagctcaggccaccagctgctcactcactgactgagcgcccagcgcccagcggtagagcaaggaagcaaagcagaggagcaatggagtacggctacccctacaacggctgcggcggtaacaaggagaagaggccgccgctcaagagggggcagctcaagctgcagatcgcaaggaccctgctgggcggcctcgtggtgccggccggctccaagaacagggatcgcagcttcgggagataagcagagctagcagtagcagctagctgtgtagatgcatctgtggtacttgacatagagagtgttgtttgtcctcaattcggcggtgcctgttgcctgctggtgccaagttttgccccttggatccccttcccctttcgtgcgctcatcttcaggttcttggctcctggaacacgcagtttttagggtcctgtgaatcgatgtagagagaaaaggactccttgctgttcttgcgttccaagttctaagagataacttataacatggtttcgatgagttatcagttatggtg

SEQ ID NO: 8737 - DNA, 227 bp, Setaria italica
  Peptide Sequence Number=SeqID_74711
agaagaagaagacagcgcacactccacctgcagcctgcgcactgccgagagcaaaggcggctggtatttttcctagcaccagcagttgattgcttggcatcgttatcaccagcgcacgctcgcgattgggtccttcgtagttatctctagaagttggaggtggaacagcggaagcagcaattgagagagagagagagagagagagagagagagagagagtgttgtgc

SEQ ID NO: 8738 - DNA, 457 bp, Setaria italica
  Peptide Sequence Number=SeqID_74712
ggcgtccgactcggcgcggcggtcgctccgcgcccacggcctgcacgtgccgccgtggcgcaagacccggtacatgctcgccaagtggctcgggccctacaagcggtcgaccaccacctcgccggcggcaatgccgatgcccggcgccgccggtctggacgtcaagtgccgcgccgtcgggttcttcccgcccccggccgccgcgccggcggcgaggatcaagtagctcgccaccttcacggcgttctccggggagagatcatggaaaaagagatgttctttgtagaaaaaagagagatttttagtgcgcgagagttccattttgactttgagttgctctcgaacttttttgtacagggatttttgttcgagattatcaagagcgcaaattgttcttgcacaccactttgcttttaaagaaaaaaaggtggcacgagaaatcattaaagtaaaaaaa

SEQ ID NO: 8739 - DNA, 281 bp, Setaria italica
  Peptide Sequence Number=SeqID_74713
ctgaaaccgcaaaccccaacgccgccgccgccgccgccggagatggcagcgtatctgagcatgggcgaggcgcaccgccgcatcggcgactatctctcccgcgtggtcaacgcaatctcctcgtcggacggcgccgcgctcgcctccctcgtcgccgtctcctcagcgcccggttccaccccgctctccgacgccctcgccgccctcccggacttcccgcgcctcgccggcgaccgcttcccgcacctagccgatttcctcgtccccctgctccgcgccat

SEQ ID NO: 8740 - DNA, 928 bp, Setaria italica
  Peptide Sequence Number=SeqID_74714
aaaccagtaactgagatttagttcaggtaacaaatgtactaagggagccaatacattacaaggtgaaacaaacagagaaaactgtgctgctgatatacagataggcaaaacttcagtgctcattgatcctaaagtgctatacatgtatgtcatatatgtatagtgatggaaccaatcacaaacttgacacagacgagatcattacagctcattacacacacccaagccttttttaaaaaggaaaacaaaaagaaaaactcagaaaatccgcgtcagtaagctacagctctacacctacacgtcatgaatttccaaaggttttatcagtccttccagcagatgacaccacatgcttgcattcagttgtcttgcctaaggaggacagtgatttagagttgcctggaattgaaagtggcgaggggagatcctgcggtagtgaagtaagaagcaaggtctacatgcaggtcatcatacatgctcaggtatggatggttcaacaaggcttgtgctgatgacctatctttagcatccttctgggtacatgcagagatgaatgagcagaattctggtgaaaactggtccgatggtgcagatggtggcggttgatcaacaacagcttcgaggagttcataaaagctatcacagggaggaaacggaaaattgccggttgcacattccagtattactaggcccaaactccagatatcactcatataaccatgtttctttgcattgattctttctggcgccatgtagtagcgcgtgccaataaatgtatccctctgtccagaggagctagaaataatggcacttacaccaaagtctgatatttttacttcacccctatgatttatcaatatatttgatggtttcagatctctgtgtataatgtgcctctcgttatgcaagtatatcagtccttttagta

SEQ ID NO: 8741 - DNA, 1913 bp, Setaria italica
  Peptide Sequence Number=SeqID_74715
tcggggaaaaatttcatctcatgctggcaatgcttctataaaaaaatcgggcccggcaagagaagagaaatctaaaagtgttggaatgtcacctgtgaggcatgagctagtttgttcttcaccgagtcaggataaaatgcatgccagacaccaggcaattggaagaagatcaatcacaggctcagtcgatacttctgctggcatgggtaacaaaacaaacctggttgatcgcaaatcctctggtcaagtaaaaatgccgacatcctctgaggtgaagaaaattcatagttcttctaaacaattgcacctaacatctgggaactcccattctcgaaactatcctgcctcagaaaaaaactcgctgcccaaatcagaagacacgaaggctaaatctaagcctggggcacaggctgttgagcataaggtgagcaccactgtcactgtgtcagctgaacggggtgcgaagcgggatcacttaaaagaggaaaggtccatttctgttgataaagcagcttcttctgaacctaactccgactctgtcaagtcaatgaaacatcttattgcagctgctcaagcaaggaggaaccttatggcatctgctcatggaaagtttgatgggtctttgactgataatgctggtatgacctccacacaatatggtttgccgggactaagccctagtcctgtttttcgcattccatccccatccagaattgcttttcccgagagtcctggtgaacgtactgttctgaaaagcccaacggagcttgaccatgagcatggaaagagtcccaaatctaggcaggtcagcggttcacctagcattggtactgatgcagcgattgctcgtgatgctttggaaggaatgatagagacactatcgaggacaaaggagagtataggccgtgcaacacgccatgcaattgagtgctctaaatatggcattgctggagagattgtcgagcttctcgtacagaagttggagagagagcctaatttgcatcgcagaattgacctcctttttcttgtggattctataacccagtgttcgcattctcagagaggtgttgccggggcttcatatgttcccactgttcaagctgcattgcctcgtcttttgggtgctgctgctccacctggagctggtgctcgcgaaaaccggcgccagtgccttaaagttctaagattgtggcttgagagaaagattatgcctgaagacatactccgaaaatacatgggcgatattgaggtgccaaatgataatactagcactagttttatgttgaagcgaccatcccgcgctgaacgctctgtagatgatcctattagggagatggatgacatgcttgttgatgagtatggaagcaatgcaacttttgagctttctggaattttgtcatcaaaagtctttgaagatgatgaagacttacctcgaaataatgggtcatcgccatttatttcgcagcctgttgaaagtgatggcattcaagaagctgaagatactgttgctccagcatctgttgaggaacagattagaccagagaatgtaactgctgatgctgctatggaaggtgccttggaattactgggcagcaagcagcagactgatggagctatccttgttgaacatgactgtagtcaagagccgggttcagagcttgaattgattgatcagaatgagcccccccctctacctgatgtccctccaccgcttccatcagattcaccacctcctccacctcctttgcctccttcaccacctcctgatacaccaccgccgccaccaccacttccactttcgccagcttcgccacctccgccacctcccccactgccttctggaccacctcctcagcctgctccaccacctctgccaacccaggccccacctcttccttctattccgccgcctg

SEQ ID NO: 8742 - DNA, 426 bp, Setaria italica
  Peptide Sequence Number=SeqID_74716
ttgacttgatgaaagttcaagagcaagaagggttgctagtgctccacctaaactgtgtccagttacatatacatgccacctaggtatattttctgcatcttcttcatccctgcagtggaataatgagatattttgtgaatgaagtttgagatagatagttaatgaatctttatattcactaaacgcagaagcatccgaattttaaatccaagggttgctttttcagcaataattttgtgagatactgagatatatagccaaaatcccttgtgcaacgaggacatgctatggaaggttgaaatgaattttcccgcttcctttttcaatgcaaatacttactggtatcctactgcaaatttgatgagcgccatgatcctattcctaacagagtcatatgcacctaagaatccactgtgaacctaatac

SEQ ID NO: 8743 - DNA, 725 bp, Setaria italica
  Peptide Sequence Number=SeqID_74717
caattctccagctgtcctttactttcgcattgtagacttctgcgaatcttctatttcccactctaggggagccaaagttgtacattgtgacaaatatgacaccattcttggccatttgacttgatgaaagttcaagagcaagaagggttgctagtgctccacctaaactgtgtccagttacatatacatgccacctaggtatattttctgcatcttcttcatcctggtatcctactgcaaatttgatgagcgccatgatcctattcctaacagagtcatatgcacctaagaatccactgtgaacttgaacttcttgtttgaagtcaccacccagcctttcagggtttagtccagcaggtagcagcattaagtcagttctcaaatccttccactttgattgttcagttcctcgaaaggcaacaactagccttcttcgtgaagaatcgcgccaaatggcaacttgtgtgtctgtcgaaacgttgtcaagaaaacatatcttttcaaaatctgatttgataaaactattacgcccaagtgaggtggcaagcatagcccatgcctccatggcagtctctgcacttgcaaacagatgccgcatatcctctgctttctgtgcatcaacagatagtttggtagatgcaacagtattatccttatcaatagagtcttcagctgcagcaacttcttgttctatgatcatatcatcttttttatttgttcttcta

SEQ ID NO: 8744 - DNA, 1203 bp, Setaria italica
  Peptide Sequence Number=SeqID_74718
attggtccacagcccagcaaattcgttgcttggacttggaaccaggatcactcgtctcttcattcttcaatcaaacactgaacttacatatcccgttccgttcatagaagatggttccagcgcattccatcaacctacactcaaccaagcacgccctgacagccccatccttgtatcacctatatatgacattgtacaagtagctgcaccctgctattctagactttctaacatcatatactatatcagaatgtgtgctagttacatcaactaaaaatagcccgctcaaacatctccaccagtggccacagtaccaccagtatataccagtgaaccagttcacatcttttcactaacctgattggtaactctagacctagaataaagaatgagcatataaactgtacgttgaaatgtttaaatggcacaacagtcataggatgtgcatgtttggattgcgaagagtgaggatgggacacaccatggcaccttcatagctcatacaatgtccttccatcagaactgtagtttttgtagggaaacacggtccaggatgtttaaccatgcaagtttactaggatcatgctgtcaattgatgggattcatcaattgcactgtcaaccacttgataccttgatctcacattctcgagaagtgtgacatagtaaaagtcttccatgtgctgcataagggccgaaccatccctgattgagcggagtaaatttatttctgtttgcagtagtttctccacaagttgcttctctcctttcataaattcagtaacaagaacatccggtgtgtactcccctatcacatcaccttggtcttcatcatctaatattccattgtttaccagttcatctttggaatctccaaatttgagataaactggtgcttccacatggcaatagcccataagacgtggtactgttggaatgatatctcggtgattgacaattctccagctgtcctttactttcgcattgtagacttctgcgaatcttctatttcccactctaggggagccaaagttgtacattgtgacaaatatgacaccattcttggccattgacttgatgaaagttacaaagaagacaaagaaagggttagactaagtagactaccaacctaaaactaagttaagttaacctaaagttaaactaaattaaattaaactaaattaagtaacctaaaaccttaaaa

SEQ ID NO: 8745 - DNA, 387 bp, Setaria italica
  Peptide Sequence Number=SeqID_74719
atttcattttatatttgaaccagtcacattctaatagtccatgtacggaagactcctcttgttccaaataaaagattctctagaagagttttgtattcctcacctaatcaaattctagtttgagaaaaagcatgtggcggtggaggtgtgggtgtatgatttcatttattagagttcaaattcaagtacccataaattattgcacaagcaaatccttgtcagtgtggtgtgcatgcgtccttttataataagaaaagaatatcaaactccagattatcagtaagaaggatttaagcgcacagaccaaagtacgtggggtactactgaattagtaaaacagtatgtttaactgactgttcacctgattaggagatggcggcagctgtt

SEQ ID NO: 8746 - DNA, 400 bp, Setaria italica
  Peptide Sequence Number=SeqID_74720
cactaccacatcgaattaagtgcacagacaatgttttaggaattcggtatttcatttatttgaaccagtcactccatgtacggaagactcctcttgttccaaataaaagattctcaagagcagttgtgtattcctcacttaatcaaattatagtttgagaaaaagcatagtgtaatgtgggcgtgtggtggtggaggcgtggatgtacgatttcatttatttgagttcaaattgtagtacccataaaaccatagtgcaaatccttgtgtgtgacagtgcgtgcgtccttttataataagaaaagaatatcgaactccagattatcagtaaaacagtatgtttacttgattgcaaagaataaaaaatttggcctgtgtatactaacctgattaggagatgg

SEQ ID NO: 8747 - DNA, 252 bp, Setaria italica
  Peptide Sequence Number=SeqID_74721
atggtggatcctccaaatggattgggaagccaaggaaagcattactactctatgtggcaaacattatttgagatagacactaaatatgtgcctatcaagcccatagggcgaggagcttatggaatagtttgttcatccatcaaccgcgagacaaatgagaaagtagcaataaagaagatacacaatgtttttgacaaccgtgtggatgcactaaggaccttgcgggagctgaaactccttcgccatctccgg

SEQ ID NO: 8748 - DNA, 340 bp, Setaria italica
  Peptide Sequence Number=SeqID_74722
gatcatatcagaggagaaacaagtagcagctagctctctgatctttgtacttataacgtgttgcaaatacacgctcatggcagcgacgcgagcgtgcttggtcgcgcgcgccgtggctctcgcgtttctcctcttggaggggccaacaatggtagcggcgttgggggctgccggaggatcgtcggaagagcacctgaggcaggtgcgaagcttcctcaggcgggtcaacaaggctcctgtcacgagcattcagagcccagatggagatatgatagactgtgtgcccatctccaaacagcctgcattcgatcatcctctcctgaagaaccataccatacag

SEQ ID NO: 8749 - DNA, 683 bp, Setaria italica
  Peptide Sequence Number=SeqID_74723
ttacctttacgtttacttttactttaccctttaaaaagtttttaggtttagtttagtttaggttaattttaacgtactttctaagttctattgtttattgtcttagtcttgtagtcttagttgtctatttcttgttgcagacttcgctaaccaggctcttcttgcatatggtttgagcagctcaagacgtgctccagatgctctacacccctatggttattcaaaggaaagatttgtatggtccctaatttctgctgttggaatattttgcttgggttcaggtgctaccattgtgcacggagttcaaaaccttatggagttctcagcccccggagaacattcactgggctgcactagtgattggtggttccttcctaattgaaggtgcttcacttcttgttgctataaaggctgttaggaaaggtgcagaagcagaaggaatgagtatctagggattacatctggcgtggtcatgatccaacttctgttgctgttatgaccgaagccttgctattgctgcagcatctttggtggctgttcaaacgacaggaaatgctatgtatgatccaattggctcaatcatagtcggcaatttactgggaatggttgctattttttctctattcagaggaacagacatgctttaattggccgggtctagttgattgatcacgacatgcagc

SEQ ID NO: 8750 - DNA, 1398 bp, Setaria italica
  Peptide Sequence Number=SeqID_74724
cccgcagcccgcagttattctctgcgtgtggccaagggcaagaagaaggcacattttgacgatgagcacagccatcgagcggttaatacggcactgtggtgtaacttcctcgtcttctccctaaagtttggtgtgtggattacgacttcaagtcatgttatgctagctgagctagtgcattctgttgcagacttcgctaaccaggctcttcttgcatatggtttgagcagctcaagacgtgctccagatgctctacacccctatggttattcaaaggaaagatttgtatggtccctaatttctgctgttggaatattttgcttgggttcaggtgctaccattgtgcacggagttcaaaacttatggagttctcagcccccggagaacattcactgggctgcactagtgattggtggttccttcctaattgaaggtgcttcacttcttgttgctataaaggctgttaggaaaggtgcagaagcagaaggaatgagtatctgggattacatctggcgtggtcatgatccaacttctgttgctgttatgaccgaagatggtgctgctgttacaggccttgctattgctgcagcatctttggtggctgttcaaacgacaggaaatgctatgtatgatccaattggctcaatcatagtcggcaatttactgggaatggttgctatttttctcattcagaggaacagacatgctttaattggccgggctattgatgatcacgacatgcagcgtgtccttgaatttcttaagtctgatccggttgtagatgctctttatgattgcaaaagtgaggtgattggacctggattttttagattcaaggctgaaattgatttcaatggagttgttctggtgcaaaattatttggagaggactggccgtggaacatgggccaaacagttccgggaagctgcaatgtccaaggatgatacggagttactccgggtcatggctaactatggtgaggatgtagtggaagctctgggatatgaggtggatcgtctggaatcagagatccagaagcttgttcctggtatcaaacatgttgacatcgaagcacacaacccagaagggctttctcttagagcagaagttttgtagattacctgcgtacaccgcattaattaatcacacttgctgatcactgccagtttgatttgtttctgacggcatttgatatgtttgcccctttgttgcttttccatcgtggtcaatataagaatcagatggctattatttgtaacagagaaggggaaaaaaataccagcctttttactctaaccctgtttggccaattttgggatctagggcatggtttttggagtgattgcttcccctaaatactgcagcaaattggtctgacttgtgtttactctggtggca

SEQ ID NO: 8751 - DNA, 640 bp, Setaria italica
  misc_feature (431)..(431): n is a, c, g, or t
  misc_feature (503)..(503): n is a, c, g, or t
  Peptide Sequence Number=SeqID_74725
ggcggcatgccgtccgggccggaggatgatgcaggcgccgggaaccccatggcgcagcaggcgtacatgtccatgatgccgcaacaacaacagctgcagatgatgatgaatggccatggtcctcacgggcaccacggtcaccatgcccatggcggcgccggatacccgccgatggggtacggctacgggtacccccgcccggcgatgccgtacgaccggccgatgtactaccctgcgccgcactcgcatgacaacatgttcagcgacgagaaccccaacagctgctcggtgatgtgaggcgacgtcgccgccgcctgacaagctttctcctgctgatgcagcggacaaagtcaaccaaaggggagcgcatgtcagtcagtcagtatacatgagaaactagtaccagctagctagaatcgcccccctttttntcttcccatttctttttgtttccttttctagcttattttcacctttttcatcctttgaacaaaaaaaaaagnggaacttccttgagtggaaggtaggtatagtaattatcaatagtggtcataagagatggctgtgctttacagtagctcaagaaggtgatgctgatggcttcccttcttgctccataatgtgatggtagaagaatgtg

SEQ ID NO: 8752 - DNA, 888 bp, Setaria italica
  Peptide Sequence Number=SeqID_74726
agcaccagccgggcatgatgatgaggccgccgaacatgatgggcggcgccggtttccccggtatgggccagatgggcggcgggcccttgggcggaatgccgatgggccacccccacatgggtggcaatggcatgcagccgggaggcggcggcgccgccctgcacggcatgccggccggcggcggcatgatgcgtggggctgggttctaccccggcggcggcatgccgtccgggccggagatgatgcaggcagccgggaaccccatggcgcagcaggcgtacatgtcaatgatgccgcagcaacaacagccgcagatgatggtgaatggccatggccctcacggccaccacggccaccatgcccatggcggcgccggctacccgccgatggggtacggctacgggtacggccgcccggcgatgccgtacccgccgccgatgtactaccctgcgccgcacccccatgacaacatgttcagcgacgagaaccccaacagctgctcggtgatgtgagccgccgactgacaagctttctcctgctgatgcttcggaaaaagtaaccaacaggaaggaggggagctcaggtcacaggtggtcgaaataacaacctggactggatcagtcagtcaggatacatgagaaactagtaccagctagctagaatcgccccccttttgattttcccgtttcttttttttctagcttattttcacctttttcttcctttgaacaaaaaaagtaacttcttgatgtcacacccggttttaaaacaaaaccaagtgctatttatatgtatgccaagatcaagttttatacatatagtgacatcattaatgaataatagtaacaatatcacgtaaaggaatataaaataaaaaaaaaaaaaaaa

SEQ ID NO: 8753 - DNA, 248 bp, Setaria italica
  Peptide Sequence Number=SeqID_74727
ttgcccttgcttcttggcgcattgtcagaggaagagttggagtcttgctcgatatctccaatctcgtctttgtacatgtcctcaatcatcggtttccaaagacggacacgggcattgatgaaccaatttgaaatctggagagacatgaaagtatagtcaacagatagaactcttaaataaatgaaaatatagggccttaatctagtacaaatatgagatatattcctggtgaacatgaatcagtaaaa

SEQ ID NO: 8754 - DNA, 564 bp, Setaria italica
  Peptide Sequence Number=SeqID_74728
tacttcttggttctagtaaattttggttctagtcgtagttttgggtttctattatttctaggttggtaagtattcctttccttttgtttaattgtactaattaactaggtaactacttgtcttatttaattctgaatctgccaccagaaggcagtagtgcaaacacaactagcctaattgatgtgaacattgagcctgttgacccagcccttagtgcacatgccaaacgcactaaagagttccacttctatccgagtgatgttccagagcccaagaaatctcagcctgctctagtagttgctacctctatgcctgcagcagctcctgcaaaccttgtcgttgatgttcccatgtccagtgccactgctgctgcttttgtgccttctgttagtgtgcctgcacctgcacctgcacctgagctgcttgccccggttggaccttcacctgttaatgtgcctatcctgcctacaactgtgccttgtttctatgcctcgcccctgcatccgcacctgcatctcgcccctgcttctgtgcctgtgccctcccacctgcagccagcgccgc

SEQ ID NO: 8755 - DNA, 796 bp, Setaria italica
  misc_feature (360)..(360): n is a, c, g, or t
  misc_feature (371)..(371): n is a, c, g, or t
  Peptide Sequence Number=SeqID_74729
ggtgtactcaacttcatttcccatgcgctggaaacaggaattgcagttgagtacaccaaaatagacaagcctattttaccacacaggttactgagagatcctcattcgtatcgaaaggtgcaccacccacgggttgtgatgaagtcgaaacgggagaaacttgaaagtcgcttcattttggatgtaactgtcctggatggcacactgatgacaccttctaccccgtttactaagatttggcgcatgcataacaatgggtctatcgtgtggccattgggcacacagcttatctgggtcggtggagatcagtttgcattgcagacctctgttccattagagattccagtcaatgggtttccngtggataaggngattgatgttgctgttgtattttgtggcacccacaaggcctgggaggtacatatcttactggaggttggcatcaccttctggtcagaaaatttaggtacaagacgaagtttagggttacatattcaggtggaagatccttcctttgttaatgacaataacaggaacactgctattaatctgaatctgccaccagaaggcagtagtgcaaacacaactagcctaattgatgtgaacattgagcctgttgacccagcccttagtgcacatgccaaacgcactaaagagttccacttctatccgagtgatgttccagagcccaagaaatctcagcctgctctagtagttgctacctctatgcctgcagcagctcctgcaaaccttgtcgttgatgttcccatgtccagtgccactgctgctgtctttt

SEQ ID NO: 8756 - DNA, 639 bp, Setaria italica
  Peptide Sequence Number=SeqID_74730
cggcgccctccgcggccgcagccgcccgccgcatggccccgtacgccgccgacgccgcgtagcccctggtggccgaggccctcggggccagcgtggacagggcggcgcggagcgcggaagagccggagagagcgagagccatcggatcagcctcttgcttttgcggcgaaggatcggacggctgctggcgctctgctctctcccctgctctgcttggtgctcgctgctgcgcgtggtgagctgggtggggtcaacgaatgggatcccctccttgcagagctggaggagatgggtttcgatgatactgagatgaacaaggagctgctcgcaaagaacgggggaagcatcaagcgagctgtgatggacctcatcgccagggagaagaaggacaagtgaagatcgtgtgcctgtgcacatagttatctaatatctacgcgtaaataatgagactgctgtacccctatggtgcagctatcacgtctcagtgcttgcttatctaaagactactttatatatgtcatgcttgtggtgtgtggtgtcgatgaactcgtagtatttagataagcaagcactgagacgtgatagctgcaccataggggtacagcagtctcattatttacgcgtagatattagataact

SEQ ID NO: 8757 - DNA, 962 bp, Setaria italica
  Peptide Sequence Number=SeqID_74731
ctcaccaccacagctgcggctcacggctacgcagcccgctccccctcctcccctgcccctccccctcctctccgattgcgtcaagggttcgtcccgaatcgatcgatcgacgactgactccgctagggttcggccagatcgccgcttcgtcctcccccccgcggggcttccccccgacacgatgtccgaccggagctcgccggccgcgccgacgttcttccccttcggcccgcaggccgaggtgcgagacgtcacattcaaggtcaaatacggtgacactcttaagaggttttatggttgtgtcaatggagctcatttggacatgaatttatctgctctgcgggcaaagatagcaactgcctttaagttcggtcctgatgctgacttcattctgacttacaccgatgaggatggtgatgctgtcatgctagatgatgatgatgacctgcgtgatgcagctctgcgtcagaaactaaaccctctgaggattactgttcagctaaagaaaagtcaaccaactgaacaaaaggagagaaattctacacctgtgaagcctactgctcaggatccactgtcccagataatgtcagctatcgaaggtttgaaacctgctcaggaagaaagtctggcacatataaaatcagctataggtgaagctatcaagtctatcccagagccaattcctgatgccattgcaaaactctctcatgaagtacttgatgcggcaccaccaccattagctgagctgatgaaaccttttgtgcaaatgatggcaccgagcaatggtggcaatggaccatctgatgcacatgctgaagggtcatccacctcttctactcgtgtggcagaggatgctcctgttgctgttcctgccacagctaagcccaaagctaaggcatgtttggatcttaggagtgtgttaaaggatgctcctgttgctgctcctagtgttgaggcttctc

SEQ ID NO: 8758 - DNA, 2644 bp, Setaria italica
  Peptide Sequence Number=SeqID_74732
accaattcctggaccctaagtaaccattactttacaatatgctgcttaaatcacaagcttttacacgtatagtatagtgtgtttcatctttacaagatccttttttaccctatcacccccaccacctacactatattacatttcctgctatacctccaatctgtgtcgaattgaaactacaggctacgacccaatgctccttttaggcatatatgttattcacccagccaagccaggtgttacaaatgttcagaggtatggcattcaggccacaaaatcatgcagaagaggtgattgctcgaaccgttgccgttgatccatctggttcattgattcatagtctgaagacgcgacgctcacaccgagaggagcggtagcgttgtagatgtcatcgtctccgacaccaggaaagctctgctgggcattaggaactgagaggctgctgctggagtgctgcaagcccagtgtcagcgatacgttgccgtttccatatctcccaagctctgccaggtggtaggccatgaaccgggcgttctcatcttgatgatgtgcgacggcgttgtgtaggaggaggccaccatctgcttcgttcgatcgttggtctttcagcatcaggttcatgaagctgtcgtcagggttgggctcgttctggaatccaacaggtgctccgccaatgttcatagtccctatgctggctctcgactcgctcagctggctgctctcacaaactcgaggtgtagagcttttcaggtcctccttgtcttcagaagatgccattttgcccttgcttcttggcgcattgtcagaggaagagttggagtcttgctcgatatctccaatctcgtctttgtacatgtcctcaatcatcggtttccaaagacggacacgggcattgatgaaccaatttgaaatctgactccttgtcaagcctgtttgccttgctagcatcattttttcagagtctttagggtacgggtgaaggaaatgctcaaagagccaagcacgaagaatggttacagagttttcaggaagccctctctgtggcctccaagcattttgtggaatcatgccatactgttggaaagctcgttgttgccttagctgctgatcaatgtaccgtagacgagttaatttgccctcctttccagatgaattttcctcctcaccaagcttcttcctgatgacattgatctgatcattgatagcatccttcaggcaccggaagtgtcgtgagattgtctggagggcaactgcagtgtaaggcttggcagctccaggcccagctaccacatcaaaagatgaaaccacactttgcatttggtggtagtagtgcttgtacttccggtccacctcatccaacatagccatcagcttcgccatcttgttctgaagctcttgcttctcagcagtagaaagctcaggtgctgcattggcagcagactcctgcggattagagccctcactttttgcccctccctcggtctctttgccatctgtttttccagcttcgacttgttctttctgagctttctgcttaatattcttccaaacgttcacaacctcatcaagcagttcttgtgctgctttcagatacctggagttccggattgcacgtgacgcctcagactgcatactcttcattcggatgtcatcaactcgaagactgtcatggtaagagtgcggcgacaacatgtctggtttgacagaccagtatggtaaggaaggtgccaggatttgtgtgttgaggctcagagataaaccttggccttgcactgagggaatgttcgatgagctgtggttgttcagaacaccaaaatcaagctgtgcaccattgtgggcatcatcatggatgagatcagctgtgctgctttgtgatccatccatcatatgcatcaacatctcatttttcatatctttgactggaccaaaagagcgctgcccctggtgggaaccaagcatgtcggactcccttgcagatgagtcttgggacatcactgaaggatggccagggtcaggcatctccatgcaattctgctgaggatgcagaatgccactgaattccgtgtatggtccggaagtagaattgttcagataaagcaagttccctagagctgatggcataggataggatgcattgcccgggtctcttgagtacatgttctgtgagtccctttcactacctgggcttgagtaataagtagccatcatacagttttggctactcactgatcaagattactccaagagatatgtgtatgcagaaccaacttggatattgactgatgaatcaagtttcagcagaagaccaaaaccattcacttacagctcgccttgttcaaccaaactgagattcctcaaagacgcttcaccggtggactaccaatacgaacaagcttttttgatcaatctgaaggcgggttgtgctcctctcatggggagcagagcaggagcaggcaacaaggcaggcagggattgcctccacacacaaatcctggcaccttccttaccatactggtctgtcaaaccagacatgttgtcgccgcactcttaccatgacagtcttcgagttgatgacatccgaatgaagagtatgcagtctgaggcgtcacgtgcaatccggaactccaggtatctgaaagcagca

SEQ ID NO: 8759 - DNA, 1770 bp, Setaria italica
  Peptide Sequence Number=SeqID_74733
aggtagaatagctgtcatgctagatgatgatgatgacctgcgtgatgcagctctgcgtcagaaactaaaccctctgaggattactgttcagctaaagaaaagtcaaccaactgaacaaaaggagagaaattctacacctgtgaagcctactgctcaggatccactgtcccagataatgtcagctatcgaaggtttgaaacctgctcaggaagaaagtctggcacatataaaatcagctataggtgaagctatcaagtctatcccagagccaattcctgatgccattgcaaaactctctcatgaagtacttgatgcggcaccaccaccattagctgagctgatgaaaccttttgtgcaaatgatggcaccgagcaatggtggcaatggaccatctgatgcacatgctgaagggtcatccacctcttctactcgtgtggcagaggatgctcctgttgctgttcctgccacagctaagcccaaagctaaggcatgtttggatcttaggagtgtgttaaaggatgctcctgttgctgctcctagtgttgaggcttctcaaggtcagcaaccatcaatgtacccatctgttgaggagttgctgttccccagtaattcagttgacaaacctgtttgcaaagggaagattgatgctcaaagtaagggcaaatctgttgcgtcctctgccactcagcctgcctccccgccatgctgttcccattcatgttccgcctccacctccttgtgtttctgaattgttccgtccacgaaggagccaaccacaccagtggcaatctgaaaataatacaaaagtcactagtgattccagatggcgcattccaatgtataaagttccctatgcaccacctgcagcagtgtctcatgcaccaccaggctatggaccttctccacattttccttatccaggccgtctcttgtcttctgggcatccatatggagatcttgctggcaatatggagaactcagcaccacgtagtctccatagatggattcagtgtgatggttgtggagtacaaccaattgttggtccacgtttcaaatctaacgtgaaagaagactacgatttgtgcaattcctgtttccagcgcatgggaaatgaagttgagtacaccaaaatagacaagcctattttaccacacaggttactgagagatcctcattcggtgcaccacccacgggttgtgatgaagtcgaaacgggagaaacttgaaagtcgcttcattttggatgtaactgtcctggatggcacactgatgacaccttctaccccgtttactaagatttggcgcatgcataacaatgggtctatcgtgtggccattgggcacacagcttatctgggtcggtggagatcagtttgcattgcagacctctgttccattagagattccagtcaatgggtttcctgtggataagctgtgtgcccaatggccacacgatagacccattgttatgcatgcgccaaatcttagtaaacggggtagaaggtgtcatcagtgtgccatccaggacagttacatccaaaatgaagcgactttcaagtttctcccgtttcgacttcatcacaacccgtgggtggtgcacctttcgatacgaatgaggatctctcagtaacctgtgtggtaaaataggcttgtctattttggtgtactcaacttcatttcccatgcgctggaaacaggaattgcacaaatcgtagtcttctttcacgttagatttgaaacgtggagtacaaccaattgttggtccacgtttc

SEQ ID NO: 8760 - DNA, 760 bp, Setaria italica
  Peptide Sequence Number=SeqID_74734
agtacaactgtggccgctagaagggttgcttccttaatgagattccgtgagaagagaaaggaaagatgtttcgataaaaggattagatacaatgtgcgcaaggaggttgcccaaaagatgaaacggcgtaaaggccaatttgctgggagatcagattttggtgatggtgcgtgttcttctgtagcttgtggctctccacctaacggcgaggatgatcattttcgagaaacccattgccaaaattgtggcatcagctcaagacttaccccagcaatgcgtcggggcccagctggtccaaggtccctctgtaatgcttgtggcctaatgtgggcaaataagggtactctaagaagtcctattaatgcccccaaaatgactctgcagcatcctgccaatccaagtaaaacgggagatacagatgacaaaaattcgactgttcttcctgtggagcataatcaagccacagtcaaaactgactccgggatgatgccagaacaggagcagaagctggacatactcccaccgaccaaagaagatatcaagtcagtttcatgacaaatgcttaaacatgtgtacataaattgagacataggtttctgtcagaaactcctgagtttaggatgacatataaggcagagaaactaacaaagcagttccattgccaaaaaaatgcacgcattgggctgccacatttatctcctacccgattcatattgtacgatttgattgctgacaataatgcagtccttacctgttttga

SEQ ID NO: 8761 - DNA, 984 bp, Setaria italica
  Peptide Sequence Number=SeqID_74735
cactttgtgtcgattctcaacttttcatggcctcaggttatgtgtgtgacgcagtgccctatccacggtagcaggcgggtgttcatgagcttgagggctaagtggtaacagaagtttgctgtacgtttcccacagctctgtgatgcagagtcgttcctaaattgtgtgaaggaatgcccatgcgaaaccatggacatcataccatctggaagtgattatgtgtgtgaagattcatcagcatctgaatatattgcttctaatggacttcaccacaggcctgatgatgcttcaagctttgaggagcaagcttctgatcacatgatagaggcaccaacaatgagctaccatgaggaatgggacctgcctgttcttgaacctctcagtgctaacaacactaataacagctactctggtttccctcctagtttcagtcaaatgctgacaaatttttcaacggagaatgagcaagatgcagaggaatcctatccagtgggtacaacaaaccatgcttctcaagaggtgtatgcactggatacttctcatgatgacaatgtttctggggtcgcagttgcccctgaagaaacaactgctgataaaggaatggatgttggtgagggaattgataccagtatattaacaggtgacataatgacacgggtaaagacatatatggctgatgactcctttaatgatatgttgttcaagcttgagaaagtcattgatgaacttggcggtgacatgtcgctgtagatagcaaaacctcttctgtgctggaggaaggccttaatttgtctgtggtcatatatactatgtagtaatagttcacctaagctagtgtcccattgcaactgctgcccctaccaaaaacgtgcttgtttgttcaggggattagtaaggaagacaaagtataccttctctgactacctacattttccctagccgctgtgtttgtatacattatctaaatcatggttatatacgcac

SEQ ID NO: 8762 - DNA, 332 bp, Setaria italica
  Peptide Sequence Number=SeqID_74736
ttttttattttattgtcgttaaccttaaagggctccagctgcatgtatcatcagcatgagctactgtcagatctgaaaatagattagaatatatacacattacatgaaactttgttacataatagcactcactgacgagttactctaggaactgtacaatttccgacaaaatttaggtcaatcggctccagatcccacccacatccatggatagactgaaatctaaatctgaactcattgatgtactcagacaactcagaaaacatctgctttccgtggaatatgacacaatcaggtgctggtttcagtataatacatctctgatgcagcct

SEQ ID NO: 8763 - DNA, 135 bp, Setaria italica
  Peptide Sequence Number=SeqID_74737
aagcatagtagcgtacgatgagagattattataggtggccataaaagtgggcgtgagagacaagacaggtatatgatgataatggtacctgcagatctgcaggtaccattatcatcatatacctgtcttgtctca

SEQ ID NO: 8764 - DNA, 687 bp, Setaria italica
  Peptide Sequence Number=SeqID_74738
gtcttgtggaacagtatacaccattcatttcagtcattgcatgagttttgtcattatcatctccgaacctaacaaagccgtagcctctagaacggcctgtgtttgcatcaataataactttagctcctttcactgatcggtatttgctagaaaataggtccagcaacatgtcatcagtaacatcaacagccaaatcaccaacaaatatcgagtgatcagatgcaagttcagagcgtttttctcccatactatatgatgcccaatttaacttaaacgcccgatcagtattaggcattacatgaccagagaagttctgtaaggccttctctgctgatgcgtgagaatagaactctacaaaaccataaccctcagagaccccagagtgtctattgcgaataactttaattgtcaccacctcgccgctggggccgaagcagctgtggaggtagttctcgtccatccagtactggaggtcgccgacccagatcgtccggttgtcctcgccgccattcccgccggatccagccgacggcggcggtggcggggtgaccgaggccggcggcgcgaagtgcttgacaaactgcggcggcggggcggcggcgcggccaccatagggtggtgcggcggtgggtacgggatgaccacccaccgcggctgcggcatgtggtggtgcgggtgcggcgcgtg

SEQ ID NO: 8765 - DNA, 690 bp, Setaria italica
  misc_feature (307)..(307): n is a, c, g, or t
  Peptide Sequence Number=SeqID_74739
tgggcatcatatagtatgggagaaaaacgctcgatcagtattaggcattacatgaccagagaagttctgtaaggccttctctgctgatgcgtgagaatagaactctacaaaactcatgcaatgactgaaatgaatggtgtatactgttccacaagaccaattcgtgtaggacctgcgactcctagaagatctcaaggtgattctggctcctcgactcctggtcattcagatggtgattcttctaacagaacggtgtgtggtactcttcctctggtgtttgtcaccttgaagtatgataatttttaanctgtggctgtcgacctgctttaggtatatgttggtgggcttgacccaaatgtcagtgaggatgaacttaggaaagcctttgccaaatatggcgatcttgcctctgtaaaaaattcctctaggaaaacagtgtggctttgttcaatttgttagcagaactgatgccgaagaagcactacaaggattaaatggatcagtaattggaaagcaggcagttcgcctttcatggggtcgcagcccatcgcataagcagtctaggggtgactccggcaatcggaggaacatgtactacggcacgccattctacggaggatattggcttacgtccttcccctagttgtcctacttacccttaaacttatttgttttacgtttccgtttctt

SEQ ID NO: 8766 - DNA, 443 bp, Setaria italica
  misc_feature (421)..(421): n is a, c, g, or t
  Peptide Sequence Number=SeqID_74740
actcaactaacaggacggtatatgttggtgggcttgaccccaacgttagtgaagaggaactgaggaaagcatttgcaaaatatggtgatcttgcctctgtcaaaattcctgttgggaagcaatgtgggtttgttcagtttgtaaacagatttgtgaatgtacttgttttgaattgtagagctgatgctgaagaagcactacaaggactgaatggatcaaccattgggaagcaggcagttagactttcctggggccgcagcccagccagcaaacagtctaggggtgattctggccaccggcgcaacggcaacggcatgtactatgggacaccattctatggtggatatggctacgcctcaccggttcctcacccgaacatgtatgcggcggcctatggagcctacccatactacggcaaccngcagctagtgagctgatgtgga

SEQ ID NO: 8767 - DNA, 441 bp, Setaria italica
  Peptide Sequence Number=SeqID_74741
aggactttagttacaaatttagttaagacaagaactgatgccgaagaagcactacaaggattaaatggatcagtaattggaaagcaggcagttcgcctttcatggggtcgcagcccatcgcataagcagtctaggggtgactccggcaatcggaggaacatgtactacggcacgccattctacggaggatatggctacgcctccccagtgccacacccaaacatgtacgccgctgcatatggcgcatacccattctacggcggcaaccagcagctggtgagctagagaggctctctccgctccgtcccctctgacgggaaacaaggtttttggtccggtgagcatagtagcgtcaggtgagaagaaggttatagccttataggttgtcctaaagttcatcctcactgacatttgggtcaagcccaccaactattattacct

SEQ ID NO: 8768 - DNA, 677 bp, Setaria italica
  misc_feature (660)..(677): n is a, c, g, or t
  Peptide Sequence Number=SeqID_74742
tctttgtaccctaaattgttctagttgtaggtattgtaactttaaaataataggccgaatacggcgatcttgcctctgtcaaaattcctctagggaagcaatgtggctttgttcagtttgttagcagagctgatgctgaagaagcactacaaggactgaatggatcaaccattgggaagcaggcagttagactttcctggggccgcagcccagccagcaaacagtctaggggtgattctggccaccggcgcaacggcaacggcatgtactatgggacaccattctatggtggatatggctacgcctcaccggttcctcacccgaacatgtatgcggcggcctatggagcctacccatactacggcaaccagcagctagtgagctgatgtggagagcttctccgatccgctccgtttcctccatcagagggaacaaggttttggtccagtaagcatagtagcgtacgatgagagattattataggtggccataaaagtgggcgtgagagacaagacaggtatatgatgataatggtacctgcagatctgcgctgctagtagaacctaaagaagcttgtagacaataagacctattcttttcctgagaaattttgacttgctaataaaactaaagctatcagttgtcgtgaacttgttcctnnnnnnnnnnnnnnnnnn

SEQ ID NO: 8769 - DNA, 797 bp, Setaria italica
  Peptide Sequence Number=SeqID_74743
caacacaagatatccttgattttctgctctgttaccatggaaccctgcttttctccagtttaccgccctctatttatctacaagtatatggctatatgtacattttgccttgaggaccatatgttaaaaatctagttcatgaaaaattaagtatagagctagcactgcatgtactgcagtggcattaattcggtaattcctccataatactcctttaatagctatattcctagcttgctatattttatgttacagatacattgattgaaatcaagttaatgtgtccagagcatgttatatatcatgcattttctttgtagagagccttgggatgctgctctttcttttctgtaatcactctggttttgatcatttgttcattcaacttgatgactacttcactcaggtgattctggctcctcgactcctggtcattcagatggtgattcttctaacagaacggtatatgttggtgggcttgacccaaatgtcagtgaggatgaacttaggaaagcctttgccaaatatggcgatcttgcctctgtaaaaattcctctaggaaaacagtgtggctttgttcaatttgttagcagaactgatgccgaagaagcactacaaggattaaatggatcagtaattggaaagcaggcagttcgcctttcatggggtcgcagcccatcgcataagcagtctaggggtgactccggcaatcggaggaacatgtttgggtgtggcactggggaaggacgtaagaccaataatacctaccgtaagaaataaggaacgtaagaaccgaa

SEQ ID NO: 8770 - DNA, 685 bp, Setaria italica
  Peptide Sequence Number=SeqID_74744
cctgcagatctcatatggttgcaaattgcactgacgaatgtgctcaggagttagtacaatcttgcattagaagcctggctaggggatatgcattagagagcctgagaaaagttgcaatcttgcagactttacaagatgacaaccaccaagcaccgaactagatttcgggtagtaccacaatacatttaccacactggtgctagaggagctcgtatactcgcgtactgcatcgatttctttgggcaaccagttattggacctggacacatgacggattgacggggacctgtccagctcgtttgaaccttgcattggcagctaagcactcgcatgttttgacctcaaggcctcaacgaatctggagcctgacgtccctccaagaaaggctggaggtctgcgagtagtcgcaactgatcgaacagcaacatttcactgttcagtaggtaaaacatcctgaaagcgacactctgaatagtgaatctaggataaggaggcagcaagattgtgtgacttgggactcttggtggttggattcatgggcactgaacgccttgcattggttgaaacagaagatatcgtcaattcatcaggaatagcgagagctttcaccttcactgtctgccagatgagatagctgtgccttcaaaatcttcagttttcagcgttcaccgttgccgtttacctt

SEQ ID NO: 8771 - DNA, 844 bp, Setaria italica
  Peptide Sequence Number=SeqID_74745
ttttttttgtaaaaaggtaaattaatattgcgattaattccattgcagcgacaacgatcgatccactcgcagagtgcagacacgacgcacacagaggttagctttcttacacgcaggacgcagcctgtgcagccaaatcaagaaagacgaggcggaaggaggaggaagttacagagatggagaggcagaggcagtggaacatggagatggagatggagtagtagacgtagctcgtggtcgtcgttaagaagcatttcaccacggctttaatctagggatcgcgataggtaactaaaccggggcgagctagggtaggtacatggacgggtcatggacatccgtccagcagctcccggcgttccagtacgccgccgccgacgcgtcgccgaggtcgaacatcccggacgtgtccagggacgcgaacggggtcatgtcggtcgagactgatgagggcgcctcggacggcaccgcctgcccggcaagatgctgcgccgaggcggcggcggcggcggccgattcctccttcggctgcgctgtgaaggtgaacgccgggagtggcggcggcgggggcggcgcgaagagggacgccagcgccgcggcatggtcggcgaatatcggcgccggcggagccacgtcgaccgtcgagaaggggttcgtgtggtggctcgtgaggccgatgctgttcgacgacggcgtggccggggtggtcggggccgttgccacggcagccgtggggctggcgctgccgctgccgctaccgctgttggagcgcggggaggacgcagaggcgcggcgcgggttcttcgcgtctaccgtaggaccgaaggtagggggtaggaacgaa

SEQ ID NO: 8772 - DNA, 332 bp, Setaria italica
  Peptide Sequence Number=SeqID_74746
gcgcagagctagagatctcatacatggcgaccgccggcagcggtgagaggtggagcctcgccggcgcgacggcgctggtcaccggcgggagcaagggcatcgggcacgcgatcgttgaggagctggcggcgttcggcgcgcgggtgcacacgtgctcccgcaacgcggcggagctggaggagtgccgccggaggtgggaggagaaggggctcaccgtcaccgtctccgtctgcgacgtcggcgtgcgcgccgacagggagaagctcatggacacggtcagggacaccttcgccggcaagctcgacatcctagtgaacaatgcggcccagttg

SEQ ID NO: 8773 - DNA, 670 bp, Setaria italica
  Peptide Sequence Number=SeqID_74747
gacccaactacggaaacaattcaaaagcaacttggtccaagaactagagtgctggacctatatggtctggaggacatcccttcataatctgccaagccaccatattgagtcagaacagcaggtgcaacagggacctgactttggatgccaaccggacgatgattcccagtaacaacttgcggaatcggagtaatcacaggtagtacatttgggtttaaagcagcttgataccgatttggcgctgcagcagtatggatgctctgcctcaggataaattgttggctaggaactacagctgaatggacgttctggcctgaagaaccttgcaccacattgtctacctttgatctcttagcaggctgcatgagctgcagtatcttctgctgctgctcaatgttcttgctaacttgttgagcagctgctactgctgcagcagcagctctctttctctctgcacttagctgctccaactgtgccaatcgcttgttggcttcttccaaaataggcagttcttctagcttctgttccttaatgaacttctgcaatgttccgagcagcgtgcgctctttagaatcagctgcactctgccaaagtccaagatagtttaggaaataagaactgtctgtacaatgtaaaatgtgcacaataaacaatactggagcagacatgt

SEQ ID NO: 8774 - DNA, 1222 bp, Setaria italica
  Peptide Sequence Number=SeqID_74748
gccccgcctccaacggcgcgccgtaccgcgggtacctcccgcacgccgtctcctcgccgcgcgccccggcgtcggcgcggcggaggctgcccatcgtcgtgcagttccacggcggcgggttcgtcactgggagcagcagcgccgcggcaaacgacgccttctgcaggagggtggccaagctctgcgacgccatcgtcgtggcggtggggtacaggctcgcgcccgagagccggtaccccgccgcgtttgaggacggggtcaaggtgctcaagtggatcgccaagcaggcgaatctcgccatgatgagcaaggtcgggagtggtgtggacacattcggtgcgtccactgttgagccgtggattgctgcacatggtgatcctgcaagatgtgttctgcttggtgcaagttgtggtgccaatattgccgattatgtcactcggaagacggtagaagatagcaagctatttgacccgattaaggttgttgcacaagttctgatgtatcccttcttcatagggagtgttccgacacactcggaaataaggcttgctaattcatatttctatgacaagtccacatgcatacttgcttggaaattatttttgtcagagaaagagttcaacctagaccaccctgcggccaaccctctggctcctggaagaggaggcccaccactgaagtgcatgccgccgaccttgacagtcattgctgagcatgactggatgagagatcgagcaattgcttactctgaggaactccgcaaggttaatgtcgactcaccagttctcgactacaaggatacagttcatgagtttgcaaccctggatgtgttcctaaagacgccacaggcccaggcctgtgctgaggacattgccatttggatgaagaaatacatatccctcagagggcatgagttctcgtattagttgtagcaaagatcacgcatgtgaaatagactctttacggggaagcatcaatatgttctttttcaactggtggtcaaagggatgctggattatagtctgagtaaccagttagcttaatgtgagtactgagtcctttggtgattttatcaaagaaatgtagtgtgcaaagttgtagaacgtactcaaaacgatgctcttccccttgtagagctcaattctttcattccttttgtaccctctgtgtattatggaattactggtgcttgaagttaccattttttgagaaaaaaaaaaaa

SEQ ID NO: 8775 - DNA, 816 bp, Setaria italica
  Peptide Sequence Number=SeqID_74749
acggggttttgagattgctcaaggaaggctcggtcctggaagactacatcattgcatgaggctaataggggcagcagaacgtgggatggatctgatggtcgagagggccttaaataggactgcatttggaaagaggattgcacagcatggtcctttttatcagatcttgcgaagtgtcgggttgatctggagcaggctagacttttggtcctagaagcagcagatcaactagaccgacatgggaacaagaaagcccggggtatccttgcaatggccaaggtggcagctccaaatatggccctgaaggtgcttgacatggcaatgcaagttcacggtgcggctggtctctcatctgataccgtcttatcccacctatgggcaaccgccaggacactgcggattgcagatggccctgatgaagtccatctggggacaattgcgaagctggagctgcaaagagcaaggttgtaacttcagggtgaagtgaagtttcgagaataaacgaatgaacagcaacctgcgcacagggctagggaatggcagcatcaccggtagatagactatgaagtaaataatggcgttaatattcgtccatgtatgttgtacacttgtactccgactgttacccattttagtggcattgtgtcgactatccacgaaactggatgactgttcaatctttgtggtgtcgtacagagatcagcagcagatgtgaacatcagctgtaacagaatgtgtttttttgtacaggagagacaatcagacaaatctgaaggaatggttagccttcggctattactgattttaatgaagaag

SEQ ID NO: 8776 - DNA, 2334 bp, Setaria italica
  Peptide Sequence Number=SeqID_74750
cattgcaaggataccccgggctttcttgttcccatgtcggtctagttgatctgctgcttctaggaccaaaagtctagcctgctccagatcaacccgacacttcgcaagatctgataaaaaggaaccatgctgtgcaatcctctttccaaatgcagtcctatttaaggccctctcgaccatcagatccatcccacgttctgctgcccctattagcctcatgcaatgatgtagtcttccaggaccgagccttccttgagcaatctcaaaaccccgtccttccccaagcaggatatttgttactgggacacgcacattctcaaaagtaatctccgcgtgtccatgaggtgcgtcatcaaaaccgaatactaacaacggtctctttacgtgcaccccaggagtgtcgatgtccactaaaatcattgactgttgtttatgcttaggtgcagaaaaatctgttttccccattaaaatcagaattttgcatctagggtccatagccccactggtccaccatttccttccatttatcacgtagaaatctccctgcctcgatattgagcattctatattagttgcatctgaagatgcaacttgtggttctgtcatggcaaatccagaacgaattttcccttccaatagaggaaccaaccattgcttctgttgctccttggtgccgtacctcaacaggacctccatgttacctgtatcaggtgcaccacagttaaatatttgaggagcccaaactgaacgtcccataatctcacacagatacccatactcaagattagtgagacccgcacccagcagaaggtcatttgaacttccaggggaaacgagagagcggtcctcaaatagtagctttctagctctagctgcactgtctagcggaataaacatgttccataggccctccttctttgccaatgctttaagattttcttcttctggatgaattgtccatcttgaggttgattgtgcatgtttgtagaactcaccctccattgggtatatgtgatcttcaataaacttcatcaatttctttcgaagctgcataaccttttcgctaggaacaaatttgccttgatcctttgtagaagttgaaccttcctgctctctgccaaattcttgccatggagcttctgagacttgaaaacctctagaaggctgttcttgcaacacattttttctatttatgaagtcccaggcacagtcaaccatagtgttagcaatcctgccagcaaatttagcacgctcaccacctgaagcattacccatagtccatctgtgatacactccagcatagatagatgccccacgaaacagagaaaaagcaacgtagaatttccaatttgcagcaggccaggttcttgcagagaaagagcagtatacggaaaggtactcttccagttgaggaaccccatctggaatgccagcatgttggaaccctccgtaagaagtcctttcaccgggtgttgcatcaataatatatggcaagcaactataagcaacatcacacatctgattccccaaggtagatagttcccaatcaataacaccaattactcgatcctctgttgggtgaaaaactagattgtcagcacggtaatcaccatgaacaagacctgttccagatcctgctgaggaatcttcttgtggtacatgttctttcaaccaacgagctaggttgagcatcctctgataacgtgcaggcttcccttcaccagtggatgcaagatattgcttctcccatctttctacttgtcttttgcaatagttatctcttctcccatacttttgcaatccaatggcattaacgtcaactttgtgtatagcagccaaagttttggcagtagataaatatatagcccgccttttagatggagttacccccggcaacgcgttatcaggatatattattccttccagatactccattatgtagaaaggagttccaattacacttgcatctgtgcaaaggcaataaacctttgggacagggacatctgtgtgagcaccaagagcttttagaacctggtactcgcgctcgacggcgtgggcggactggaggatggccccgggcggcttcttccgcagcacgtagcgggtggtccggcctcccccgggcgcggaggcctggatgcagtaggtggggttggactggccgtggccgaactgggtgagcgccagcgccggcgcggggcccgggaaccccgggacgttggcggccgcgtagcgcagcagcgcggcctcgtcgagcgcgtgcgccgggtccaccggccgcagcagctcggaggtcagcttcgccatcgtagacggcggcagcggcaggtggag

SEQ ID NO: 8777 - DNA, 243 bp, Setaria italica
  Peptide Sequence Number=SeqID_74751
gtctgaagcttgtttcctcaacgcattttgaacgtatttcatacacaatggctgtggacattctgaaaaatacagaacaaggttgaatggggaatcgatttagcatctgagcatgaaaggtatttgactgaggtgatatataagaagccagttattgtttataactatcccaaagaaataaaagcattttatatgaggctcaatgatgatcagaagactgtttctgctatggatgttcttgcg

SEQ ID NO: 8778 - DNA, 181 bp, Setaria italica
  Peptide Sequence Number=SeqID_74752
agcggagccagcgcttctccgacgccgaggaccggtcctggcactcgcactcccggcagggctccgcctccacgcccgcgtccatcggctgcgacgccggcgccagtgccggcggcgggggcgcggccgagcgtcccaggaagtcgtgtgtgtcggagtgctcgctggacgacgtcgtcga

SEQ ID NO: 8779 - DNA, 875 bp, Setaria italica
  Peptide Sequence Number=SeqID_74753
ttttggttctttaaaagtaattcccctagttagtctttctaggtctttctacttgttagaagatatattctgcgaatgaaagaagaagaccttctttactcatttccctatcacactgaagtgcctaaagttctgttgtttggactgttgggcttcacatgctctgtactagcacctcttatcttgccctttttattgatatacttttgtctcggctatgttgtgtatcgcaaccagttcctcaatgtttactgcacaaaatacgacacaggcggtctatattggccaattgcccacaatactacaatattctctctagtcctctctcagatcatctgtcttggtgtatttggcttaaaagaatccccagtagcttcaggcttcactgtgcctcttatcatctttactcttttgttcaaccagtattgcagaaagcgtcatcttccattattcaagactttccctgcacagagtttgattgacatggacaaggaagatcagcaaatgggtagaactgaggaccttcatgatcgccttcattctgcttactttcagtttcctgacactgacgacatacctttggaaggagcacacaatgttggtagagatgaaaatggaaatggcacttccggtgaatcgagtcgcaaagaaagcgccgatgatgaccccaaagatgacctgtctcacccgacactggccggactccctgttagccagctgcggaatgcggtgatatccatcggtatgtcgtcagtgtcaggaaactgaaagtaagcagaatgaaggcgatcatgaaggtcctcagttctacccatttgctgatcttccttgtccatgtcaatcaaaactctgtgcagggaaagtcttgaataatg

SEQ ID NO: 8780 - DNA, 520 bp, Setaria italica
  Peptide Sequence Number=SeqID_74754
agggcaacaaaagagagggagatgttgccaaaactcaaatttcctcacccaagagcaaggctgggcaaaagttggcaaagttttccttgtttattctctcaactgtgaactgtgtttttatcgtgttttcgcatggcaaagctctctgttgaagttctatctactagccacttgaaatgaatcattctactgaattactctcacttaattcttggttgcgcagagtttgattgacatggacaaggaagatcagcaaatgggtagaactgaggaccttcatgatcgccttcattctgcttactttcagtttcctgacactgacgacatacctttggaaggagcacacaatgttggtagagatgaaaatggaaatggcacttccggtgaatcgagtcgcaaagaaagcgccgatgatgaccccaaagatgacctgtctcacccgacactggccggactccctgttagccagctgcggaatgcggtgatatccatcggttcgattttgagaccgcagaggaga

SEQ ID NO: 8781 - DNA, 1363 bp, Setaria italica
  Peptide Sequence Number=SeqID_74755
ccattgcgttgtattgtacatcatatctgctgtagcttgtgtgcttctgtacttcgagtacaagcacattgccaggctgaggttatgtcacatttctcgagcaacaagcaatcctagacattttactgtccttgtccaaggaatacctaaaagtacagaatcattcagcaggactgttgagaatttctttaccaagtaccatgcatcaagttacctatctcatcaagtcgtttacaaagttgggaaagttcagaagatagtgagtggtgcaaagaaggtttacaggaagttcagacattccaagggcaccacagttgataagagatgcagatccattacatttcaatgttgtttttgtggagcgtcttctaattcattccagttgttgcccagtgacttcgagcaagagagcgaaaagcctcaaatgaatgattcaagcttgagcttacctgatgaggaatgtggtgctgcttttatatttttcaaaactcggtatgcagcactagttgtagcgaaaattcttcagacatccaaccctatgagatgggtcactagtctggctccagaacgtgatgacatttattggtctaatctctggttaccctacaagcaactctggattcggcacatagctacacttctgggttctattgttttcatgtttttatttctcatgccggtgacgtttatacaaggtttgactcagctagagcagctgcagcaaaggttccctttcctgagaggtatattagaaaagaaatacatgacccagttgataactggataccttcccagtgtgatcttgcaaatatttttgtatactgttcccccaaccatgatgctattttctactttagagggtcctatctatcacagtgaaaggaagaaaagtgcctgctgtaaagtattgtacttcaccatttggaatgtcttctttgtcaatgtcttgtcaggttctgcaattagccaagtgattgctttatcaagcccaaaggatattcctatgcagctggccagagcagtacctgtgcaggctacattctttacaacctatgttcttacttcaggatgggctagtctatcatcagaacttatgcaactctttggtcttacatggaacttcataagaagatatattctgcgaatgaaagaagaagaccttctttactcatttccctatcacactgaagtgcctaaagttctgttgttaggactgtttggggcttcacatgctcctgtactagcacctcttatctttgccctttttattgatataacttttgtctcggctatgttgtgtatcgtcaaccagttccttctaattgttttacttgttacttacttaaaattttaacgttactta

SEQ ID NO: 8782 - DNA, 608 bp, Setaria italica
  Peptide Sequence Number=SeqID_74756
aaaaaaataaaaaaaaaataaaaaaaaaaagaacaaaaagaagacacgtcatcttccattattcaagactttccctgcacagagtttgattgacatggacaaggaagatcagcaaatgggtagaactgaggaccttcatgatcgccttcattctgcttactttcagtttcctgacactgacgacatacctttggaaggagcacacaatgttggtagagatgaaaatggaaatggcacttccggtgaatcgagtcgcaaagaaagcgccgatgatgaccccaaagatgacctgtctcacccgacactggccggactccctgttagccagctgcggaatgcggtgatatccatcggttcgattttgagaccgcagaggagagaattacctgtatagcacattgtttcgtccgcccatgtaaattcacggttggcaaaccacacaagttatactcatagcacgtacaggaaggggaagatacatcatataccgaaatggaagagaagtatatatcgcccgtttgcaagggtgatgtatctgatgtgccaattgacttttctggtataccacgattgaaaacttatatattacaattcaaaattcgattcca

SEQ ID NO: 8783 - DNA, 685 bp, Setaria italica
  Peptide Sequence Number=SeqID_74757
cgcacgagaccggcggcgccgccgggacgcagccgcggttgggcctccggaagtcgaccggccggaagttggcggtgtcggggcagctgcactgcatttccgtacacacgccgtaggcgccgcacaccgtcgggaacgcgcagtcgtcggggaagaggcggagcacgtcgaagaccggcgcccaccccgccggccgccactcgtataggcggaggtggccgtcgtactcgaggcgcatgtactggaccgtgccggcggcgacggcgggcagctggatggtggtgagcggcgcaccagcgggcgaggcgagcaccgtgaggctgccgttggcgtacgcggcgtaggcgccggcggtcctggtgaagccgaggtggtagtagcgctgcggcggcttggcgtcgacgtaggcgctgaggctgtcgtcggcgacggcgaggtagaggcggctcggggaccagtttgcggcagaggtgttggcggtgaggcgcgcgccctggcgcagggactggccgacgaggagcgtgtcggtggggtggtcgaacgactgccagaccgtgcggttgctgccgtcgagcatcacgaggttgccgtcgctgttgatgctgatgccggcgacggaccgccccgcgctacccgccgaccagacgacggttgccgttcggccgtcctttgtaggtacgtaggt

SEQ ID NO: 8784 - DNA, 1755 bp, Setaria italica
  Peptide Sequence Number=SeqID_74758
tttttttttttttttttgtattcaagtaaacaaaccattttataagaatgcaaccacgaattagcccaaactctgtatcatgcacttctcactggtattcacattgatcactatcaaacgagcgccaaccataataaagactgtcaagttatctccaaccagcacagccaaggggccatttggtacccccaatgacgaaacagaggctcgcatttggctccaacattgtaacagtatcgacaaggaggagaggaggagagctgcaggagttgtttctaagggccacgggctctgaagaagcacaagcacccgcccgcctggccttccggtatcatgccgccgcccttgctcgtgtcgagggcctccatgagccgcaccacctcatccatgtccggacgcttgtccgggttcgcgtcccagcacttgcgcatgatgttcgccatcgcgcttgggcagcagcgggggatgtccgggcgcagattctgatgaacaacagcagatgagacatctgcaaaactgaggtctggataaggcatgtcacagcagtatatttcccataagcatatgccaaaactgtagacgtcacacttcctattgtatggcttgccttcaaggacctctggggccatgtagccaagtgtgcctgtcgcgcctgtcatatcctttggattctgagcctcaacacgagcaacaccaaaatcagcgattttaaggttccgttgcgtatcaagtagcatattttcagttttaacatcccgatgaactatctttcttgcgtgtagatagctcaatcctctggccagatccaatgctatctgaaccacaaccttgtatgcaagcttccgtcgcctgttctttattagatattgttttagtgttccaccagcaagatattctaccacaacacaacatgctcttggcggcagctcagtgtgagaactattggctggaatcttaaggtctgtagtacccatcgatgcaccaatgaactttgtaacatttggatgactgagctcatgccagacagcaacctcctgcttaaacgatgctcgcagtgtagcagtttcagtttccgttgcaaagccatcttcaccccaatccaacagttttactgcaacatcctgcccatcatacgttccgcgatacaccgtgccgtaggtgccctgcgcgatgacgtaccgaatctcgagcttggcgaggtcgatctcccagtcctcccggggccccagggtggacttgcccttgtgcttctcccaggtcttggccagctgcttctccagctggatgtccaggctctccaggtcgatcttgtcggctcgcacgtaggtctcgttcttcgccgccgccgacgcgccatcgccggcgctcgacgccatcgcggcccgggaccggcctccggcttccaagacctcaacttgtctcccttggcggagacttgcagcctccgctgtgtttgatggagcagtggagccctccacaggacctctgcgccgccaggggcagaggccagggtcgcaaattcagcggaaggaggaaccggtccccaggtcccggtggatctgcagctccagctccagcagcagggaggggagagcagagcaggaggacggcgagtcggcgaggacagggaaagaagcggggagttcgaggtgacgcgctccggtgagggcaggttatggaattaggtaggcgtgggtgggagccggtaggtggctgcggcgccggcgaggcggtggacgccggacgaaggtagga

SEQ ID NO: 8785 - DNA, 2032 bp, Setaria italica
  Peptide Sequence Number=SeqID_74759
gtactcaattctttgcatgatccatgaataagtcctttttatcaaaggtaaagatgtatatattcaccaatgtcaccaaaatggacacagaaagtagcattttcaataatgtaactcgtataccccggaatctctttagaatcacaattacatcatcacactggtatagaaaaggagcatttgaccccaaaggtcatataagagagccgtaggcctgtagtcgacgcacaaagatggcaccacaaccatgaacaccgactacgtcggtggagacaggaagcatgccatgccccagtcatttacatgggcaaattgttgctgagggaagaaggtatcaggaaaagaactatggaccgcgagccttggtgaagcataagcatcctggtgactggccatccggtatcatgccaccgcctttgcttgtgtcaagagcctctaaaagctgtaccacctcatccatatcagggcgtttatcaggatttgcatcccagcatttccgcataacattagcaaatgtgcttggacagcagcggggaatgtctgggcgcagattctgatggacaacagcggatgagacatcggcaaaactaaggtctgggtacggcatgtcacaacaatagatttcccacaggcaaatgccaaaactgtaaacatcacacttcctgttgtatggtttaccatcaagaacctctggggccatataaccaagtgtgcctgttgcaccagtcatgtcctttggattctgagcctcaacacgagcaacaccaaaatcagcaatcttaaggtttcgctgtggagtgagcagcatgttttcagttttcacatccctgtgtacaatctttctggagtgtagataactcaatcctctagccaaatccaatgcaagctgaaccacaactttgtaagcaagcttccgtcggctgttctttatcaaatattgcttcaaagttcctccagcgagatattctaccacaacacaacatgctcttgctggcaagttagtacgtgcaccaccgttggaattgttggctggaatcttaagatctgtggtacccatagatgcaccaacaaactttgtaacattaggatggcttagcttatgccaaacagcaacctcctgcttaaatgatgttcgcaaagctgcagtttcagcttctgtagcaaaaccatcttctccccaatccaaaagcttcactgcaacgtcctggccatcataggtgccgcgatacacggtgccataagtcccctgcgcgatgacatagcggatctccagcttcgcaagatcgatctcccactcctccttaggcccctgggacttgaggttggccttgccccaggtcttggtgagctgcttctccagctggatgtcaaggctcgtaagatcaatcttgtcggctcgcacatacgcatcgttgcctcccaggctcccggacctcttcagcttctccttcgcctcaggcatctcgctggtgctcgaagccatcgcctcggcggccgagagcagctttccagcaactatgcaggaagccccaaaactatggatagacgaactcctttactggagatgcagaatcggtgtgctacagaacatactgcagcaccagagacgaaacaagaacacgaatccaagaactggtaaagcttcaatcaaatcttgggcgagccttgactggaagattgctgaaatcttggcggagacttgacgaactaaagcgacggtggcagcacgaattcgaagagccgcggagaccaaaccgaccggccaagttgaccagcggctgacgaaaccgcggggaaagatcgcgagctgggggcgccgaccactggaatccaatcaggcagaggccagattgacctgacccccaacccgcaagaacgcgggacccggcggcgcctccagccgccaattggcagaggagattgcctccggggaaggagccgtggattcgtggagtggaagctccgccgatttggccagagacggcagcagaattgccgctcggggggtggggcggtcgcggtgttgacgaag

SEQ ID NO: 8786 - DNA, 826 bp, Setaria italica
  Peptide Sequence Number=SeqID_74760
agacggggcgggcaaaaatatatcatctgtaactctggatgttaaattagcaaactacaaaaatctatgcacaactgtaatggccacagctactgctctgggataaacattgtagcgaaaccatggcatatacaccaagctatcaaagttagcggccatcctgcgactcgtctaccttattcacatgtacatcacagcacgcaggcagcaaaggcacggccatgaggatacagatagcctccatctccatgccatacatcattttgaccttgttggctggcactgtgaatatgacgcagtcaccagctgatacatccctccttttagcagaaggtaaccgagactgttcaaattatcaacaagagcatctaagtctggaactcgcaagctgatcttatcagctaagttgtaaatctcagttcttgaaaagcaatcttttcgttgcaactcagattccttgtttaacgcattcagaaacgtccttgcctccttttgttggctcatcccaccgctccgagcaaaatcgacaaaaccatgttcatcaacatatttgtcatagagagattccttcatgatatctacaacatcctgagcatcttctctggtcacttcttctcttagatccacgcgagcacgagcttcagctaatctgactaggctttccaactgcctggctgtgatgggtgtaccgtcagcagaagtgctgcggtttctcaatcccaaataaaattttttcaaaatttcagctgctgcctttgacattctagggaatacatgttctcttgaataagctatatacttgcgaagaaattgcccagctaatgga

SEQ ID NO: 8787 - DNA, 214 bp, Setaria italica
  Peptide Sequence Number=SeqID_74761
gatgaagtgccaagcgtcagttgaaccagttttcataataagagttgtcagtcctattagagtacttgtctatcaagagctgtgatattgcagctaaagagtgtctagttaattttcctttgctggtttgtcgaaccttttgtcgttcttaatatgctagttatggcattatgaatctcgaattaaaaaaaaaaaacaaaaactaaaaaaaacg

SEQ ID NO: 8788 - DNA, 449 bp, Setaria italica
  Peptide Sequence Number=SeqID_74762
aagatgcaactgatggacatgggaattatcaaccaatgaaacgcagaagttgtgaatcacatgctgaggagccaccttgcaggtaagtccgccattttgcaggcgggctgccacagcaggagcccagctgccaaatgcagcggtaagtccgtctggattggtgtcagtaatcccatcgactggtggctccccgagtttggacacggcgaagtaggccaagacctggtttgcatccactagccccttgctctcgaaccacggatccagcatcccattcgcgccagcgcgacttgggggtggactcgagcacggcgtcgaggtcgtcgttgcgcgtgcacacgagtatcggcccgggcgcgtcgtcgggcaccttctcgccgcggccgacgagcacgtcccttcccggcgggcccatggacagcagcgcctggcccacgcgtcctccgccg

SEQ ID NO: 8789 - DNA, 1385 bp, Setaria italica
  Peptide Sequence Number=SeqID_74763
atgccactttaaatcagcatgttgtgcagtatgaattgacaaattcaatggaaactactagaggctgtctaggcacgttaggcgatcttgacattttcttttcatatgaaagagccacccagcctctgtggtaatgttgtggctatcataattcagaataaccttcttcatcagtttaaccttaacatactgatgacagaaaaacttatatgcatcttgtggctatcataattcagaataattgcattggccatcacaacagcgtagtttagtgctaaacttttacacacaaaggttttatttatgacacaggtgacatggaagttacaagtgtaacaggagaaaacacccaattcaaaagtaactgaaggtgcatgcaattctctatatagatagcagtatagcacctactgtcctgtggatctgtgcctcatgtacatgactactttttatatgaccttaatctcctttagccaagctgtgtggagtgggcaaggatctggctttcctgctgcaagtgccttctcggtgagagagtaaaaccaaccattcctccatttgaactctttcacagcagtagggaagtgtgccacagctcttgagtatgcacagagccgctcttctataccttcatcaaatgtaagccccctctctgcagctgcagcagacgctaattcagcaatcaggctcgcaacctcagctcggtagtctttttccaccacaccgacagtagcccctggatgccgagcaccaacaagcatgaaagctgaaatccatatcaacttctctagcatttgcttctgaaaggcttccttttcaagcaccttgcaggtaagtccgccattttgcaggcgggctgccacagcaggagcccagctgccaaatgcagcggtaagtccgtctggattggtgtcagtaatcccatcgactggtggctccccgagtttggacacggcgaagtaggccaagacctggtttgcatccactagccccttgctctcgaaccacggatccagcatcccattctggaaaaacaccaaatcgcgccagcgcgacttgggggtggactcgagcacggcgtcgaggtcgtcgttgcgcgtgcacacgagtatcggcccgggcgcgtcgtcgggcaccttctcgccgcggccgacgagcacgtcccttcccggcgggcccatggacagcagcgcctggcccacgcgtcctccgccgaccaccacggccggctgcaccgccgtcgccgccatcgccgcggaaaccctcgcgagcctgcggaccgccgtccttgaggaggaggagaggaggcggcggaggggaggcgacggcagctgggtgacggagacggcggctttgagggccatctcgacggggagtgggtggga

SEQ ID NO: 8790 - DNA, 370 bp, Setaria italica
  misc_feature (340)..(370): n is a, c, g, or t
  Peptide Sequence Number=SeqID_74764
cgcacaagcttcagattctgcaatgaaaatgcaatctgagaagatcgagagtttgaagaaagcagtaagagaaactgagtacctccttcgtcaactgctaaacttcagagggtaaggccaatgtgtttcttaggcatctgctcatgtccttccaattgcttgtgctggtttgtgcgtattgtggtttgtgcttaatgtgtttctaggccagctttgttcttggttaaagagatatcaagtttagtggtttgtgatctcttatgtacaatatgcttgtgcttattttttggtcatgaataataaagtgtgaagtgtgattagaaaacaaaaaaaaaaaaannnnnnnnnnnnnnnnnnnnnnnnnnnnnnn

SEQ ID NO: 8791 - DNA, 342 bp, Setaria italica
  Peptide Sequence Number=SeqID_74765
cagaaacagaaagagggcagcgagcaggggaatgaggatggatcctcctctcccctctgctatttttcgcccctcgtgagtcgtgagatggcggcggggtggatgaaatgccctgacgtgcgcgtgcccgggtagcgggcgcgcagggcctggcctccgctgcttgccctgacgtgcgcgtgcccgggagcgggaggggcggagccgcgacgccgttgcggcttcctcctcctcatcccgccccacccgtaggggcgccgcggacgtgagcgagtccgtccgtcatgtcgtctaattcttcgaccagcccgccggcggctccgtcgccggcgaagagcacgg

SEQ ID NO: 8792 - DNA, 527 bp, Setaria italica
  Peptide Sequence Number=SeqID_74766
caacagcctttcaaattccatcccaaagcagtccacgaatcacagccaactcacgttagcaaaactaaatcacagttaaatagagatgtttctctgttcgcatgccaacaaatcgtggaacatgaaaaattaacaaaccaacatcagggaaaagctacgcaaagctttgctttcattactgctcgtatacgtaggcacacgcgcagctaggaaggacacttgctccacaagctgccttgtagttgagcagtggattattacacagtacgcagattgcttctgtttaaaacgtttgcaaaggactaatcaaagttttcaatcttgattggtgttatgtcatcagccaccttgaacttccccactaatcttgcgaagaacatcatctcctgctccaaggtgaatttgatgttctcagccttgcgaaaaccatgtggttccccttcatactcaactaaagcaacgggaaggcctttgtcctttatggccctgtatattttcgttgtctgatctggttgcacaaccgttgt

SEQ ID NO: 8793 - DNA, 2086 bp, Setaria italica
  Peptide Sequence Number=SeqID_74767
aaggaaagcttgttccattattgctcgtagtcgtagtcttgtaagaatgtgcagcatgtaccaagttgcatctaagctgactagttcagcagttgatggtgggtaaacagaatgcagattgctgccattttaaattaaacgtttacaagcaggggctagtcaaagttttcaatcttgattggagttatgtcatcagccaccttgaatttccccactaatcttgcgaagaacaccatctcctgttccaaggtgaatttgatgttctcagccttgcggaaaccgtgttgttccccttcatactcaactaaagcaactggaagacctttgtcctttatggccttgtatattttcgttgcctgatctggtgatacaactgtgtcttccaatccttgaaacaaaatcactggacatgaaaaattgttaacaaaatttattggtgatctctcaaagtaagcttgtttattccccacaaggttatcaatatagtatgcttcaaacttgttcattcctgccctcaatgccgctaagtcagctatcccatataaagatgagccagtcttgaaagtctgtctgaaagcaagacaagctaaagttgtgaatccaccagcagattctcctgtaacacaaagccgttgcccgtccactcttctggtttccaccaggaatgtagcacaactacagcaatcattgacatcaacaacaccccattgccctaaaagcctctctcggtattctctcccatagcctgagcttcccccatagttaacatcaactagtgcccatcctctgctcgtccagtactgcacgctaagatccaggaccccttgtgcttcagctgtaggtccaccatgggttctgaccagtagtggcggcttttcttctgatgaaccttggaaactatcattatacggagcatagaaataagcatatgcatgctgtccaggaattacagtaggaaacttgataaattcaggcacgctaaaataggatttatgttttgttacatcctctgaggaggaccaaactagagagaaatcagcagtcactttcctcttttcatccagagttacctttgctattgattctggaagattagcagatgcaccttcaatatagaagcattcatctcctgaaactatgttagttacagaagagaagggaatgtcaagtgttgaaaaggactctgaaccagggtcaagcaccccaaagtatgacttcccattctgcctgtaacagcaaatgattttgtgacttgagttgtcttttccaaggaaatcataggagctgacaccaaaaatccacatgggcttggagaattcagcatcaagtgaatacagtgttgttaccacatttctctgctcatcccatttgtaaatattccaaaacccactccgacgatctgttatgaagaacagctccccttttgaagaccacttgggttcagtaggagattctactagtgttgggtctccaccagcaacacagatccgttttgttacctctcctttctcgttgaaatatccaacccatagttgtgatttatcccatgacatattcgggttactccactcgatccatgccatacgttttttagtttgatcaacacgtgggaaggcataaaagtcactgccgctgaccagcatagtaggttcttctacatcttgatcacttattcttacagcagcaattgtagtgatgggatttgagctgttctggcgatgatcttccattatagttacaaaacgatgaaagtgaggatcaaagacaccatcagcatagcgtacaactgattcggcgtattctggtgtcaacggtagtggcgagttatctccgattgtttgcttgtacagacgctggtcggtgtagttggagaagacaacaacatccccttgcacggcgaatgcaccaccgccgtactcctgcgcgagggaccgcaccgcgaacccctgcggcgtcacctcccgtgccttggcgcctgactccgtcgattctttcacgaggactgcgcgccctccttcctcgggacgcgtctcgacccagacgagccggccgtcgccggcgacggcgagcccctcagcggtcctcc

SEQ ID NO: 8794 - DNA, 886 bp, Setaria italica
  Peptide Sequence Number=SeqID_74768
ttttaagaacgaagaacatttttagcgagccttttcctgctttcttgagttgctcatcaaatccaaatgttacttttgacgtctgtttctcctttaataattcacaacatggtaactcggaaagatgataatatggagagtcgtcagcagatgaaaattctatcaacaggagctgaattggccacattcagataattgacgtcaactgcattctccccgaaatcatcttcgtacactgttcttacaatttgaacataatcacggatgatctcttgatagataatgccatcaggatgtgcatccaagacgaccaatgttcctggtgctaaccaagctttcgtctcctttgaaggcaatggtgctaaccaaaggatattgcgcaagttcatagaatcatcatatggtacattggatcctgcttggcaatatcccaaattataaggaaacaattccttgtcaattgctggatattctttagcatggaatagaattccgagccgtcctgtttcatatgagaggaaaagatgcccatggaacaaatcatatcgactgagtgatacgtttagtccaaccaaaggtccccgtgccacaatcaattcaaacaagaacgccaaatacgaattgagctcctcattggcgaagcgcctcccatatggtgttcttgtgagttggcatttgtccttctgcgtcccctgaacatctggcactggcagcattgttggatccagcgcgcggtggatggccccgggatcgccgccggagtcgacggcaagccgcgcaagctccatgaccggcgccggcggccacatcaccatctcgtccgcctccgccgcacccgcatcgcgaccttcccgcagaaacttccgggagcctccgccgctccaag

SEQ ID NO: 8795 - DNA, 471 bp, Setaria italica
  Peptide Sequence Number=SeqID_74769
aggaccgggatcggtgatatgcgtcgttaggtgtaggagatggtgaacgagcacgcctcattgtagtctgccgacaaccgggagtagaaatagaagattgagacttgtgcattttgcgacttgtatattgtctgttatatcgtggaggttccgaaactggatgaatggaagattccagtagatccacgcctggtaatatgtaacgcctgtggtactttggcgccttgatgagaagagcttgttgagatcttccttcctggtcaattgtctgttggcaaattcgtaccctctgttcaactgaagatactagaaattctgtttcgttaacctcatcagccttttcgctgacaagattatccaccttgtatgagacaaaacccagatggtccactgtgctaacaagggcctcaactgtgtaatctttcaaactcgtcatcaccgtagatttgtgcgagttgtttcggtaaaata

SEQ ID NO: 8796 - DNA, 730 bp, Setaria italica
  Peptide Sequence Number=SeqID_74770
accacgatcaacgtgtcaggccagaagttcaacgccctggtgatcgagaatttcatcttgaggcagccgtcaagtgtgaaagaagaattctggaaatgcgatgtggacgtggaagagcagcaggtgagggagctctatggactcaagagctcagagcctaacattctgtttgcactgtgctgcggcatcagatcatctccagcactccggatctacaaagccgatcgcgtcgccatggatctcgagaaggcgaagctggagtacctgcaggcatcgctggtggtgacgtcgacgaggcggctgctgatcccgagcctgatacactctagcatgcatgactttgcaaaggacatggagtcgctgctccggtggatctgcgagcagctgccgacgtcgtggtcgctgaggaaatccatggtggagtgcctgagcctgagggggcacacccaccatctcatcaacatggaggaggtggtggatgtcattccattcgactacgaatttcagtacctgctgcccatgtgatgcgacaacaagtatacacacatttcaattttaatttttcttgttgttgttcttgtgtgtgttttcctttaattctcgccttatttgttgcgccgcggaagcgcgatagatgtgtactgactagtggagtataagttaagtgatggatgattgataaggatgaatgattaaaaggttaaaggatgatgattatttgtaaaaaaag

SEQ ID NO: 8797 - DNA, 641 bp, Setaria italica
  Peptide Sequence Number=SeqID_74771
agtttaaaagtgaaaactggatcatcattatttcttacgagtgtacaaccaatgctttgatttccaaaccacaagactttctgcaagtccctgctctgatctattttacacgaaaacaatatgcctaaaaaatgctattctacatgaagggggtgggaggtatggataattaaacttttatctatttttttatacgttgatacagagcgatttagatgaacaagggtccaagttacatgtactgatgatgactttatctgtagagtccaaagaaatgagctgctgagctgagctggcttctgttactttggcagcggttggcaccgacgacgcgtagagggatgcaccagtggggaactggagacttttgacaaatcctgggagcaacagctgcctgatttgctctgacttctaccgtccacaaaattttgatccctagtgctgatcttcagagcttgctagatttgtttgcttcagaggcgtctctggtttggcattctcctgatgggaaccagtattcagaagaggaggatcgattttccattcgtgtgggaatttgacgtcgtggagactctctgaccggagcgaccacgcgagcgccgcctgggcgcagccggcgagcggctcgacgcggccggcgt

SEQ ID NO: 8798 - DNA, 389 bp, Setaria italica
  Peptide Sequence Number=SeqID_74772
gccactagtgtgctgctttggacctgctaaatactcatttattccttctggaagacctgctaataggctgatagatcatgagattcatgatagaatgagggatatgttttggtctccagataaatttgtgagggcaccaggagggccttcatccaatgttgctctagctttagcagcgattggtggcagggttgcattcatgggaaagttaggtgatgatgagtatggtcaaagtttgctgtaccacctaaatgtcaatggggttcaaacacgagcagtttgtatggactcttcagcgccaactgccgtgtccttgatgaaggtcacaagcaaaggcagtttgaagacaaactgcgttaaaccttgtgctgaggattgttttctgcagt

SEQ ID NO: 8799 - DNA, 302 bp, Setaria italica
  misc_feature (297)..(297): n is a, c, g, or t
  Peptide Sequence Number=SeqID_74773
ggcggccggcgcctgcggctgctggtcggggcagtcggtgcagacgacgccggactggtggcggtggaagttggcgatgaagatggcggccttgttgtccacgtcccgctcgcccacgtacggccaccggccgccgtcctcgtcgctcggccacaccctcatcaccctcttctcgcagccgtagccgcccgcgtcctcgcccgccgacgcgcctgaggaggagaagcacccgcccattgctcgcgccccttgcttcctctcgctcctcgccgcagccacccgcctcgatctcttccngacga

SEQ ID NO: 8800 - DNA, 736 bp, Setaria italica
  Peptide Sequence Number=SeqID_74774
aaggattattcattacaagtggctggcaactcgaggtgtggatgaagaatctatattgattgctctgcctgcagatcttcgccgtgacattaagcgccacctttgcctggatcttgttcgtcgggtcccacttttctcccagatggacgatcaacttctagatgccatctgtgagcgtcttgtatcttccttgagcacagagggtacatatattgtccgtgaaggtgacctggtgactgagatgctctttatcattcgtggtaagctggaaagttccactacagatggtggtcggacgggtttcttcaattcaatcaccctcaaacctggtgaattctgcggcgaagagctcctcgaatgggctctagttcccaagcctactgtcaacctgccatcatccactcggacggtgaaggcaatcctcgaagttgaggcatttgctctccgagctgaggacctcaggtttgtcgccagccaattcaggcgcctccacagcaggaagctgcaacacactttccggtactactctcaccattggaagacatgggccgcgtgctttatccagcatgcttggcgccgccacaagaggaggaagatggccaaggacctgagaatgagggaatcattctcctccatgaggtcatacgaaggccatggctcccccgaacagaatttcacgcttaggagaggagtaagcatcatcaaagaattgcctaagttcaggaaaccatcggag

SEQ ID NO: 8801 - DNA, 1923 bp, Setaria italica
  Peptide Sequence Number=SeqID_74775
gccggcggcgaggatgagcagcaggggccccgaggccggcgtgtcggagaagacgtccggcgcgtcgtcgtcgggcatgctgctgggcggcggcgagggcggcggcaacgccttcccatggagcaacgcgatgctgcaatggcagcgcacgggcttccacttccagccgcagaagaactggatgaacgatccgaatggccccgtgtactacaaggggtggtaccacctgttctaccagtacaacccggacggcgcgatctggggcaacaagatcgcttggggccacgccgtgtcccgcgaccttgtccactggcggcacctccccctggccatggttcccgaccagtggtacgacatcaacggcgtgtggacggggtccgccaccaccctccccgacggccgcctcgccatgctctacaccggctccaccaacgagtcggtgcaggtgcagtgcctcgccgtcccctccgacccctccgacccgctcctcaccaactggaccaagtacgagggcaaccccgtgctgttcccgccgccggccatcggccccaaggacttccgcgacccgaccaccgcctggttcgacccctccgaccgcacctggcgcatcgtcatcggctccaaggacccccaccacgccggcatcgccgtcacctacaaaaccaaggatttcatccacttcgacctcctcccgggcctcctccaccgcgtcgagggcaccggcatgtgggagtgcatcgacttctaccccgtgggcacacgcggcaggggctccgagaacggcatcgacatgtccgacgccatatccgagaacggcgtcgtcgtcggggacgtcgtgcacgtcatgaaggccagcatggacgacgaccgccacgactactacgcgcttgggcggtacgacgccgcggccaacgcgtggacgccgctcgacgccgccagggacgtcggcatcggcctgcgctacgactggggcaagttctacgcgtccaagaccttctacgacccggcgaagcgccgccgcgtgctctggggatgggtcggcgagaccgactcggagagagcagacgtgtccaagggatgggcgtcgctccagtcgatcccccgcacggtgctgttcgacactaagaccggcagcaacctgctccagtggcccgtcgatgaggtcgagacgctgcgcaccaactccaccgacctcagcggcatcaccatcgactacggctccgtgttcccgctcaacctccaccgcgccacccagctcgacatcgtcgccgagttcgaggtcgaccgccacgccgtcatggctctcaacgaggccgacgtcggctacaactgcagcaccagcggcggcgccgccaaccggggcgcgctcgggccctttggcctgctcgtcctcgccgacaagcacctccgcgagcagaccgccgtctacttctacgtcgccaagggcctcgacggcggcatcaccacgcacttctgccaggacgagtcgcggtcctccagcgccaacgacatcgtcaagcgcgtcgtcggcagcgccctccccgtgctcgacggcgagaccctctcgctgcgggtgctcgtcgaccactccatcgtcgagagcttcgcgcagggcggaaggtccacggccacctcgcgcgtctacccgacggaggccatctacgccaacgccggcgtctacctcttcaacaacgccaccgccgcccgggtcacggccaagaagctcgtcgtccacgagatggactcgtcctacaaccacgactacgtggcccaactctgagccatgcagctatccacttcattttttgatacagagaaaagcatctttctgctgctgcttgtacctatcaatttttgtttcccttttcgatatcccctgccttatttttgtttcccttttttctaattattatttgctcgagg

SEQ ID NO: 8802 - DNA, 496 bp, Setaria italica
  Peptide Sequence Number=SeqID_74776
ggcaccgcaagagattgtgctggcacactcggccgtcgggtgcttcgtgacgcactgcgggtggaactcgacgttggagggcatccgcaacggggtgcctctgctatgttggccttacttcaccgaccagttcgccaaccagacgtacatctgcgatatctggagggtgggaataagggtggcgacggtaggcagggaaggtattgtgaccaaggaggaaatcactgagagattggagagcttgctgggtgacggtggtgttaaggaaagggtgaataagttgaaggagttggcggagagtagcatgagtggagaggggcagtctttgaagaatctcaacgccttcatggagtctataaggaagtgaatatcacagcatggtttatttccctgaagttgcaagaaaaaaaatcgaaacgaaccgagcggaagagctgctgattatattaaaaagaagaaggtccagattggatagttacaacgcaacaataggtgc

SEQ ID NO: 8803 - DNA, 300 bp, Setaria italica
  Peptide Sequence Number=SeqID_74777
aacgcaacaaatgcgtgtcctcgcctcttcttttctcgctgtccaagtattcatactgttgcacgattgctgctccattcgactaacaaatagcagctaaaatgaggtctactaagaaatcaacagaaacaaaaaggctttcttacaaatggtatcgatcaaaccacctgaaagaataaaagaatggaggcccgtggattattgctgaagcaataagaaagctgaagcagcaaggaccaagaccaaagctaaggcgctgctgagacgggtcctgaatccgctgctgctcttaggaattct

SEQ ID NO: 8804 - DNA, 657 bp, Setaria italica
  Peptide Sequence Number=SeqID_74778
tgcaagactacaaggtaggacattgaaaccattagctgcataatgcccccacacccccaccccactttggaagttcatgtctggcaaatcaataggatagatttgcttttcgaaatctacagctcaagaagcagtttaaggatcaatacaagaacatatggttcacttgaagcatttagatgggcatattgaagaggttccctatttttgcctgccagcaaatgacctggttgatgttattgcaccatcatgctacagctgctttgactacacaaatggcttggcggatttagtggtggggtatatgggtgtaccaaaatattcaggggtttccatgacacagcatcctcagtacattacggtcaggaacgatcgtggaagggagatgctgagcctggtagagggccttctggagagtacgcctacagttagcagcgtatgcatgcatccgcagctagagaattgatgcaactttgttcagtgactctgcatgcaggagtaggactgtaggacattgacaagtgtgttgtgcctctgttttttcagggcgcaaggcaaccgtttgttatggagacggtgaaagctgacgatgcagcaaagttggggaaaggcccttcgaaaccagctccgagatttgtcggcgagattctggccttc

SEQ ID NO: 8805 - DNA, 692 bp, Setaria italica
  Peptide Sequence Number=SeqID_74779
tcgttgctgactcgctggtgtggagggaggcagcgagttccatggcctccaccacctgcctctccctttccctgcacgcctcctcggcgccaccctctgatcccgaaccccgccgcttctccttcgccccctcctcgtcctcctccacctccaagagaaggcgcgaggccggcagggctaaggttctcagggaggattggaggcagaaatccaagcccatccctcctggcgccgtctaccctgccaaggaccactgcagccgctgcggcctctgcgacacatactacgttgcgcatgtcaagaacgcctgcgccttcctggggcgacggcatgtcccgtgtcgaggatcttgagccattagtccatgggagaggcaggaaggaaggcatgaatgaaatgtactttggagtctatgatcaactcttgtatgccaggaagaccgaacctgttcaaggagcgcagtggacgggaattgtgacaacaatcgccgttgagatgctgaaagcaaatatggtcgatgctgtgtgatcctgacgacaggcttgctccaaggcctgttttggccaggacaccagatgaagtaattgcagccaaaggcgtgaaaccaacattatcaccaaatctcaatacccttgccttagttgaggtaaatcattcctttcacactatactctgctgtgtttgttgtcccc

SEQ ID NO: 8806 - DNA, 390 bp, Setaria italica
  Peptide Sequence Number=SeqID_74780
tctagagagtttaacagtttcctttggcaggcagctggtgtaaagcgccttcttttctgtggtgttggttgtcaagtgcaaggtgttttcctttacccaaccattaccattcttctttttctatttgtgactgttcatcatatatcacagttgttgaagttattatttgaactacagctttgagatctgtagaaaagtaccttggtttggaaaagctttatgtgcttggcacaaactgtggtaatttccaatacttattcaaatcaatcaatctttacattttctgttattgtgttgcatggaagatatattgtagctccgacatactatgtatttttctcagttgacaatggtacgcgtgaaggacttgaataaattcttgaaggcggc

SEQ ID NO: 8807 - DNA, 667 bp, Setaria italica
  Peptide Sequence Number=SeqID_74781
tacaaggtaggacattgaaaccattagctgcataatgccccacacccccaccccactttggaagttcatgtctggcaaatcaataggatagatttgcttttcgaaatctacagctcaagaagcagtttaaggatcaatacaagaacatatggtatacacagcgttgtcatgcttttgcttagaaacttttgatccgtgataacattgtataactgagaattttgacaggttcacttgaagcatttagatgggcatattgaagaggttccctattttgcctgccagcaaatgacctggttgatgttattgcaccatcatgctacagctgctttgactacacaaatggcttggcggatttagtggtggggtatatgggtgtaccaaaatattcaggggtttccatgacacagcatcctcagtacattacggtcaggaacgatcgtggaagggagatgctgagcctggtagagggccttctggagagtacgcctacagttagcagcggcgcaaggcaaccgtttgttatggagacggtgaaagctgacgatgacaagacaaaagttaggggaaaaggacccttacgaaaaccaagactaccgaagaatttagtacggacgaagaattactaggaccttacctacctagaaacctaggttaggaccaaaga

SEQ ID NO: 8808 - DNA, 1372 bp, Setaria italica
  misc_feature (1364)..(1364): n is a, c, g, or t
  Peptide Sequence Number=SeqID_74782
aagaatcaaatgccaaatccttctttatcgctgcaatgtgcaagcattaccacgtgggtttaagtaatggttttgttacttctgcagtgatcctgacgacaggcttgctccaaggcctgttttggccaggacaccagatgaagtaattgcagccaaaggcgtgaaaccaacattatcaccaaatctcaatacccttgccttagttgaggcagctggtgtaaagcgccttcttttctgtggtgttggttgtcaagtgcaagctttgagatctgtagaaaagtaccttggtttggaaaagctttatgtgcttggcacaaactgtgttgacaatggtacgcgtgaaggacttgataaattcttgaaggcggcaagcagtgatccagaaactgttcttcattatgaatttatgcaagactacaaggttcacttgaagcatttagatgggcatattgaagaggttccctatttttgcctgccagcaaatgacctggttgatgttattgcaccatcatgctacagctgctttgactacacaaatggcttggcggatttagtggtggggtatatgggtgtaccaaaatattcaggggtttccatgacacagcatcctcagtacattacggtcaggaacgatcgtggaagggagatgctgagcctggtagagggccttctggagagtacgcctacagttagcagcggcgcaaggcaaccgtttgttatggagacggtgaaagctgacgatgcagcaaagttggggaaaggcccttcgaaaccagctccgagatttgtcggcgagattctggccttcctcctgaacctggttgggcccaagggtctagagtttgcacgctactctctggactaccacaccatacggaattacctgcacgtgaggcgggcatggggaaaacggagagctgagcagcacatcccggggtacgccaagaagatcgtggaggcctacgacgggagtggacagatcgagtcgatgctccagcagtcaagggactgactgaccatttttcttcagtttcttcatccatgtagtcatgtagcatgtatttgtagcatcagtgcatcacatcacattgagctgaatagtatttgcataattgcattgcaagattagtattgcagggacataagtgtaatgtattgtgatgtactgatgtatagtacccctgctggatagtattttgcattgcaaggttagtattgcagcgacatgagtgtaatgtaatgtgatgtatagtaccccgtccgttcggttttatttatagtttcagacaacttagcagaaaaggacatgttattgtggaaaaaaacatttcccctttttacaaaaaaaaaaaaaaaaaaaaaanaaaaaaaa

SEQ ID NO: 8809 - DNA, 712 bp, Setaria italica
  Peptide Sequence Number=SeqID_74783
ttttgttccctttgtaccagatatgtacttcaccgttcttgtggatggacaaatccgatgtacaatatgatgcgccactccagttgttgggaaaaccttcgggtggagtagatccttcatataagcaacgttttccacgtccgcatcgtgacaagtgtatggtggtcagatgctctgcgatatctgcaattacttcttctggctgtggcctctgatcctttgaacggtcacagaaattcttgtactcttcagcatccctaattgcataggaactcaactcaacatcacatttcatctcctttggacagggctttaccatgtagaatctctggagggagaagaacttattattatttgtacatatgaagagcacataagatattataagtatagaatggacagacagtacacagtatactaccctatcagcaggcatttgaagtaccctttcttgcagagtaatggaaccatattctcaatactccaaactaatggcatcataagatcatccacagttacaagacaaaagcaatacatattgcaagaatatagcatacaaaaagactaagaaagtttaattgtggttaggtttaccaggaagaaaggatttaaaagaagcagatagttatatggatgtatcaaaatgttcatcaaatagtgcatgaataaatcaaagcacttgatcacagaatattcttatgcatgtggaatg

SEQ ID NO: 8810 - DNA, 230 bp, Setaria italica
  Peptide Sequence Number=SeqID_74784
ctgattctcaccggtctcttcctcctccgccgccatgccgcacctcgttcgcgagcggctctacttcggcgacatcaaagatgccatcgccgccctcactgattcctcctccaccccgaccttcacccacgtcctctcggtcgtcagctccgcctccatctccttcatcaccgactgccgcccgggcctcgccatccccaccgaggaggtccgccgcgtcgtcgctggcg

SEQ ID NO: 8811 - DNA, 384 bp, Setaria italica
  Peptide Sequence Number=SeqID_74785
gggcgaatagaatctgaattccaagttatggtcccttgttttcctcagccatttcccttttataggcctgcaaactttgaggagagcaagaaatttaaagaacggttgcaggcctataaaagggaaatggctgaggaaaacaagggaccataacttggaatgtagggcgatgatctgaattcgaatgttctttttatcataatccaatggccttagctctgtacgtcacatattttacagttttgaaaagctactagtgatgaactagaggctctaattaatacactgaacttttctgaactaactcttgtggttgtgctactgatgttcagtcaaatctcaaggaatcctatggaaacttggagttcctgtggaaactatttg

SEQ ID NO: 8812 - DNA, 371 bp, Setaria italica
  Peptide Sequence Number=SeqID_74786
acgcggcgacaaggcgagcagccaccctcggccaggtctttgtcgggcggccacccttagcctggtcttcgtcgggcgccggcgacgaggatcaggctcccgcagtcgcgcttagacatctctggagatgcatcccccactaaccttgcacaggcatcctatgtgtgctgagattatcgaagcattccagaagtgccatgtggatcaccccgtcaagaagttctttggtgaatgcacagatcttaagattaagctagaccagtgcttccggcaggagaaagctttgaagaggaaggcaaactttgaggagagcaagaaatttaaagaacggttgcaggcctataaaagggaaatggctgaggaaacaaggg

SEQ ID NO: 8813 - DNA, 427 bp, Setaria italica
  Peptide Sequence Number=SeqID_74787
gttttgtatagacagacacaggcacaggcagctgtagtgagtgagtagtgagaccggccgggcagggcagcagcggagaagagagcttgagagttgagacatggccatcggaggcggcggcttcgctgaaggccccgccggcgccggctacagcggccgggtcacctccttcgtggtgctctcctgcatcgtcgccggcagcggcggcatcctcttcggctacgacctcggcatctcaggtggggttacctccatggagtccttcctcagcaagttcttcccggacgtgtaccaccagatgagaggggacaagaaggtgagcaactactgccgcttcgacagcgagctcctcaccgtcttcacctcctccctctacgtcgccggcctcgtcgccacgctcttcgcctcctccgtcacaaggaggttc

SEQ ID NO: 8814 - DNA, 691 bp, Setaria italica
  Peptide Sequence Number=SeqID_74788
ctcttcactcgcatctctctgatctccatcttcttctctgctccaattctccaagagaccaacacaccagtaatggatggggagatggactggatcgccgcgcggttcctgctgtcgaccatcctcggggtgcatccgctggtggtcctggatgacggggaccgcgacgacgagcgcttccccgtggacgacggcgtccagcagcgcgtgacggtgccagcagcggtggaggcgcccgagggggtggccggcgtgtcggtctgcgcggtgtgcacggaggaggtcgcggcggggcaggccgtagtgcggctgccgtgcgcgcactggtaccatgccggctgcatcgccccctggctgcggatcaggaccacctgcccgacgtgccgtgccgagctgcctcgggagggcgggccggagaggtcgcggccggcggtggtgcatgccgcgcggctggcggaggtggcgatggagacggccggcggccggctgcggcgcgaggcgtcgtacacgatgctggcaggcatgttgcccagctaataaactatacttactagctggtggacgtgacagccatcgcgtgcgtgacagtagtattgtacagtgatgaaatttttttaagtatatatagtactgatgagcaatgtacaggataattcacttcacttcagcttattcagttggtttatcagcc

SEQ ID NO: 8815 - DNA, 645 bp, Setaria italica
  Peptide Sequence Number=SeqID_74789
cccggtgatcaccggaaccctagctccggcacctctagcgcctcgctctattccatcgctgcgcgtcgcctcccggacttcctcgccggattgatcgctgatcgagatggcaacgccacttatagcaggacttgcagttgcagcaactgctcttgctggtagatatggcatccaagcttggcaagcttataaggcaaggcctatagttccaaggatgcgcaaattctatgaaggtggctttcaacctacgatgaaccgaagggaagctgcgttgatccttggtgtcagggaatctgccaacacagagaaggtcaaagaggcgcacaagagggtcatggttgccaaccatccggatgctggtggaagtcattaccttgcttcaaagattaatgaggcgaaggatgtgttgacagggaaaacgaaaggaggtgggtcggccttttgattggagaatgaacagtgtgttcttccactcgaaagataattttgtacctcgagacttagcattagaagatagacacaaatcttggtgttatgaaaatttctggacaaagaatattggatattttcggaaggttattaactgcgtaataaaattctatgtttaattgtggcaccatcaaaaaaaaaaaaaaaaaactaaag

SEQ ID NO: 8816 - DNA, 1092 bp, Setaria italica
  misc_feature (1)..(54): n is a, c, g, or t
  Peptide Sequence Number=SeqID_74790
nnnnnnnnnnnnnnnnnnnnnnnnnnnnnnnnnnnnnnnnnnnnnnnnnnnnnncttttccaacgctccagactcttctaccttattcattcgcccattacttcaaacattttgcaggtttacattacacgtcatcgctagcgcgcccacgcgctgctcccggacccggacggcatcagacggtcgccgaagccagttccctcacttgcccggcctgatgcgccgcgcgctgatccggcgctccagctccacccgcgccttgctcctcttgcccgaggtcgtcgtcgtcctgctcccacaggaagctggcgtacgcggcgaggacgtggctgttctgtggggcggcctgcaccgacttctggaagtagccgagggacctctcctggtcgcggtgcacctcccagatcagcttcgcgtactgcgacttgatctcgccgtcgctggggtcggcgagcatggcgcgcgagtaatactcctccgccctcctcgggtcgcccttcacctcgtgcaggaactgcgcgtagttgcggaggaacagcgcgttgccgggctgctcgtccaccatccgcttgtactgcgcgtccagcgcggcgaccgcctcgtcctgcggcgccaaccgctcctccacgccctccattttggctcccgcaccctgcttggtcttgtcggtgccggcggtgaagaagccggaggcgatgcggtcgatcccgaggcccctggccaggaacagcggcacctccgggtggtccggctgcgacgtgcgctgctgcagcagcagctccggttcgtcgtggcgaggctcctcctgggacgccagcggttcggcgccgccgtgctcgccgaaggtgttgtagatggagaacgggagctccgtgtggaggccgccggaggtgggtttgcttgcgccgcttggggtggtggacgacaggcggtggagggaggggatgtggctatcggagaaggctcggcggagctgcagggaggaaggggacgagggaaaggaggagaggaaggggtgcaggaatggcgtggatgagctccgtagcaacatcctccgactccgagccttctcagaacgagagggaggaggcg

SEQ ID NO: 8817 - DNA, 1415 bp, Setaria italica
  Peptide Sequence Number=SeqID_74791
aatcccattgtttatgcctggcttgatggccacagcaccgatggcgaagaggacactgatgctcctgaactggcaccagtggatgatgccaatgtctcacagccactggtggctgcctctgggttggaaggggatggctttacaccatgggtggaaaagtccttgcagcctggtagtagaatggagatggttaacacaagcacactgcgtcagtcccttcgaggggcatctgcaattgaagaagggactccggagctccgctttcaaagggtgatccagattagccagcagcacagcattgtgaggccaggatcagtgaaccgcagccaacgggcagctagtccggacgccgataggctggtctgggcaatccaacgtacccataactctttagaagcagcaaggcggcagaagatggatagcgacaagaaggtgggtggaaagggtgctgctaagaaagatggttgctgtgagtgtagctccagctttgagtgcaatatctgtcttgacccggctaaacagcccgtggttacaccttgcggtcacctcttctgctggccatgcttgtaccagtggcttcatgcacattcagccaactctgagtgtcctgtctgcaagggcgaggtgctcgaagtgaatgtcactccaatttatggaagaggcggtgaagaaggggattctgccaaccttgatatgccacccaggccgcgagcaaacagaagggagagcctgaggcagcagctgcaaatgacagacacaagaggaattgcaacggtggtgaggcagttgatagaaaaccagggcatagtgagaggcctcccaagcccaacgggtatcgagatgactgtggttcctgcaggccggcaaagggctagggctcggagacagcaaaggcaagataacaatgcatcatcttccgtacctgcaactgcaataatgctgcatatgggcaatgttgcctctgagagcagcaatcagataccattgccaccttctaatgccaacaatactgcacctgtggctcctgcagctcctcagcagtcatcatctgtggagcaactgtcgaattctagcaccacagctgttatagtgggggagcctgggtcaagtaggcgtgcaaggccttcggagtccacagtcacaagaagaacgaggaggaggccacagtaggtaccagagtgctgtcgctctcttcaataaaacctacagaccatgccccattggtagttattaccatgattagcttcaataacatctcaaggttaataattttaggaatgtatatgccatcctgcctctctcttacataccatgtatgtagcttcatcatggaaaaggagtcgaaatgtcagtttcaatatctgatgaatatgttcttttgtgcgcttggaatataaattctgatttcggctaac

SEQ ID NO: 8818 - DNA, 529 bp, Setaria italica
  Peptide Sequence Number=SeqID_74792
tacgtacccgccggaggagcagccaatgcttgatcccattgtttatgcctggcttgatggccacagcaccgatggcgaagaggacactgatgctcctgaactggcaccagtggatgatgccaatgtctcacagccactggtggctgcctctgggttggaaggggatggctttacaccatgggtggaaaggtttgtgcagcctggtagtagaatggagatggttaacacaagcacactgcgtcagtcccttcgaggggcatctgcaattgaagaagggactccggagctccgctttcaaagggtgatccagattagccagcagcacagcattgtgaggccaggatcagtgaaccgcagccaacgggcagctagtccggacgccgataggctggtctgggcaatccaacgtacccatgcttgtaccagtggcttcatgcacattcagccaactctgagtgtcctgtctgcaaggcgaggtgctcgaagtgaatgtcactccaatttatggaagaggcggtgaagaagggat

SEQ ID NO: 8819 - DNA, 726 bp, Setaria italica
  Peptide Sequence Number=SeqID_74793
tgccacagcagctcattccttagtggtcaagagtggctttgacaatgaactagatgtagtgatcacactgacatccatgtatgccaagttcgggtgcatcgtggctgctagggcactctttgatacggtgccaaccccacgggtgaatgtgatcctttggaatgccatgatatccggttactctaagaatggccttgccaatgaggcggtgcaacttttcaagcagatgaggaaggttgcgaggagcatgacccctgactccgttaccttacggtcggtgattctggcttgtgctcagcttggttctgtggaacttgcggaatggatggaggactatgtccaaggcagtgaatacagggatgatgtgcttgttaacacagcgctgattgacatgtattctaaggcagggagcattgcacgtgcacgtacagtgtttgaacgaatgcacatgcaggagcgggatgttgttgtttggagtgcactgattggtggttacggggtgcatggccatgtcaaggaggccgttgccctgttcgaggacatgaagcatgctggagtgaaaccgaatgatgtgacattcctgggcctcctatcagcttgcaaccatgctggtgttgtggagaaagggtggagctacttccattccatgaaacatgactatgggatcgagccccggcacccgcactatgcctgcattggttggaccttgtctttgtcttcgttgta

SEQ ID NO: 8820 - DNA, 265 bp, Setaria italica
  Peptide Sequence Number=SeqID_74794
aataggacttaggtgagaacatcgatttttcgcccctggccttaatttagggtcgagtatttatcgttccctgttgaggtccatcctttgctgacaccaatgtaattagcatctaaagaaatcatttgaaactgctgtgattcatcagcaagacattttggttgtcatgtacaatgtacagaatgagaatcttgctaacaaagacggatctgtttcttcttctgccttgtggctttattgattggcatacgttcttttttaaaaa

SEQ ID NO: 8821 - DNA, 1479 bp, Setaria italica
  Peptide Sequence Number=SeqID_74795
ccgataaggatttccagacaaagcacgttcttcagggacaactgtgacatttgtcataatagatggattggtcattaccgtcgcatcagttggcgactcccgttgtgtactagaagctgaaggctcaatttaccatttatcttctgaccatcgatttgatgcaagtaagaggaggttgaccgtgtaactgaatctggaggtgatgttggaaggctaaatgttgttggtggtgccgagattggccccccttaggtgttggcctggaggtttgtgcttatctaggtcaattggagatcaagatgttggccaatttattgtcccagttcctctcgtgaagcaagtaaagctatctactgcgggaggccgacttattattgcaagcgatggtgtttgggatgccttgtctccagaagcagcttttaactgttcacgtgaacttcctccagagcctgcagctgaacaaattgttaaaacagctgttcattcaaaaggactgcgggatgataccacctgtattgtcgttgatatagtagcagaaaaaaacagctcctccatgccccttcctaaaaagcaacaaggaattggcgtcttcaaaaatatgttctgcaagaaaaaatcgtccgactcatcgtcccatgcggatagagaatatatggatccagatattgtggaggaaatgtttgaggatggatgtgcgcttctttctagacggcttgattctgaatatcctgttcgaaatatgttcaagctcttcatatgtgccatttgtcaagtagagttgaagccaaaccaagggatatctgtacatgaagattcatcacaacctggcagcttgcgtcgctgggatggtccattcctttgccagagctgtcaggaaaagaaagaagcaatggagggaaagcatcgttcgcgagattcatcaagaaacagtgggtcaggtgaatagttgtcatgtgtagattgatcaggtaactactgaccaacaacgccccggcgccaccgattttgcagcatattcttctgttgtggcacttccttgatcacatggaatgtctgggagttctgatctagaactagagtgaagtattgaattgccatttgtggaggtggctgcagcaattgagaagcatgctttctcttacagcaaggttcttgcccaggagtgtaggcagctttactctccctttgaccttgatggcacatacaggttgaaggtgacagaatggtgtggcatgcctattttaaggtcaattgctgcaatgcaaatcacttatcgtatagagctctgacgaatagctacagcattgtgattctgaaataggacttaggtgagaacatcgatttttcgcccctggccttaatttagggtcgagtatttatcgttccctgttgaggtccatcctttgctgaacaaccaaatagtaaattaagacaatactaaaagaaaatacaatttagaaaactagactagtagaatta

SEQ ID NO: 8822 - DNA, 673 bp, Setaria italica
  Peptide Sequence Number=SeqID_74796
ctccctcggccagctcctgctgcagcaactgaagttagaggtgttaacttcaaacgctttaggaagagggaaacagtgtccggaaacagcttcaaggaccttgttccttttgcacgagaaccatacagagaatctgattatgaagcgggcacagtgactgatttcatgcgggaggagaagcagcggaaacaaatggaagccattgcagaggacctcttcaacaacgcaaagtcaaagaaacgggcagctgctggcagttcaattcagaccctacttaccggctgcagatgagagcctgcaggagaagatcaccagtgtatgtacatatgctccgcctgactcttcattcagaggcctggagaactgcatgctcatttgctaaccggatgacagtcatcttcgaagcaccttcgacactccactttcactgaagttttctggaggtctgagaagcccgttttgctccagggctcctttttgaccatggtgggagaggctgaggctgtggtagatatgaattgtaccttagggcacgttcgctgatctaagttgggaaggctgtttgaaatggatcgtgttgtggctgacggctagtttcctgctgtgattctgggattacatgttggacacgtttaccagttctcagtttttgtttgataacaaaaaaaaaaaa

SEQ ID NO: 8823 - DNA, 302 bp, Setaria italica
  Peptide Sequence Number=SeqID_74797
aggacgcggcgtcccggccgaccatgaagcaggtgctgcagcagctcatccagtacgaccgcacggccagcgtcgccggcgcgtgccgggacgcccgcgacgatgacgacgacaacgctgcgcgggcgcaattaggcaaggggaagaagggcgaccgaggtgtgaagggagcgttggatagtggaggagagttttgggatggtgatgtggagatgagcagcggcttcgtagcacatcccgtttaaggcgtctttttttaaaaaaaactaagaaaggaaaactaagcaaaaaaaaaaacctaa

SEQ ID NO: 8824 - DNA, 837 bp, Setaria italica
  Peptide Sequence Number=SeqID_74798
taaggtaagttaattagttaggtactagttcgttgagggcctcagcctagtaggatggcggcatgatggcctagaacaacagggagcggataatattgttagtggatctaatgatgcgcccagctttaccgttctgggaggatgtgtagggacatggcatgcgcaggtgcatgccatgggtgaggaagaacgtgcgggtgcttgagttgtcaaactcgcgcccgttctcgcactggactgcctttatcttagcaccgaactgagtggccacatgagcaaagaaattagctagagtagaaaacgtgttagtttgtcagagtggcctttatcagattttttgcattaattgctcaattaatttttagtttgttggagtgagtaaattcaacaaaagttttcaatttccaaaaacatggtatgttgagaaaaattgggtagtatatgccaatttaaagagtattcagaatggaaacctcaggtataagttgaactttaagcctctaactcatggaattattgaatctaataaggtgggctttatgttattactcagtttaagtgttgtttttgagatatcgtaacctcaacatatcaaaacagggttccagggtcatggaatctttcaaatatgctgcatcggacacaccctcggagtagtaattccacaagtagctttaatttttatgaaatatgtccattatgtccttatttttttaaagaaaaagttatttcacatactacaatataaattaagagtaaaaattaggacttggaaaatgtgaaaagttcttatattttggacccaaaacagttggaatgaactttagaagtgctaaa

SEQ ID NO: 8825 - DNA, 372 bp, Setaria italica
  Peptide Sequence Number=SeqID_74799
taggtaaggtaagggaaggaggaagacgcggcgtcctgcttgggaggagcagctgcaatggcggcggcgttcttggcggaggcggcgccggagaggagggtgacggtgaggtcggtgttgaagtactccctgagctgggtgatcaccccatcgggcccgacggtccaggcgtgcacccagtagagctggcgcgtctcgtctgcgccctcggcgatgacggtggagccgaaggcgtcgacggagcgcggggtgaaggcgaagccgccgttccctgtctcgccgccgattcgcagttgcctctcgtctccgccgcccgtgcgattcccgtgcccgcgcctcgtagcccccgagtcagcagcctctcgcccttat

SEQ ID NO: 8826 - DNA, 341 bp, Setaria italica
  Peptide Sequence Number=SeqID_74800
cacggtgaggtcggtgttgaagtactcgcggagctgggtgatcaccccatcggcgcccacggtccaggcgtgcacccagtacacaccccgctcctggtcgccgccctcggcgatgacggtcgacccgaaggcgtccacggagcgcggcgcgaagcggaagctgctgctgctgtttgatccgccgccggcgagagcgaggagcaccaggaacttagttaataaaaaaaacaaaaaaaaaaacaaaaaaaaaaaaaaaaaaaaaaaaaagagcgaggagacaaaccaaaggaaaacttaaagttaaaagaaaacgaaaaactaaaaagaaaactaaaaccaaa

SEQ ID NO: 8827 - DNA, 741 bp, Setaria italica
  Peptide Sequence Number=SeqID_74801
ggcagcgacttgtgcgcgcgtcggcgcggcggctctgccacaggcacttggggcctgcggacgaggaggcggaagagggggaggaggaggaggaagacgcggcgtcctgcttgggaggagcagctgcaatggcggcggcgttcttggcggaggcggcgccggagaggagggtgacggtgaggtcggtgttgaagtactccctgagctgggtgatcaccccatcgggcccgacggtccaggcgtgcacccagtagagctggcgcgtctcgtctgcgccctcggcgatgacggtggagccgaaggcgtcgacggagcgcggggtgaaggcgaagccgccgttccctttctcggcgccggtgaggaggcgcatcatgtgctggcgcgcgggggggccatggaaccaccactcgaggtcggccgccagcagctcctgcgcccgtcgcgcgtcgcgagcgttgagcgcctcgtagaggcgcagcaccaggaagcggttgcgctgctcctccgactcctccaccacgagggcggccagctccgccgcctcctgcgggcgcggcgaggccgctccctgaccctggtggtgggtagccagctccagacgcgagccccgcgcaggctcctcgatcgaccccttcgctggggaacgggggaggccgccctgccctgcaacggaaaagcagtactcgaagcagagagatggaaacgaaacgaaacgaaacgaggacacgaggccggtggact

SEQ ID NO: 8828 - DNA, 902 bp, Setaria italica
  Peptide Sequence Number=SeqID_74802
ttttttgctggtgctgaccaagtaaatctcagcagcatttgatgtgcagattaaagggttgattctgtatgcatacagatgtatatatccagtgacagtagatgaataagaaggcaaactgaacatatacagataatccaatatacatgcaacacaatactagtttggtttttatgattactgatgaggaggaggaagaagcagcagcagtacagaggatgcggcgtcgccatcttgctactgtagtagtaatttcacacaccaccaacacacctactattacttactaatcgattgctcgatcagcccatccaattattgttcaatcaatcagatcagagggccaggacgaggcccgggagggagttggttgcgcggtctgggcgtcggctctgccagatgcacttggtggcggcggcgaggcgggtcacggtgaggtcggtgttgaagtactcgcggagctgggtgatcaccccatcggcgcccacggtccaggcgtgcacccagtacacaccccgctcctggtcgccgccctcggcgatgacggtcgacccgaaggcgtccacggagcgcggcgcgaagcggaagctgctgctgctgtttgatccgccgccggtgagcacgcgcatcatgtgctggtgcttgggcgggccatggaaccaccactcgaggtccgccgccaggagggcctgcacgccggcgtggtcgcgcccgttcagcgcctcgtacagccggagcaccaggaacttgttgcgctgctcctcgctctcgccggcggcggtggcgccgagcactagcggctcctcctccagcttagcagacgccgccagctccttggatcctagtgcgcgcgattggatggttttggtgtcttgttgggccaacaatccaagacaaataca

SEQ ID NO: 8829 - DNA, 915 bp, Setaria italica
  Peptide Sequence Number=SeqID_74803
gtcggacccgtactcgagtcccctccctcctcctccgcctcccatataaccccgccgcacgggatagggcttccccgtctcgccgccgattcgctgttgcctctcgtctccgccgcccgtgcgattcccgtgcccgcgcctcgtagcccccgagtcagcagcctctcgcccttatcgcgggattcgtgccgagttagggttagggtttgtgcggtcgcggagaggagggtgtaggagaagaagaggggtcggagatggaggaggtgacggagggagtgaacaacctggcgattacggagccgcacaagaagaaccggatccaggtctccaacaccaagaagccgctgttcttctacgtcaacctcgccaagaggtacatgcagcagcacgaggaggtggagctctcggcccttggcatggccattgctacggtggtgactgttgctgaaattctgaaaaataatgggcttgctgttgaaaagaagatcatgacatccacagttgatgtcaaggatgattcaaggagtcgccctattcagaaggccaagatcgaaatagtgctgggcaagacagagaaatttgatgagctgatggcagcagctgatgaggagagggaagctgccaaggctgctgaggagcagagctaaacatctattttaaattttgctgttgtagtttaattagtgtcatgctagctgctgcgtttgaatctcttgactaacaagagatatgcttctttgttatcaatcaagagctctgctcattgattagctcggatgttaacttggttgatctattggttgtttgtttcactttaagttgggatcgttttgaatggcaacttgtttgcttagcatatttattggtgtatgcaaaatagtcgtggtggtgccatttgtggttggctaaaaaaaa

SEQ ID NO: 8830 - DNA, 378 bp, Setaria italica
  Peptide Sequence Number=SeqID_74804
ctgtcgcccgcctccggcgcgtccgccttccgcccgccgccgcaggctccgccctcgtcggcggcgttcttcctcaacgcggctgcggcggcggcggggcaggactttggcgacgacgggggcaacgggccccactcgttcatgcagaccaagccgttccatggactcatgcagctgcccgacctccaaggcaatggcgccgggggccccggcggttcggcgccaggcctcttcaacctgggcttctttgctaacaatggcaacagctcggggtctagccacgagcatgcaagccagggcctcatgaacaatgaccagttcagcggcggggcaggcggcggcggtggttcggaggcatcggcagcggggattttcggg

SEQ ID NO: 8831 - DNA, 1624 bp, Setaria italica
  Peptide Sequence Number=SeqID_74805
cgcgaccgccggcgccagtggtcgccctaccacaacgaccgcggccgggaccgcgaccgggctcccccttccgcggcggcggtgacggcgggggcgcctggtctgcctccgacgacgacaacgacaaggaactccagggcctcagctacttcgagtaccgccgcatcaagcgccagaagctccgcaagagcaagaagcggtgcatctggaacataacgcccagcccaccacgtgccgagggcgacgacgagaactacggttacagcgacgtggaggaggagaagaaggaatccccggagaagaagagctcgccggaggggagcgaggaggacagcaaggatgcgtcggggtccgagtccggtgagtccgatagcctctctgagtccagcgaatccgagggttctaggaggaagaggaaagggagaaagagcagtcggcgtagtagcaagcggagtcggcgccgtcatcgccgtcgctcataccattctgagagtgaggacgaaagcgtgagcaatgatgattcagagggctcgttggattctgaggactctagggataggaggagcaagaaaaggtcgcggaggcacaggaaatctaggaggggtaggagctccaggaagaagaagaggagccaggatacagcatctgagcaaagctccgaggaggcagagcattctgatcctagccccagggacagtaagaaaaagagtaagacctcaaagaggaagaggagcaagcggtcagactctgaagaatcattaccttctgataccaatcctgatgttaaggaagatgatgaagaaataaaggagccggaaattgatcccgaagcaatcaaattcaaggaaaggcttgaggcccagaagaaagctgccttggagaacgatatgcctgttgggccaatgcctcttccccgtgccgaagggcacattagctatggtggtgcactaaggcctggtgaaggtgatgctattgcacagtatgttcagcaagggaagcgtattccacggcgtggtgaggtcggtctgtctgcagaggaaattcagaagtttgaggatttggggtatgtgatgagtggaagtagacaccagaggatgaatgctatccgtatcaggaaggaaaaccaagtttacagtgctgaggataagagggcgctggctatgtttaactacgaggagaagtcgaagcgggagcataaggttatggctgacttgcagcgcttggttcagagaaccattggcaatgatgtggggccttcacatgatccatttgctactactgatagctgagtaatgatgtcccaatcttctataatgaaatggtcgcctgtgtgtgttaggccttgtttggataaacctattccctctcaatacacatggattggggtggaaaatgaaataatttccctgtcaatgtctcctaacatctatctattagaggagattatgaataatccaaacaaagccttacgcagatagtacacttgaaccttagtcaaaaagagcttattgttagcttgtatttctgtattggctatgttttgtaatatggttatccttccatgtgcttatgttttctattattatggtttcaagcttgctcggttttttaactaaaaaaaaaa

SEQ ID NO: 8832 - DNA, 377 bp, Setaria italica
  Peptide Sequence Number=SeqID_74806
tgactccactgcactgactgctcccagtagctagcaggatgcgacctgtgttaacttgtactaccctttttgattggatttatttattttccgtgggcatatttgggtcagcagttaagctgattgcaagaaaattttggcttgtctctgtttgctgggtttgggttttcattctggaatccagccacagcgttcaactgaatggaatggagcaatatcccgtgttgtggttgggcttgaagaagcttgcagtattctagaaagaaatctggagtaggcctcgttttggcaattgtttgcgctggctttacctctcttgttccttttttatcccccccaacccaaggaacattaatagttgttcttccattttctat

SEQ ID NO: 8833 - DNA, 226 bp, Setaria italica
  Peptide Sequence Number=SeqID_74807
aagcagaaggagacgcctcttgttggtgacaatggcgaacttcagcaggagctgcacacatttgtttgtgacgtctcctgggtctgtcaggtcttgagcaagcttgagatggtgaagtgcattgttctctattgggttggagtgtcatctgatgtggttgaagctgtcgacgcagtatgccctgggcacgactgtctgaataccaggctgaaggtggtagaggtgt

SEQ ID NO: 8834 - DNA, 1712 bp, Setaria italica
  misc_feature (463)..(463): n is a, c, g, or t
  Peptide Sequence Number=SeqID_74808
ctctcagtgtcaccagcaaattttagaggctgtaaggtttgttcacgtgcttacataatgaaagagaggagtgttctaatggaacgatatgaaattgggagattgttaggacaagggacctttgtgaaggtcaatcttgctacgggtcagaccgttgccataaaaatgatccataaggacaagattatgaagactggtctcatggatcagataaagagggagatctcgataatgagattggttagacatccaaacattctgcagctctttgaggtaatggctacaaagaacaggatttattttgttcttgagtatgctaaaggcggtgagcttttcaaaaaaatagaaaagggaaagcttaccgaggaggctgcaaggaagtattttcaacagttgattagtgctgtggactcattgtgacttgaagcctgagaacctgctactggatgagaatgaaaccctnaaggtctgtgattttggtttaagtgccgtagctgagtcaaagagacaagatggaatgctccacacagcatgcggtactccggcttatgttgctcctgaagtgctcagcaggaaaggctacagtggcgcaaaggcagatgtctggtcttgtggtgtgattctgtttgtgcttgtggctagttatctccctttccatgatgaaatctcatagagatgtataagaaatttcaaaagctgagtacagatgccctcgttatttttctgcggcactgaaggagctcctttatggaatccttgatccagatcctaatactagaatgcccatctcaatgataaagagaagtgcttggtaccggaagcccgttgggttggcagtgctgaaaactgaaatagtcaacaagatttgtacagaagctaccacctctggcttgactgatggcgttctgagagaaatcaaggatcattgaggctgacgaacttgaatgcattcaacatcatttccctctccacaggatttgatctttcctgtatgtttgatgaaaaatacagccaaagggaagcacggtttacttccgagcagtcagcaggagctgtctttgggaagctgaaggaactggccaggcgtttgaagctcaaagttacaaagaaagatggagtgttgaaattggccacaaccaaggaaggaagaaacggtattcttgagctggatgcggagatatttgagattgctccttcttttgtattggttgggttgaagaagactaatggtgacacattggagtaccagacgctgatgaaagatggcattaggccatcactcaaggatattgtgtggacatggcaaggtgatcagcagcagtcatgtattcttagacatgcagggcagcagcagctgcaactgcccaccactgccgccatttccactacaccagtaatacatcagtagtacagagttgcaattgcaaatgcctttctcaccatcgccaccatgatcctaagaaaaggcgatctgccaagtttgctactgcatcttgacatattaatatgtttttctagattggtatttaactgtaaaaacttgcatagatttgcactgttagtggaaatgcaggccctacggttacccttttttgttaacattgtaaatcctgcatgtacagaagtgttgtcttttcaaatatgaatactgtgagaaaaaatggttaaaacagggtaataatatggttgatgcttttcatttttgttaaaaa

SEQ ID NO: 8835 - DNA, 284 bp, Setaria italica
  Peptide Sequence Number=SeqID_74809
gcggccggggagagcgcggcggtgggcgagagcaggaactcccgcggctcgaactccatcgccgacgccgcctgcgacggcgcgtcggaggacgtccccgcgcccgccccggccccggacgctgcggcggcgtcgaattgcgcctgggagctggagcccgggccggtgaggcgctggaccagcgccatgaagtccccgggcttggtgtggatgaccttgggcgaggcgtcgtagatgatgaccggctgccgcgcctgctgctggtactggtgctggtgctggtg

SEQ ID NO: 8836 - DNA, 640 bp, Setaria italica
  Peptide Sequence Number=SeqID_74810
ccggcgcgcgcctacgacgccgccgcgctgaagctccgcgggcccggcgccaccaccaactacccctccgccgacgcgaagacggcggcggcggcggctccggcgacgagcgggagcgggagcgggagcatcgtgctgtcggagggcgcgtcgtcctcctcctcctcctctcgggactctccgctggcaccgagtctggcgcttccggccacggccgccgcgcagccctgccatctgttcctggacccgacgacgacgacggtggtggtcgtggcgccggcgctgctgcagttcctgccgccgaagagcgaggaggagcatagcttcgcagggtcgagctcctcgccgtacgtggtgtttgactcggcgccgccggccgtgggcctggggctggacctgaacctggcgctgccggcgccagggacgatggtggtgtagcggacagactaatcaattggttaattgcatacagtaggaattagctgatgatggatccagatgccatcaggccagtgtaagataggctgcagatttgttaatgcagcccatcgttttcctttctttttgtactggcacatctgcatcttcttgcaatgcaacagcgaggatgatcttccctcccagtttaccaaaaaaaaaa

SEQ ID NO: 8837 - DNA, 724 bp, Setaria italica
  Peptide Sequence Number=SeqID_74811
ctactactacacaattggaaagagaactgagtagaaaccccaacaagctgattgtgctggagttcatggcgccgtggtccgagccaagcaaggtcatgaagatcccgtataggcaaatcgccggcaatagttctaaagacaaagtcaacttctacacgctcaacgtcgacaagttcagagtatgtactgtatggatgatgccgagctagcagcgtcggcaaatcattaactcgatcgttggatgatttcggcgccgccgtcctgattcctgatgcatgagtgcaggatttggcggaggaagttggtgtggaggcgctgccgacgtactttctggtcaaggacgaggacgtgaaggacatgatcgttggcatgaagcggcaggagctcgagaaggccataggagactggagcaagtgatccgatcatccatgcatgcgtcgatcgagaacgggaaaagaattgaatgatccataaataaccccactactgtcccatgcatgtattgtatacgtatattcaaactcgtgtgcatgtacacatcctagctcatcagccgccgtagcagctagttagggtgcattattgtacgtatggatcgattgtgtcccatgtttgatttcctaaacattcgatgggatgggtgctaaacataagcaaaggtaaccaaacgccccatatgtatactggtttcaaacagtttgcaataaataaatgtcgtcgcagc

SEQ ID NO: 8838 - DNA, 669 bp, Setaria italica
  Peptide Sequence Number=SeqID_74812
aacaggagcccacgcagtgatcgaaagcgagtaaaaagagaagatggccggcgttgtgaccatcactactactacacaattggaaagagaactgagtagaaaccccaacaagctgattgtgctggagttcatggcgccgtggtccgagccaagcaaggtcatgaagatcccgtataggcaaatcgccggcaatagttctaaagacaaagtcaacttctacacgctcaacgtcgacaagttcagagatttggcggaggaagttggtgtggaggcgctgccgacgtactttctggtcaaggacgaggacgtgaaggacatgatcgttggcatgaagcggcaggagctcgagaaggccataggagactggagcaagtgatccgatcatccatgcatgcgtcgatcgagaacgggaaaagaattgaatgatccataaataaccccactactgtcccatgcatgtattgtatacgtatattcaaactcgtgtgcatgtacacatcctagctcatcagccgccgtagcagctagttagggtgcattattgtacgtatggatcgattgtgtcccatgtttgatttcctaaacttccgtggtcagaaggaatatggtcccctttggttacatttgcttattcttagcacccaaattaacttaagaacaaacccgtaa

SEQ ID NO: 8839 - DNA, 272 bp, Setaria italica
  Peptide Sequence Number=SeqID_74813
tttttttttttttttaagtttaaagatcacccgactattaaagtagcacaactacaaaattaagttataatacatcaccatacatcaccagcaatgctgccagctgcagaatgatcttgccgggacaaattcatagtgctagtaataagttgacagcaaaaaatggtagttccatggcatgttgatcgtgctaagttgaccaggctaactatataatagctataaacccgaacccctcctagcatcaagaaacattgaatgtcgacccaata

SEQ ID NO: 8840 - DNA, 428 bp, Setaria italica
  Peptide Sequence Number=SeqID_74814
ggtgaatcaactggcagggaaggaagttcagaactgattggtgttgtagcagaaacatgcttcttgagctgggaaacatggaccacagggtgaatgcggcactcaaccggaaggtccaacttatatgccacagaaccaacccgttgcaacaccttgaaaggtccataaaatttgaaggagagcttctgattggatctagaagccactgatgtctgattatatggttgaagcttgaggtacaccaagtcattcacttgaaattcacgctcagtgcgaagcttgtcagcctgagatttcattcgctgctgagcccggaggagctgctgctgaatcaacttggataataaatcgcgttcagtcaaccttgtctccaactcaggcacagctgaagcagtcaagttggtgatgccaaaatgccttgggggatg

SEQ ID NO: 8841 - DNA, 293 bp, Setaria italica
  Peptide Sequence Number=SeqID_74815
tcgttacttcttgtaaacttggcaagaaacttgaggaactcttgcggggtgctttcacctccattctgcctacagtgcagcaagtactccatggcttgcttgtaaccaatggcccgagttgcagagttcatattcggatgcagaccgatatcaagcagccatgatgcttctgaaagcaaacctcctgtgtcagccagcatttcttcacacctcaaatcaagtgccctgtacagttcaatgcgtggactcgcaaggaatatacaaaagagtcataatccagcttcgtggcttca

SEQ ID NO: 8842 - DNA, 600 bp, Setaria italica
  Peptide Sequence Number=SeqID_74816
ctaagctaccgtcagtggaaactcctactttgcactaagcaagatcttaatgaattagtgataactttatcactttcttcctttctggagttatcctgagcaattactaaagcaggacgtatggtattctagacaatcgagtatgtgaagaaaatctagtcttttttgttttaggtatgagaaaatctagtcatatgctcatcttttacacttccagaacttttgttagcaggatgcaaagtctctcattgtaacctggtatcaaggcttaactccatataacattagaggccatgagacgcttaagtggagagtcaatgtattgttaccaacttagttaccagcttctgttttattatcagttacagccatgtcttttatttcccgaaaaaaaaaccaagcattgaggatggttagacttcttatctcttagcagtggccgcattttatataaccttgtgccagttcttgtggagctaaattgcatgtagatgtgaggatagtgctgcagatgtttgtaaacagaggaggttcaccaccgaaaatggctcaaacttttgctttccaggagtaacgttaaattaactaaagtaaactaaa

SEQ ID NO: 8843 - DNA, 1048 bp, Setaria italica
  Peptide Sequence Number=SeqID_74817
gaaaccctggcagcctgtttccattctcaaaacaaaataatcctttcgaagtgaccagctcaagaccagagtttggccttgtctcatcagattcactgatgagctctcctcatagctccttggagaatgtcaatctgctcagctcacaaagtctgaatgaaaaccagagttcagcttccctgcaacattttgtggattggccaaggacacctgcccagggaggtctttcatggcccgacgctgaagacatgcaagctcagagatcacagctctcagtatctgctccaatggcatcttctgagctatcttcagcttccacatctccgattcatgagaagctaatgttgtcaccacttaagctgagccgcgagtatagtcctattgggctaagcattgcagcaagcagagatgaagttagccagttagaagcaaactgggcgacgatgttccgcgattcttcgatgggcgggccattgggggaggtcttaaccaagaacggtaacgctgaagcaaagaactgcctgtcggcacctctgaaccttctaacggacttctgggattcaagccccgggatggagtcatccccagtgggagttctgcagaagaccaccttcggatcagtctccagcagcactggaagcagccccaggatggagaaccacggtgcttatgatggtatcagcaacctgcgggatgatctcggttcaattgtagtgagccatccgaacatccgcctactgtgagcttctgagttctgaccgtgaaattctgcaacaagaggaaggcatatggaaacagatgagccagctttggcatgttacatatcgataatccatgatcttgagagccagcatttacctcatagtctgtcatttgagactgatcaccagctgcttttgccattttcagctctcctttctttttttcccctttctctttttaacttggctttgtaagttgtaactttcaccttcctcggatcgtgaaatgctgcaatgtgtggtgtggatggacttggtgcgccgttgttgcatctaaaaaaaaaaaa

SEQ ID NO: 8844 - DNA, 727 bp, Setaria italica
  misc_feature (718)..(727): n is a, c, g, or t
  Peptide Sequence Number=SeqID_74818
aacagagattatagaaggcgaagccggagcagaagtagggaacgatatgaccaggacaggtacagagatagtgatcaccgtcgccgtagcagaactcgcagtgttagtcctgattatgacaggaaacatgacagaaacagtcgctctcctgcacatagaagccctagtcatggaaaaggccattcacctcgtaggataccttcttgtgaaggaactcctagcaggcccagggatggccgctctccacgttctggaagccattgagcctaagttgaatatcatacacatggacagcttgagggtgagtggactagagctttggcaaaaacaggtctgtctgcttggttactggagctatatggtggcaatggtggagtattccatgtagctgcattcgacttccagtactgctttttgtgaacatctgagccgcctttgggagctacatacgtattagatattgtcatctcaatactggatgcttactatagctggtgacttttatgtctctagttgtatgatggagcgaagaggtgttttgttgataagtggtaaggatgcaagttgacagtagtattgctggtttgccttggatatgatggtggtgatcatttcactgccatcctttgctgtctgtcaaatgagaggttcgactggcagattgcttgatcaattcaaccatctatcaagcacgtttctgcttgctcttagtagtttnnnnnnnnnn

SEQ ID NO: 8845 - DNA, 802 bp, Setaria italica
  Peptide Sequence Number=SeqID_74819
caactccgaaacccctgaccataacccacggccccgccgccttcctcccggccggcaccgtctccggcggcgatgtcgcacttcaggcgctccgggccgccggagaaccgcgacaccttctccctcctcgtcctcaacgtctccttccgcactacggccgacgacctcttcccgctcttcgaccgctacggcgatgtcgtcgatatctacatcccgcgcgaccgcaggactggagattcgcgtgggttcgcgttcgtgaggtacaactatgagggcgaggcgcaggatgccgtcgacgggcttgatgggaggaaggtggatgggagggcgatcatggtgcagtttgccaagtatgggcccaattctgaaaagattcataggggtaggattacagaagaaattccaaagccaaggggtcatttcagaagtcgcagtccgagatggaggtatcgagatgattatcgggacagagattatagaaggcgaagccggagcagaagtagggaacgatatgaccaggacaggtacagagatagtgatcaccgtcgccgtagcagaactcgcagtgttagtcctgattatgacaggaaacatgacagaaacagtcgctctcctgcacatagaagccctagtcatggaaaaggccattcacctcgtaggataccttcttgtgaaggaactcctagcaggcccagggatggccgctctccacgttctggaagccattgagcctaagttgaatatcatacacatggacagcttaaacaaacaaataaggaaacagcttgagggtgagtggaca

SEQ ID NO: 8846 - DNA, 484 bp, Setaria italica
  Peptide Sequence Number=SeqID_74820
tgttcttgtctttcttccttaagatcgcaagaacctactttgcaggtttaaccggagcaccagttctgacgctatgcaaaaggttggcactaagaaccaatctggtgtaaaggaattttcaacatttcattctttcgacaaccctaaagggcgtgcaatccaaaaggctcctgttggcactaaaagcatgctagcggctctcttcatcaagcacaaatcagcgaagatgaaaaagatagcagttcgctgatgagctcgcatttgattgggggggcaggtatcactgtaaatttcatgctggaagagaagcttgatattgtacatctgacccgtggcgtctgcgttcagtctgctgttggtttagagctgagtatctgtagtcatttctctatttcgtaattgttgttattgtcatcttgctgatgaccgaatgtaatgatttcatatcagcatgcaccatgctcgccgtgtaattctgcttgct

SEQ ID NO: 8847 - DNA, 1259 bp, Setaria italica
  misc_feature (1221)..(1259): n is a, c, g, or t
  Peptide Sequence Number=SeqID_74821
cgccggagccaagggaagtggggaatgcaggcgctgcgccacggcccggcggcgggcggcggctggggcggggtcgcgggggcgggccccaccaccgtcgacgaggcgtccatggagcgcagcaagagcttcatcaaggccctgcaggagctccagaacctccggccgcagctctactccgcctccgagtactgcgagaagtcctacctccacagcgagcagaagcagatggtgctggacaacttgaaagattatgctgtacgagctgttgtcaatgcggttgatcatctgggtactgttgcctacaaattgacagaccttttcgaacagcaagcttctgaggtgtcaactttcgaactgaaagttgcacgtctgaaccagcaagtcttcacatgccaagtctacacagacaaagaaggcctcaggcagcagcaaatgatggggacaaacataaaacaccacaagcactatatcctaccatctactggtcataagagatccccggctcatgctcacctgccagcagacactgatcaggaatcaaaacctagaccttatccctcagcaaagaccctttcctggcatctggcttcagagaacagcaccacagcaaatgcagcacataaacctacatttgccctagtggacacagcatcatcaaaacctgcatcaggtaaggagcggtctgcttctcctatgcgcagacctctgcagtttaaccggagcaccagttctgacgctatgcaaaaggttggcactaagaaccaatctggtgtaaaggaattttcaacatttcattctttcgacaaccctaaagggcgtgcaatccaaaaggctcctgttggcactaaaagcatgctagcggctctcttcatcaagcacaaatcagcgaagatgaaaaagatagcagttcgctgatgagctcgcatttgattggggggcaggtatcactgtaaatttcatgctggaagagaagcttgatattgtacatctgacccgtggcgtctgcgttcagtctgctgttggtttagagctgagtatctgtagtcatttctcatttcgtaattgttgttattgtcatcttgctgatgaccgaaatgtaatgatttcatatcagcatgcaccatgctcgccgtgtaattctgcttgctcgaagcttcggcttttagcatctaaataaaagcatctcggaaatagactttagaacttttttttaaaaannnnnnnnnnnnnnnnnnnnnnnnnnnnnnnnnnnnnnn

SEQ ID NO: 8848 - DNA, 1470 bp, Setaria italica
  misc_feature (1430)..(1470): n is a, c, g, or t
  Peptide Sequence Number=SeqID_74822
gtacaccaccactcggcactcgctgcacctgggagaccggcaaagcgaggggagccgcgcgggaggcgtcgcgtgttccttgcttcgtcctcacgtgccgtggccaccccgcttcctcctcctccccccgtatccgtcctgttcccccaccgagctaaccggcggcgggggtgtcggccagtgggcggaggcgatgcatcacgaaccgtggcggcctggtgctgagaccgccggggcgggggcggggcccgcgcccaccaccgtcgacgaggcgtccatggagcgcagcaagagcttcgtcaaggcgctgcaggagctcaagaacctgcggccgcagctctactcggcatcggagtactgcgagaagtcctacctccacagcgagcagaagcagatggtgctggacaacttgaaagattatgctgtacgagctgttgtcaatgcggttgatcatctgggcactgttgcctacaaattgacagacctgtacgaacagcaggcttctgaggtgtcaactttcgaattgaaagtagcatgcttaaaccagcaagtccttacctgccaaacttacacggacaaagaaggccttaggcaacagcagatgacgggggctgccaggagacaccacaaacattacatcgtaccatatgcgggaaataaaagaatgcaatctttttctgagatgcaaggcaatgctgattttgactcaacacctagaccttactcctcagcaaagacccttcagtggcatttggtttcagagaagaactccaagagcaatagacctgatcagtctgaatccaccccaggagaaacaaaaactactaagccttcatcaagtggcttccgccttctcggcaaggaatcatctgcatctcccttgtccaaacatgtgcaatccaacttgaccagcttggatattgttagtgtcggcatgaaggaccagcccgggacaaggcatttgtcatcattcagttcttttgacaacccaagagggcgtcaaatccagaaggctccgcttcgcacaaaaagtatgttagctgctttctttgttaagcacagatcagcaaagatgaaaaacgtctctgttcgttgatcaacggcaagcctgcagtttgctgcagccataccaatgtggaagtcaaggacatgtatacatagcttcttccatgttgtagattgtatttggatcttgtatattagtgctctatagataaacctcctgataccctttcaatctgtatcttaatgctatcttgctgatggcctaaatgtaatgatttatatggatatacagtaatagttctataccgtagtgccatctcagtgtccaggaaatacagtgtaaacggaatgtacaaggagtcgagtatacttttgtgcgagaaataaaaggtggatggctcatctaattaggtaaaaaaaaaaannnnnnnnnnnnnnnnnnnnnnnnnnnnnnnnnnnnnnnnn

SEQ ID NO: 8849 - DNA, 547 bp, Setaria italica
  Peptide Sequence Number=SeqID_74823
cttggtcccctgcaggctggcgtcgagccgcgcggcctgctcgccgacgtcggcgtccgacacgaagcccccgaaccggcgcacggcggcgtacctggccccggcccaccggtgcacgcgcaggccctcggccggcggcgggtccgcctggttcttggccggcacgtagaagctgacgacgaaggaggaggcgcagaagggcccgtcgctgggcagcaccagcgtcagcaccggcgccgtcatctcgatcgtctcgttgtacgcgttcttgccctggatgtagttgaacagctggaggaagccagcgcgcgtggcggcgacgaaggagatgtcctcgatgggcgaggtggagacccacatggcgtccgtgtaccgccggatctcgaacccgttggcgctgtccaccacctcgtacgccgggcactcgatgcgctcgcacgtcggcggcactgcggcggccacggcgagcagagccgcggcggcggcggcgaggagcaggctgctccggcgcgccatgctttgcttctcactcgcgctgctgccgatt

SEQ ID NO: 8850 - DNA, 1090 bp, Setaria italica
  misc_feature (28)..(28): n is a, c, g, or t
  Peptide Sequence Number=SeqID_74824
agaacaggtttgcccataagggaatcanccttttcgctagttgaacaacatggaatatcttggttatcatcagcatgagctcctacctctggttccacttgtacagcaacatccagttcgtctccagtttcattaataaaagaatgtagagcaagattggcgtggatttctagatcgtgtttcacttcaacaacatcacttgaaggagagcagcatccttcaccggtcatctctttatccaacaaaggagaactactatgagaatcaattccagacagctgttcctgctgtaaatctactggaacagagagcatatctagttcagaacttctgttaacactgaaagatgcatcagattttaaatgagaatctactcctggtgtctcatccgtgagatcttctttgccagaaaaggtcattgatgtagcgccttgtatatccatggtagatgaaggctcagcacattgagaaccaaacttagaatgaacacaggcttcctggtttaacttcactggcaaggcagaaacagaacttggaaaatctgattcactgaccagaaaagcatttgaaatattgttagagtctgaggccggttcactgtgacaaccttcagcggcagctgaaaaatttatctcatgatactcacggcagaaggatctgaaatcttcttcagtcataacttctgatggcaatggcgcttcatcaggtggagttgcaggctcccaaagggaatcagcagctgctcccatattgtcatgctgcactagaagttctgaaaggaaatcctgttcttcagggaaacatggttggcaactaacaatgggagatggacaagtttgagttaggctcagcatgtaggcaggatccatgaatgggtttgtactagtaaaatcttgatcgggcatcccccaagccaaatcttgatcgtcaacatcctctggttgttcccccatggtgttacatttcaggcttactgcaaaatccttatccaaatcacacagagagtgaactccagcattatgactggactctagtaattcctcttgataatcagattctacaggaaaatgtcctgcggaaagaacctcat

SEQ ID NO: 8851 - DNA, 598 bp, Setaria italica
  Peptide Sequence Number=SeqID_74825
cttttaagaactacgatgaagcaggcaatccacggagaaattcaatgcctcaaatatcttgtccttgccaatatgttgatggaatctgaagtgaatccctttgatggacaagaggccaagccgtaagacatccaatgatccccgcataaatcttgtagcttgattttctaccaccctgaaaactctaatgcttgcaggtataaaaatgatcccgagatccttgcaatgacaaacttgattgcagcgtaccagaagaatgacatcatggaatttgaaaagatcctaaagagtaatagaagaacaataatggatgatccttttatccgtaactatattgaggacctattgaagaacatcagaactcaagtcttactcaagcttattaagccatatacgcggatcaggataccgttcatttcacaggaactcaatgtccccgagaaggatgtcgagcagctcttggtatctctcattttggacaaccgtatccagggccacatagatcaggtgaacaagctgctaacggagcgggagtgctgcacgatggagcggccgatggagttgatccattcctccttctctttctcggtgtcggcga

SEQ ID NO: 8852 - DNA, 268 bp, Setaria italica
  Peptide Sequence Number=SeqID_74826
gggaagatgcacatggctgagaggcagtgggcagaagctgcgactgatttctttgaagcttttaagaactacgatgaagcaggcaatccacggagaattcaatgcctcaaatatcttgtccttgccaatatgttgatggaatctgaagtgaatccctttgatggacaagaggccaagccgtataaaaatgatcccgagatccttgcaatgacaaacatgatgtcattcttctggtacgctctttaattctttagtatttgtttatata

SEQ ID NO: 8853 - DNA, 1737 bp, Setaria italica
  misc_feature (1709)..(1737): n is a, c, g, or t
  Peptide Sequence Number=SeqID_74827
cggccgtcccttgtgttcccatcgagcccatctctccgcctctccgcaaggtgcaagggcgcaaagacgcaaacccctcgttccccagaaaccctagccctccatccccgcgctcgccgagtccctcgccgccgccatgggctccgatgcggacatggaggactacgggttcgagtactcggacgaggagccggaggagcaggacgtcgacatcgagaaccagtactacaactccaaaggtatggttgagacagacccagagggtgcacttgctggttttgatcaagtagtcaaaatggagccagaaaaggctgaatggggatttaaggctctcaaacaaactgtcaagctttactataagctggtgaaatacaaagaaatgatggatgcctacagggagatgttaacatacataaaatctgctgtgacccgaaactacagtgagaaatgtataaacaacataatggattttgtttctgggtcagctagtcagaacttttctcttttgcaagagttctaccagacaacactgaaagcgcttgaagaagcaaaaaatgagagattatggttcaagacaaatctgaagctttgcaaaatttggtttgatatgggggagtacggtcgcatgagcaagatactgaaggagttgcataaatcttgtcaaaaggaagacggttctgatgatcaaaagaaaggcacacagcttttggaagtctatgctatcgaaatccaaatgtacactgaaacaaagaataataaaaagcttaaggaattgtatcagagggctctttccatcaaatcagcgatacctcatccaagaatcatgggtataattcgtgaatgtggtgggaagatgcacatggctgagaggcagtgggcagaagctgcgactgatttctttgaagcttttaagaactacgatgaagcaggcaatccacggagaattcaatgcctcaaatatcttgtccttgccaatatgttgatggaatctgaagtgaatccctttgatggacaagaggccaagccgtataaaaatgatcccgagatccttgcaatgacaaacttgattgcagcgtaccagaagaatgacatcatggaatttgaaaagatcctaaagagtaatagaagaacaataatggatgatccttttatccgtaactatattgaggacctattgaagaacatcagaactcaagtcttactcaagcttattaagccatatacgcggatcaggataccgttcatttcacaggaactcaatgtccccgagaaggatgtcgagcagctcttggtatctctcattttggacaaccgtatccagggccacatagatcaggtgaacaagctgctagaacgtggagacaggtccaaggggatgaggaagtacaatgccattgacaagtggaatactcagctgaagaccatttaccaaacggtgtccaacagagttgggtgagacggcttctggctgtcgtgtatttgcactcatgagatatgttgatagcctgttttggggatctgagggcaaatgcaaattgttttgacgcttgaggtagaatgttggatctgggtgtaatgtagagcttgaactgaacccagtgtttttagagtccgagagactttactatggtccaagccaattgccagaggggaacgattatccatctggttgccctacttttcgaaaaagcctctcgagtccttaaacnnnnnnnnnnnnnnnnnnnnnnnnnnnnn

SEQ ID NO: 8854 - DNA, 1029 bp, Setaria italica
  Peptide Sequence Number=SeqID_74828
tttcctatttaaactgtcatcgatgtttgcaacatattctttaacatgaagctccaaattgttcatgtcgtacaggatctgaagcaataacaaatatacagataacctcaaattctaagcctcctcacggaaatatcctggtataagcacatcagcaggacagcctcatgaaaatccaaatgaacattttcttaggccaagtaattttgcactacattgacctaagacttacagcaatgtggaaagggagaggcttaaatttctcaggtacaacagtaaaaatggccaaagagcatactttgaagtttgaacttaacacgtgagccctatttctgaaacagggcagaaagctcccctttttcagccatggatgaaataatgtcacagcctcccacaagctcccctccaacaaaaagctgaggaaatgtcggccagttgctgtatgtcttcagggtttctcttagcccatggttgtgttcctcatcaagcacatcaacagttacaaaatccactccatgtgcttccaggatacccaccaccctttgtgagaatccacactggggagcactccttgatcctttgatgaaggctaccactttgttctccttcaccagacgatctatcagctgttctagtgggacagtcagctgaacatggcgaccaggtgtcaatcgcaagtctggaggcctctgcggagcaccaacccaggtgttgtttccagcaacattccctggtggtgccttgcctgtggattctatatgttcttccatccatgatttccaggcattagtaaggaccgctcgatctggtgtctcctcatctgctactgaaaccttgacagaggcgcagaggtcggcggggaccttccggcggtggccctcgacgctggccctgacgttgcgcgaaatcccgacgaactgcagttccccggcggcgtcgtagacgccgtagaccccgggcttggggggcagggcttcctcgtcgagcgggggctgggcggactccggagggatgggcacgggggacgcc

SEQ ID NO: 8855 - DNA, 378 bp, Setaria italica
  Peptide Sequence Number=SeqID_74829
agtattagggtgttgtgtgctgttgcttgtgtgcgtgatgtttctagatgggcatctagtttgtctttcagtggttatctgtgtcctcaccaatttttcatttcagcgtctggaatggatcatgttcgtgtgcatcctaggtttctacactcaaatgcaacaagtcacaaatgggctctaggcggtatggtcttcctttcatttctccttattcctatctcttttctataacatgtggaatcagagttcagacacaccactcagcaatgtgttactggcttctgttatagactactttgatcatattttttggttaacatgtgctgtgatattgcagctttggctgagctgctggacaattctctcgatgaagtaagc

SEQ ID NO: 8856 - DNA, 3054 bp, Setaria italica
  misc_feature (2991)..(3054): n is a, c, g, or t
  Peptide Sequence Number=SeqID_74830
gtaatgctggtagaacagatgcttggttagttatcagtattatgtaaaagagaaaaattccttcaatacactcaataaatcccccatctgcaactgcatgctggcctatatacctttgattcataaaccggatgttccatctttgtggccattttcttgtaaaatagggtgtcatttagtaaagatgaaatttattgtttactctgaatagtactagtgattgattggcctcactcactcaatggtgtttacctgtattctgtatttctgtttctaacatacttcatggtagtacttcacatggtgtttatcgatttgttaacgtaagtgttttttagcccaccggtggtgaaaaccgaggcggcggaggagcgcggctccctgccccggacgccggcggcggccacggcgggggccaacggcggggccgccagcgcgtccccggcggcggttatcgaccttagcagcagcgactccgattccgacggcgagggcgcgggcgggagcggaaagagggcgcggggcgcgggagggggcggctcggcggggaagcgggctagggtttccgcggccgtcgacctgcccccggggttcctcgagccgataccgctgccaccgccggtggtgccggcagcctgcgcgacgaagcagttctggaaggccggggactacgacgggaagccgctcggaaatggggtgccgcagccgtcagcgtctggaatggatcatgttcgtgtgcatcctaggtttctacactcaaatgcaacaagtcacaaatgggctctaggcgctttggctgagctgctggacaattctctcgatgaagtcataaatggagctacctatgtgaacatagacatgttagagaacgaaaaagacagtgacaaagagatgtcaagaatgcttcttgttgaagatgatggtggtggcatggacccggataaaatgaggcagtgcatgtccttgggttattcagttaagagcaaaattgctagtactattgggcaatatggtaatggtttcaagacaagtacgatgaggcttggtgctgatgttttagttttctcccgtagtcgtggaaaatcaggcaaaaggcctactcaaagcattggcatgctatcttatacatttcttaggagcactggcaaagaggacataattgttccaatgattgattatgaatataaacaaggatgggaaagaatggtccgaactacatcggatgattggaacacaagcttacgtacaatcattgcatggtctccatattcaactgaagcagaattacttgaacagtttaattctatgaaagaacaagggacgcgtattattatttacaatctttgggaggatgaccaaggggacttggaacttgattttgatgctgatgtacatgatattcaactcagaggtggtaaccgtgatgagaaaaatatccagatggcaaaccagttcccaaactccaagcattacctcacatacaggcattcattgaggagttatgcttcaattttgtatctgcgacttccaaattacttccaaatgattttacgtggaaaagagattgaacaccataatattgtgactgatatgatgctgaaaaaagaggttacatacaggccagtggcacctaacggacatccaaaggattcaaatatggtagctgatgtaaccattgggtttgtaaaagatgcaaaacatcacattgatgttcaaggatttaatgtataccacaagaaccgcttgataaagcctttctggagggtgtggactgctgcaggaagtggtggccgtggtgtcataggtgtacttgaggcaaacttcatagagccagctcatgataagcaggactttgagcgcacaacacttctggcaagacttgaagcacgcttagttcaaatgcagaaggattactggtcagggaatgctcatcggataggatatgttgcgccgcgacctggcagaatctctgagtcaggagagggagaaatttttcctgaaaacaccacaagtgcacaaccatcaccctattgttctgggaaaggctacacatattcgaaagatttccacaatagtaaaaagagtgggaaggctggcacatcatttggtatccagcagagagctgagaagtctgcaaggactaaacgatctacaaagtcagtactacatgggctacctgatagcgatgacagtgattctgagtttgtgggcactccgtcatcaaggtcaagatctcacatccttaatataaaccaaaaatcatttcaaaatggcagtattggtttgacaacacctcaatccagtggactcacagaaagagagagagtcagaactgagtcacagttgatggacccaaatgcaactattgatgagtatgaggctgttatcaagcaattaagggatgaaaactcatcactaaaggaaagattatcaaaggtggaagaatcgatgcagcaagaactggtgatggagcgtgacaagaataagtctctgacagagagggtggaggatttgcagagacaacttgtgtctgcaaccaaggaacaagaagcactgattgacatattctccgaagaaagaacccgtcgagacctagaagaggacagcctgaagaagaaactgaaggaagcatctctcaccatacaggacttgctggagcaactgaacaacgccaggaaaggccgcaaattttgaggaaataaactagcagcatcgctaccctttcactaactagtggaagccgtcgcagaggatgctgtagggcagggttctcctccatggtttgcttgcctcattgttggtttagagttgaggattagctacaccattgtcgtgcacctgatcgtcgtctggatcatctcgtgtcgtgtacagcggacagccaagtagtagtgacaaccaaagggcacatcatggtgtaccggcagtcagtggtaaccctgaataaaccccttgcttagttatctcaattcgttctgttagattaaaaannnnnnnnnnnnnnnnnnnnnnnnnnnnnnnnnnnnnnnnnnnnnnnnnnnnnnnnnnnnnnnn

SEQ ID NO: 8857 - DNA, 348 bp, Setaria italica
  misc_feature (317)..(348): n is a, c, g, or t
  Peptide Sequence Number=SeqID_74831
ttttttagttttttcgaagtaagtcgcactagtaaccactgctgaagtgctgatcatgatttgagtttttgcattttcgatgggaattgcaagaaaggaagaccgaagattggcttggcgagcggaagtgctgtgtgctgtatgtgctctgtgtgaatgtgtgttaatgtgtggaagtgatggttgttgttagcaagaggaaggccttttgctctactttacattttcatataaaagggaattactccatgtcacgttgcttgagaaaatatttcatgattgggaaaactagatttttctttgattgattttaaggnnnnnnnnnnnnnnnnnnnnnnnnnnnnnnnn

SEQ ID NO: 8858 - DNA, 605 bp, Setaria italica
  Peptide Sequence Number=SeqID_74832
tttttttgtttcatccaaggatgtagtatcggctcttagctcgctcagtttattgtatatttacaggtttccgtggtagtttaaacagaaattgctcgtcagtagttccttaagacagccccagttataaacctatggttcagtacagcctcggcagttggccgcttgcggtaatccggatcaagcattgcctggagcaactcccagccagcaccatcccccaaatctagaaaatttacggcttccgacaaccggtcatctgccagacaatactctcttgccgcataaatgtcaagccggaaagtgctctccaaaagtctctgcaaggaaatgccatccataatgcctgcttcacaaaatggaataaatgccatgtatgcaataagcagcccggctccataaatgtcatcagctattccaaaggctcgcttctccaaaggagttgatgctcctgcagctgatgctcggcgccacagtccgtctgacaatgctccagcaccaacagatgaatacccaatatctacagaaaatgccaaatctcgcagccttggaactagatagggtccctctttctccattacagtattgagaacaactagaagaaa

SEQ ID NO: 8859 - DNA, 512 bp, Setaria italica
  Peptide Sequence Number=SeqID_74833
agactgctccataactgttttgtcaagtacacgcaaatgtaagtgatcgtttttgttgaagtaaaagaaaaggaatacttgcatgtcatcagctattccaaaggctcgcttctccaaaggagttgatgctcctgcagctgatgctcggcgccacagtccgtctgacaatgctccagcaccaacagatgaatacccaatatctacagaaaatgccaaatctcgcagccttggaactagatagggtccctctttctccattacagtattgagaacaacagaagaaggcccaaggctttgatgcagtctatcatgattgtgcatgtggacaaggccactcatagctccattaagcagcttaagaacaaagtatctccttagctccaatttgtatgctcgactgaaagggttccaaaatggcatgtctccagattgctctttcagttgcctctcactggttattttcgcatagtctgcagcactatatctcccatcatcacggaaggctagccact

SEQ ID NO: 8860 - DNA, 490 bp, Setaria italica
  Peptide Sequence Number=SeqID_74834
actacgttactacggggacaacggacccgggacgccgcgagggagatgagggagcgggagcggtggaggcggcggtgcgggcagctgtcgtcggcgccggcgtcgctgcgggtgtcgccggcgaacagcgggcacctgtcggtgggcgggtcggtgaaggtgtcgacgtcgtcggaggagagcaccatggaggagctgcagagcgccatcgaggccgccatcgcgcactgcaagaactccatctccgtggccaagcagacggcggccggggacggcaacaagcttcagtaaaccgtagttagtaggggcggcggcgctcgtgcgacgtatgtgctggctcaacgtacgtgtggcttatgatcgagctttggatcggagatcagaattccggaagctgagcggccgggattaggttcgatcacacgcaagggcatgtaaattaagatacggaagaacagatgaaattaaagcagtatacagatatatagtg

SEQ ID NO: 8861 - DNA, 393 bp, Setaria italica
  Peptide Sequence Number=SeqID_74835
ggaacaatcccaagatcaacaaaatgaaattgataaactgaagtccagtctggaaagctgtgagaaggccatagatgactgtactcttcaacatgaactggagaaggacagcattctctcagatctcctaaacctccaaaaggaagtatcgaccttgtcatcatcttctttgatgaaagaaaaggaatctatccgaaaggaacttgataggactaaagcaaagttaagagagactgagaacaaacttaagaattccattcaggagaaaataaaacttcagagtgaaaaagcagaggcccacaaagaagttaagaaattgcaaagccagagaactttgcttgaacgtgatttacggaaacgtgactcagtcactgttgacaaaaggcatgagct

SEQ ID NO: 8862 - DNA, 325 bp, Setaria italica
  Peptide Sequence Number=SeqID_74836
tgtacagagagttaaccagctggtgctgagcagcggatattttgaatcaattctaactgactgttgctatttagaaaattgacattttcgtaggtgaactataaatgtaagttttctataagcactgatatccaatgctgtcaaaaaggtatttgcaagaatataatgcaatccagtgctatttctcataggctgtacttccacaatgcaagtccacttgggagattctgtttcttcttgccatgtagtgtattttttgacctgcgtgtgtttgcagtgcaattggcgatggccaagtgagtactgaatagcatcaactgcattt

SEQ ID NO: 8863 - DNA, 698 bp, Setaria italica
  Peptide Sequence Number=SeqID_74837
gaagataagcttttccttcattctttgtcgccagatagtccacttcccattacacatttatcacccatagaattccagccatgaaaatataaggcaatctgaactgacatttacataaagagcttcctatatagaaattaattaatctaccctttgcatttaaaagaacggtaatgttcagatgcaccggggtaaatgcctacatctatctatacaagcacaatatagaatatgcaacctattgtaccaagacgtaagactgtcgtatgagatttatttacaaggaaaatgccaaaaaggagggaaaaaagacgccttgtgtgtgcaacgttttctctgaaagcgtcagcatgtcagcaaccttaggattcctccaacaacacccagtcacccatgtacagcaatcctggagctaattcctcgcataacctgtgtttacaaatgtctcctgtaatctgcactagcatcatctttgcttcttgccgccagccaagacacgagtgattggaagccctcggctgaaggcctgattgaatagcgatctcatctgtaactccaagacagatgggaaccatgctagcaccgccatcaggatgaagatccgatccccatcgacagaaccttgacagacccccacagcccaaatgccttgaccaccggtttacttgcttgtgatgtctgtagactggctcatcttg

SEQ ID NO: 8864 - DNA, 259 bp, Setaria italica
  Peptide Sequence Number=SeqID_74838
cgtctcctcaccccgacccccgcccaccgattcctccacgccacgcgcgcgacagcggtggagctggacgagctccctggcggtgcttctcgctcaacacgcacgctcccaggcctagggttagggacggggctgccttcctccccgcatggcgcccgccgccgcggaaaccctcgcctcgttcccaatcgcatccccgtcccgctcgctcctccggcccctccccggcgacccgccgccgccgggagaggcgccctat

SEQ ID NO: 8865 - DNA, 524 bp, Setaria italica
  Peptide Sequence Number=SeqID_74839
caagaaacgacggagcgggaagactctccacagctctcaataaagctcttccagtccagtctccggccggcatcgatggcgcccggcaagctcgcagcggccgtcgccctggtggcaactctcctcctgctcagcaacagcaacatcaaggctgctccgggcggctatccgccggctcctcccgtcggtcctccgccgcaccagatcgtcgaccccgccaaagactgcgggggcgcctgcgacgtgcggtgcggcgcgcactcgcgcaagaaccggtgcacccgggcgtgcctcaagtgctgcagcgtctgtcgctgcgtgccggcgggcacggccggcaaccaggagacctgcggcaagtgctacacggactggaccacgcacggcaacaggacgaaatgcccgtgagcgtctgcgcggtgggtgtggccggtgagagcgtgctccccggccgaaagcaccatgtgtttgtttgtactatgatccatcggcttagttgtagctagctcgtggttgctgtgctc

SEQ ID NO: 8866 - DNA, 881 bp, Setaria italica
  Peptide Sequence Number=SeqID_74840
atgtgccaaatccatgcgtacaaaactcatctttctttgttcctcaacaaaccaaaccaatcttttctttacatcttgcttttctttgttcctcaacaaaccaaaccagtctttttctttacatcttgcttaatcaacattacacgtgctcatgctgggacctctctaaacttctaggtttcctgctgtaacttgtacgccaaatcgaaccagaatatatgcaccatttgcggtgacttttgcttttaggactgttcagctcatcccgtattcctacacacgacaagaatcagaatcgcattgtgcagattgcggttactatcttttgacatgtgtcggcatgtcgcccactattttcctcgtcacacatggtcttgcattgcagtcattctttatctttacttttcaatctccatgtctccatttttgtgttacacacatgaattatatgaccaaaataaacattggagatgtgtcttgttgacaggtgcactttccagagctcgatggcaagatcatcggcctctacttcgctgcaaactggtacccgaaatgcgaggccttcaccccggtgctggccgcggcctaccagcatctcaaggagcgcggcgccggcttcgaggtggtcctggtgtcgtgcgacgaggaccggccgtcgttcgagaggttccaccgcaccatgccgtggccggccgtgcccttcggcgatctccagtgcaagaagcgcctcagcgagaggttccaggtcgagggcatcccgcgcctggtggtgctcgccccggacggcgaggtcgttcacccggacgccgccgacctcgtgcaccgctacggcgagagggcgttcccgttcacggcggcgcgggtggcggagtcttggtagt

SEQ ID NO: 8867 - DNA, 1428 bp, Setaria italica
  Peptide Sequence Number=SeqID_74841
ttttcgtcgtcgatcgcgcgagggcgcgtcgcgtcgcgtagtcgcgggctgcggaggcacagtgcacggcagcgtcaggcaccggcgagccttcggcctctcggcttaatatctccgcgcgtctccagaccagctgctgttggccgggacagggaaagcgtcggaggaagagcacgggaagtggacatggctggtgttctgctggaggtggaagaagcgccggagggtgggggaggcatacgctccgtgctgaccatgggttcgctggtctctccctccgggaacgaggtgcactttccagagctcgatggcaagatcatcggcctctacttcgctgcaaactggtacccgaaatgcgaggccttcaccccggtgctggccgcggcctaccagcatctcaaggagcgcggcgccggcttcgaggtggtcctggtgtcgtgcgacgaggaccggccgtcgttcgagaggttccaccgcaccatgccgtggccggccgtgcccttcggcgatctccagtgcaagaagcgcctcagcgagaggttccaggtcgagggcatcccgcgcctggtggtgctcgccccggacggcgaggtcgttcacccggacgccgccgacctcgtgcaccgctacggcgagagggcgttcccgttcacggcggcgcgggtggcggagctggaggctgacgaccagcacaagtacgcgtcccagacgctggagaagctcttctccatcgacgggaaagagttcgtgaacggtggcaacgaacaggttccgatctcgagcctggtggggaagacggtgggcctctacttctcggcgcaccagtgcgcgccgtgcatgaagttcacggcgaagctggcggccatctaccgcagctcaaggggagagcgaaggacttcgagatcgtgtacatccccatggacaaggaggaggacgggtacctgcgctcgtgcagcgacatgccgtggctggcgctcccctacgacggggcgccgtcgcgggcgctggcgaggtacttcgacgtgcgggagatcccgacgctggtggtggtcgggcccgacggcaagacggtgacgcgcgacggccggaacctggtgaacctctacttcgacatggcgttcccgttcacggacgcgcagatcaggcagctgcaggaggcggaggacgaggcggccaagggatacccgcagtcgctgcgccaccggggccaccgccacgagctcagcatcgtgtcggagaagtccgggggagggcgtacacatgctgcgagtgcgaggagcaggggcttggatgggcgtaccagtgcatcgcctgcggctacgagatccacctcaggtgcggccggaacgccgagggcggcagcgcgggaccggttagcgggtatctacctagactagctagctgtgtattggacgtggtctgtgtttt

SEQ ID NO: 8868 - DNA, 731 bp, Setaria italica
  Peptide Sequence Number=SeqID_74842
cgtgttgccttgccccccactcgcccgcctgaccccgaatcgagagaggaaaacaatggcgatggcggcggcgaggagagccctcctgacccacctccgcgtcccggtggcgcgcaccgcagcggcggcggtagcggcgggaaccgtccccgtcgcggcccggaggctgttgtcgtcaactacggaggaaacgaaggggtcgttcctggacaagggcgaggtcgccgaccgcgtcgtctccgtcgtcaagaacttccagaaggttgaacccgcaaaggtgacacctaccgctcatttccagaaggaccttggacttgacagcttggacactgtcgaggttgtgatggcgtttgaggaagaattcggcttcgagatccctgacaatgaggcggagaagattgactccataaagacagcggtcgacttcatcgcctcacatccccaagcaaaataagagcatttcttctttcccgttccaacgcacttttgtatccaaaacctgtatgaggcacggaactgatttgctgtagcttgcccaagtgggtgcatggcctgaagtttttctggctgcacctgccaatggataggaagtctgttctttctctgtgttgatcatgttggaataaaccggctaccaattggtggttgtggatttgtgaccccatttgcaggtgctggaacaccttttgcggccaaacttgtgcacacggtgcatggaagtcgtcagtagc

SEQ ID NO: 8869 - DNA, 514 bp, Setaria italica
  Peptide Sequence Number=SeqID_74843
gtcaggtggaccctccctatgttctccaagttcctccatggtaggctgtggagcacctttgctcattttcaattggtatccaggtgttggcataatgtaaagtgcaatactccagctgcacccagcctggttcagaagtgggactcgttccttaggagcaccatatgttaccaataagtagatcccacgaggcctaagaagccttgccacttctgctagcattttggaagcaccatcaggagcatcatcagcacactggaacattgtagcaataccgctctcaacacatgcctaatcagaaagctgttatgtagttcacttggtagaaagtgcttaccatcatagcatccagggttcctaaagagaaaggttcaacagactaacccataaatcagtagcaaaaaaaaaatgaatcgaattaaatgaggttcatagaaagatttcaagagcactaaactatgaatcaaccttagtttgatgtcgtttggagtaaatgtgatgcttataatttacc

SEQ ID NO: 8870 - DNA, 325 bp, Setaria italica
  Peptide Sequence Number=SeqID_74844
caacacagggaatctcccgattgcgatcatcgggtcggtctgccataccagtgatcacccgttttggtcctgcatgcgacaccaagggcatcgcttatgtctcatttgcgcagtgggttgcggttattcttgtctacactttggtctaccacatgatggagccacctatgcagttctatgagattgttggtgagggtgatgagatacaggaagaacctgagcaggtcagcaactacagcaggtctctgctcatgaaaactctggcgatgaacggtgtctttgagtgctatgttactttatcaaacatccctggccattccgcctc

SEQ ID NO: 8871 - DNA, 1994 bp, Setaria italica
  Peptide Sequence Number=SeqID_74845
acagatcaccttcgtttattaagcatcaggcaacaatgtaattcactaccatacagttcaactaatattatccaggcaatagtttgtatctagcaatagtatcatgaaactcagcaatatattgaccaaaatgaacagacaacaaatgtatctcctgttctcaaacaacacatgtaactgaaatataaataactaccaaattataaacacttatcactgatacgaaacgaggccgaaaaaatcattcttctagcactccttttccaagccatcgttgccccaagacagttgctatatatatgccatattaggatagatggccattgtcttcaaatgaaagacatcaacttgaagtatacaatcaggtagagggaaagagagaacactgcacaaatatgctgccagaatagaagggcagatgcttccttaacaccatatcctctcagaccggcaattgctgcaagcaagatagcgcttggagtggagtactgaagcgaaagcacaaagcggtacatatggtcttcctcaacaagtaggtgcaatttgtctgctagcgtcacaacaccaatgccaatgcatgggagcaccaaaagccttgccacaattataccgatggtagtcctgatacccaaggcattatcctttgggccttctgcaagcatgccccctagaattaacatcaccgagggaaccactgcagcagccaggatatccaaactatcagtgaagaacgagagtggtgcatcagccccaaacacaaaatctttcaagacaggaaccatgccgatgataatggcaagtaaagaggcgattgtcggtggctgaaggacgtgctgaattggagtcttttcagctacaaccctgatccttctgaccactcttggctctgccaaacatctgatagacttaggactgcttggtccagcaccagaagtaccctcttcagtaaaatcaatatcaggaaacgtattctgcgaggaacctgaaatgctcatgaaaactctggcgatgaacggtgtctttgagtgctctgttactttatcaaacatccctggccattccgcctcatgaagcagagacctgctgtagttgctgacctgctcaggttcttcctgtatctcatcaccctcaccaacaatctcatagaactgcataggtggctccatcatgtggtagaccaaagtgtagacaagaataaccgcaacccactgcgcaaatgagacataagcgatgcccttggtgtcgcatgcaggaccaaacgggtgatcactggtatggcagaccgacccgatgatcgcaatcgggagattccctgtgttgccaaacccagtcatgatcactgtgaaccggaacaagtgtgggggtgggcggcagatcagggccactatgtacccaagaatgcacccgatgacagtgctgacgagaacgttgacagggatgaaccaccagtgcaggatgttgtcgaaggtgaccgatttgccgaggtggacgaaaatcaggcaggggaggaagagggcaaagacgagcttgctcaggagcttgaaggtggccctaggcacgacctggacccgcgggttggcgaggagcaggccgatgaccgtcaggcacagcagcttcaactgcggcgccacggccgacacccagtcgccatggatgtccacctgcgggtccattgaccaaagcattgccgctgctaaagcttctagcctttctcccacttcagttctcaaagcaaatattcccctattttaaactctaaaacaacactccctctttttgtctgtacaaccaaattatctttctcgcgcagagacaacgcccaatcaaatgcaaaggtctgatatttacggagtttcgatctgggaatgaacgagggggtgtcggtgacgccctgtgctctccctctccgcgacgcgccgaggcaggctggagcagaggggaaggagcgaggacgacggcgagcggaggaagagagagcagagcagagttaccga

SEQ ID NO: 8872 - DNA, 1782 bp, Setaria italica
  Peptide Sequence Number=SeqID_74846
ctcccgtccgtctcctacatatcgccggctcgccgtcgttcgtcgcctcatcctcctgacctcctcctccttcgcctgctcgatgcgcccgtagagacctgaccggagggtttctggagtggcgccgcacgtcgctcgtggtgggactggttagggggtccatttcgggttgaagcagcctcagcctccgcgccggtgagccgccgaggctgggaggtgagcctggcggagtgaagatccatctgaaattcgattggttcctcggattgttgaagtgagatggcgaacctgcaggctaccctcaccattcccccctcgttcgccggggcctcaccgccgtctccctccccggtggccgggagcagcggcggccccgccctgggccaggcggctaaggataagaagatggcgtcagcggagcagctggtgctggaactctgcgaccctgaactgcgcgagaacgcgctgcttgagctctccaagaaaagagagatatttcaagatcttgccccgctgctgtggcactcgtttggcacaattgctgcgctactccaggagatcgtgtctatctacccttcactttcacctccaacactttcacccggtgcatcaaaccgagtttgcaacgctcttgcacttctgcagtgtgtcgcatcgcaccctgagacaaggatccttttcttaaatgctcatattccactgtacctgtacccgtttctgaatactaccagcaaaacaaggccttttgagtacttaaggctcactagcttgggtgtcattggtgctcttgtcaaggttgatgatactgaagtcatcagctttttgctgcaaactgaaataattcctctctgcttgcgaaccatggagatgggcagtgagttatcaaaaactgtggcaaccttcatcgttcaaaagattctcctagatgatgttggactgcgctacatctgcgccactgctgagcgtttctttgctgtaggcagtgtcttagctaacatggttgtttcacttgctgatcaaccctccacaaggttgctgaagcacatcattcgttgctaccttaggctgtcagataatcccagggcctgtgctgcattgcaaagctgccttcctgacatgctcaaagatgggacattcaataactgtcttagggatgacccagctacaaggcgttggctacaacagcttcttcataatgtgacaggcggaggaggcatgggaggagctcctcagccaggcctggatcacatgatgggcatataaagatgaagcagtctagtcgttgcaattcacaacaataatacaccacctcacagtgaattgcaactagagaagatctgtccgctgtccagaagaaacttagtatggtgtagtctaactttctgccggggttaaacaaaaaagaaggattgttgcgtggtactaccataagcggttaagctggtgtgctcttatcatgtaacgctgtgggaaataagcacagctggctgctcctcttctgtgcttgcaccggaacgcttttgctttgacagttcagaacctgagaacaaagaggaagaaccccattacgtgaagctttctctctctgctgatgggttgagaacttgaattgctttcagatgatgccttaagaaaaagcataccagcgagaagtatgattgtatgaatgtgctttatcttaaggcatcatctgaaagcaattcaagttggttgatttctgtttttctttaagtagtcgtgtgttaaggtagacggatcctaatttgtgcagagaacatagca

SEQ ID NO: 8873 - DNA, 923 bp, Setaria italica
  Peptide Sequence Number=SeqID_74847
ggaggatatatcatcgatgtcatggatattggatacacgagttctgaatcagaatcacattgactaagctggaaaatccaacaattcacaccgatggaggattggattccctgggattgccattggagggagtgcggctctccgaagcagactgacggagttcctccatcatcctgatcacctctgccattgtcgggcgtcggtctggtgaccacgacgtgcacgccatggcgatatggagcatctggaccagctcatcttctatgttaggatatttcatcagctggacatcaaacacttcggctgtccactcctcgcggacaacagaatgcacccatcttggtagatcaacgacatcatcctgcccctgtgactggaggggagttttgccggtcagcatctccatgaggaggacaccgaaactgtatacatcagacttgtgtgtgaatttcctggattcaaaggtctccggagctcggtaaccagcaatgacccgggaggtgttgattggaaggctcatcaaagcactcagcccatagtctgacacataagggttgtggccttgatccagcaggacattggttgacttgatattgccatgggcgagcttggagccaccttctgcatgaatgtgctcgataccgcgtgctgttccaagtatgatcttcatcctggtattccaatctaacggggtcttctcacaaacgcctttaataccgtgcaacaatgctgagaagctgccagtagcaatatactcataaacaacaagcttctcatcctttgagtagtagtaagcacgaataggtgcgatgtttgcatgtttgcctaccctccctataagctccatctgctgctcaaattctttcttccctgccacaacatcctttagcctcttgactaccacaatggtgccatcctcaagt

SEQ ID NO: 8874 - DNA, 282 bp, Setaria italica
  Peptide Sequence Number=SeqID_74848
taccaagaataggtaactagaatagcatacaaggatcgtcaccatggataatgtaatcaatgttgtactcggtgaatagcttgttcatgaattcttcggttatggcataaggtgcatctggaatgatatcatccgcccgtcacgccgctccacgagagaatgataatggtccgtgctgtcaaatgggtggatgatatcattccagatgcaccttatgccataaccgaagaattcataaacaaggatcgtcaccatggataatgtaatcaatgttgtactcgg

SEQ ID NO: 8875 - DNA, 542 bp, Setaria italica
  Peptide Sequence Number=SeqID_74849
cagaagcggaacgagaagaaggaagccagtgagaagaagtactacgagagtaaaagcccatagctattggaacagcatatggatttgaatcatcctccataaagtccatgttctcagcaattgttccatgaacaactgacgaaatattgaatgtggtaatcatgtcttttgagacatcccatggagcaccaatgatcacctcatcaacataacgacaagccaaaacactcaaacttctgtcatggagattcatgattgggtgatgtcgtcctcacgttgaactcaacatgtccagcatggaatagattgaaagcaccatcagtgtaaactggctaagaatttggacctggacctgcattggcagtgtctacagagaacagaactgaatcatctctgcaactgaggaacttggttgtcatctgaggaactgagcagcttccaaatgaaacataagggaacaggaaatgcaaatcaggtacgagaggcatacctgatgtcgatgccccgctgctgtggagtgccgcgtcgtggactctccatgg

SEQ ID NO: 8876 - DNA, 600 bp, Setaria italica
  Peptide Sequence Number=SeqID_74850
actctcgtagtacttcttctcactggcttccttcttctcgttccgcttctggtaagcttcatggttaccaacaatcctcctgataatagtacttgtagtgatatccaaaggactctccagcctacagtaaatgcccatagctattggaacagcatatggatttgaatcatcctccataaagtccatgttctcagcaattgttccatgaacaactgacgaaatattgaatgtggtaatcatgtcttttgagacatcccatggagcaccaatgatcacctcatcaacataacgacaagccaaaacactcaaacttctttcatggagattcatgattgggcgatgtcgtcctcgtgttgaactggcaggtatagtaaacaccaacagaaaaataggctgaatgtcagtgttaagagcatctccagcagttccccaattcccaatccaactatcatattgggagagttggtaaaaaatgctcagcagactccctttacttttcccttttctcaataattattgggacaacccaataattcaccccttatttccctaaaaaacttacttacccttaaaattaaaaggtaagggttagtactaaaa

SEQ ID NO: 8877 - DNA, 1125 bp, Setaria italica
  Peptide Sequence Number=SeqID_74851
cccaatatgatagttggattgggaattggggaactgctcagcagactccctttacttttcccttttctcaataattattgggacaacccaataattcacccccaactctccctaaataaaggagggtgcaaaagtaattctcccaataataatgaaatggatattgggatacccacgttaactagttattgggaaatatttattgggagattgctggagatgctcaagggtattgtttagacgtattgcatcaaaagaaatgcatccactaataaacaaggactacttcagaactgaattaacttgagcatcgtagcttgtaaagaattaataaaggagagtaaaaatgcaaccatcatattaccttatggtctgatccgtgtgaatgcccacaagcaaaaagtccccaagttctcgagcaagtcgcaaaatctcaacatgtccagcatggaacagatcaaatgcaccatctatgtaaactatccgagaatctggacctgggcccctgctatttgagaactgaactattcgcctagatgttggaaggaaatgagatactctagttccacttccagatccactatcatcaactttctgaccatgtccactactgaattgcctttgtagcgaagagtgattgtgggcatcagaagatgatctctctctaacacaaagaagcatccgtccaacaatatctgttgttgaaactccctcagttcttttaatctgcttatatcggccagcctttttggcaagagcatatgcatcagtaccatctggtagcaaacaaggatcgtcaccatggataatataatctatgttgtactcagtgaatagcttgttcatgaattcttcggttatggcataaggtgcatctggaatgacatcatccacccatttgacagcacggaccattatcattctctcgtggagcggcgtgacgggcggccctttgttggccttgatctcgtcgtcgctgatgacgccgacgatgagctcgtccccgagggcgcgcgcctgtcgcagcgcgttgcagtgtccgtagtgcatcatatcgaagcatccgtccatgtagactcgcacggggcggcggcggtcggtcgtccggtagtccggtcgtcctta

SEQ ID NO: 8878 - DNA, 402 bp, Setaria italica
  Peptide Sequence Number=SeqID_74852
gctcgcttcaacaatatccgcatctgtagatgctagaagagcagacagatgctgctcaaaaaaacctatagaagtgtctatttgtgcaattttccaatattattcttgacactcgaagaatttgaaggactgcttccctaggaaatgggggatccacatcaagaaaattatcttcgagcagcaaatctttccttgatttgatataactctcaaagaaagaatcaaagtgattgaaaaggtccacccagtgatgaaaatcccccttgtcaaattcccatgcaaaatccttcagaggcagttctacattgtcaagaggaactgcggtaacactgtcgatgaaagattttatatttggaggcacttccaccgcgcgtcgccgcttgagcttcataccgcaattcg

SEQ ID NO: 8879 - DNA, 320 bp, Setaria italica
  Peptide Sequence Number=SeqID_74853
ggatcgaacactttacaaaattttgcacaccgtacatcagcgtgggaagagcctcttgagctcgtcggtggggtttgccagccacgagcagaacaggcaggcggccgcggcgaccgacgccgccgagagcgcggccagccagccgaagtgcgcggcatccctggctaccacggccacgcccatcatggtgagctcggcgaggctggccacggcgatctctgtggcgccgatgagcttcgccttccccatcgggttccccgactgcaccacctgcaggccgatcacgctgtacgccatgtgccccagccgcgacgccacga

SEQ ID NO: 8880 - DNA, 822 bp, Setaria italica
  misc_feature (775)..(822): n is a, c, g, or t
  Peptide Sequence Number=SeqID_74854
acaaggacaagacggaacaaaggatgttcctcaatctcaaagagatcgtagccatggctgaggagataggctacgaggtggtggttgaagaggccaatgtgaactctaatgtcgcccatttcgccaaggtagttaattcggttgatgtgatgatgggtgttcatggtgctgggctcacaaattgtgtgttccttccacacagtgctatattaattcagattgtaccatggggtgccctggatgggatatgccgaattgattttggctacccagcagaacaaatggggctgaggtacaagcattacagcattggtgttcacgaaagcagcctcacagatcaataccccatggatcatgagatcttcaaaaacccgcttgcattccacaagaatggatttgagtttgtccggcagaccttcatggatacacagaatgtgaggcttgattgtaaccgattcagacctatactcctcgaggcccttgatcaattgaaccaatgaagaccactggtattattccggggctgttgtactagattctttttcgttaccaatttttgtttgtccatttctctctttgtaaaatttcttgatcatcttctgataacatgagcaagaagaaaattaattatttgtctaaacgtaggaaatgtcatcaccacatggatcgaaattcaggtatccatgatttgttgggacctttccgtaatgagatatatagaaaaggtcttctatttttttcgtaagttgttgtacttttaatgatcatatttacnnnnnnnnnnnnnnnnnnnnnnnnnnnnnnnnnnnnnnnnnnnnnnnn

SEQ ID NO: 8881 - DNA, 986 bp, Setaria italica
  misc_feature (952)..(986): n is a, c, g, or t
  Peptide Sequence Number=SeqID_74855
tcaaacagctatcagaagttaaagcagccaatgatgcttcatgctcaagagcttgtgaattagttgagaaaacaaaatgtgttacacagcttgatttgacttaagatcctctaagccaggcagatttcgcagttctgcaggaattacctgaggatgtgaaggctgatttgtttagcgcgcttccattacatagaccaggagatcctacatgcagcacttccaatgtttctgaaagtaaacctcctaatgtcggtggagctgaaaatagatctctcaatgatggtggagctgaaaatagatctctcaatgatggtggagctgatgatccaagagaccgaagtatttttgtcccaccaggaagctttcaaaaatggattgaacagtttagagttagcagttgcttgattctgaatgtaattgcagagcaacacacagattcgatctgtagccgaccattatcggctgttttggagcctttagcttcgttcctatctttgtgtccagactcaggtagtgaagaatggaatgaaacactttcctgtctatccgagcttcttagacagtatatacaactgaaggttgaaactgacattgaagagctctacaaatgtttttgccttatgaaaaggttcgcgtcagcatcggagttctttctagaactacatgatagtattcttccttttctacaggattccgtcagccagcattatggcgggacactgcatttctaggtcggtgctcaagttcaagccattttgctgtatgaagatgcaatgccgtagaattagtatgccgtcgtgacccttttggcctgtcagttatcgttccattgcaaagacaaactacagtgctggcagattccttttggacggacatgtaattatttctcgtaaaaggacaactgacatgctgagatttgatgatataaccacaacaattatttttaaaaaannnnnnnnnnnnnnnnnnnnnnnnnnnnnnnnnnn

SEQ ID NO: 8882 - DNA, 731 bp, Setaria italica
  Peptide Sequence Number=SeqID_74856
ggtgtctcggtggcgtccggcttgttaatcttgattgccttgtcctcaggcttggaatctgtctcggcaagcctctgcttgatgtcacgcgcaatggagaaaacacttgctccacgttaaggtttgtcttggcactagtttcaaagaacttgatcccgtactcatcagcaagcgcttgtcctttttgcagtaggtacagcccttttgctctcatccatatctgccttattgccaaccaatattttgttgacattatcagaggcgtgttgctcaatgttccgaatccagtttcggatgttgttaaaagaagactcatcagtgacgtcataaaccagcaggatgcccatagctcctcggtagtatgcagtggtaatggtccggaagcgttcttggcctgctgtgtcccaaatctgtagctttgtattgtcgtctttgtcctattcctaacttcttatttgtttcttatcttaaaatcaataccaattgtggtaataaagcttgtagtgaaggaaccatcggagaaccgcaataggaggcaactcttgccaacaccgctatccccaatgaggagcagcttaataaggtagtcgtagtcggcccgggccctcgccggcggcgccgccatggcgctcctcctcctgcccggggcgcaacgcaacccccgacctgcacgcagagggcaaacgaggaacgccgcgccggtgagcgaccgagggaatggcggccggcga

SEQ ID NO: 8883 - DNA, 1340 bp, Setaria italica
  misc_feature (1)..(38): n is a, c, g, or t
  Peptide Sequence Number=SeqID_74857
nnnnnnnnnnnnnnnnnnnnnnnnnnnnnnnnnnnnnntttttttttttttgtctacgtttgcatgcagagcaacaccttattccatgcattgatcgataaaatgcaaacccaacgacatggatttcattcattacacactgtagggaagggggaggtttttcaatggaccgaaatccagagtgcaatagctcccggcaatagcaatagctacgtcaacagcaagaggtggttgcttcaaagaggggaagcaaacacaagtacaaccacatcagtatatcaaagtggcttcttcaaattcttcctataacagccaagcgggaaataaataaagtcaaataaccaatgaccacagacattgtgctttgcttatgagccgcagcaagcagatttctggccaactggtgtctcggtggcgtccggcttgttaatcttgattgccttgtcctcaggcttggaatctgtctcggcaagcctctgcttgatgtcacgcgcaatggagaaaaacacttgctccacgttaaggtttgtcttggcactagtttcaaagaacttgatcccgtactcatcagcaagcgcttgtccttttgcagtaggtacagcccttttgctctcatccatatctgccttattgccaaccaatattttgttgacattatcagaggcgtgttgctcaatgttccgaatccagtttcggatgttgttaaaagaagactcatcagtgacgtcataaaccagcaggatgcccatagctcctcggtagtatgcagtggtaatggtccggaagcgttcttggcctgctgtgtcccaaatctgtagcttgatgcgcttgccatccaactctattgttcttatcttaaaatcaataccaattgtggtaataaagcttgtagtgaaggaaccatcggagaaccgcaataggaggcaactcttgccaacaccgctatccccaatgaggagcagcttaataaggtagtcgtagtcggcccgggccctcgccggcggcgccgccatggcgctcctcctcctgcccggggcgcaacgcaacccccgacctacgggcgtggggcgcggggatcgaggagcgggcggtgccggatctgggggctgcgcaggggaggttgggggcgaagcgagacgagacggggagacgggaaattttccgtgaggggtaaaacgagcacacggtggtggttttgattcgacggggccgggcgcatgagcgagagacaagacttaaataaaggtaagtacgtaagtacggacccgggaccctacgaccggacggacgaccgaccaataggacgactacctacctaaccttagtacccggggacgaca

SEQ ID NO: 8884 - DNA, 846 bp, Setaria italica
  Peptide Sequence Number=SeqID_74858
agcccgggttcgccgagtcgacccccggcgccgaggcagccgcgtggtggacgcccgccttccagcgccgcgtcgacgccatgctccgctccgccgccacgctcgccgcgggggagctccgcgaggtccgcgtcaggcactgctccgacgacgggctcgccttcgccgccgagagatctccaagacttagtatcctttccatcagaacaagcccggctgtaactgatcgatcaatgctcattgttggaacatgctgcaccatgcttacagaattggatatcagcaactgctatgaagtttcatacaggtcactggaagttatcggccagagctgccagaacctcagggtcctcaagcggaacatattcaactggatcgatccatcagagcatgtcggtatagttcctgaggactacctgagagaatgcccccaagatggcgacagggaagccattacaatatccaagttcatgcccaagcttaaacatctcgagctaaggttctcaaagctgactgctgttggtctcaactcaatccctggaggatgcaaggaactggagatcctggacctgtttggctgcgcaaatctgacaagccgggggatagatcaggccgctgctaacttgaaaaatctggaaacacttgtgaagcccaacatctacattcctaggtcctccttccatatggggaggtatggccactggcagttatacgacgagaggttccagacaaatgtatttcagatatgattatagcctcaggttcgacctaaggggctcccttcgacctatagtttgcgctctctaatataggttgtatgtatctgtgcacaaataataacaataa

SEQ ID NO: 8885 - DNA, 323 bp, Setaria italica
  Peptide Sequence Number=SeqID_74859
gcagtcggcaggagggagcgagtctgtgatcagcatttgggcagatcggacggtggcgggagcagcttctggtgcgggaggctgccgtcgagcaccagccatgccatcctcaggccccacgtcgtgtgcacctccaaatggcagtgcatgaaccagacaccggggttgtcagcgaggaagcggatggccacccagccgccggccggcacgccgacggtgttccgctcgacggggtcgacgaggttgaacttggccgggtcgttgacggggtcgtagttgccgtacccttgaccgacgacgaagaagttgaagccgtggaggtg

SEQ ID NO: 8886 - DNA, 376 bp, Setaria italica
  Peptide Sequence Number=SeqID_74860
ttagaggaaatactccctgcaatcacaaattcttcatgctcatccagtcaaacttttgaaaaatttaaccatcactagttttataaaaaattactaggaaacataaaaatcatatgcaggtttgtcttgaaaagcacttccataatcgcatacacttatgagacattaaaactatattctaatagaaaatagtggtcaaagtagcaccttgaaataatgttaactggagggagcacattgacttagtaagttgcagcaaaataagttcaaccaacctagggagtttacaatctgttgagaatgaaagaatctctatagaacacatttaagtttgtagaacatatcagcaagtttgttcacataagttagagaaacg

SEQ ID NO: 8887 - DNA, 2293 bp, Setaria italica
  misc_feature (1)..(30): n is a, c, g, or t
  Peptide Sequence Number=SeqID_74861
nnnnnnnnnnnnnnnnnnnnnnnnnnnnnngtttttttttttttttagtttaacccatttgattcatgcctttgactttggcttgtactttagatcatctaatacataaggcaatgcaattgcgacaacactcggttctgtaggcacaccggcccaaatcagcacacgacaccaaccccaaatgcacattttaacagctattctcctgataattctgacggccaagcaaaatgcacgtataattgaataaagaaaccgctagctatatacatcactcaatagctccaggtttgctgaggtaccgcaaggacatgggagcgcaacacttctgtccagctggctcctctccgtcagttcttcttcacgtctatctagtatctactcactcaagttgcatccacggatgtaagggtggtcatacttgatatacttggtccaatatggtcggtacttggtcattgctagctccaaccatggcttcatgttcccattgtaatggacaacagcagcaccatctatctccgaacggtctatgcttgggttgtatcctaatccaagaacatgccaggacttgtccaggggatgcgtcaacttgtagaaggtcaagaggcccggtggaagtgtcccaagcttccaaagaactctgtcttcattcatgttttgccatttgtggtagatcccagtgatatctttcttcttccactccttcagatcaaagatgttcatcccataggcccagccgcatgcattcggatcaaagttccgagcaatatgtggatttgaaaaattaagatacttgtcaaaacggtggaaactctccccacaggtctccacagcaccattgaccttcccattaagatcaacatcccacaaccctgtcaaatctttctgcacaactatgtcatcatcgaggaaaagtatcttatccaactttggatagacctctgggagatagaacctcaagtggttcagcatagagaggtacttggggttccgatactttaggtttgaagaacctgctgagagagtggtaggacgatcagctttgaaatagtactctttcatggcagcagactcaagttgccgcaacacaggacagtatgatgagttcaaccacttaaattcgtccacattctcaacatggatggtggccttgccaggtgggttcagcagaaaccacatgttcatggctccaaagtttaacttatcagtcacaagatggaaaacatgtttctctggttccttggcattcatgatggttgagttcacaacaacagaggctgccaagacgttgtctgagaaaagtgcatagtggtagagacttgggttttctaagttttcactccttgggaatttccgttgctccagggggaggagatagtaatcaattgtcaaacgcatagacaagcaatgaatgctatttggaattgtctttgcagccaactggctaagaaatgtactctgcttcttcaaactcctgacctgttcatctgctgactgaagcatagcccttagtctctgagttatcgctctgcaatcatacaattctcctctagcctttgataaaacttgacccattgctctgactttctcaggagcgctgtgatgcaggtcagcatctgcagcggcctctccaacagcccgctggctttccttgattcgggtctgcagttcttgaaatagaccactcttgttctttgatttagcaagcgcagaatagacacgagccataataagttggtccctcatcaacctaactgtggagtctgaattctcattctcattctcttttctccatatgctgtatttcccaagcacagcagaatcgacagcctttgatcgctcaatagcggcattctccagcttaacacgcgcttcatcatctttgcgcaccaactccattgctctcttctcacgccttttctcccttagtttccttcgagctatttttgctgctgtgtcaacttgatgttcatctgaatctttgggtgatttatttgttggtaaatcatgttctggcacactgttttcatcattagccttgccatcgacatacatgctcatgtcagtgactagatcatcagttttccatgagggggattcatgattcctaaagaagtcgagactcaaagtgcctgcttcttgctgactagcagttatagcgtcaatcacctcttttggcaaaatagatttcagattcttcattgtcactgcttcctgatcgccattccttgccctttgggtattcggtaggtcgtacgttggtactattggtccgtcgtaccttctattt

SEQ ID NO: 8888 - DNA, 265 bp, Setaria italica
  Peptide Sequence Number=SeqID_74862
aggcaacagacattttgccgccgcaccactcccgcgtccaccccccgaccccctcaccgccgccgggaatggaatccagcgccgagaggcttcgcggcctccgcatcacctccctggatggggatgatgacgagaccgtggttccccaccagccctctccagcccctggcgccgccgcagcggattacgaggacgatgacgaggatgaggaggaagaggcagaagtgacccttggtgtccttaagaagccgaagcacccaggcat

SEQ ID NO: 8889 - DNA, 548 bp, Setaria italica
  misc_feature (537)..(548): n is a, c, g, or t
  Peptide Sequence Number=SeqID_74863
cggcgtccgccgcgcccgccaagaagaagaagccggccgcccccgcggaggcgaagaaggcgcgcgcgaagcgggccaggaaggcggcgccggcgccggcgcagccgatgccgaagccgaagcaggcggccaggcccgtccgcgccgccgtagccaggaaggcggcgaacaaggccagcgcctgatcaaccgccagcgacagcgccgtgtcgtcttggtccccgtgtctgcgcgccgccgtccgtgtatagctggtagtagctgcagtggtgaattagtagtagcgagcactccggtgcagtatcggtcgtctccgccgtgtgtgtgacggcgtgttgtaaataccggaaccagtgaggtgtgatgggaataagcgcgcgctttagcttctgctggtgctcggaagaagaaccgatctcagtgtagtgtagtgatctgctagctgagtattgagtgtgtgacgatgcttgatgagatcatcgtgctagttcaataaataaaactagaacataaaaaaaaaaaaaacaaaaccaaggnnnnnnnnnnnn

SEQ ID NO: 8890 - DNA, 348 bp, Setaria italica
  Peptide Sequence Number=SeqID_74864
ctaattcaagatatgattgtggattctcaaagtatattggatgtgattaattcttccgagagactgatctccgatgatgatggcgcatttgggtactatcaaccagagctctttgcatcagtcagctcaattacaaacatccggtatccatttcttgatggtcagcaaaaagaacagcatagtaactccatatttcatggaagaagtgaagttttcagatgaagaactccattcaaatcaagatgaagcatccatcctttcctacatgcaaaagatttatccagatcaatggaaaaactttttggaacgccttggttcaaaggctacaaatgaagaaattagatactg

SEQ ID NO: 8891 - DNA, 574 bp, Setaria italica
  Peptide Sequence Number=SeqID_74865
taccaattgacaaaaaactaattttcaaatttctcatcattggtgagacagagaagagggtggtagctgccatattcgatgaaatagaaaagagtattctgaagtcaagccttctgactgattttaagatggatcatttgccttcactgttcagcaaatttgatcggttggctgaacttctgtttataaacaaacaagaacatcgatatgaggtgacaattctgcttcaagatattgttgatattctaattcaagatatgattgtggattctcaaagtatattggatgtgattaattcttccgagagactgatctccgatgatgatggcgcatttgggtactatcaaccagagctctttgcatcagtcagctcaattacaaacatccggtatccatttcttgatggtcagcaaaaagaacaggttaaacgcctttaccttttgcttaatacaaaagaaaaggttgtagaaataccatcaaattcagaggctaggcgacgcatttcgttctttgccacatctctatttatggatatgcctgcagctccaaaagttcgtagtatgttatcatttag

SEQ ID NO: 8892 - DNA, 1010 bp, Setaria italica
  Peptide Sequence Number=SeqID_74866
acagccaccgtagctttagtactatacgccaatatgttttcatgccacacctgtgttactactgctgcctcatttgagaccactgctgaaccatctaaggggatcagcaagaaatctttgtccaattgtaacaaagcttgtctcttgatatgacatgaagccagcaagagatgaaacacttccagtgaagatatgctctctaagcccaaggatggttggagcttggtccctaggatgccttacaaactcttgaaggacattcctcattttgtaagcttcttccagatagttgtcttgattcatatcaattgtttgtagagcttctccacgagtgaagataatggcatggttttgattttctggcttcccttctccaatgatgggcggaccaggcagctttatacggtaaatctcctggtcaaaattattttctgcttttattaacacagaggaataaaccttatgaggagagctatgtagtatgacttccttctcttcaatataagcaacccgcagagtagggtacctcgtcatcagatctatgatgtcttgagcatggggatcacctttgattttctgttccccaaacttctgacatgaaatgacatatgaaaatttcatatctgcaagtgcttctatttcagtggataatgattggtggatgtttcttttattttttccttgctcagtagccaaaggtcctttatataattcttgatcacttgtcctgtctaggaaagcctgtagtctcaatgccctcctgtagtacatcattccccgcacagttcggctcagtgtttgaccacggtaggaagcccagtatctaacttcatttccatttcttgatggtcagcaaaaagaacaggttaaacgcctttaccttttgcttaatacaaaagaaaaggttgtagaaataccatcaaattcagaggctaggcgacgcatttcgttctttgccacatctctatttatggatatgcctgcagctccaaaagttcgcagtatgttat

SEQ ID NO: 8893 - DNA, 380 bp, Setaria italica
  misc_feature (1)..(25): n is a, c, g, or t
  Peptide Sequence Number=SeqID_74867
nnnnnnnnnnnnnnnnnnnnnnnnngtaaaaaattgcacaatatgaatgttacatcgccaaaaagaaagaagtttactctttgtaatctctcagtttcagcaaaatttgctgcccaatctttggcgttctggcattctcaaatgagtaaacagaagaaactgagaatgctcacgatgtatcaataggtcatcattggcatatcaaatgccgaatatcaaatccatcacattggttacaattgattttgcgggtgcagcaacactgccggttgcacgacggcctgcatctcggttaacatttgtgttagccttcgggtcatatgggcggggcaaagctcctagctggttcgatgagcctgtgctcttcaaggcaagtgtac

SEQ ID NO: 8894 - DNA, 1295 bp, Setaria italica
  Peptide Sequence Number=SeqID_74868
aaaacttattccataatcaagctggtgctgcctgtatttgaagtaagcataattgaatgatttgcccacccaatatatccaatttgaaccaaacaaaatctggagttcacaccccaagtttctaagatgatgtacaggacgctcttgcaccttctcacatatgcacagctagaacacgaatgctaagagtaacaccaccaacaaaatcaacatgataattatgcttcttggatgctgcttatctacttcccccatgaccacggttttagggagaggatgatgacaagtacgattatcaggaggatgattatcgctatgcaggtccattttcgtgtgttcttctgcagcttcttcgctttctggagaaggtttgttccagtctgaatatgttcagctgcacctgtgacctgtgtctcaatgttgtccagcatctctccttgagcttcgaccaagacagccaagtcgaggaaaatctgatgcagatcaagaagcttcttctcgatctctttcactgtatcatgacgctcctggatctcctgcagtgtgtccagcacccgtccccgcccttgctcctgaattgctctctgaaagatttgctcgccatcgcctgtttctatcagcttgtcaattgtctcttcatcagcacgctcgccagtcacggtgaaaacacggcgctccactacaccacggtattccttctggatttcttctcttaatgtctgaaactccaatatacgttctactcaacctcttgtcaatgcaacagttgttgtcgtccgggatcggtccacacctgagcccttgccaaatcctggtttttgtctgtttgcagcattatctttgttcagttcctctacttttgattttgccagccgtgcaacctttgtcacttcattgacatccttctccatgcgcttttttacctctttcatcgcagatgccttcgtgacaacttttgactcctcatttgagttctgaaggtccttcagtaactttgtcaacgtgctgagcagattttcgatatccttgacctgttcaaaaaagccctcgaaaccaggctgcgcagaacttgtcaagtcaccctgcagcccgagctcgatgtcgacatttccaggggccagctcccttttgccaagctcaaacgagtccgtgagaaggttccgcatcgtggccaccggccggcggtgcgagagcgcgcgggatcggcgccggaaaaccgagaaattcttcgcaggcgcgcgtcgggcgcgctcccggcgggcggaacggggcggggaacagaggattcagccgcg

SEQ ID NO: 8895 - DNA, 157 bp, Setaria italica
  Peptide Sequence Number=SeqID_74869
gtggtggacctcagctcgccactcattctccagtgccttgccatccttgacagcaaggctccagtgctccaacccaggttcatgacggtctcctttgcctccacccataacatggatccgcccagccaaagctgagcagctggtgcatacctgggca

SEQ ID NO: 8896 - DNA, 303 bp, Setaria italica
  Peptide Sequence Number=SeqID_74870
atgggctgcctcatcatcatcatcatgccgccggcgccgggcgcgccgtacccggcgtacccgccggcattggcggcgctccttgcgacgtcgccctgctgctgctgcgcggcggcggagcccgaggaggcggcggccctctcgccctcgatctcgcggaacttgtggaggtagtgcttgagcggctcgacgtagtcctcgaagccgagcgtggtcatggcccagagcaggtcgtcgccgttgatggtcttgcgcttctcgcgctggcacttgtcggaggcctcgccggtgatgaaggagatg

SEQ ID NO: 8897 - DNA, 590 bp, Setaria italica
  Peptide Sequence Number=SeqID_74871
tgcaaggcggagccggagccggaggagcccgcggcgccggtggccagcttctcgccctcgagctcgcggaacttgtggaggtagagcttgagcggctcgatgtagtcctcgaagccgagcgtggtcatggcccagaggaggtcgtcgccgttgatggtcttgcgcttctcgcgctggcacttgtcggaggcctcgccggtgatgaaggagatgaactcggagacgcactcctgcaccgtctccttggcgtccttgctgatcttggcgttcgccgggagcgccttcttcatgatccggctcacgttggcgatcggcaggaaccggtcctgctcccgcggcgacgaaagctcgccgccggcgttgctcgggccgccggagtcgttgtccgagtccggcatccccgctcgagccgtggtgcctccttcctcctctgcctcgattcaagaacaacaaggccgccgaggatgctgggttgctgacgcgatgaatcgaagcatcaacaacacctctgcatggtgcaagaacaggaaccacgaagacaaggaaaaggaagggaaaaaaatttgtcgtggggtttgtgccctcgaaga

SEQ ID NO: 8898 - DNA, 398 bp, Setaria italica
  Peptide Sequence Number=SeqID_74872
agcagccccacccagacagctgactgtctctcgcggacgaggcccccacctctctccctccctccttgccgcttccgcttccgcttccgctccgcctccacacacacccctcttggtggccttgggcgagccgcgggcgcgacagcacacacacgcacgcgcgcctcctcccgaaccccgtccacacggcactcccactcctcgggcgcgcacggcagccgccggccgggttgacttgactccggcgggggttcaggacgcgttcttgcgcgtgcttctgccggcgcggttggcatcgcgcggtcgggctcggctcagatcctccggaagattgggtttcggagggagggagcgcccaattggtagccgcggttcctggcgttgactcccgccgagtt

SEQ ID NO: 8899 - DNA, 862 bp, Setaria italica
  Peptide Sequence Number=SeqID_74873
cgcagccgccggcggccgtgctggggcacgacgagcttcagcaagcaggtacgtgtgcgtgcacgcatgtaacacgctagcttgttcgtaggttatccagtgctctcctatggccccgctgtctaatctctctgtcgtcgtctcttgcgcgtcgtgtaccacgatcctcttcttgtctagatcattcgcctccattccccgctatatgtcttgtcagaaggaaaaggtgcaaaaaccaaaagagacagaatttatttacagccttttgtaaggaaattggtcattaactagatatactacttaagttgcaaaaattattggcagatgagcaagaacaacgatacatgctactgcctctgttctgctatgtttgttcatgatcttgaagaagaaaaaatattgcacaatattttatccattttgagggtatcaaaagcatagttactgtaatatttcaacttagtacctagattaaatgccttagaaaaaagggattacaccatattatttaatacaagtattggtggccattttacaaagtgagctaaacctgtatggatctcttggaggcttgagcacacagattacagatgtctccttcaagaacagttccattcatgcggcttttatttttgtgataatacttaatatatatctcgaaacctttgacccctgcatgtacttaatcttgtggcccacaaaacagtctgatggatggatctggatcactggatgtgaccggaatcgacccacactaatcgcgcgagctatttcagtgatgcgccagcaagccgccgctgcgcctgccacggcggcgtcgtcggagctgccgccgccgccgccgcggtaccgcggcgtgcgg

SEQ ID NO: 8900 - DNA, 731 bp, Setaria italica
  Peptide Sequence Number=SeqID_74874
aaaatatggagatttggagagctttcactggacgacatatgtggggaccatgataattcgtgatggatgcatgatagaaaacggtgacaatacaaccataaggttctactacagagcagcatacccatgctagtaaacagactgtcagactggacatccctaaatcgatctggatgagttaggagactatctttgaacatcatctcatttgtaagcatatctgtggaacttgtgttccccaaaacattgtggagttgcaaggacgtaagggacccatgcaacacgctatacagtcagggaccccatggacatcaaacatctacggcatgatagataaaggccatgctcctatgtcttagctaatccaagaactgagaaacaatgacaaaagagagaaagagatagtattatttcaaatttctcaatacatagctcattagctgtatgagacctggtggtagggtgtatatcctgacctcccacacaaactgaggtaggtattcctttttattttatgcttaattgggaagctccattctatttaagcctacataaactaagaagttcattcccaatctggcaatttcaacagacagaaaaaggactgtctgtccccacaaactagtactcccccgtccaaattgtaggtcgttttggcttttctagatacatagattttgctatgtatctagacatagcctatatttaggtgcatagcaaaaatcagtatc

SEQ ID NO: 8901 - DNA, 320 bp, Setaria italica
  Peptide Sequence Number=SeqID_74875
tacaaggctttgaattagccagtatcctgaaaaacataaataaacagtttgcaagtcaacaacacagttcacactcgaactacctaaggttaacagaagagaaactatctcaagacacatcacacagccatattttttacaacctcaaataacggtggactggtggttttagaatttagagcatcattatgccactaaaagggcatcaattaagctgtagtttatatgtatggaccactgaacaacttgatgtagcacatgatttttttaatagtcgaagaagccaaaatatgcaatgacgcgctggctcaaatattgta

SEQ ID NO: 8902 - DNA, 292 bp, Setaria italica
  misc_feature (249)..(249): n is a, c, g, or t
  Peptide Sequence Number=SeqID_74876
acatcctgcctgtacgagtattttcgaggacagatctggttggaatcaacgattgcttgaatcttgaactattccttagtttgcttgaatcttgaaatctttgctaatcaccttaggataatcagtaacttgtatctgggcttccatctttgcgtatagcaaaaaatcagtagcaattaacagtcactatattgtatcacgaaaatcaagtaatgtattggtcttcttagattctactgtcttttttangaacacatgtattttgctgtcgaagttggaataaagttcactt

SEQ ID NO: 8903 - DNA, 399 bp, Setaria italica
  Peptide Sequence Number=SeqID_74877
ctcggcgcgaggcggccacttgcgcgcgggtgcccctggaatccgcagcaccaaaccccgacggccgccgcgcccgcccaattggtgggcgggggaccgcccgcgccgatcggataggctcggcggcgggcggtgggcggctggctaggtctgaaggccggcgagaatccgagaactactcacgactgcggctgcgatctttgaatttgttcttgccgttgctgatctgctggggaaggaaggtcgattagctttgcttgcaccgctaggcttcaatttggttctgccggtgccatggatgaaagagtggagtgggaatctgtgattggggtggtggcgattgcgggtgctctaccactttgactggtcgctgccggagggggttgctgaggtcgacat

SEQ ID NO: 8904 - DNA, 254 bp, Setaria italica
  Peptide Sequence Number=SeqID_74878
ccaagggttgagattatatatatgttaatctttatggcgttcaagtcagtttagaattgatccttgttctatgatgtttctaacgaactagaaaatgacaattcgggttcaaggtaagtcgtgctaggtagcatttagcatcctctaggacctatccagatatttctataagcagactcatcgaagttaggcttccttctacaaacttcatttgaccttgacttgacacctgtgattggtttggtgtgccaaaa

SEQ ID NO: 8905 - DNA, 220 bp, Setaria italica
  Peptide Sequence Number=SeqID_74879
ttttttttttctagagtaatgcttccattttacatggagatgacctatctttgtcctgtaacatgttgccatgtgcaacaaaatccattcaggtttgaattgccggagcaacttctaaaaagttacaattcataagccatgccatttggttctgaaaaatgatacatacgtcataacagaagccaaagccaagaaaaattacagcaagctccgacttgtg

SEQ ID NO: 8906 - DNA, 1814 bp, Setaria italica
  Peptide Sequence Number=SeqID_74880
ttttttttaaagtcaaacaccaaatgaccaggatatatattcgcttcattattgggataccttacaattacaaagcaatgcaagtacatcattggtacacgcccaaggctacaaatcctttattgtcacaccactccacacacttctcatggatgaaatgaaacagaatataacgggaatcacccaccgctacttcctcgttgaatattgttatcctcagccgatccatcagatggagatgctgttggggatgcccctggcggtgacgccggcgttctcgcggtcggagacgttgggggagagcagcgtgtacgggaactttgccgggctgttgcggttcttgagccgggggtccgcgttcatggcctccacgcgcttctcgatctcggccagccgcgcgccgaacctcttgaacgcctcctgcgccctggcgtccgacgtccaccccggcgtgtcccgctggccgaggtacacctcgtcggaggagtggctggacaggatctccagcagcgagatccccaccacggcctggaactggcaggtgatggagcgcacgaagaacctctccgggtcgcgctccagctccgcgtactcctccgtgcccggcgccggcatcggcctccggctaaccgacggccggttcgggtggtacccgcagtaggggtactgcccgaagttgacggcggcgtgcagcgccgacgcgatccatatgatggtggcgcaggccctggtcagctccgccaccgtcgtcatcctcggccaccacggctcgtccttgaggtcggcgtgcccaacctcgcgcgcctccttccaccacgcctgcagctcggcgtcggcctggagcacgccgtcgtcggggtagtagatggccaggtactcagccacccactgctcgatggcgtgccagatcgccagcccgtccgacgcgtacgggtagtcctcgatcagcagccgcaccttgtacgggctcgagggatcctcgacggccatgcctctcttgacgaggtcgttggggagggcctggtcggcgaagctccagctcccgtagaccttggaggagatctcgatcgcgtacttgcgagggaagacggtcatctcgaagatgccgccggcgttgatgagcttctggcgcgcgagggcgttgatgttcatggtgtcgcggtagtgcgggaggagcagcttgtgcacggggtgcgtcacgctgagctgccggttggtggcgatgatgaagggctccatcacggcgtgggtgttgagccagtggctgatgccctggtgccagcagtagtcgttcacgttcacgtaggccttggcgaggtgccacacccacgcctcggcgccggtggtggacgtgggcgtgtacacagtgctcttggcggcggtgatgccgtcgcggagctcagggaggctgagctcgatggccaccggcgccagcgtgccgtcgccgcggaggaacagcagcgtccgggtggcgtagatgaagttgtcgtccaggttgttgatctcgaccaggaacggcatgtagtggtcgtggtggtcaactacgtacagccggttgctctccagcgcctgctgcacggtcaggccctccaggttcctctcgatgtgcgccgccgtgatggtgctcgtatggtcgccgtacttgctcgggtccagcgtgcttttcggagggaactccgtgagacgcttgatgatcatggggttcacgccggcgagtatctccctggcgaactcatcatcgctcatccaagctttcttgtcctctttgatgatcttgggcatggggagcttgaggaggaagtcgccgccgacgg

SEQ ID NO: 8907 - DNA, 886 bp, Setaria italica
  Peptide Sequence Number=SeqID_74881
tgatcaaaagataaaactgaagctcaaagctgtctacatgtatgctgctggattttacacatattcaatctttgctcttctgttctgggaaacaagacgttcagattttggagtttcaatgtcccaccatgtagcaaccgttgttctgattattctatcttatattttcagatttgctcgtgtcggctctgttgttttagcccttcatgatgcaagcgatatattcctagagattgggaagatggccaagtacagtagctgcgagtggctagctgttgtggcatttcttctttttgtggcgtcgtggatacttcttcgcctcattattttccctttctggattataagaagcacaagctatgaagtactgctgaccctggacaaggagaagcatcgattttacggccccatatactactatgttttcaactgccttctgttctcactcctagttcttcacatatattggtgggtactgatatggcggatgcttgttagacaagttcagtcaaaagggcgtgttggcgatgatgttcgatccgattctgaaggtgaagaggagcatgaagattaactttttaggttgaatgtttaactgaagactggtggtccccacagcaaggcacacaggggataggatttttccccccttttacagaagatatgcagatattagatctcattataccgtatcatttttttcagcatcaaagatgacaaccttcatgagttgccactgaagccacctgcgcactcgtgtccttgtatgaaagaaaaaatgcattgtgtttttcagtaaaccagaatttgtaaaagatacacaataatatcttgttcattcatttttgtaactagacagatgattttgatttcaaatcatgtaatt

SEQ ID NO: 8908 - DNA, 924 bp, Setaria italica
  Peptide Sequence Number=SeqID_74882
gagctcttcgcgctcccgctcgaggtcaagcagcagacggtgtcgtccaaggggatgttcagaggctacatcggccagcgccccggcatggactgggagagcctccgcgtcggggagcccacgaacgccgacaacgtccgcgaattcgccgacttcctctggccggagggcaacccggagttctgtgagacgatcgtgtcgttcgccaagaacatgcggaagctggaggagatggtggagacgctggtcctggagggcctcggcgctcggggagagagtgtagccgcccacatggacatgctcggccaaggcatccggatgtcgcactacggcgtgccgccggacacggagaccagcatgtccatgcaggcgcactacgacgacagcatggtcaccatgatcgtgcagcacgaggtggaagggctcgaggtgcatgttgggaacgggcgctgggccgccgtccctcccgagcccggtaccttcgccttcatcgccggcgagcagttgagggtcgtcacgaacgggcgcgtgccagcgtgcctccaccgtgtgaggacgccaagcaaccgcgagcggttctcggtgctgttcggccggcggcagaaggacggcgtcgcggtacgcgctttggatgaccttgttgacgccgagcaccccttggcgtacaacccgctgaagcacgaagagtactccaagtggcgttactcggaggaagggctaaaaattggaggatccactgaaagcgtactgcggagtggagaaggatggagccaccaccgtggtttgatcgcagctcgcatgtcagcctgtccatccgttccgaagtcgctatcattatgaatgccctgttgttatatccagttacctagagtgacgttttaatcaagttgcatactagtacagttgatctatttttgtaaaaaa

SEQ ID NO: 8909 - DNA, 286 bp, Setaria italica
  Peptide Sequence Number=SeqID_74883
ctccctgtctgattctttcttcttcttccttcagcaggtaaaaagagaagaaatgggaggagggggaagagacgccgcgcaatcaggatcaccctgtggaagttgttctaatgccagactccggcgagagctccccgaagccgtcgccgccggccgaccaggactcgccgggggctgcgagtcggcaccgttcaaggttgaggagatgcagggcctccgcgagcaaaggtagcatcaacagtagggcgcgggcggcgccgcgtgcggagcagcggcaaccgtaggg

SEQ ID NO: 8910 - DNA, 255 bp, Setaria italica
  Peptide Sequence Number=SeqID_74884
tgcatccctgcccaactcttcaaaccccatgccacacagagagcacacattagcctcggcttgaattcgaagttgatgatacacaggtaacaggacatctcaaaccacaaaacaggggcacagcagagtacggtaagagcaaatgatcgaacattggcaatcaattcccaatttctgatcaggcgaagccccgctggagtactggaccaaagccgttgacagatgggttgatcagcctcacatgaacaacaaaac

SEQ ID NO: 8911 - DNA, 460 bp, Setaria italica
  misc_feature (1)..(107): n is a, c, g, or t
  Peptide Sequence Number=SeqID_74885
nnnnnnnnnnnnnnnnnnnnnnnnnnnnnnnnnnnnnnnnnnnnnnnnnnnnnnnnnnnnnnnnnnnnnnnnnnnnnnnnnnnnnnnnnnnnnnnnnnnnnnnnnnntttttttttttttttttaatacaaaactgaatgttgagttcagatgtcaccttttgagccaatggtttcagatttttcatgtgaaatatttacattcctagctgtgtacaaatgtgggtcgtagctgcttaaacggatcacccgtatggctgtattcctattactacattaatattctagttctatggtactgtatgcaaggcagcaagccccttcagtattctacatttcatcgtcttgctgaggtgcaaattctttcagaatgttttccttgtatggacccgaatcatggaggaccttaataacatgtttaacctgagccgtctcacgtgcaagaaaatttccaatagcag

SEQ ID NO: 8912 - DNA, 766 bp, Setaria italica
  Peptide Sequence Number=SeqID_74886
ctcgagaacggcctcgaccccggcatctataaggcgataatggtggggaaggtcgggcaggagccgatgcagaagcggctgcggaatgggattcgcatcgtgctcttctcgctcggcaccggcggcatccgcaacaaccgccgcccgctggaccgcgaggagccgcaccaatacgccgatcgatgctccgttcagtggcaccgcgtctgcgtctacccagagcgcctcggcaccctcgcgctcaaccacgtcaagaccggcactgttctctatttggaaggaaatctggagaccaaagtgttctgtgatccaattactgggctggttagacgcataagagaaatagctgtgcgtgcaaatggtcgcctcttgtttcttggtaatgatgcaaatggtcccaagttgggtgaagtcaagggcgtcggctacttctgatactggtttttgtttaactgatgataccagttgatgctgacaactgggatggatgtatcagtggtgcggaacttgctcaatattgttgaagtctgagagtgaaccaacaaatctcggcagagattcaaagtcttttgctgcgctgaatttatcagatttctcttttcctcaagctctcaacaccatgtagatgccttataattgttgagcagcagcatgtagtgtgtgtaacttaatttaacctcagacacactttatggagtgattcctttctacgtttccgttcttagttgtttttaagaacggaaacgtagaaaggaatcactccaaa

SEQ ID NO: 8913 - DNA, 489 bp, Setaria italica
  misc_feature (434)..(489): n is a, c, g, or t
  Peptide Sequence Number=SeqID_74887
cgcatcggggtccggtgtgccgggcggccgccgcttgcgcttggcgggtggcccgacgccctcggccgggcaggaggaggagggctgggccgagtgctcctaaccgacctatccgcgcagggcccagcgccctgccatggcggcatggcccactgcccatccattgctgttgctgaaccagcaagtggccgagcctgatcctctgagataggctgcgcgtagcaacatcatgtgggcaacgttcgtttgttcttttcctccctccctaattaagaattaacaataccatcagggtccaggaatcttgtggttaggagggccaagatgaggtccaaatggctggtatggggacatgagagtgtaaggtggtggctgcctctctctctctctctcttgtggttaacaaaaggctacttgtatttgatttgaattgnnnnnnnnnnnnnnnnnnnnnnnnnnnnnnnnnnnnnnnnnnnnnnnnnnnnnnnn

SEQ ID NO: 8914 - DNA, 745 bp, Setaria italica
  Peptide Sequence Number=SeqID_74888
agttctgcgaagttggttatcgaagctgaggagttgatgaaatctgaatccgaaggcaaaactgacagatggtcacttcttgaaagtatttggaacaaccagttcacttcgtatgggttagctcatttgtgtaatgatgtcccagaaggggttttgtgtctgttatacagggatgaaaggttcaatgtgctgtacaagtgactgctcaagacgtattggaagattatcctgatgcactgtggaggaagttggagcaggttgatggagatggtgatctactgacgagctcctttggtccaataaatgtaacctggcttgaaaatcgaacgaaatctgatcgaagatgagaggaaagctgtaaaacagtatgtttttcttttcttgctatagtggtgaataagctaccaaacttcagtttatgcacaattttttttattgtataacttgcaggaaagaaacccgccgcttgaaaaatgcgaagaagcgtgggagaagaaaagataaaaagaacacggtaacacaagatgaatgtggggaggcaaataaatatcttggtgatgaagaggaagccaatacagctggagatagaggaccagcctcaccaaaagatggagttttaggcccttcccaagataatatgttgagggatggatttatgaaatttttaaaggagtattcttactttgtattggtaaaattctattactttcttagggttatttcttaagtttggttaattttgtta

SEQ ID NO: 8915 - DNA, 392 bp, Setaria italica
  Peptide Sequence Number=SeqID_74889
agacaaacaactaaggtaagaaagacttaggtaacaatttaactacaaagactcaaggtggatcaacacttgccagagtaatcggaaggtcatcgtttccctctccgagacattcactatatatcccaaattcacaaggaccaacgactttgaggatacctcggataaacttttgtataatgctttgggcattgctatttatcacggatggctgatgaaccctcaggataccgataccagtgaagcagttggcattgaaagttctgcgaagttggttatcgaagctgaggagttgatgaaatctgaatccgaaggcaaaactgacagatggtcacttcttgaacctttcatccctgtataacagacacaaaaccccttctgggacatcatta

SEQ ID NO: 8916 - DNA, 587 bp, Setaria italica
  Peptide Sequence Number=SeqID_74890
ggaacaaccagttcacttcgtatgggttagctcatttgtgtaatgatgtcccagaaggggttttgtgtctgttatacagggatgaaaggttcaatgtgctgtacaagcataaaggaatgttgcatgttctagtgactgctcaagacgtattggaagattatcctgatgcactgtggaggaagttggagcaggttgataaaaatggtgatctactgacgagttcctttggtccaataaatgtaacctggcttgaaaatcaacaaaatctgattgaagatgagaggaaagctgtaaaacagaaagaaacctgcagtttgaaaaatgcgaagaagcatgggagaggaaaagataaaatgaacacagtaacacaagatgaatgtggtgaggcaaataaatatcttggtgatgaagaggaagccaatacagctggagatagaggaccagcctcaccaaaagatggagttttaggagccaattacccttcccaagataatatgttgagggatggatttatgaaatttttaaaggagtatctacttgatggaaaatcatacttcagggatcaagtggaattgatgcatttgaaa

SEQ ID NO: 8917 - DNA, 1141 bp, Setaria italica
  misc_feature (1103)..(1103): n is a, c, g, or t
  Peptide Sequence Number=SeqID_74891
atctgaagctatgcttttgtgattattttcattcaataatccaagaaaattctgttgacacggataaagttgaactgtatacaaagatcaagcttacaatttgctgcttgcctctacgtacataaaagatttatgtccttcgaagagttcgccgcagagaattgtatgtatagtttatgaacttgaaggatggtgaagtgctctagaatacaatttcagcctgccttgcataatcactttgtacaagtagaatccttagcctgcatgacattggcttttaagtttttttttaaaaaaaacgcacgtgcactttactagtttttttaataagcagaagatttataattcattaacacaggtcattgagaagtcacagagcctgttgtacaatgcaatgtattttactcgaattcttgctttggtgcacctggtctgcagcagccagaaggaaaatctactgtagacattgccgagcaaatgtacaaagtgatgtcaatgttcagtgtagctaagtttgcaggtcgacgtggcgatttctgattgaattttccaatcttatcaccaaattccctgccctgaacaatcctgacctcgcactgtcgcacaccgcatgatgtgcttagcggggtgggggtggataaagcacaaaaataaaatcctcttactcggagcctttatttattattgaagagcatgggaccagctctcccaataataagtgacttggagtaaggcaggctctcaaaaacctccttgcacatgcatactttttgctcagctagcttcccatcagcaaacatgcctacttcaagttggtcgccattcttgttgcaacggtgcacaaacagtacagtatccttgaacaagtcaaagcgacgctgcatctcttcacggctccgctcctgaccccaaaacttgcaccagcgctcataaaaggcccacagggcttcatctgactcgaggtccttgtcgtcgacctcaaaggcaggacgagttagaggctcaagtgtgccttgatcggaacgggccatgagggaggacaggcacctcccgaacggcggtgaggcgacgggggtgatctgcgcagaagcagatcttgggcnccgcaccacctaaacacgccacggctgtacgtcgagat

SEQ ID NO: 8918 - DNA, 3053 bp, Setaria italica
  Peptide Sequence Number=SeqID_74892
gatgcttccaccctgaaaccctagcagtagcagactagcagcgggcggagcaagctgcagcgccgaattccattcgctccagcgccgcttcgtccgcgcccggccacccaccggtcgcagctgctccgcaagctttccgcaaccgtccactggctgccgcgcctctacacttaccgcgcctcccgttcctcttctcggggccgtgcgctagggtttggagccgccgcacaaatcctcgtcggcgccgccatctccggtagaatggaagacgttcaggacgccattggggtctgacatgtttagtctggcttgctcgtgactccttccgacctgccccccttagcaatggcagactctaagaaaaagtacagggcacgtgaaattgagttccttggtcaaaaaagacacattgttctgcaagatgttggtggatggtctcacctcgtggaagtggtcaatgttcttctcctcggagatgaattaccagaaggaatcatatttcagagcaaagctcatggtgagaagtatattgaacagtacatgatggagaatgtgctagacacctgtttggtgaggagattgcaaacactggtgaagcttggtacatttactcaagctcaggtggatcaacacttgccagagtatcggaacgtcatcgtttccctctccgagacattcactatatatcccaaattcacaaggaccaacgactttgaggatacctcggataaacttatgtataatgctttgggcattgctagttatcacggatggctgatgaaccctcaggataccgataccagcgaagcagttggcattgaaagttctgcgatgttgattatcgaagctgacgaattgattaaatctgaatccgaaggcaaaactgacagattgtcacttcttgaaagtatttggaacaaccagttcacttcgtatgggttagctcatttgtgtaatgatgtcccagaaggggttttgtgtctgttatacagggatgaaaggttcaatgtgctgtacaagcataaaggaatgttgcatgttctagtgactgctcaagacgtattggaagattatcctgatgcactgtggaggaagttggagcaggttgacgaagatggtgatctactgacgagctcctttggtccaataaatgtaacctggcgtgaaaatgaacgaaatctgatcgaagatgagaggaaagctgtaaaacagtatgtttttctttcttgctatagtggtgaataagctaccaaacttcagtttatgcacaattttttttattgtataacttgcaggaaagaaacccgccgcttgaaaaatgcgaagaagcgtgggagaagaaaagataaaatgaacacagtaacacaagatgaaagtggggaggcaaataaatatcttggtgatgaagcggaagccaatatagctgaagatagaggaccagcctctccaaaagatggagttttaggagccaatatagctgaagatagagaaccagcctctccaaaagatggagttgtaggcccttcccaagataatatgttgagggatggattcatgaaatttttaaaggagtatctacttgatggaaaaccgtacttcagggatcaagtggaatttatgcatttgaaagggatttcccatttgatcatttgttatggttggattaagacatatgacaaagagcttgcagtatctatttgcagtaactactttagggttgcagaggatctgaagctatgcttttgtgattattttcattcaataatccaagaaaattctgttgacacggatatagttgaactgtctacgaagatcaagcttacaatttgctgcttgcctctacataaaagatttatgtccttcgaagagttcgccgcagaaaattgtatgtacatagtttatgaacttgaaggtagatttgtgaattctacctcttatgttgggaggctgatggccttaggctatttggattgcatccttaagactcataaatccggttattcctggtatggagaattcggaaaatctcacatgtctgtaaagattgtgaaagggatcatgatattcaagatcaaaactcttgctactatggttaaactgaacagagataatggtattgctgactttgacaagtataaggagatcctgttccctctcttcaagaggcatgatgttgaagactatccagtctacttcgatcagtttgtactagattttttggctatgccagacccaattgaatctcctgtgaaatttgagaaatttcagaagtacatgggggcacatcttttcgccaaagctcccctggtccgatctgctctggttacaaatacatatcaagtatttgagtctttgatatttacaatacctccgccaggtggttggcctgtatacaccccacttgattttgatgatgatgatttgccccattgggatagagagcaactgggtgctgcaatgtatggggtttatacttacagggacagacgttcttctgtaggtggctgtgctcacagtaggtatgacagacatacctactggtatgcacttatgttgggaagacatggcgtccagcacctgcattggtatacaaagaaaggaaatgtacaaactattaaagattttgtcatagctgatttgacagtagcacatgatctcaaaggtattttggcaaatgttgtttacaaaattatgaagattaccaacttcgatggcccgttttcaagcgtctggagaacattcgtggcatctgaaacctttgaagagcagcctgctggggatgctgcagttgaagctggagaaacagaaggaacctttgaagagcctgcctgggatgctgcagttgaagctggagaaacagaagcagctccgggccctgctacagccgcaattccaggagatcaggaattaacaatgtctatggctcccccctcccctgacaagacgaactatgtagcagaatgatgatgttccttaagagttcggttaactgagggaggaattgaaaattcagacgtttattccttggttctaaaatctgatgaactgatttt

SEQ ID NO: 8919 - DNA, 846 bp, Setaria italica
  Peptide Sequence Number=SeqID_74893
agaagctaatgactgattttcaacttccttacaaagcattgccacgctcagaattcgaggttgtgaaagacaagttgagccaagttgcacgttccattggtcaatctgcaaatgttgagtctgtgttcttcaaggtaccttttgaagaagttcctgatcttgttagcagccgccgagtatttctttcaaaaggctatgcttatgtggcgatgagccaggtggtttcccttgtggttactcaattccgctgcaatatctcgaaggcacttgttttgacaaacagaaaaatggacggcaactattaaggaacaagaaaaggacaggttgacgcctattgttgaagcgttaagcaatgcgtattttggacctgattactctcagccgaaggatgctgtcgaaatatctctaaaggatattgaccaactggctaaaagttctttccctctttgtatgcggcatatgctagataagttgagagaaaaccatcatctgaagcatgggggtagaatgcagtttggtctttttcttaagggtgctggactaaagttggaggatgcccttgcattctggagagcggaattttctcagaaggttggctctgagcggtttgacaaggaatatgcctatagcatcagacataattatggaaaagaaggaaaacgaacagattacactccatattcatgtcaaaagatcatttctgcaacacctggtgttggagatcaccatggatgcccttaccgacattttggcgaagaaaatttgcgggcagcactcaacaaaatgggtgttagtgggcatgccttggaagagataatggataaagtgaagaacaggcattaccag

SEQ ID NO: 8920 - DNA, 1025 bp, Setaria italica
  Peptide Sequence Number=SeqID_74894
tagaatacttttagaacaatgaatatggagtgtaatctgttcgttttccttcttttccataattatgtcaaaagatcatttctgcaacacctggtgttggagatcaccatggatgcccttaccgacattttggcgaagaaaatttgcgggcagcactcaacatagtgggtgttagtgggcatgccttggaagagataatggataaagtgaagaacaggcattaccagctagcttgcacattgacctttgaggcaacacatggtgtctcctgcgattctggaatcaaccatccaaatcagtatttcagtgaaagccagaaagttttgcgagccaaaaaccaaacagtggagagcaagtcagcaacataaattgtattgtagctgcagaaagcatccatcaacaaaaggttaccaggtcagcgtctaataaaagattcatgcttgatgcaattatgtgatggttactggttgttgatctttgatgcttagctggaatcctgttgctagctacctgttgtttccaagctccagttggtggctgtcatactggacaagccatggtgccacactgtatactagaagggttatctagtgctgtgaacagaagcaggttaaggcatacttacgtgcagtcgtgtaaatctcgagcgaatcgagaaacatattgtagcacagtttgtgctgtgatgttatgttattgccaaagcttctgagtagaagagaattgcttactctgattttgtcaatgtatcatgtgtagttacccgagctgaagtgtttgtcatgtaggttacctatcattgttatcttaagtaggtcgtcaaagtatagttggacatgtaacaaattactaggaacccttttccgtagctcttgtacgagcttactcattttgcctttccttgttttggaggcaaaggtacaactttgacatttataatttactcgttttttccagtttgtagaaagtaatttataagtgatttatgtacaagtaacttagtgagtctgttttgagttcatgta

SEQ ID NO: 8921 - DNA, 337 bp, Setaria italica
  Peptide Sequence Number=SeqID_74895
gggcgggccgccagcaagaccacggcgcaccgcccctccaccgggccgcgggtcgccgcgcccccacgtcctcgctagccgcgggtggggaaggggaagaaaaccaggagacgcgctccacctcggcaaccccgctgcccccgcgatggcgcccgacgccactgcggcctccacgagccgcgccgtcttgtgcacgtggatgtactccagcgcggcgaggctcacggaggcataaccctcgccttccatgttcgcgacccgccccgccgcgccgccgcccgccgcgcggaggaccgaaggggcgagcgcgaaccgtggagggagtggggcccacctg

SEQ ID NO: 8922 - DNA, 825 bp, Setaria italica
  Peptide Sequence Number=SeqID_74896
gaaaggcatcatcccaaacgttacgttcaacattttgattcatagtcgttgcatcaggggaagctttctgtggcaaaaaatctggttttaatcatgggattcctgcaaatgttgtgacatacaatatgctcatccattggtcttactaccatgggagtgctagtgatgtggaaaacatgtttgagtacatgacaaaagtagcgaatattgctccagatgaaatcacctatacgataattgttgatggattatgccgacaaggaaaatttgatagggctactgattgtttaaagaacccctcaaggatggactgtcaaaggatcttcttactgcccttataaataggcttggtcacagggagagaatctggaacaaccccttatcatatttgaggaaattggaagacaaggttttgtccgtaatcacattatatttgagggtacaattagatcattttgtaggtttggtttttgttagcgcacaaagattatcagtctggaattccttcaggatggaatattgggatctggcaaggaagtataccctgctcataagggttgaggaaaaagataaatgctcacatgcaacaatgcctctttcaagtttgttgtcaaatacatatgattagtgctaagtcaatatgtcgtggaggaatttggaggccctgctaatgaagagagctgatctggcacagaattggctaattctgtgtccagaaaaggtggcctatagagcactgagttgcctaatgttcatggggaagatgagcggcgccgacccgtcgaacgccatgctggtgagcttctgggcggtggcctccgtggg

SEQ ID NO: 8923 - DNA, 247 bp, Setaria italica
  misc_feature (243)..(243): n is a, c, g, or t
  Peptide Sequence Number=SeqID_74897
tgggaaagtgaagttgccagctactttattcacatttacaaatccatggatgttacaaccttccccttgttcatcttttaacctttgtacaaagccctctagcttgccatctccaatatgattctcctccatcctcgatccatcgtctcttggcatttgctgctgccatgtactaaatcgcatgcatgcgtccaccatatatcatcatcttctttctacttaacaaaaaaaaaaaaaaaaaanaaaa

SEQ ID NO: 8924 - DNA, 708 bp, Setaria italica
  misc_feature (427)..(427): n is a, c, g, or t
  Peptide Sequence Number=SeqID_74898
tttgttattgtcctagtctaaccgttgtaaaattaccttcctaactaattagcacatatgttcgtcaggaagtgaagaagcgatgtattttcttcagtaaaatcaaccttaattggtgaaaattcgtagaagaaatatacaccaggtggaggcctaggatagccaattgcctctctgaagtgctccgtcacagaaaaactgcaaaaagaaaacaaagaatcaatcacgaaattaggcttcaagaaagtaagaaactaggcatggagatcatgctatttacctgatttgagtaaatcttccgcccctaatatctgtgtagattgtaggaacaaccttcacaaaatactggtacatccctgtcaacccatttggagttatcttgtgaccactcaactccatcaagaggattgatgacacctgggaactnttccccaaaggacagcttatttatcttgtgactgatattgtaagtttctggttggaggttcaacagatctttgcaggaagttgaatgactggtccaagcttttcccaggggcaaagtgaaagttgccagctactttattcacatttacaaatccatggatgttacaaccttcccctttgtttctatcttttaacctttgtacaaagccctctctcttgcactggaatgtgaggaaactaactggttacgaaaaccacacctaactaaagttaaaacctaaa

SEQ ID NO: 8925 - DNA, 533 bp, Setaria italica
  Peptide Sequence Number=SeqID_74899
tgacatccattgtatcaacagcaactagagaacaaggaagggccgggaatgtaatatcgaaattgatatgaagtctttcccctcttgaggtatcaacagtgagcttactctctgtagcagaatatagatagagccctacaggaaagttatcatatcagtaagttaaaatacagtgcatgaactattatcaagataaataggccaaggaacaagaccctttgcgagagaaggtacttgcagcatctaacaagttaaaatgtctcttgatttagcatgaaaaagtagtacgtgccagttataacacataggtatgggtaaaggtgatcacgcatagcaccatatagcaatggcatgcctatagtaatcatgctaacaaaaacaaggcaatagaaacttagcattaagcaacaaacaccaaaaatgatgtaacatgcccaaaaatgttatgaaacttagggagtgattggttgttgcatgggactagcctggctcgtaccttggaaccaggctcccgctggacaggctgagcgcat

SEQ ID NO: 8926 - DNA, 1592 bp, Setaria italica
  Peptide Sequence Number=SeqID_74900
ttttttttaaacagcgctatgagcatgttgctgtgggattgacatgtagtattgacataaacattggttcgcacttggcagtgatgcagctgcttacacatctttagatcaagaatgggggtaaactgccgacctctctgcgccaacaaaggaaatggcttaaacgtgaagctctaggtctgaagaagttagcaagtcttaagtgattacagatgtattacagctgaacaaaattcctccataattatcatcgccaaacaactttttgaggcatgagttaactcgtttttactatggtcctagagactccgctataaatcggaattatccaagctttccgagctccatcttcttcttgatggcgtgatgaccatggtagacgaaagaatcgatgatgccagcaaccgtgaaaatacctccaacaatagcacatatgttcgtcaggaagtgaagaagcgatgtattttcttcagtaaaatcaaccttaattggtgaaaattcgtagaagaaatatacaccaggtggaggcctaggatagccaattgcctctctgaagtgctccgtcacagaaaactgatttgagtaaatcttccgccccctaatatctgtgtagattgtaggaacaaccttcacaaaatactggtacatccctgtcaacccattggagttatcttgtgaccactcaactccatcaagaggattgatgacacctgggaactcttccccaaaggacagcttatttatcttgtgactgatattgtaagtttctggttggaggttcaacagatcttgcaggaagttgaatgactggtccaagcttttcccaggggcaaagtgaaagttgccagctactttattcacatttacaaatccatggatgttacaaccttccccttgttcatcttttaacctttgtacaaagccctctctcttgcactgatcaattgattctacgttggtgagagcccaccctttcttccgataggcatcacggacttcttcacaggagttgcaacactgatcatctgactcctcagaaccataacaagatccacagtaaacctcattgtggtcaagcctaccaccatgcttctgcaatggtctttcaatcttaggggcaccaactccatcttttcttgattcaattacattaccaagatgatcaattcttttctttattatgtcgtgttttatatcataatgttgctctccactgacatccattgtatcaacagcaactagagaacaaggaagggccgggaatgtaatatcgaaattgatatgaagtctttcccctcttgaggtatcaacagtgagcttactctctgtagcagaatatagatagagccggatctcggagaagaggaggaggaggatggcgagggaggagaggatggtgatgaggccgccggagagggtgcggctgtagaagtcctcgttcaccttcgggtaggcgtccaggttccgcagcttactccagagctccatcgcttgagctcacgccgccggcgagaccgccggaaacctgggacgaggtagagatctacgtcgtcggagtcggcgtggccgccgcgagaaatgaggagggtata

SEQ ID NO: 8927 - DNA, 241 bp, Setaria italica
  Peptide Sequence Number=SeqID_74901
gctagtctattattgcagtaccatttatgcatacttcgttagcacagtatcgtatttgctatatattttacctgctatatacttctgtttttaatatacgatgatgtttaggataaacatgccggttcatttttaaactaatctgcttatcccaaatgacatataggatacgtagcatcagccactaatacctagctagtggctcatcactatctctgttagctgggccatgcgtgccacg

SEQ ID NO: 8928 - DNA, 2623 bp, Setaria italica
  Peptide Sequence Number=SeqID_74902
ctagtaaatgtgacgttgagggtttgagcgatcaagctgccatgaaatcaatctgtttaacaatcaatagcaggcttcacacgtgtgcttgtcctccggatagtatattaaccgtaatcttggttttatttctcaaacttggggagtgttcttttgtctttatgaaagatatcctacttaccctggcacggtttgctatgaaaatggacaaagaatcacaactaaagaatgttgaagaatgcattggagcagcagtgattgctatgggaccagataaagtcctttccttaatcccgatagcttttgatgaagaccggttgacatgctcaaatacttggcttctacctattttggataagtatacatatggagccccgctgcaactttttctagagcgtattgtgccactagcaaaatctgtacaaaatgcatctgacagggtcaagaaaggacggaaacgtaaagatttgcaatcttggactaatcaactatggaagttgcttccttccttctgccgctatccagttgatgtacatcatagttttggttccctgtccaagttgctggtagaaattttgaagtgtgatgagtgtctgtacaaatctgctgttgaagccttgcagcaacttgtagatggaaccagaaaattaagtagcaatgatcaagatgttgaaatatatatggaactttcagccttgttctcctcaaaacctattactttcagatgtgcacgtttagagaggtgctccaaaaaagaagcccgcaagaatttgaaagttctagcatcacattctgccgatcttctctgcacttttgcagactatttccttgactcctcaccagaaaagcgtgctcatttgaaggtcgctttcagatgcctggctcaactttctggtagcacgaacgtatgtgaactttttgtttcactagtcaaaaggtttgatttagaagatactcaattggagtcagacagtcaagaatgcaaaactgatgaaccagatagaaaggatgaagaaagtactgatacagcagaggagctaaacaataggaggtctcttctgttagaacttatatccacattcgctgaagttgctgatgaagatcttctggataaactctttggatttatcaagtcttgtttgctgaacaccagcatgtcttgtcacagcaaagctctcttagcattaagcatgattgtgaaggaacataatgaatattctttagtacatttggatgaaataatgctattacttcatggaatgaaaccagctttggataacacagttttagaaagccaactattatgctaccagcatttgttggttcacatgattaaggtcaatgaagagaacaccagcaagaaggcattcttgattctaaatgagctaatagttgcactaaagtctaagaaggagagtagaaaattagcatatgatgtgctcctggcagttagtgcaaacttgagaagctcagggtcaaatagtgcagattcagatcttcaacgattgtttacaatgataatgggatatctttcaactccatctcctcacatagtgagtggagcaattgctgcactgtcattgcttatatacagtgatgctaatttttgcatggaagttccaaatctgatacaatcagttttagtgttgctgcaacataaagccattgaagtaactaaagcagccttgggttttgttaaggtattggtaacctctttgcaaccagaaaaactactgaatttgcgagcagatatcatgaaggggatactagaatggtcatcagttacaaagcaccatttcaaagcaaaggttgtactaatattagaaatattgatcaggaaatgcgggtttgatgctatcaacttagttacacctgataagtacaaaaaattcgttaacagtgtcgaggagggccgcaatgggaatcatagtctagctgatggtgcggagtctgagtctaaagaacacaaacaaaatgatgccaaaaggagaaaacgtattgattccaatgatgaaactggacaagaaggaacacctagtcgtcgaccaccgtcaaagagttggtcagctgggaagcaggcaaaggattttcatttcaagaaaggggcagggagaggtaaccctcatgctgcaaaaagccataaaagtaaagcttcaggtgacaaaggcaacaggactaatttcaagtcgaagtccaaatggcaaccaggaaacagtcaaggaagcagaggtgataaattgcctggcagtaacaaaaaactagggtgggtgccttcagcaagacgcaaaaatagtgggagtagagcacctgggcactctcctagtttcaagaagcgtaaaaggacagcatgaggtttcagtttcccttgcatcatctaggcactgacgagcatggatttgatgagatggctcggaattttgcagcatcgagcccagcacatacctaccgagatgcttccatcttgaagatctttgcagaccttatgggtgaaatgagggtcgtagtgaatctgtggtgaatccacctttttgtaaggacggattttgacttgtaggtggattgagtattgttaacaaatacgaataggtaattttagtaaattaagtaaaaaaaaaaaaaaaaa

SEQ ID NO: 8929 - DNA, 703 bp, Setaria italica
  misc_feature (645)..(703): n is a, c, g, or t
  Peptide Sequence Number=SeqID_74903
ccgcctccgatcccgtcgtcccctggtaccatgccaacaggatgctcagcttttatgctccaggttggtgtggagagatccgtgatgttatctacactgacagtggaaaggtgactgtgatataccgtgtgacagtacgaggaacagacggagaggttcatagagaggccgctggaacagcgtcgctgagtgacgcacggtttgatgatcccgtggcggcggcagaagaagccgcgttctgcaaagcctgcgcaaggtttggtttcggcctgtatctgtaccacgacgacgagacgccgtagcgggtccgcatccgtcctttcttctgcttggcttctcgccagtctatcaagttgttgtggtggcgctgtgggggttgatcagcttgccgagtcatctccaattctccgtcctgatggtgatggcgcatgtatcatccgtgctgctcaactgtaaatatgaggcgtatcaagttgctaatcactcgagctgttgtatggttggtgcattaagcgtgttgtttgctcaatttgggacacagccttgcaaatattcagtgaaattgtatctgatgctgtgtattatgctattatgaatgtgtatgcatttattttttaccacaatacaataacaaaaaaaaaaaannnnnnnnnnnnnnnnnnnnnnnnnnnnnnnnnnnnnnnnnnnnnnnnnnnnnnnnnnn

SEQ ID NO: 8930 - DNA, 362 bp, Setaria italica
  Peptide Sequence Number=SeqID_74904
cttggtttaattttagtcttatcgtcggtgttgcacaattgctgtccttggaaaggtgacatgaccaaaaccagtgtctcaaacagtatctgacagcataaattaaaccgagtacctcagacgctctaggcggagacccaatcaaaactactctgtaggaaatacaagctgctgctgcttctacactagtctttttcacataacagccctacaactactccttaccgcagcagtcaacaacgcctgttatttcaaatggactgcagtagtaacacctgccagctgctgtgaccacccgcaacattgtttctgtaggaaaacagaatgagatcttgtcaccatcattctgacaagaaaaaaac

SEQ ID NO: 8931 - DNA, 605 bp, Setaria italica
  Peptide Sequence Number=SeqID_74905
aacaaacttaaactaaggtaagaacaaagaactaagtaagaacaaacaatacggtaatccataggaccagcatctgaagtgatggcatcaacaggtgctggtgctgaatcctgttcttgaattttgcttgctttagtggcatcagacttgacttcagaagtggccaagtctgacttcacatcagtactgacatcattgacaatgactgcctcattagtctctacatctgaggtcttctcaagaacaggctcattattactttcagtatgcagttgcacttcttcaaatgctaaatttcctccaacaatggaatcaggtacttctcctttggcagcagaggcctcatttaaggaagcttcaacatcgatactgggggtccctccagtggcagaaattgtgaattcctgactaacttcggtggtaggaacttcaacttgctgagtgacatgaaccacagattcctgacgaacttctgtaatggtaactgtagtttcctcactagcattggcatcaggcaactgatcatctgcgtttgcttccacatcttctagtaagtctttcgttctagtctttgttcttttgtttttcttttactttttcttttt

SEQ ID NO: 8932 - DNA, 1776 bp, Setaria italica
  Peptide Sequence Number=SeqID_74906
ctgcagtccaccggcgctgccgctttgattggttcggtgttttgcaacaacctcttcagcttcaagtttcctcttttctgttgaagctgctgacttttcttcagctataacctccttggtatcaacagaggaagcctcaacaacagaatcagggagggtcaccgatttcacatcttctgagttaagctcggtctttcctctgagatcatcagacttcatattcaactcaacttgtttaatttccataacatcctcctccattgactcatcacctgaactcctgtctaaatttaatttctctggagaaccttcaggactatctttcttgtatgagtcctcattagcggtggaatctatgtcttccacagatgactggtccttaaccagctctttgtcatcatccaatggctgcaaatctccacctaagggagtaatgccggatgatggttcgaccatcttcggcttaacctctagttctaaatcaaaattattagcattcaagttatcttctatattattctttttattagttgatagatcactagaaatcgactcacacttaatttgagaccctaaatctgggctaacctcaggtacctgattatttggttttgacacgatgggctcgcagtcctcgttcatggtatcagaatctttgtgctcttcatcatacattgacactttgtcacccaaatcatccttgggtgccagtttctccccatcatcacttactggtgcagctgtgacaacatcggtatccataggaccagcatctgaagtgatggcatcaacaggtgctggtgctgaatcctgttcttgaattttgcttgctttagtggcatcagacttgacttcagaagtggccaagtctgacttcacatcagtactgacatcattgacaatgactgcctcattagtctctacatctgaggtcttctcaagaacaggctcattattactttcagtatgcagttgcacttcttcaaatgctaaatttcctccaacaatggaatcaggtacttctcctttggcagcagaggcctcatttaaggaagcttcaacatcgatactgggggtccctccagtggcagaaattgtgaattcctgactaacttcggtggtaggaacttcaacttgctgagtgacatgaaccacagattcctgacgaacttctgtaatggtaactgtagtttcctcactagcattggcatcaggcaactgatcatctgcgtttgcttccacatcttcagaagcttcgtcagctgctgtttcactctgaatggattcaaagagtcgcctcacaagttcttctttcaaacccttgacaggaagcctccttttacggagttcatccttcagatcagtaactctccactgatcaataggacggttgtttagcacaggatatgatgacatgatgactgacagcaatcctgatgccaggagatcccacggagcagatggcgcaccaccctcgaccgagacgccaaaaccctagcccagccgccgcgaatcctccgaggccgcgcgctcctgaaacaaacaaccaaaaaagcaccacaaaaattcccaatacgaaattcgaaaaaatacagaggacggcggaggcggaggagaagggaggccggggtttgagggggagtggcgggagaatccggaccgaacccgaaactattgtgggggactggagctgcgcgcggcgcgcctcccccccgcggctgcgctaggggtttgggggcacggcacggttggagtgggagggcgagcaggagggag

SEQ ID NO: 8933 - DNA, 1833 bp, Setaria italica
  misc_feature (1)..(24): n is a, c, g, or t
  Peptide Sequence Number=SeqID_74907
nnnnnnnnnnnnnnnnnnnnnnnngttttttttttttgttgcaacaccgacgataagactaaaattaaaccaagcatctcaacagtattttcccaagactcaactaaaaccagtgtctcaaacagtatctgacagcataaattaaaccgagtacctcagacgctctaggcggagacccaatcaaaactactctgtaggaaatacaagctgctgctgcttctacactagtctttttcacataacagccctacaactactccttaccgcagcagtcaacaacgcctgttatttcaaatggactgcagtagtaacacctgccagctgctgtgaccacccgcaacattgtttcgcaacactggcgccaaaaaatggaaaccaatgcctcctattcctttttccctttgccttgtgcggcgagcttggctgccacctcctcttctgacaaaggcagatagtagatcctcggggacgactgtgtcttcctgaagagatcatcaagcgtcacaacaggaggctccggcttctttggagtgggcggaagcctctcccttgctgatgctactgggtcagcagtagggggcttagcaaggggcggtgggggtggcagttgctccttcggtgtagcagcttggcgcggcacattttgattagcctgagcctgttgaacaggaggcgcccttgcggcggcagctgggctaacaggagcagctggtgggggagggggttcaatcttgagcttcacttcctgagggtcaacaaattcagcaatcaacttattgccattgtttgggggccactgtaggttgtaaacagcatccctggtagcaacagcttcatcaaccgaggaaaacgtaacatagcaatgagtcttgatatgatccatccagaagttttgtactgatccagttttaccaagaagctcctgcacagctttcagagtaaatgggcgtacaaatcgatcaattctcaaagaagttgttgcaggtttctgagacggtggcacaatccgctccttaggagaatctacactagctgttgaatcggacctcccaaaagagcgtttaagagcaggctgaaaaacatccttgggagcatcagaaccagtttgatccaatgtttgtctctctggaactttggcaccgtctgcagtccaccggcgctgccgcttgattggttcggtgtttgcaacaacctcttcagcttcaagtttcctcttttctgttgaagctgctgacttttcttcagctataacctccttggtatcaacagaggaagcctcaacaacagaatcagggagggtcaccgatttcacatcttctgagttaagctcggtctttcctctgagatcatcagacttcatattcaactcaacttgtttaatttccataacatcctcctccattgactcatcacctgaactcctgtctaaatttaatttctctggagaaccttcaggactatctttcttgtatgagtcctcattagcggtggaatctatgtcttccacagatgactggtccttaaccagctctttgtcatcatccaatggctgcaaatctccacctaagggagtaatgccggatgatggttcgaccatcttcggcttaacctctagttctgattatttggttttgacacgatgggctcgcagtcctcgttcatggtatcagaatctttgtgctcttcatcatacattgacactttgtcacccaaatcatccttgggtgccagtttctccccatcatcacttactggagaaccttcaggactatctttcttgtatgagtcagcatctgaagtgatggcaagacaaccaagacaacctagttagaa

SEQ ID NO: 8934 - DNA, 271 bp, Setaria italica
  misc_feature (129)..(129): n is a, c, g, or t
  Peptide Sequence Number=SeqID_74908
cttttccaccctaaagccaaaccttatccgcttgacagcagcaatcatcagaatcagaattgtctttcttattcccaggagaactagatttatttgatttttttacaatcactctccgcattcggatcncccttttctgattcgtcatttgacttgcagttctgtccaccgctgcagcattcagaacatagagttccccgttctctaggttcacttccaaatcttctcagtcagtctcatgtggaagtgaacctagagaacggggaactca

SEQ ID NO: 8935 - DNA, 596 bp, Setaria italica
  Peptide Sequence Number=SeqID_74909
actgatgatggatcagatttgtcaccgtagcattgatttcgtaggatttctcttgaggggcgacagaaaacgtaaggtgcagagcataacgaagtacacctccacctgaactatcattatcttagaagatgagcagcatggtttctttccacctaagccaaccttatccgcttgacagcagcaatcatcagaatcagaattgtctttcttattcccaggagaactagatttatttgattttttacaatcactctccgcattcggatctcccttttctgattcgtcatttgacttgcagttctgtccaccgctgcagcctgcaaagaaaaacagaaaaattagcattgcctcaaaatctaccagtttggattcagccattatttggtattttcaggctatcagctccattacattcagaacatagagttccccgttctctaggttcacttccacatgagactgactgagaagatttgggccccaacattaacatcacatggcctgttccctttcttccgctggattagagggtaagacaggagggggacagtgtgtacctttttgccgcatgaaagtctgtctcgttacacaacagg

SEQ ID NO: 8936 - DNA, 830 bp, Setaria italica
  misc_feature (1)..(1): n is a, c, g, or t
  Peptide Sequence Number=SeqID_74910
nttaaacctgtacagtttgccggccaaagatgaaacggctggtgactgagttagtcattgtaaaatatttacagattctttttatgcgcagcagcgcaagctatacatgagatcagagcgcaagaagcatcagttgcttatggggaagtacttgggatcggcggggaagtcatgctccactcgcagcttgccttcatctgaatctgagtgcctttgaggaaatacaactctaagatcattgtagagatagaacctacgctcttcctcggccactgtattactgttgtatggcactgatgatggatcagatttgcaccgtagcattgatttcgaggatttcttggaggggcacagaaaacgtaggtgcagagcataacgaagtacacctccacctgaactatcattgatcttagaagatgagcagcatggtttctttccacctaagccaaccttatccgcttgacagcagcaatcatcagaatcagaattgtctttcttattcccaggagaactagatttatttgattttttacaatcactctccgcattcggatctcccttttctgattcgtcatttgacttgcagttctgtccaccgctgcagcattcagaacatagagttccccgttctctaggttcacttccacatgagactgactgagaagatttgggcccaacattaacatcacatggcctgttcccttcttccgctggattagagggtaagacagagggggacagtgtgaccttttgccgcatgaaagtctgtctcgttacacaacaggagaaacaagatgagaatgacagatagaaaaaaacaaaacatgtca

SEQ ID NO: 8937 - DNA, 2846 bp, Setaria italica
  Peptide Sequence Number=SeqID_74911
ttttttttttttttttagttaagaacaatgatcgaggagatgcattttattggaagattaaacctgtacagtttgccggccaaagatgaaacggctggtgactgagttagtcattgtaaaatatttacagattctttttatgcgcagcagcgcaagctatacatgagatcagagcgcaagaagcatcagttgcttatggggaagtacttgggatcggcggggaagtcatgctccactcgcagctgcaacaaagatgaaaactgtcacactaaaatacatggatttaacagaacaagaaacaagcaaggagcagtttgattgtcggtgataggatgttagggcaaacttctataagtgttttgaaatgattccaagaaagactaaagatggtttaccatcatctctagggaataacagaatatcattttaagtattgtgttgtgcagccaagtatgctgtacatcaaccagcaccctagtaattcctgattagcgcgacccgtggcagctcgcagagttatatagccaccattggagaagataggagggggagagcaaccaagaacgcaagaagggaggggggcgaaccggagaaagttaggaaggggagggagatatctcgagggaaagggtataacccaggaggaatcggccggaatagaccccgacttctgtggcgaattcctagcgatcggatcgaagcagttgaatcgcaggcagaagacccgattccgttcttcggccatgcggttgatctctctgtttggtttctctggattgtgatgggcatggttcatcccaggtttctggttgcttgctcaggcttcaagttatgcttcatctccggttgctgtagtagcagtgaaaagatgatgatatccttgcttcagatgcgtttgagtaggatatcggagtgtagttctacccttccagtattgattgatttcagtagatgattcttggagcatcagtttggtggtctggcgactgaaatacagattctgaaggacatcaaaagaagttgaataagttcattttaggtgcaaatccaaattaggaaactaaatctttctgcgaggataagaaagattggttctgatgggtttaccccaactttcttcagtcaatgatgatgcgccaacagcaccacacactcccttctcatgccctccacattgtggaggtgttggtgcctgtgatttggatggtcttgcgggaagctcaagtagcagggtgttttcatacccattgattggtgattttgatagaaaaactgcattagatgcaccaaatgaatcaaatgggtattctgaaggcgataacatgtttcacgaacctgcagaccaccatggactgaaaattgattcgagcgatgcaaattctagatcttacactaaactgttgccttctgtccatatgccagtaaggagggttgtgggctttgaatctagttgtattagggctactgatggaacagaaacagatattgtcaattcatctttggtcaacagcaattgtcatttgccatttgatcagcatgagcttcaggcaaggaaaagactgctctccccattgaaaaatgtgctcactaaacagttccatggtgatatgctcaatatttcttctggcgattctagatttaggcattctgattcagctggtaaactatacagttctggctttcaggataataaaaaggccaacactggatgcctcaattcttttgaaacacaggaaagtccaacctataggtgctccaattggagcccagaatgggatatttctaggagcaattctaattcattcactgatggtcctttacttgggagcaaggattctatatcctattatgaccatctagcagctagtgcaaaattagcacactctccactttctctgtctcctctcagccctaaatatatgaacaaaattaaggttgcaggatcccaaagatatataatgagagatcttgaaaatgacttccttgatttaaaggaaactggaggttctgatggaactaggatgcaggagatatcagaagaaactaacttcttacatgatgaacttgatgttacgacacctaaatgggtttcactgagaagatatcgaaattggggccctcaagcttcccctacatctccccgaattggttatggtcggagttcgagtttgcttgtgaggaggtcactagttggctcctttgaggagtcccttttatctggtcgatactcgtatggaaaagacaatcagacgattgatggtttcttagctgttctgaatatcactggtggtagtttcttccccccaactcagaaacttccattctcagtaacaagcatcgatgaggatagctccttattgtactattcttctattgatcttgcggggaggttgcccgcaaataacagcaaaagcccgaagctccaaagaagctatagtaataatgattcacgatcagcaaagagtcgcctacgcatccctgtgaagggtcgcatacaactggtcgtgagcaacccggagaagactccacttcatactttcttctgcaactatgacttgagtgacatgccttctggaaccaagactttcatgcggcaaaaggtcacactgtccccctctgtcttaccctctaatccagcggaagaagggaacaggccatgtgatgttaatgttgggcccaaatcttctcagtcagtctcatgtggaagtgaacctagagaacggggaactctatgttctgaatgctgcagcggtggacagaactgcaagtcaaatgacgaatcagaaaagggaaataggaagactagaataagacctagaaaaataaccaaaataaataaggaacaa

SEQ ID NO: 8938 - DNA, 742 bp, Setaria italica
  Peptide Sequence Number=SeqID_74912
ttaaagttaaaatttacctaattttcgtcctcgactccaccggaaaagcggcgaccccagaatacgggaggcctcgcttctctcttccccgttcgaaaagccattcgccgagggagcggaaagggggagatcgatggcgacttgctctcgcgcgctcttcgtctccgcatccgccgcgtcctccgcctcgccgtcgcgggcttcccttcgccgccttcacacggtagcagttgtatctatttgggaacctcatccacctctgcgcggtgcagcctgctgttttgctcaaacgaagcaatgctgtaggagatccatcaaatgtttagcgagtggaccgtcagtctccagattgacacggccaataaagagaatactgtctcgttactcctcactgatgactgtcttgcacagcaatatcaaccgatgttatcaggccatgagtgcattgcaccaggatggagcatccaagaactttttgtctgttggttttggccgcgtggttttaggggtggtgctcgtcatgtccatctctgcagcttcttatacaacaccttcgtcttcggctcttacagaggaaaacttgcttttcctggaggcttggcgcgcggttgatcgagcttactatgacaaaacattcaatgggcaaagttggtttagataccgtgaaaatgcccttcgcaatgaaccaatgaatacaagggaagagacatatgcagcaatcaagaaaattgctttctaacta

SEQ ID NO: 8939 - DNA, 273 bp, Setaria italica
  Peptide Sequence Number=SeqID_74913
taaagataggcagagctttgtgtctgtaacagtatatacgcattagatgatagaacaactagctcgcagatgtcccagcagtagaagttccaatggaatacactacaacatttgctaatcacctagcatagtacgaacttgttgggttcatgggtatcctacacaagaaggtgctcaccttcttgtgtaggatacccagttgtaaccggcttctatttcaaagctagcagttggtgttccactaagaaggctttgagtctctatcatctctgc

SEQ ID NO: 8940 - DNA, 258 bp, Setaria italica
  Peptide Sequence Number=SeqID_74914
gggaggcggagcgggagagggagacgtggtggccgatcggcgggaggtcgcggtcgccgccgactgagtagtggcgacggcggcacagctgccgcgcggccgcggcctcggacccggtctcgtcgttgcccaccgagcggcgacgcggtgcgatctccgccgtcttggccccggtgtcgtcgcgacggttggcaatgtcgtcagctgtctcggcagcggatgatgacgaatcagccaggctgctccgcgacgccgacg

SEQ ID NO: 8941 - DNA, 274 bp, Setaria italica
  Peptide Sequence Number=SeqID_74915
cagccatggagctcgagttcactgaggggttcaacttctagtgttgctgtggcggagattggtcaggccatgaatgatccttgagaatccaattgtacccgatcctcaggatgatatcaactaattcaatcaaaggtgttgctgtgaaatttgtgtttactgttactgccaatcttctgtatacaaggcccaaatagcttttgtaccagatttcgaacgatgcgcataataagaaaacatgtatcgatggatggaaactgcaagaacttcgtgg

SEQ ID NO: 8942 - DNA, 332 bp, Setaria italica
  Peptide Sequence Number=SeqID_74916
aatggcttctggtttgggtacaggggacaggggtgagagcccaagcaaggagttatctgaagattttacaatgaagaggagagagaggagaagcaagtggaaaccacaatttcggacacaattacatggaggcagtgtggagctcgagttcactgagggttcaacttctagtgttgcattggcggagactgggcaggccatgaatgatccttgagaattcaattgtacctgatcctcaggatgatatcaactaattcagtcaaaggttttgatgtaagaaaaaaaaaaaaaaaaaaaaaaaaaaaaactaaaaatagacgaactagagtacg

SEQ ID NO: 8943 - DNA, 262 bp, Setaria italica
  Peptide Sequence Number=SeqID_74917
ggccgccatcacggcggatcccaacttcacggtggcgctggcggcggccatcacgtccatcataggaggcggcggccagcagcagcacggcagcagcaacaacaacaacaatgtcacgagcagcagtaacaacacggcgaccagcaacaacaccaacagcgagacccagtgaatatatcagctgctgaaatgattttatttgcatcaattgcagctagcagcacaggttgtattgattcgttaaatccatttttaattcttg

SEQ ID NO: 8944 - DNA, 203 bp, Setaria italica
  misc_feature (177)..(203): n is a, c, g, or t
  Peptide Sequence Number=SeqID_74918
ctgtagaactgtgtggtagagcacagtggcgtggagcgcgacgaggtggacatcgaccatgaatggatgttctgtatagcagctcgcatcctgtaattatgtagatgtagaaaaaagaatacccaaggaattaaggagtcgtggttaacccggtgaacaaaaaaaaaaaaaaaaaannnnnnnnnnnnnnnnnnnnnnnnnnn

SEQ ID NO: 8945 - DNA, 269 bp, Setaria italica
  Peptide Sequence Number=SeqID_74919
ccgggcaattggagcttttggccgggaacgtggacgacgggcctctcgggttccggcgagcttgtcggggccaaccggcgcccgggaagcatggatggctgtagaactgtgtggtagagcacagtggcgtggagcgcgacgaggtggacatcgaccatgaatggatgttctgtatagcagctcgcatcctgtaattatgtagatgtggaaaaaggataaccaagggaataagggggtcgttggtaatcccggtgcaatactaaaaaaaa

SEQ ID NO: 8946 - DNA, 273 bp, Setaria italica
  Peptide Sequence Number=SeqID_74920
cggcgacccccgggaacgcccaccacgccgccgcctacgcccacttcctctggaacaccggaggtgaggacacatgctaacccctcgattgacgcgcgaacaccggcaccgacacgaaccggccaggccaaagatcgaaaaaaatgaaaatttagaattcaagaagtcaagttcttgcagcatgcgcgggggcggccacgcggcgagacggctagaccacgacatcacacccatggcccgggcggtggagtggagctgacacatgatatcgtc

SEQ ID NO: 8947 - DNA, 270 bp, Setaria italica
  Peptide Sequence Number=SeqID_74921
ccgggaatccgggcaattggagcttttggccgggaacgtggacgacgggcctctcgggttccggcgagcttgtcggggccaaccggcgcccgggaagcatggatggctgtagaactgtgtggtagagcacagtggcgtggagcgcgacgaggtggacatcgaccatgaatggatgttctgtatagcagctcgcatcctgtaattatgtagatgtgaaaaaagaataaccaagtgaataaggagatcgtggtaatcccggtgacaaaaaaa

SEQ ID NO: 8948 - DNA, 335 bp, Setaria italica
  Peptide Sequence Number=SeqID_74922
gaattcaagaagtcaagttctgcagcatgcccggggcggccacgcggcgagacggctagaccacgacatcacacccatggcccgggcggtggagtggagctgacacatgatatcgtcccccttttacttagaagtgtgcgtgcgtggcgtgggcagtggagtgagttgtgatccaggaggacatggcggtggcggtggtggtgcttctttcccccgctccgggaatccgggcaattggaggcttttggccgggaacgtggacgacgggcctctcgggttccggcgagcttgtcggggccaaccggcgcccggggaagcatggatggctgtagaac

SEQ ID NO: 8949 - DNA, 342 bp, Setaria italica
  Peptide Sequence Number=SeqID_74923
tagaagtcaagttcttgcagcatgcgcgggggcgggccacgcggcgagacggctagacccgacatcacaacccttgccccgggcggtggagtggagctgacacatgatatcgtcccccttttaccttagaagtgtgcgtgcgtggcgtgggcagtggagtgagttgtgatccaggaggacatggcggtggcggtggtggtgcttcttcccccgctccgggaatccgggcaattggagcttttggccgggaacgtggacgacgggcctctcgggttccggcgagcttgtcggggccaaccggcgcccgggaagcatggatggctgtagaactgtgtggtagag

SEQ ID NO: 8950 - DNA, 565 bp, Setaria italica
  Peptide Sequence Number=SeqID_74924
atggcctcccgaacaactcgctcatcctcgccaacttcgcgcacttcctctggaacaccggaggtgaggacacatgctaccccctcgattgacgcgcgaacaccggcaccgacacgaaccggccaggccaaagatcgaaaaatgaaaaatttagaattcaagaagtcaagttcttgcagcatgcgcgggggcggccacgcggcgagacggctagaccacgacatcacacccatggcccgggcggtggagtggagctgacacatgatatcgtcccccttttacttagaagtgtgcgtgcgtggcgtgggcagtggagtgagttgtgatccaggaggacatggcggtggcggtggtggtgcttcttccccgctccgggaatccggcaattggagcttttggccgggaacgtggacgacgggcctctcgggttccggcgagcttgtcggggccaaccggcgcccgggaagcatggatggctgtagaactgtgtggtagagcacagtggcgtggagcgcgacgaggtggacatcgaccatgaatggatgttctgtatagcagctcgcat

SEQ ID NO: 8951 - DNA, 333 bp, Setaria italica
  Peptide Sequence Number=SeqID_74925
ggagtgagttgtgatccaggaggaccatggggttggcggtggtggtgcttcttcccccgctccgggaatccgggcaattggagcttttggccgggaacgtggacgacgggcctctcgggttccggcgagcttgtcggggccaaccggcgcccgggaagcatggatggctgtagaactgtgtggtagagcacagtggcgtggagcgcgacgaggtggacatcgaccatgaatggatgttctgtatagcagctcgcatcctgtaattatgtagatgtagaaaaaagaataaccaagtgaataaggagatcgtggtaatcccggtgacaaaaaaaa

SEQ ID NO: 8952 - DNA, 549 bp, Setaria italica
  Peptide Sequence Number=SeqID_74926
ccgaacaactcgctcatcctcgccaacttcgcgcagttcctctacctcgtgcagaacgaccacgaccgggcggagccggcggacgcggaggctctgagccggtacgcgaccttcttgtggaaggcgcgggacaacctcgccggcgcggaggacacctaccaggaggccatcgcggccgaccccgggaacgcccaccacgccgccgcctacgcccacttcctctggaacaccggaggtgaggacacatgctaccccctcgattgacgcgcgaacaccggcaccgacacgaaccggccaggccaaagatcgaaaaaaaatgaaaaatttagaattcaagaagtcaagttcttgcagcatgcgcgggggcggccacgcggcgagacggctagaccacgacatcacacccatggcccgggcggtggagtggagctgacacatgatatcgtcccccttttacttagaagtgtgcgtgcgtggcgtgggcagtggagtgagttgtgatccaggaggacatggcggtggcggtggtggtgcttctccccgcgccgg

SEQ ID NO: 8953 - DNA, 806 bp, Setaria italica
  Peptide Sequence Number=SeqID_74927
cttcgcgcagttcctctacctcgtgcagaacgaccacgaccgggcggagcactacttcgagttggcggtgcgcgcggagccggcggacgcggaggctctgagccggtacgcgaccttcttgtggaaggcgcgggacaacctcgccggcgcggaggacacctaccaggaggccatacgacggaccgaaccccgggaaacgcccaccacgccgccgcctacgcccacttcctctggaacaccggaggtgaggacacatgctaccccctcgattgacgcgcgaacaccggcaccgacacgaaccggccaggccaaagatcgaaaaaaaatgaaaaatttagaattcaaagaagtcaagttcttgcagcatgcgcggggcggccacgcggcgagacggctagaccacgacatcacacccatggcccgggcggtggagtggagctgacacatgatatcgtcccccttttacttagaagtgtgcgtgcgtggcgtgggcagtggagtgagttgtgatccaggaggacatggcggtggcggtggtggtgcttcttccccgctccgggaatccgggcaattggagcttttggccgggaacgtggacgacgggcctctcgggttccggcgagcttgtcggggccaaccggcgcccgggaagcatggatggctgtagaactgtgtggtagagcacagtggcgtggagcgccgtgaggtggacatcgaccatgaatggatgttctgtatagcagctcgcatcctgtaattatgtagatgtgaaaaaagaataaccaagtgaataaggagatcgtagg

SEQ ID NO: 8954 - DNA, 642 bp, Setaria italica
  Peptide Sequence Number=SeqID_74928
gcgcgcggagccggcggacgcggaggctctagaagaccggtaacgcgcgaccttcttgtggaaggcgcgggacaacctcgccggcgcggaggacacctaccaggaggccatcgcggccgaccccgggaacgcccaccacgccgccgcctacgcccacttcctctggaacaccggaggtgaggacacatgctaccccctcgattgacgcgcgaacaccggcaccgacacgaaccggccaggccaaagatcgaaaaaaatgaaaaatttagaattcaagaagtcaagttcttgcagcatgcgcgggggcggccacgcggcgagacggctagaccacgacatcacacccatggcccgggcggtggagtggagctgacacatgatatcgtcccccttttacttagaagtgtgcgtgcgtggcgtgggcagtggagtgagttgtgatccaggaggacatggcggtggcggtggtggtgcttcttcccccgctccgggaatccggggcaattggagcttttggccgggaacgtggacgacgggcctctcgggttccggcgagcttgtcggggccaaccggcgcccgggaagcatggatggctgtagaactgtgtggtagagcacagtggcgtggagcgcgacgaggtg

SEQ ID NO: 8955 - DNA, 927 bp, Setaria italica
  misc_feature (2)..(2): n is a, c, g, or t
  misc_feature (848)..(848): n is a, c, g, or t
  Peptide Sequence Number=SeqID_74929
tncggggctcgcgagatcccgcggcgtaatggtgtggcggccgcgcccggcgcggacgaccgcgaggagcgcgctgagcgcgagcttggatgggatgggggccggggacgcggagctggagacggaggaccaagcggagcacgtacggacgcggcagaggtacgaacaggccgtcgccgatgagccgaacaactcgctcatcctcgccaacttcgcgcagttcctctacctcgtgcagaacgaccacgaccgggcggagcactacttcgagttggcggtgcgcgcggagccggcggacgcggaggctctgagccggtacgcgaccttcttgtggaaggcgcgggacaacctcgccggcgcggaggacacctaccaggaggccatcgcggccgaccccgggaacgcccaccacgccgccgcctacgcccacttcctctggaacaccggagcatgcgcgggggcggccacgcggcgagacggctagaccacgacatcacacccatggcccgggcggtggagtggagctgacacatgatatcgtcccccttttacttagaagtgtgcgtgcgtggcgtgggcagtggagtgagttgtgatccaggaggacatggcggtggcggtggtggtgcttcttcccccgctccgggaatccgggcaattggagcttttggccgggaacgtggacgacgggcctctcgggttccggcgagcttgtcggggccaaccggcgcccgggaagcatggatggctgtagaactgtgtggtagagcacagtggcgtggagcgcgacgaggtggacatcgaccatgaatggatgttctgtatagcagctcgcatcctgtaattangtagatgtgaaaaaaagataaaccaagtgaaataaggagatcgtggtaatcccggtagaacaaaaaaaaaaaaaaaaaa

SEQ ID NO: 8956 - DNA, 565 bp, Setaria italica
  misc_feature (541)..(565): n is a, c, g, or t
  Peptide Sequence Number=SeqID_74930
acgcgcgaagcgaggcaccgacccgacacgaccaggccagggcaaagatcgaaaaaaaatgatttagaattcaagaagtcaagttcttgcagcatgcgcgggggcggccacgcggcgagacggctagaccacgacatcacacccatggcccgggcggtggagtggagctgacacatgatatcgtcccccttttacttagaagtgtgcgtgcgtggcgtgggcagtggagtgagttgtgatccaggaggacatggcggtggcggtggtggtgcttcttcccccgctccgggaatccgggcaattggagcttttggccgggaacgtggacgacgggcctctcgggttccggcgagcttgtcggggccaaccggcgcccgggaagcatggatggctgtagaactgtgtggtagagcacagtggcgtggagcgcgacgaggtggacatcgaccatgaatggatgttctgtatagcagctcgcatcctgtaattatgtagatgtgaaaaaaagataaccaagtgaataaggagatacgtaaaggtnnnnnnnnnnnnnnnnnnnnnnnnn

SEQ ID NO: 8957 - DNA, 1043 bp, Setaria italica
  Peptide Sequence Number=SeqID_74931
cctccttcgtctggctcttccagcacatcttcgccggcactccggcgctcatgctctccctcatgctcctcctcgccaacttcaccgtccactcgatgggccacagcgtcgccgccgcggccgccaccatcccgcccgctccgcccgccgtcgccgctgccgcggcggtcgtcgacaaccagcgcgccgagccgtcccggccacgtttcgacaaggtttcggtgaagacgttctccgtcggcaggacggcctcggtcggcgggaacagcggcggcggcggcaaggcgccgcccgtcgcgggcgccaccggcgacggctggtcggacgagtccctctatcggctaagccgcgtggcgccgcagcagccgtcgacgcccgctggggcgggcctcggggaggccgcgcccgacgcttcggacgaggacgagcaggccatttgggaaatgatggtcacggaggcttccaagatgcaggccagcgcgcgcgccgaggagctgagcgacccagatgtgctggggagcctcgtcgcgccggtggaggcggagctggagacggaggaccaagcggagcacgtacggacgcggcagaggtacgaacaggccgtcgccgatgagccgaacaactcgctcatcctcgccaacttcgcgcagttcctctacctcgtgcagaacgaccacgaccgggcggagcactacttcgagttggcggtgcgcgcggagccggcggacgcggaggctctgagccggtacgcgaccttcttgtggaaggcgcgggacaacctcgccggcgcggaggacacctaccaggaggccatcgcggccgaccccgggaacgcccaccacgccgccgcctacgcccacttcctctggaacaccggaggtgaggacacatgcctaccccctcgattgacgcgcgaacaccggcaccgacacgaaccggccaggccaaagatcgaaaaaaaatgaaaaatttagaattcaagaagtcaagttcttgcagcatgcgcgggggcggccacgcggcgagacggctagaaccaacga

SEQ ID NO: 8958 - DNA, 293 bp, Setaria italica
  Peptide Sequence Number=SeqID_74932
actgccctccactccagtcacagctcatcagctcagctcattgccccagacccgcccgccgctgctcgcgctcccggcggtggcgcccggcgaccggcgagctcccccggccacgagtcccgtggagtggagcgctgaacccggcaaggcgcctgcattccgctcggcggtttcctttgtcttctgcgcgtgatctggttgctctagtcagtgatggcaggcgacattacatgcggatccttgctgcaaaaattgcagttgatatgggatgaggttggtgagagtgaggacgg

SEQ ID NO: 8959 - DNA, 1132 bp, Setaria italica
  Peptide Sequence Number=SeqID_74933
tgtcgttgtattcttggtttgtcttcttagttctagttgtattggcaggcgacattacatgcggatccttgctgcaaaaattgcagttgatatgggatgaggttggtgagagtgaggaggaccgcgataaggtcctgtatcagctggatcaggagtgcctggatgtttacaagaggaaagttgaccaagccactaactctagggatctcctcatccaggcgctggatgattcaaagatagagcttgctagacttctttctgcccttggagaaaaagctattgcaagaacacctgagaagacaacaggaacaatcaagcagcagctagctgctatagcgccaacacttgagcagttgactaaacagaaaaatgaaagaaaaagagagtttgttaatgtacaatcacaaattgatcaaatatgtggtgaaatcgctggcaccatagaggtcggtgagcaggtggcaacaccccaagtcaatgaggatgacttgacacttgaaaggcttgaagattttcggtctcagctccaggagcttgagaaagagaagagcaataggttggagaaggttcttgagtatgtaagcatggtacacaatctttgtactgtcttggggatggattttctcagcacagtgactgaagttcatcccagtttagatgactccattcccgatgactctaagagcattagtaatgatacgttgtcaaaacttgacaagacggtagccacacttaacgaagataagaagttgcgtctaagcaagcttcaagagctcgccggtcagctctatgatctttgggatctcatggatgcccccaaggaagaaaggcgcatgtttgaccatgtcacctgcaacagatcagcatctgtggatgaagtcactgcacctagatctcttgccctagacttaattgaacaggctgaggttgaggttcaaaggctggaccagctaaaatacagcaagatgaaagagatagctttcaagaagcaaactgagctggaagatatatatgctggtgctcatatagtaatagacacagctgctgcccatgagaagatactggcactgattgaggcaggaaacatagaaccatcagaactaattgcggattattggtattagtcctagta

SEQ ID NO: 8960 - DNA, 1337 bp, Setaria italica
  Peptide Sequence Number=SeqID_74934
tacttacgttaatttactttgtttaaactaaagtaattccctaagtcgtctaaggggacgagcatgtttgaccatgtcacctgcaacagatcagcatctgtggatgaagtcactgcacctagatctcttgccctagacttaattgaacaggctgaggttgaggttcaaaggctggaccagctaaaatacagcaagatgaaagagatagctttcaagaagcaaactgagctggaagatatatatgctggtgctcatatagtaatagacacagctgctgcccatgagaagatactggcactgattgaggcaggaaacatagaaccatcagaactaattgcggatatggatagccagatagcaaaagcaaaggaagaagcattgagtagaaaagacatactcgataaagttgaaagatggatgtctgcatgtgaagaagagagctggctagaagattataaccgggatgataacaggtataactcaagccgaggtgcccacctaaatctgaagcgtgcagaaaaagctcgtattcttgttaacaagatcccagcgcttgttgaaactctggtggcgaagaccagggcatgggaagagaatcgcggtctgtcctttatgtatgatggtgtacctcttctagctatgttggatgagtatgttatgctcagacaggaaagggaagaagagaagaaaagaatgcgggaacaaaagcgctacattgagcagcaactcaacactgatcatgaagggccattcggctcacgagtgagcccgaaccgacctgccagttcgaagaaggccattggtccaaagttgaacggcagcgtctcaaatggcactcctccaaacagaaggctatcaatcagtggtcaacagaacggccacggcgtcaggtctggagggaaggatagcaagaaagacactgtgaagacagcatctccagggaacaacaatgcagctgcagctgcccctgcttctgtgcctgcggcagccaaggaagacgccgcctcccacatttctgggaccgatccggtcccgagcacaccgtgatctttaacctagcgtcgtatattagatataagggactctttttctgatgtttttccattgttttgtggtaatatattgtaatgccttcgtagagaagagtaattatgacgtcactctttcagatgtttgcccaggattgttcactttctggtgtaaccggtgtcctgttttggttcgttcggccgcgctatttagattgtatcaggcggtgtagtatagtctttcactgagatgtattgttattaactagtgtgctagaacgtttttagttggtaaaaaaaaaaaaaaaa

SEQ ID NO: 8961 - DNA, 776 bp, Setaria italica
  Peptide Sequence Number=SeqID_74935
tgagagggacatgaagatacagaaactgactacacacacccctcagtttcttggattgccaactggggtgtggccaacaggaggtggatttgatagagctggtgaagatgttgtgattggctttgtggattctggaatttatccgcaacatccgagcttctcttcccacaaaactgatccttatggacctgttcctcgttataaagggaaatgtgagatggatccagtaacacatagaagcttctgtaatgggaagatagttgggacccagcattttgcgaaagctgccatggctgctggagcatttaatcctgatattgaatttgcatctccattagatggtgatggtcatggaagtcatacggctgcaattgctgctggaaacaatggaattccggttcgaatgcatggtcatgaatttggaaaggcaagcggcatggctccacgtgctaggatagctgtctacaaggttctttacagactctttggtggttatgtagctgatgttgtggctgctatcgatcaggctgttcaggatggtgttgacattctcaacctttcggttggaccaaatagcccaccaacagctacgcggactacgtttttgaacccttttgatgcagctcttctctctgctgtgaaagctggggtttttgttgcccaagctgctggaaatggaggaccatttccaaaaacactggtctccttcagcccatggataaccaccgtagctgctggagttgatgaccgtagatacaaaaatcatttaacactcg

SEQ ID NO: 8962 - DNA, 405 bp, Setaria italica
  Peptide Sequence Number=SeqID_74936
ggagaaagaatcgcaccgtcaacgcggcagaaagaccactgacgagggcacccttcgcctgagaaacatcaaggagtctgcagcctataacctgccaacactctctgattctaaacgcgagctattaagatcatcttcagggcggtccagcctcgcaaacttcttgagtgcttctatcactgaatatgtgcccaagatctcctgcaaactttcagaggacatactaaggtgcatttctgctgtctactgcaaacttgcaagcaagccattgaaagaggcaaattctgagccatcgtccactccttctttctcatctgcatcgagttccttttctctgaagtacccggtcgatagttggagccctcgatgccattacaatgtcgctgagacccgtgatacatatgg

SEQ ID NO: 8963 - DNA, 1800 bp, Setaria italica
  Peptide Sequence Number=SeqID_74937
atctaacagtgaaaaagacttttgttccagttctcaaaaagagaagaagcagaagctgccctgaaagctccggatgctgttatgggcaaccgctttataaggctatggtgggccaacagagataggattcctgatgagggagagggtagaatccctgcaaagtcttcccaatcgtctactatgctggccaattctgcccctcaaccatcttatcccaacagagtcaaggaaaatgttcaattagctccaaggcccagttctggatcttctgctgaaccattgagttctggtacaggttctaaaacgctatcgacaagcagtataaaaccaatacccaatgctccaaaaaggcatgaaagtctagaactactggaagaacttcgcaaaaaacaggagatcttagctcagaagcgtgatgagttccgccgccagttagagaaacttgcaaaacaaaaaggttcagctaattcagttaagcatgccgaggccagtggaaaagaagttgcttcaaatgatgcatcaaaagtaaaagatgcaaggtccatgagcgccagggctgaaggatcacaggaagttgctggatcattggaaaagcaaagctctggagagttggcttcatgctctcaaaaatctgctgagatatccacacagaaatcagcagtggttacgaagcagactactctgttagtacctccacagaataggtttaagcttgacaatcgaaccacatcattcagaattcttccacctttgccgtctgaaattgcaaatgaatctatcttggcagaccatttctcatcatttggggagctttcatctgttgtcctggaacatactgaagcccataaccatgatgcaaccttaaaaccatctctgagttgttcagcatgtgtgacttacacaacacggcaatcagctgagaaagcatttattggtggtaaatcttgtaaagggcatactctacggtttatgtggttaacggcatctcctggctcaaataaccattctagacctcagaatacttcaattcctatcagggcctccagccctgttgggaaaatctcatctactgccacatcttgtacggcagccattcctcataataaatccatttcgactgccgaaagtgcaaagacttctccagttggaatttccaaagcttcaggttctagttcctctctatcgtcaaatgatgagtgtcctcctgaacatggttcaacaagggatgttatctcagattctgctcttccacaatgaggttgatggtggtcggacgagttggtgttcagaagcttggatttggtggcttggttgttacataaatctgcacctagccaaattcccctgcacatttcaagttattggaagatcttttgaagaccttggtatgaattttggggcagcatgggtaagacccataaaagggaaagcggatggttaagaaaaagaattcaaatgtacactgggccttttaccgacattgggaatcactgccaaatcttctcattctccacgagaaaaaaaatgaggtgtgctagatcatctgtgcacctcagtatggagtagcattatgctgaaagcagttaatgttatgctagttctgtagattgtagctccttgctgaaagcagctccgtgtggattctgttatgacttgtgagctcactgaacaccaaactcgtaaccccatctaggctctcatccccaaaacttctgttgtgcataccaaactgatagggcatacgtaactgacccattcaatgcaaattttgtgtttactggttactttgttctaaaaaaa

SEQ ID NO: 8964 - DNA, 647 bp, Setaria italica
  Peptide Sequence Number=SeqID_74938
gttccgaaaaaggaaccagttgaggatagcaaggatgaaaccgtcgataaggaattgctgatgaaacttaaggcatcacagattacagatccctttgctagaagagttaaaactgaggataagcgtaagagtgcttatttatgttcattccatgctttatagtctaaacctcatcaccacctagtaaatttgttactcctacctctaaaagaagtgttatccctgcaagctgatgtgctcgcagctactcctgtgaatggttattgatgtatgttgcatcacgttggattgtctaaaattttgcattgtgttgtgcatgcaccgaactctttctttccaagtcttgaattagtgtactaaaatttagtgcatgtagtacaaggtaaccaaggatttgttacagagaaggtttattcagaaaaaaaatcattagtttctttctaaattgatagatccaattgttataattatcaaactagtatctcattggtgtttataaatatacaatttttataatattggtggggattatttattttatttctgatgcacatctagctaacgatgtattgctctgtttgcatagcaaaagccggacacaagttgcatttggacaaggaaattcttcttatgcaagatcattttta

SEQ ID NO: 8965 - DNA, 1155 bp, Setaria italica
  misc_feature (1136)..(1155): n is a, c, g, or t
  Peptide Sequence Number=SeqID_74939
cttcccggccagcgatcattcaactggtttctgattttattatggacgacaagagtaaagtacaagaaggaaatgggtgctccttgatgtaagggaggactaaatttgcacccaaagtacctgtgaagaaagctgccaaaattatgttccgaaaaaggaaccagttgaggatagcaaggatgaaaccgtcgataaggaattgctgatgaaacttaaggcatcacagattacagatccctttgctagaagagttaaaactgaggataagccaaaaagccggacacaagttgcatttggacaaggaaattcttcttatgcaagatcattttctatgccaaaacgttctaaagatgaagagaagttaacaaaagaatatgcagagccatgggactataaccatactgattatcctgttactctcccattgaggaggccctactctggaaatcctgaaattcttgatgaggaagaatttggagaatcttctgccagcagagctcaagatgctaaattaaccgcagcggaagagcttggattaatcgatcgatcggatgaatcacaattgctcttcatccagttgccgtcttctcttcctttaccattgcagccacaatcagttgctgagcctaataaaggctctgaggagagacgtcagggcatgaagccatcatcgcactgtggctcgaaactcaaggatctgcctgggggttatatggggaagatacttgtatataagagtggtaaagtgaagatgaaggtcggagacacgctatttgatgtttcttctggctcgaattgcaagtttgtccaggaagttgcagcaatggacaccagagaaaagcattgttgcgcggtgggggagattaacaaacgtgctgttatcacccccgatattgactacctgctgggttctattgacaagatggaagaatagcccattcatttcttttaggattacaatcagcagcgcccattgtctccgcaaggaagttcgaaaacgcaatccatccagatctgaaccctctgttgatcttttaaccttgttgttgcaaaaactgtgggatgtctgcatctccaatgaattccaacataactcttgtacattctgcggacttcaaatacattctctcataccnnnnnnnnnnnnnnnnnnnn

SEQ ID NO: 8966 - DNA, 994 bp, Setaria italica
  Peptide Sequence Number=SeqID_74940
ctgctcaacggcaccctcccggcgttccggcagcgggggctcgtcgtcttcaacgtgtcctacaacttcctccagggcgaagtcccggacacccgcgcgctgcgccggttccccgcgagcgcattcgaccacaacctcaagctctgcggcgaggccgtgaacgccgagtgccgggaggaggcgccgccttcgtccggtggttcggccgccgccgatggaggcggcagtgacgatccggtcatcaggccggcaggcggcaaggatcgggaagcacggaagcccgtgcgattcaggctggcgacgtggagcgtcgtggcgatgtgcctcatcgccgcgttagtgccgttcgcggccatcctcatcttcctgcaccacaagaagaagggccgggaggtccgtctcggcggtcgtgccgatgccgcagtgacaggagctggggacatcaacgacaaaaccaagcagggcagagggagcggcagccggagcacggactcggccggtggcaagggagccgagctgcagttcttcctcgacgacagggcgaggttcgagctcaacgagctgttccggtccacggcggagatgctcggcaagggccggctcgggatcacgtaccgggtgaccctcgaggccggccccgtcgtcgtcgtgaagcggctgcggaacatggcgcacgtgcctcgccgagacttcacgcacaccatgcagctcctgggaaagctccggcacgagaacgtcgccgatctcctcgcctgcttctactccaaggaggagaagctcgtcgtgtacgagcacgtccccggctgcagcctcttccagctcctccatgggaacaggggcgaggggaggacgccgctgccgtggccggcgaggctatcgatagcgcagggcacggcgcgcgggctggcgtacctgcaccagtcgctgccgtacttccaccggccgccgcacggcaacctcaagtcctccaacgtgctcgtcttcttctcggccg

SEQ ID NO: 8967 - DNA, 663 bp, Setaria italica
  Peptide Sequence Number=SeqID_74941
acaaatacgaccgtgatctgcaatctgtgtgcgggagatggtgttgctgacgtaacgtaaagacgattcgggcaagtgaagctccctcacaaccctgaaaaatcgtatgctggaagcatcgcgaatttcatggctggtttcatcgcatcagtgctgttcatgtgctacttcaacatcttcgggttcgttgacaagagctgggctatggttggtgccttcggtgtcgtatccctggctgcagcggttgtggagtcgctgcccatcagcacacgccttgacgacaacctgacggttcctctcgcatccgtgctggtgggtgccctggttttccacttgattggagccacgaacctgtgctgcttcatgagcagcggtacccaagacagcagcagcagaagcatttcagcaatcgttgatcagtggtggttattcgcaggcagcagctacgctagcagctggtgatcgaccacgtgatacagctgcaaactgcagaggttgattgaatcatgatatgtgttggttaccttatgaattttatcagtgaaaacatgtgcttgtgacttgaaatttatttgttacgtaataaagagaagaagaagaagaagaagaagaagaagaaaggaaagaggaataatttctaatttctttgaagattcaaaaaaa

SEQ ID NO: 8968 - DNA, 316 bp, Setaria italica
  Peptide Sequence Number=SeqID_74942
gggattgggactgggaggagaggcggcaaatgagtgagcggagcgagtgaaggagtcacgacgccggcgtagtctaacggctagggtttggaatagcagttcggcagcaatgttagacggcacaggccggacggcgccgcacacccgtccgacttgctgcagcacgcgacgagaacggggtgcggggcggcgcggcagcggcggccggggggccggtttccttagagaacgaggtgctggtgtaggcacacgtaaggagaggccctggagaagccgcaggcgtggagggcggaagcgtccaggcggagccgccgac

SEQ ID NO: 8969 - DNA, 543 bp, Setaria italica
  Peptide Sequence Number=SeqID_74943
tcctagcgccccgacggcgcagcccgtcctccccgacgagatcctggaggagatcttcctgcgcctcgacgctgcggccgacctcgcccgcacctccgcagcctgctcctccttccgccgcctcatctccgcgcgccggttcctccgccgcttccggtccctccactccccgcccgtcctcggattgctcgacgacgaagggtacggaggatcccgcctccccgtcgagcgattcatccccatcgagcctccccaccgctccgccccggcggcccgcgcgctcgcgcgtgccgcagacttcaccttctccttcctccccgacgcctgctcgtggcggccccgcgacagccgcgacgggcgcgtcgtcctctcccggcgcgtcgccaatgcagccgcctttgatgacctcgtcgtctgcgaccccttgcaccgccggtatgtcatgattcctcccatccccgacgacctaacggcctccatcacaaaacttggcaagaatttcgaaccctttctggctccagccggcgacggcaaagatgaaaa

SEQ ID NO: 8970 - DNA, 961 bp, Setaria italica
  Peptide Sequence Number=SeqID_74944
gtcttgcaagttccgtccattcattcaccgagagaatacaggtccatctaaactgaccacattcacatcggccaacaccttacgcgctctttatttgccttttctcttcctctatcttagccttcataaatgagtagagggcaacaccagcaatagcgatggaagtgccaattccagtttgtgtggtgatcctgttgccaaaaacgatgatggaaaagccaatgacgaagacacgtttcaacacattgccaatggcgtgtgagagaggggccacccgctccaatgtgtttgtagcaacctggttataaaggtgatagaacaagcccaccacgaaaaagttagaaatcaactttgttaatccaactttggcaattgcatctttaaatccatgctgcattaattgaggtccttcaataataattgcaggggggatgcagacaaagagagcaattattgatatgtacgcatacaagtttgtgctatccatgtcagtcatagccttcttagagtagatgctccggtaggtgaaggaaatatttgagatcatggcattaatgaagccagtccaattgaatgagagttcggtgagggatgctaccgagacaccgacaacgactggaacaagggacagccagagcgtcaatggaactggttgtccaaggacaaactgagaagcagccgcactgaagaatggctccagagctttaatagtgtgggcaaatgatacagctacagcagcaaaggacacagtgctagttacatggccgatggcatgacaaacagcaactggaacaagctgcttcagaagcgttgagttgaccggcgcacgctttgggaaaccgaagctccagccaataaggcagtataggactccaataaaaagatggctcaccgacacaaagtatggataggggaaataatcaaagatcttcttgttgaggatgttaaatattacattacg

SEQ ID NO: 8971 - DNA, 532 bp, Setaria italica
  Peptide Sequence Number=SeqID_74945
aatcaacaatctattgtacattgcatttacagcctcagcaaacatgatacaaataccaaaaggaagacactagactacagatagcactctacatcagttccatgatctctgcggtatccgcagtttacagtcccaagaccacgccaaaactgcagcattgcaatgtgttaactgtttaagatatgtaggaattttgcaatgttcaagggaaaagaacagtccggtactatcaagtttaacaagagcaatggaaatgcagtagaggtgattcagtaccatcaacggcaagaaaggagcattaacacaattcaagcagcttgatggtcaggtgagagatatgcctgcccattcacgctgtctccgcttaagcttcgcttgttccttgttgaatttttctttcctttctccagaagaggatctaccactacatagtcatctggatcatctttcctagccattccatccttggagaatcaggtaagaaagacagccggtttgatgccacctgtgtagtcctcttcagcttcctttt

SEQ ID NO: 8972 - DNA, 1408 bp, Setaria italica
  Peptide Sequence Number=SeqID_74946
gcctcagcaaacatgatacaaataccaaaggaagacactagtctacagatagcactctacatcagttccatgatctctgcggtatccgcagtttacagtcccaagaccacgccaaaacatcaacggcaagaaaggagcattaacacaattcaagcagcttgatggtcaggtgagagatctgcctgcccattcacgctgtctccgcttaagcttcgcttgttccttgttgaatttttcttttcctttctccagaagaggatctaccactacatagtcatctggatcatctttcctagccattccatccttggaagaatcaggtaagaaagacagccggtttgtatgccaccctgtgtagtcctcttcagcttccttttccaccttatcagtagcaagattattttctctgacatgatccgtagcaggattcttactgaggaaagaagccttgaacttctgtagctttgctagagtctcatcttcacggccttggagctgacgttttttctgtttttgtttatgtctctcttgttcagctggatttagcagctgcaagttagcatctgctttggacatcctctcagcactggcttctgagccaataccctttttcttcaaggatagttttttagacttttgcagctcatgctcctgatcatcatcgtcatcattgtccctcctatgttcgatattggacctgcggtctggtaactctttatctttccgatgcggtttatctgctttagaggtttcacgggggcgaacatcaccaagctctctacgtttttttaggatttgtgagcgcatcctattgtcaaaatcttcttcattctcgtcttcaggataatcatcagattctggagcctgctctgactctcttgagtcaactttctttgagatcaaagcatccctgacagataaaacagtgtcctttttcttctcctcttcctccttggacagctgtacatcctctggttcccctttaagaaaacggggatcatccaacacatcatgaatactttttattttggcctgaacagaggaagctgcctcattctcctcctcttctacttcatctccaaaagagagcacgttaagttgcttaacagccttctttttaggtttcaactcagcatcagtcttggcaacagactcggccttcttaagttgccttggaacaatatcctcaaatgggtcccagagaacctcgactgaaagaattttctgcgggtacacaggtcgatcatccttatcggtctcaacatcagccaaggcaagaaggttgaaaatagaatcaccggtaaccttcccgaagatggtgttcttcttatcgagccaatcgcaacggtcaagagtgataaagaactggcttccattcgaatgaggcgtgccagcattggcgcaggcc

SEQ ID NO: 8973 - DNA, 722 bp, Setaria italica
  Peptide Sequence Number=SeqID_74947
aaacagaaggataaataactagtttggattcaccagtaatagaaagaaaatattagaaacccaaaccaaatacaggtaagtaccagaataaagataacaacaaaatatgacaggaaaaaggcacctcgactgaaagaattttctgcgggtacacaggtcgatcatccttatcggtctcaacatcagccaaggcaagaaggttgaaaatagaatcaccggtaaccttcccgaagatggtgttcttcttatcgagccaatcgcaacggtcaagagtgataaagaactggcttccattcgaatgaggcgtgccagcattggcgcaggccactaaacccctgtggttaaaccttaaccgcgagtggaattcatctgcaaacggcgccccgtagatgctctgaccccccggtgccggagccggtggggtcgccgccctggacgaggaagttcttgatgacgcggtggaagagggtgccgtcgtagtagccctcgaggcagagctgcacgaagttgcgcgccgccttgggggcctccttgggccacagctcgatgtcgagcgggcccgccgtcgtctgcaccaccaccttgcccttcgtcgggggctcgagcacgtacaccgacgacatcctgcccgcctcgtctccgccagccgccgcctccgccgcctcggcgctctacttcgcgcgtgctccttcccgccggtcgggctgtccggtccgtctggt

SEQ ID NO: 8974 - DNA, 385 bp, Setaria italica
  Peptide Sequence Number=SeqID_74948
cgggagggggtggtggtggtggtggtcggaggggaggtacgggatcgggtgggagtcgtactcgtacctcgaccgcgcggggcaacgccgcccccgccgccgcctccgccggcgggcaagtggtggaggtggtgctggtctaggtagtggtggtggccggggtgcgcgcggcggtggtgcgggtggtcgaagggctggtgcggatccatgccggattgccgctcgacgagccgccgggggagagaggaaagggttcgctggatcgaatcgggcgggggtgaattgcaattgcaaactcggggaagcgtactaggggttcgaggaggaggagcgcggatcgcgtgcagcgtgggctggtgggatgcggcggctgctctagaactaa

SEQ ID NO: 8975 - DNA, 308 bp, Setaria italica
  Peptide Sequence Number=SeqID_74949
agactacgaccggaacggctaggtggaaagtaagaaagccgtaactccgggtcactgttgatgtagaacttgcccttgcagtactcgttaggtagcctcggcagctcggcccattgcctcgtgatggggttgcagaggaggtagaaccccatgtccttcttgaacaggagcacgccgtcggacgaggcgaggaggcggccgcagtgcgccgggacggtgagacgcgtggcggggtagcggaggaggcgctgtcggtcgtcctcgggggaggagaccgggagcgcgtccagcgcgacgtcctcggagct

SEQ ID NO: 8976 - DNA, 557 bp, Setaria italica
  Peptide Sequence Number=SeqID_74950
tcccttccatctcgaacagcttcatcatcttgggtgtccttgatgtcggtcccggcatttggcagaacatctctgacaccgtgtcgaaagctgtaatccttgtcttgcccgtggcgcagcgccagatcggtggccagtgcagcttgccgtcgagagccacgggcatcgtcgctgtcgtgagcaggggtctgataaatcgggtgatcagatcaggctcttgcttcagtttgaggtgccggggtttgccggcgcctgtggagacgatgtaccagaagccgcgcgtgaggctgcagcacaggagccggaactcgccggacggctggtggaagtagaagccgtactccgggtcactgttgatgtagaacttgcccttgcagtactcgttaggtagcctcggcagctcggcccattgcctcgtgatggggttgcagaggaggtagaaccccatgtccttcttgaacaggagcacgccgtcggacgaggcgaggaggcggccgcagtgcgcctcctccgctaccccgccacgcgtctcaccgtcccggccgcagtgcgccggg

SEQ ID NO: 8977 - DNA, 672 bp, Setaria italica
  Peptide Sequence Number=SeqID_74951
gtttgtcttacttgtttagaatacatgtccactatacatacaacctggcggttgagactttagacttgggaggctactattttacaaaataaaagacaaatccagcaagccctgaccaactacgcccttaagctagtcagctagatctggggttcatctacaccaaacaaaaagaaagcatccaacgcgacctaatccagtaacatattgccttggccatcctacgcgcttgacgtttgaatgtctgatacaactagtggagtatttagtaaaaggacacctcggggtgcacacagccacagctcagccgcaggtacaaggatattgtattatacaacagattcacattcaccgtatctatgatgaccagtacaatttaagtccggaatcaggcataattgcaacacaaatagttgaaatcaaacataacgggtgagatcatgatactccctccgttaatttatggagtcctgttgcggaatcccaaatccccaaccaaaagttaaatggatgaaaagacgaagagggttcaaggttgattaccaaagtcacctgctcagccaccggcagcggctgagcggcgcaaccgcagctgttgttcctcatcgcccgcgcgctgggcacggcgtcggccacaacacccgccccctctccctccagtcctcctagggt

SEQ ID NO: 8978 - DNA, 327 bp, Setaria italica
  Peptide Sequence Number=SeqID_74952
tgtagatgatggtccactgagagcctatgatgatcctgaaaatgcagacttcattgaggtgattccttgtagtcaagtagatattgtttaaaaatgtgctctcaaacttcagaaactgaagtttaaaatttgtcacataaaatggagctagtagaacaatggtcgaagatttgcattagagactgaagaaatgtcaaaaccaataagtaaatgaagggagatcgttggatactgcaagcaatccacaatctgcaagcttaaacaagcagggccttaaacaggttatcatcttgaaaatgctattaatccgtaagccattcagccaag

SEQ ID NO: 8979 - DNA, 1314 bp, Setaria italica
  Peptide Sequence Number=SeqID_74953
aaccgaaaacgaagcagagctgttcgactccgcgagtacatacgagacgacgcgacgcgaagcgcgaaccaaaccctacccactcgccgcgaccccgatcccccacctcgtcggagatgagctccgcctccaacggcgggaagaagccagcgagcggcggcggccgcggggggccccaccatccgcacgctcgccgacatcaaccgcgggcccgccggcttccccggcgccgggggcagcggcagcgactccgacgagccccaggagtactacaccggcggcgagaagagtgggatgcttgttcaagatccaacaagaaggaatgattctgacgcaatctttgaacaagctaggcagacgggtgctgtccaagcgccacccccttttcttgatagccaatcttccagctcgaggagctttacagggactggccgactgctttcaggggagacaacaccatctgctgcgcctgcgcctcaggaaccagttcacatactccacgttatacacttgtggaacaatggtttcagtgtagatgatggtccactgagagcctatgatgatcctgaaaatgcagacttcattgagagccttaagatgtcccggtgcccccaggagctggagcctgctgatagaaccacaccagttcatgtgaatgttatgaaaagactcgaagattaccgggaacctataaggccccgatcagctttccagggtgttggaagaacccttggcggtggaccttccacagatgagacttcagcacctgctcctgctgctcccacttcagcaccccctgctgcttcgaggtccaccagctttgtcgtagacgactcccagccatttacatccatacagctgaggctggctgatggcactcgtatggtcgccaggttcaacatgcaccacaccgtgggggacatcaggtccttcatcgacgcatcccggcccggagctgcaaggacgtatcagctgcagactggcttcccacccaagcagctggctgacccaacgcagactgtcgagcaagctggcctggcgaactccgttatcatgcagaagatgtaaatgcttcaccaagctgggaacccagatgcataatgcgtcttttgaaaacttagtatcatcgagtggttggtcatcgtatcagacactgtactgtgtactggcctattgccgtatcagcctcgttgacagcctatcagagtcgtcagtgaactatgcatacattcatatttaaatcaactactgaattaccacatccacgtatttgcgtaattgaaactgaatagccagttattgaaaaaaaacaaa

SEQ ID NO: 8980 - DNA, 289 bp, Setaria italica
  Peptide Sequence Number=SeqID_74954
acttcggtgtcatctcgccttgcaaatactccggagatgcatatcccggtgaaacaacaatggtcggatcagactgatctggctgatctttgatgaacaacttggcagtgttgaagtcggctatctttggtttccagttatcatctagtagtatgttggaaggcttgagatctctgtggacgacgctttcctccgatccctggtgaagatatgcgacgccgtgcgcgacgccatggattatatccaacctctgcctccagttcagcctagcgcggtcgctaggttcgcc

SEQ ID NO: 8981 - DNA, 471 bp, Setaria italica
  Peptide Sequence Number=SeqID_74955
ctcccatgcggcgaggacgatccagccgccggcgtttgccgatcatgggtgtggttggtgcctgttgttggggccgctgggtgtgtagtcctcgatcacctccagctccaccctctccggcacggctggtccatcgtcgtcgtcctcctcctcctctgccgtcgccgcggcgggcaaggtcgtgtagtgcccgcgctccacctcctgtcctctagcattctccagtgacgcgctctccactaccttctccgaagaaggtgcacgacccgctggagaaagagaagccgcggcgtcagcgcgagcgaggcatagcgcgagcagcgccacgaggagcaccaccgcggcgaggcggagggcgccgccgctcccccgcccacgctgccgcgccgtcacattggcggccgggagcatagcgcctagctccctctggcctctgatgatctcttcctggtttctcgcggtttgttgctg

SEQ ID NO: 8982 - DNA, 1422 bp, Setaria italica
  Peptide Sequence Number=SeqID_74956
caaaaaaaaagggctctcccagcacccctaatgtgccgcaggacatttttcttgaccattattcatgtgctcatctttcaccaagactggcgcatcatcaaaaccacctaaaggcgcaatctcatttaggtcgaggaattttctgctgacacttttactatccctgctaggaacaagtgccttctctatgcgctgctgctgtgctttatttacttcatcatcttcttcctctcggtcttggcttgttgttgaaacctccataccattttgtgcatcagagccagcatctggatctgatgcactgcatttctcttgctttccaaattctatatctctaccagaaatatcatactgttgatagttaatacgcggacgagtggagcgcttactgcgtctgatgccaatatggatttcatcaacagatctcaacttgctcccttgagggttgtgaattggaaatcttttgtaccattgcagctcatctgtgtcttcactagcactcaaagaatgatccacttcattgtcaccatcactggcaacttgttccaagtgaaactcttcatcattttcagaaagacttgccttttgcttgttttttacttctaagatattcctcatcatacactgcttcacccatgatatcatcatcactgtcaacatttgggtcaatgtccgagacagcctccacaaagtcttttgtgtacctttgagatctttttctctgcctgtagctacgatgaagagttgcaaccttcccttcatgattgcttgcttggtggcgatgtgactttgctggagattctccatagaatcctttacataatggtgaggggccaatctcatttttctttgtaggttttatggcttcatttattgaacgctcataatcatcaaaagtataagtgacacgcttcctttcacgacgagagcgcccagatgtgaatccattcactgtcaagtagctgtcaaggaggagggcttctctttgttgctttttgagcagcttctctttcttcttatgaatcttttctatctctggaaggtgattgaacttcagcttcttgccaagcgagacttctgtcctgttcctacttgaaaagagtttttctgcagctgtattgaactcatcaaagttggatgccactgcctcccattgataggatataaccggaacacttgagactccctttcctttagatcctttttgttggctccttcacatactccactcgcctaacttcgcgatacaaccgatgcccaaggattgggtcatcttcgtaccagtatgaaattccatatgaatctccgccaattcgttctttacggaagatgggaagatgataaccatgcttcaaagaactatcgatgaagttccgaatatcctcttgctcacaacgtatatcacatatagctttcaggaat

SEQ ID NO: 8983 - DNA, 647 bp, Setaria italica
  Peptide Sequence Number=SeqID_74957
cagggcttagttcttctgcagcggttggcatagcctatctgctggctttggaaaatgtaaatgatctggtcatatcaccagtggataacattcagttggacaagtccattgaaaataaatatttgggtcttgaaaatggtattctagatccatcagccattttgctttcacgctatggttatctcaccttcatggactgcaagaccgcttcaccttcccacgtctacttctcggagctgagtaaaagccagcagcctcagggagagctaccattcaagattttgttggcattttcagggctgcagcataatctacctaagaagcgtggatataatacacgagtttttgagtgcaaagaggctgcccgtgctcttttgcacactgcaggctgtgaagatacaccaaatatacttcgtaacgttgacccagttgtatatgaaaccaagaagggtgtattggaagaaaatctttccagaagagctgagcactacttttctgaaatgaagcgtgtcgctaagggtagagacgcatgggctcgtgggaacctgcaagaacttgggcagttgatctccgcatctggccgtagctccatactcaactacgaatgcgggagcaaagagatgatacagctgtacgagatcctcctc

SEQ ID NO: 8984 - DNA, 2014 bp, Setaria italica
  Peptide Sequence Number=SeqID_74958
cgcactcgcacgcgccaccactcaaggctgcgcctgccgcctgcgctactgcggccgcgccgccacccgcgcgacaaccacagccacgggcggcgagccgcgaccggcggtgggtggacaagtaatggtggcgccggagggagtcggagtcggaggaggcccatcgcggtggccggcagcggaggagcttgacattgtacggaagaaggtggctgagataagtggaagagatgaaaaagaggttagggtagttgcttgcccttacaggatttgtccattgggggctcatattgatcatcagggtggaatagtcacagctatgaccataaattatggagtacttcttggttttgtgccctctaatgattctgaggttttacttcaatctggtcaatttaaaggtgttatacaattcagagtcgatgacttgcaaaaacctattgataacccagaaaacataaactgggaaagctatgcaagaggtgctgtttatgctctgcaaaatagtgggtatgatctcaggaagggtattataggctatatttctggggtgaaaggattagacagttcagggcttagttcttctgcagcggttggcatagcctatctgctggctttggaaaatgtaaatgatctggtcatatcaccagtggataacattcagttggacaagtccattgaaaataaatatttgggtcttgaaaatggtattctagatccatcagccattttgctttcacgctatggttatctcaccttcatggactgcaagaccgcttcaccttcccacgtctacttctcggagctgagtaaaagccagcagcctcagggagagctaccattcaagattttgttggcattttcagggctgcagcataatctacctaagaagcgtggatataatacacgagtttttgagtgcaaagaggctgcccgtgctcttttgcagtgagttcctctgttagtgtggctagatttcatcatgaaaataaatgtcctcttatgttgtccatttttgaaagggttggaatttgtggttcttctacatatcagttagtagttgtcatgttcaaaatgcaggcaacttttttataatattttcgtttgaattccagcactgcaggctgtgaagatacaccaaatatacttcgtaacggtaaatacaagtaatattagttctgacccaatatataagctaattgttctgagattttcttttgtgttactacagttgacccagttgtatatgaaaccaagaaggtaattatcgcttttagctccagtttcttaaatttcttcatgttttccaacatatttattcgtgcaggatgtattggaagaaatactttccagaagagctgagcactacttttctgaaatgaagcgtgtcgctaagggtagagacgcatgggctcgtgggaacctgcaagaacttgggcagttgatctccgcatctggccgtagctccatactcaactacgaatgcgggagcaaagagatgatacagctgtacgagatcctcctcaaggcccccggcgtcctcggcgcacggttcagcggcgccggcttcaggggatgctgcctggcgatcgtggagagcgaccgcgcggaggcggcggccgcgtacgttgcagccgagtacgagaaggcccagcccgagctggtctccaggatccccgcggatcgccgcgtgctggtctgcgagcccggggactccgcgcgcgtcgtactgcccgacgacgaccgcctccgttcctgatgggccctgaccgaggcggccggccggcggtgtaaagagcgctgctccacgctcattgttccgggagtgtcgcctattgacgacgacgtatagtatccgagtgtgcagtatgcagagcattgttgtgcgtgtgctttccatttgatacattcgtttgtacggagcaataagcgtagcgttcgcgtttgtatcgaagcaataaggttgtcgagtaaagagaagtggaatgtactaccagtatagaacaaaaaaaaa

SEQ ID NO: 8985 - DNA, 1717 bp, Setaria italica
  Peptide Sequence Number=SeqID_74959
ttttttttttattctgaatctttaatcttcctgttaccctctcctcgcatctttactctcctcgcattacatgtacaagtacaacaacatgacgaaatgaccaaccacagacagacagtatactctacagcagtcagatcctgcctaccaagtcaacgctaaatcgggggaaaaaaacctgtcaaaagtttaacagggctaagctaccaaaaatgtcactgagattgggggtggaagtattgcattccagggggcggcggctgctgcatcggcctgaagggcggcacgccaggctgctgaagggcgaactgcatctgaggggctaggttcatcggcatctgctgctgaagcatgggttgaggctgtgtctgcggcatgacagccatttgcggctggggtgctgaaggtgatggccttcctaagttcatcatctgcggcggtggtggaggcgggggcggggtcatggtgctcatgttgtaaggcatgcccatcattacacctccaggctgctggacaaactgctggggaggggcctggtagatgttgtactggggctggggagcaggggcttggctttgcataggtgcttgctgtactagcattgcctggggctgctgctgagctgttgtggcaaccacttgtggcattggaacgaaagcagcagcattggctgcacttgggacctgcaagggttggtcagttttttgcctcttatctgagcgcgtttcagatgaattcttcgcttcttcagcagcaaacttagaaagtgcagactgcagtatctgctgagagtttgatgatgctgcaatcttgtccgcaaggatagcagcagctgtcttctgctgctcctttacttgcccattgggaagcgcctttcctggctctgctgacttgggaagcggaatggttggctcattcttgagtctccgttgcatgttagaggcttcatgtaccattgcttcagccagctgtaactgagtacgaactttctccaattcagattcctgttcctgcaatgcctccttcaattcagacacaacagctgctctatttgcttcaactacttttagcttttcaatgcatttttcatgttagcctcctcgtcctttaattctgcacaaagaacctcacgacgaggatcttcagctttgctacaggcactgtcaacatccttctccagctttccaacatgacgcatagaagtcttgcatttttccaggtcagcatcttcatctgcttgttcactgtgaacagtatgcaatgcagatacaattttctctgcagttcctcccacacctagtctaagttttacagagcgcgaatctcttttgacaatctttatgcccgaaccatgagagcgcttttttgtcatatctaaaacaggaagaggggcagctccaagcatcacatccttgatgcccccagcgcgtgaaccaaaaactctcctttcttgccatatgtcaaccagcctagatgccaccttcttcccacgatcatcaccattctcagttacatctttaagcgccccagggagaaccttccaaaattcttctacaaactctgtcccattgcgcttgctgttctgtaagatgtcattagcaagatacaggaaagggactttctgctccttgctagagctgtggaactgcttgtcccaagtctggacaatttgctctgcattctttctatgataaatgcaccaatgcgacagcgtctc

SEQ ID NO: 8986 - DNA, 418 bp, Setaria italica
  Peptide Sequence Number=SeqID_74960
agtttcatattaaaacaagtaatgaaatctagtgtctcagcagatacattgatttgggcatataacaccaaactcttagcatctcctctagcaactctacattgactatttacaaaacatgcttttggattcataactgaaaatgtgaattttctgccaacaatagcataaaagttgaagacaatagtaaatcagaattttatgaagagattctagcacaagtagttctattgtgaagcatgcaaaactccgtacatccagcttatgattgattttttttcataatcagctgcattaaaatctgaagcatgagtttatgattgaaaattggcataatcagcagtgtcaaaggatggcagcaatgtcaggtctggcactggctttgtctatgcagtattataagggtgtcgctatcctt

SEQ ID NO: 8987 - DNA, 436 bp, Setaria italica
  Peptide Sequence Number=SeqID_74961
atgaaaacactttaatagtatgtaactcttttattaagataatatatttttatagatactgtggttaaagtgacaccttgtagaccatggcaatgccctaatagacttatatttccaatgggaggtagcactgattttcggtacctcctaaagttatatcagtccggggttgtatgtgtacaccaaacaatacctaatggcaactttaactaatggtgtaatatcaatggatggtatgttgcacaaattgttctaatgatttatcttgaatccatggtcgcatatatgggcttgtttggtagagctcccagcttctcggctgaacccgggaggagtttgccaaacagtttctcggctgaacccaggaggagttttgccaaggttttgctaaggttttaggaagaagcgaaagtgattctctgatttgtgaagtgta

SEQ ID NO: 8988 - DNA, 720 bp, Setaria italica
  Peptide Sequence Number=SeqID_74962
ctgttcgttatgacagtgttgtcaactgggctaggcagaattgttccaaacttgatatcaaggaagcacactaacagcgcagcaactgtcctttacgcgttctttgggcttcgtctgctgtacattgcctggaggtcagattccaaggcatcacagaaaaaggaaatagaagaagtagaggaaaagctggaagcaggtcaagggaagtcaacatttagacgtgttttctcaagattctgcactcctattttcttggagtcatttgtgttgaccttcctagcggagtggggtgaccggagtcagatagctacgatcgcgctggcgacgcacaagaacgcgattggtgtcgctacgggagcaaccttggggcacaccatctgcacatcgatcgcggtggtgggtggcagcatgctggcgtccaagatatctcagggcacggtagcgaccatcggaggcctcctcttccttgggttctcgctttcgtcatatttctacccgccattgtaatagttcctcctgccctgcctgtcatccttcaagttcctcctgctcgcgcctatttgtttgttgctcagccactccctaacctctgtgcccctcaccttggtccttggccatcatttctcatctgatccagtgatccttggcctgtggcataggattttttgctgtaccagtgtacacggatatgagatatgagaagtagggatacaatcaacg

SEQ ID NO: 8989 - DNA, 845 bp, Setaria italica
  Peptide Sequence Number=SeqID_74963
tgtgagtagtggcgtactggctggtgccgcagtacgcgctgcacgggatcgccgaggcgttcaactccgtggggcacctcgagttcatgtacgaccaggcgcccgagagcatgcgcagcacggccacggcgctcttctggctctccatctcgctggggagctacgcgagcacgatgctcgtggacgcggtgcaccggtggagcgccgggcccggcggcgcaaactggctgtcggacaacatcaaccacggcaggctcgactacttctactgggtcgtcaccatgctgcagctcatgaacctgctctactacgtcgtttgcgccaagaagttcacgttcaagcccgtgcagctccacaaggaagtggaggaggaagaagtgggcatggcactggtggagctgcaggataaggtttgagcagcatcgcagcagctatgtgcaggtacaggtctaagctgcaaagcaggtaatactagtgctaagcagattatctgcaactcataaggttaatgcatctgttgttttgcccgtcgggctttcccctttattaatacgctgcagcagctctcctgctagctcttttacaaaaaaaaaaaaagaattgtagccatgtagatcaggaacattgagtgatattgttcaggcaagcaacctcaaagttgtcaattgcaaaagctcaaaattgcaatccaactgtcaactgtaactaagcaggtactagcctaagcctactaggtagtatgttgtatgtacatgtctgaaccttgatgttattgtctaagcatctgtttgtacactagggataatcagagagattgttcaggcaagcaatttctgaaagttttc

SEQ ID NO: 8990 - DNA, 679 bp, Setaria italica
  Peptide Sequence Number=SeqID_74964
cactgctcgtgtcggacttcgggcccaaaatctcgttccggatcgtcgacacgctacgcgaggaaatccgcgatggcaagctcaagtccgggcccgagataaaggcatccctgaagaggtgcattctcgaactgctgacaagcaagggcggcaacccggagctgaatctaggtttcagaaagccggcggtcatcatgattgtgggagtgaatggtggtggaaagacaacctcgcttggaaagcttgctcacagatttaagaatgaaggagtgaaggtattgatggcagcaggtgatactttcagagcagccgcccgtgaccagctagaagtttgggctgagagaacaggttcagagattgtcatcgacaatgataagaaggcacagcctccagcaggcagtaaaacgtgggaagcgtgaaggatttgatgtggttctgtgtgatacatcaggaagacttcatacaaattatggtttgatggaagaattggtttcttgcaaaaaagtcatagctaaagcccttcctggagctcctaatgagattttgcttgttcttgatggcacaactggcctaaacatgttgcagcaagcgcgggagttcaatgatgttgttggagttacaggattcatcctgactaagctagatggcactgcggcggggtgctgcgtggttagcgttg

SEQ ID NO: 8991 - DNA, 542 bp, Setaria italica
  Peptide Sequence Number=SeqID_74965
ccacggtgagatggcgacaccgcggcgggtgctgtcggaggatctcatcggcgagatcttcctccgcctcccgccggaccatccggcatgccccttccgcgcgtcggccgtcagccaggcgtgacgtaccttcctcaccgaccccgacatcctccgcctctaccgccagctccacacggcgccgccggttctgggcttcctgcagcacaccggccgccccgacagcccgttcgcgcacatcataaccaccgccaccccctcgccgccgctccgccgcccggacatcgagtgctcgctctcgctcgagctcgactgccgccatggccgcgtgctgttccacaccataaaccccctcggcctcatcgtctggaaccccgtcaccggcggccaccacttcctgccctaccagctcgaccatccccagcctgccttcagccacttcgccggagcggtgctctgcgccgccgacggctgcgaccacctcgactgcggcgagggccccttccgcgtggtgttcgcggccaccgtcgacgaggacgtcg

SEQ ID NO: 8992 - DNA, 474 bp, Setaria italica
  Peptide Sequence Number=SeqID_74966
agtttaccaatttagaaagactagtagaaatctaacaacctaaccaataaaaattacaaactggcacccagcagaaatataatctagaaaagtatgtcgattgctctcgacatatttttccacatataactgactcttcaatacctccttactgtgacattcatgtgcattgctggcaggaacaaagaattttcaccattctgcctatggtacatgttttccaattctgcaactgatttgactatcttgccgactaggtcatgtttgccattgctactgaagttaaagcactctataattagagggttctccttacttccaatctgttggagattcagaatcactggcttccacctaggattgagatcattctttcttacttctgtcttgcaaattggaacgggcattccactatctgatattctagatattagcaaggaaggatcactctttgtgtagaagatccttgatttc

SEQ ID NO: 8993 - DNA, 476 bp, Setaria italica
  Peptide Sequence Number=SeqID_74967
tctttgtttatgggtttgtcggtgccacagtatttcaacgaatacagaggatccattagctgttccaaataagccacccaacaaaatgccaaccccctgccaaccaatgccacgactcatgacagaaggagggcatggagttgcactggcataccgtgaaacagcaatgaatgcaccagtagactccacaagagcaacaaaggaagctgccatcatagcaaaagcttcaccagcatcaaaggttggtgctccccactgaaatggataaggtacacttatccatggagcgcccccaacaagcccagatcgatcagtacggcaatggaattgggttttgggagcagcattcttatacgcgccaccaactgtcaggaagaaggcgtaaagccacacaacggcaatggacattacgacagcaaacctctcaaaggcagtacccagtaacgggaccagatgcggtatgtactgagaaagag

SEQ ID NO: 8994 - DNA, 1431 bp, Setaria italica
  Peptide Sequence Number=SeqID_74968
gtaggtagaaagaagttaggcattttcagtttattgacataaccgggaatccaacccaatttacatccaaaaaataccgagccattcctccatcccgtccatagttaagctgagctctacaagattcagaactcaggaggtacattagaatataggagagacaacagcgtgggcgtggcatcgccaaaatcacttcgtcaacgacctaaccgtacaatttttttcccgttttctgttaccggctgcggatcagaaggatgggaagaacttgttgaggttgaatggtagggagtagaactcctcgctgcgcgggtctgtcttgaacgacctgaacctgtcccagaaatggtgcccccggtccttcctcacggtgccgtcacgcctgtgcagggtgttgtccagaaaatatgctacagcgcctccgacgaatgctttggaggagaataccacgttgatcatatcattgaaccatctggcatgtgtgtgtactggaccaaagcctgcgacagaagtgtattcgttgaaatactgtggcaccgacaaacccataaacaaagagaagcccaggatgaactttgtccggaagctattcaggttgcagaactgaaggaacccaacacctgccataccaacatatgcgaagagaagacaatatatagctgcaataattgggccaggaattgatgcaaaaacagctccaaatttcccaagaatggagaagaatatcataaatccagcagaaatctgcacaacacgtctgctaccaacgcgtgtcaaagcgagcaacccagcattttcaacagatacagaggatccattagctgttccaaataagccacccaacaaaatgccaaccccctgccaaccaatgccacgactcatgacagaaggagggcatggagttgcactggcataccgtgaaacagcaatgaatgcaccagtagactccacaagagcaacaaaggaagctgccatcatagcaaaagcttcaccagcatcaaaggttggtgctccccactgaaatggataaggtacacttatccatggagcgcccccaacaagcccagatcgatcagtacggcaatggaattgggttttgggagcagcattcttatacgcgccaccaactgtcaggaagaaggcgtaaagccacacaacggcaatggacattacgacagcaaacctctcaaaggcagtacccagtaacgggaccagatgcggtatgtactgagaaagagccacaagcagtaaaatctgaggaagaccaatctcaacacacttggcaacgcttggaaatcccagttcatagagcccaaatccgacaagcgcgaccaggggagcagcagataacgggctcagcagcctgacgacaatgcgccaaaggccgctgaagcccatgatgatttgggagggtggaggccacaatgagcg

SEQ ID NO: 8995 - DNA, 637 bp, Setaria italica
  misc_feature (1)..(21): n is a, c, g, or t
  Peptide Sequence Number=SeqID_74969
nnnnnnnnnnnnnnnnnnnnnatgctcaaagggatttcatttcgatgccaacaaaccaaatccatggcacccggaggcatccacatctccaatgtcatcctagccgttgcaagagattattaatattatttttggatacatgatacgtttgatcctacaatgatggaagagaagtatgcagatcgtgcatcgatgggctgggcaacttcttcagtgtcaaccttgcctcaagaacaaacatgactaaacgaatcctaactttgagctccttgattgtattaaggccctccaagtattgcgttctcgatgtcttctctgcttagggcatagctgaaccttctctccacatccttctcaagacttccaggaccgcttttcaagtacctagttaacaataaggttaacaattttgtatgaacaattgagtgatcgagcaaaggattcatatttcacagtgttttgacgacacagttaattcatggaactcagggagtagcagaaaaaggctcaagacactgaaacacgaaggcccttcagaattgctagatgaacaagcgagttgagtcattgtgaacaaaatactgtacaccctagctgaacaagtgtggaacatccaaactgcaagttcatcccacgc

SEQ ID NO: 8996 - DNA, 690 bp, Setaria italica
  Peptide Sequence Number=SeqID_74970
ttttttctacatctccaatgacattggagatgtggatgcctcctgccatggattattaatattattttggatacatgatacgtttgatcctacaatgatggaagagaagtatgcagatcgtgcatcgatgggctgggcaacttcttcagtgtcaaccttgcctcaagaacaaacatgactaaacgaatcctaactttgagctccttgattgtattaaggccctccaagtattgcgttctcgatgtcttctctgcttagggcatagctgaaccttctctccacatccttctcaagacttccagggccgcttttcaagtacctgatgtggaggtcggtgacgtcgaggctgaggcgcgcgtgccagagcggcttctcggcgacccagacggcggggtcctcgcgggactgcgtgaacccgaggctgcgcagccacgcctcgatgcacggcaggctgtgcgtgtacagcggcttcttcttctccggcagccgctctagccactgcgcgtccgacggcagcgccgccgcctgcgaaacgacccccgcccctctccgcggccgaccccgcgcgcgggacgccggggcagcgaacccgctcgggcgagcggagggcagggccggggagatcagggccagggcacggagcgagctcgagagggccatggacatcgacgattgctgctgctttttcac

SEQ ID NO: 8997 - DNA, 924 bp, Setaria italica
  misc_feature (1)..(31): n is a, c, g, or t
  Peptide Sequence Number=SeqID_74971
nnnnnnnnnnnnnnnnnnnnnnnnnnnnnnnttttttttttgtgaaaaacaaattcatgttcacgccatatatgaactgaacaattaaagcatgcatgcagtcattaaggacgagtagcagagtggacgacgacggtgaaatctatataattattggacagcaattcaagaagtagagatagatgaaaagagtaaaaggaattaggtagctagatgtcgacgacgcatggtgcggcgcggttgaacttgaagtagccgagccctcctccggcgtttgatccgtagcttccctggccgtcgttgacggtgagcagcgccgggcagcgcaccctgaggtggtagtggctggtgatgaaggccccggccttccaccggatccatccgtcgacgcggatggtgacgagcaggtaccccgccgtctcgtcctgcgcgagcgcggtggcgaggtacggcggcagcgggacgccggcggcggagaggaagggcgcccagacggtggcgtcgccgcggccctggaacatgggcggcagcgcggtggccaccgtcacctggaggccccggtactcggcgtacacgtcggcgcggtcgtagaagatgcccacgcgctcgttcgggttgcgcgccgccagcgtcgcctgcatcgtcaccgccagcgccgaggaggagctcacgttgatgcacacgatgtcgacgttgctgaggaagaagcggggcttgctcgggcggaggacaagccacacgatcagcacgatgaggagggccagcaggatgatccccgcgacggccgcgcagcaccggcggtaaagccgctgccgctcgcagtccttgtgctggtcgcagtacttgatcgacatcctgtataccctactgatgatgatgcttcttcttcttcttgatcgtgtgtgtgagagagggagagggagg

SEQ ID NO: 8998 - DNA, 271 bp, Setaria italica
  Peptide Sequence Number=SeqID_74972
cacgggaattttaacctttcagttcaagattcagccattcaggtgctacacaactcccaaccaccatcggagattcagctaaacagcacagcaacatggattcagtcaatcgcacgcgggacacacacgaatcgaacacgcacgaacaacgctagaagaacagacccaccgatcaccaccggcgccgccgccgtcgaagcgaacctactagcagcacgcggccggcgcgacctcctccttgttgcaccggtcctccacctgcgccccgccc

SEQ ID NO: 8999 - DNA, 772 bp, Setaria italica
  misc_feature (761)..(772): n is a, c, g, or t
  Peptide Sequence Number=SeqID_74973
tcctaacttcgttttcttcttgacacacagctcggagctcgctactgccacgcctgggaaggagcttgccgcagactaggcaatggcagcagcctccgtgtggctgctgcagctccctccccctgctctccacaactccctctcccacccaagcaaccaaccttcctctgcatgtcctccactgcacaagaagccaagaggagatcttctctgctgcgcttcatcgggcgcctcgtcttctgtggtggccaaggagcaagaggaagcagtcgctgctccttcagaagaaggatatgagcctgcactccttagctacaaggacgaccccaacttcaggggctgtaggggctgcggcagggaagagcttgagaggggctgcaatggtgaggggcggatccaagggggcatagccgccgtcccgggcttcggctggtggccgatcaaggcctaccgcccgtgccccggcttcgtcgcgtcaggcggccgctaccggcgccagggccaaagcatggatgacgttgcatccggcagggggaaagaaagtctctccagccaagaagaagtaacctactgcacaagaacatgcttcttactttttcctggatacatttctagatggccaatgtgccatctggataagtttccttttttatttgtgtgtatgtgtgacaattatagattgtcatttcacaattcttcgctcattgtcatatgtagctcgtgaacatagactcttttacggtacataatactaggttatnnnnnnnnnnnn

SEQ ID NO: 9000 - DNA, 342 bp, Setaria italica
  Peptide Sequence Number=SeqID_74974
aacttaaaggaacctaagaactacaaaaaggtacaattactaataggtagaagaagttaattagtagaataattgccagtaactggctaggtagatttctactagtctgggaagcaggatacaacaagtaaaaaagaagtggagaatcattctataacatatctgtaaccgggtggtcattatgtgttggtttttatcccgatattgaagatttcccatcgggtagttgtttgaattgttgaacgaatgggctgtcacatccggttttaaaggcaaaaccggatacataaatcaacgtgcgtttggatcaaattatacacatgtgacgatttcagtgaaaaa

SEQ ID NO: 9001 - DNA, 1116 bp, Setaria italica
  misc_feature (1087)..(1116): n is a, c, g, or t
  Peptide Sequence Number=SeqID_74975
caccaacaagaaggaggcggaggcaaagttcaagcagatctctgaggcatacgaggtacttagcgatccccagaagcgcacaatctatgatcagctaggggaagaagggctcaagggacagccacctccaggggcaggaggtcctggagcatctcccttcttccctggcggggctcattccacctccttccattttaatccaaggagcgcggatgatatatttaaagagttctttggattctccggcatgggtggcatgggcagcatgagaggggaaccaggattccagcggtctatgtttggcaatgacttctttccttcacgctatggcggtgagggttccaccagtatgcagcagccattacacaaggcagctcccattgagaatcggcttccagttagtcttgcagatctgtacaagggtgtgacaaaaaagatgaaaatctcaagagagactatagatgcccatgggagagtctcacacgtggaggaaattctgacaatagatgtaaagcctggttggaagaaggggacaaagataacatttcctgagaagggaaatgaagctccaaatatgagacctgctgatattgttttcatcattgacgagaagccccacgacgttttcactcgggatgggaatgatcttgtcatgactgagaaaatctctctggttgaagcactgacgggctatactgcacgtgttactacgcttgatggacggagcctgtcattgcccattaactcaataatccaccccagctacgaagaggtaatccctggagagggcatgccgatacccaaggaccccactaagaagggaaatctgcggattaagttcaacatcaagttcccttccaggctgacttcggatcaaaaggctgggatcaagaagctattaggttcttaggcctgctcaaaggtcattctatggtgagagttattgtgaatattgccagtaactggctaggtagatttctactagtctgggaagcaggatacaacaagtaaaaaagaagtggagaatcattctataacacatctgtaaccgggtggtcattatgtgttggtttttatcccgataacnnnnnnnnnnnnnnnnnnnnnnnnnnnnnn

SEQ ID NO: 9002 - DNA, 246 bp, Setaria italica
  Peptide Sequence Number=SeqID_74976
gtcggtgagtggcggcgcggcggcggcggagatggtgctgcgtggagatggggaggtcgtggaagatgtgaaagcagaggcgtcgctcgctggcgaagacgccgcggactgcggcgcgggcggcgcggatccagcgtcggatcttggcctcgagcgcgtcccactcgaggcgctggacgtcgccgatgctgaggcgctcgacgccgagccggcgcagggaggcgtcgacggcgggcttgcggacgg

SEQ ID NO: 9003 - DNA, 280 bp, Setaria italica
  Peptide Sequence Number=SeqID_74977
gggttgacttcctggcgacgaagggcgcgcgtaccacgcggcgttgctggccagcgggtggagcggcgaggccgagctggaggacacgcccggggtggaccacgtcttccacctcgtgcggccggggacggaggcggccgagaagctgatggatcgtgtggtggctttcatagctcgtgcttgatggcacgccaaagtcccgatgcgaacttgcgtgatccgtgtcaatgtgtaatgtggatgtggacaaataaaggagttggctaacaaaaaaaaaaaa

SEQ ID NO: 9004 - DNA, 336 bp, Setaria italica
  Peptide Sequence Number=SeqID_74978
ccataaaataggcgatgggcacactcacaataaggagtacagttatagacctgtaggtaaataaagctagcttatggtactgttctgccccgtaggcctgcccacaaatagtttccaatccgcatgccagtcccatgaggacgctgaatcccgatacgttggtgagcgagttggcgatggcggcgccggcgagcggcacctcgccgaggtgcccgaccatgatggtggagatgagctgcatcgtgagctgcagcagcgccaccgcgatcatgggcgccgccagcgacgccagccggccggcctccgccgtcgcctcgccccaccacccttccgaac

SEQ ID NO: 9005 - DNA, 266 bp, Setaria italica
  Peptide Sequence Number=SeqID_74979
gcagcaggacgccggcgaccagatgatccggggcctcaagatcctccctgcgcaggtggagctccgcgccggggagctaccgtggctcgtcggcgactcggccacccagaggtcgcggttcgccttctggctccagaacttgcaccgcgccaggagcttccgctgggtcctcgtcaactccttcccgggcgaggccggcgttgccgccggtgatgacgtgcaccgcctcgcgcggcagagtccgcaggtcctcccggttgggccgg

SEQ ID NO: 9006 - DNA, 371 bp, Setaria italica
  Peptide Sequence Number=SeqID_74980
tccccagtgtcgccatggaccgcgcaaacagctggaagaacacctcgtcgggcccacccgcgacgctctcgacgtcggcccgcgccgccgggtcggtgagcagcgcggcgtcggactggagcaggcacctgtgcttgcgcagcgcgcggtagtagcccaggtcgaacgtcaggtggctgcccgggtccatctccacgacggcgtcctcggcgaacccgccgctcggcgcccggcacttgcgccggcggaggttggcggcgtaggcggcgtcgagggtcgggtcggttgtgtcgttgccggcgccggcgccggggtggccgtagaggcggtcggcgaaggacgagcagtgggcgatgccgatcgtgtgcgcg

SEQ ID NO: 9007 - DNA, 294 bp, Setaria italica
  Peptide Sequence Number=SeqID_74981
tggcgtgcgggcggaagcccgtggtgcaggacgcgcgcgacaaccggctggtgctggtggactgggtgctggagcggtggcgcgccggggtcgtcacggacacggtggacccgcgcctggccggcgacttcgtcgggagcgaggcgagcctggtgctgaggctggggctgctgtgctcgcacccgctgcccggcgcgcggccggggatgcggcaggtggtgcagtacctggacggcgacgtgccgctgccggagctgtcgccaacgtaccagggcctcaacatgctcgcgctca

SEQ ID NO: 9008 - DNA, 764 bp, Setaria italica
  misc_feature (508)..(508): n is a, c, g, or t
  Peptide Sequence Number=SeqID_74982
agagccccataacaacatttttggattcatactgtgcaaatactgagtttaagatctgatccattaagagagagccattgtcagccttttcaagattatgcagcacaatatcaaaaccagccttagaagcaggcatcttcaaatgttgaagcaaatcataaccatcttgtccgctcaaaaaatgaatctgactgctcaagaacaccattatagtgtctgcaaactcactgccaaaaaaccacatgctcagggctaatgattttcgataccgaatattatcagaagggggaggagtagcaacagcaatcgcactagaagagccccaaagatcagagacatcctccttccaacggccataaaacttcttcaaacatttgatgaagttttctggactgactacagttgaagatccacttacaggggccgtttgatccagtgtttcaagaattgccataatttccaaagcactgatgaggcctttgcaatcagacaccaatccgaggccgancagagaaattccgccgatcaaacccccccgatcgcagcgtcggtttcgcgaattccaccagcgatcgcagcgtcggttccgcgaattccaccagcgatcgcagctgccgccgccgccactgtagaagcccagcaccccttggcctccacggaaccgccgaaaccgcctcgctcgaccgcagcaggagaggggtcgcgcgagcccgccatagggcgcttatataggcagcgccccccgcaccgacctagccgcccga

SEQ ID NO: 9009 - DNA, 267 bp, Setaria italica
  Peptide Sequence Number=SeqID_74983
tactccctctgtcaaattatatagggtatgcatgtttctgaaaagttcaaactttgtaaattttgacttaagcttagtcaaattataagtatgtctaatgtatataattatacagctgtctaatgtgtataattatactgttacattcatatttcaaagtgctttcacacttttttggtccctatgtactgggatggagggaatgcttggatacttcacaaacaataaggaaagctattaagaaaaaatggcaggtagctatcaaca

SEQ ID NO: 9010 - DNA, 299 bp, Setaria italica
  Peptide Sequence Number=SeqID_74984
gtaaatactcgtcgctgacgaggtggatgcccttggcggccacgaagtcgacgagcagctcgaggtcggcgcgcggggacgtggtgcccagcgggttggaggggttggtgatgagcacgcccttgacgcgcagccgccgcttctgggcgcggcggtacgcgtcgtccagcgcggcgcgcgtcacccggaagccgttggcgctcgtgcagtgcacggggacgatctcggcgccggtgcgccacttgaggtcgcggtcgaatcctgggtagtatggcgtggggatgagaaaggcgtctccg

SEQ ID NO: 9011 - DNA, 406 bp, Setaria italica
  Peptide Sequence Number=SeqID_74985
agtgggctcattctattcctatgccagagtctggatgcgtgttggtcgccactgaagagcttgatggcaacggtacctttgagaggacagtcatccttctcctaagcctaggctcaagagatgcctatgatggtccatttggtatcatcctgaaccgtcccctgtacacgaagatgaaacatgtgaacccatccttcggcgagaaagcaaccccttttggcgattgctctctgctatttggtggcccagtcgatatgagcctattcctgatgaggtcgactgagggaaaaccaatcaaggggttcgaagaggtggtaccaggcatctgcttctgtttccggatgacctggagaaggctagtgctctgatgaataatggcacggtgaagcctgaagacctgaagttc

SEQ ID NO: 9012 - DNA, 263 bp, Setaria italica
  Peptide Sequence Number=SeqID_74986
taagatcgtggatgctgtgaaagaagccaccttgaagaattaggcctagaaggaagagctttgaagcccggatcatagccttcttggttgccagcgctctgtttggcactctcttgaacgcaaaggccaaggagactccaacgatgaagaggaagaaggggaacacaaaatctgcaagcgtgacgccgtcccatggtgagtggctgatagcagggacaaggccaccaacatcatccacaatgatcataagcacgacggtgatg

SEQ ID NO: 9013 - DNA, 246 bp, Setaria italica
  Peptide Sequence Number=SeqID_74987
cactaaatctattgtataatatgccaataagaccatgtaagagagaagttatgtaatcatcatgaaccatcttggaagatatactcatttgtatccgagaaatgaagatagcaattttcctgctagtagatactgaaattggagttgactcaacactcagaagggtatccaaaacattagtgtatttagctgtttcctctccagaatcttctgttctttgtctcttgtgtggtctctcttcatttg

SEQ ID NO: 9014 - DNA, 301 bp, Setaria italica
  Peptide Sequence Number=SeqID_74988
tatctatcagtcgtggtgtttattccaagaacgtctacccatgagttcgaaaagtttcgccgccgatcggctattggtacgccttgaaccactcgcaagccgatttggaacctgcaatgaagttaagcagatcttctaagtcctccatattattcaacgcagaatcttgaggtccaaattttatgtcaagaccttaacgctggagtgcttcagcagaacggacaacatgtaggcgtcatgccgagtgttagcgtgcagaggaccgcgccggccatgggcacggcgaagtgcagctcgtaca

SEQ ID NO: 9015 - DNA, 316 bp, Setaria italica
  Peptide Sequence Number=SeqID_74989
ggctgttgctgaagcgccccgtggggccgccggcgaagtcgattccgtagggcgggtagttggcccgcgccatcgacacgatgaagttgttgttgccgttgtccacgagcgagtccccgaagatgaagtagcacggcacctgcggcgccgccacggccggccgcaccgtcgtcgtcgccgccgcgccgagcacggccaggacggccacggccatttgccacgcgcgccgccccattcccctcttcctactggtagtggtagctagcgatcaagcgaatgggaggcgccccgagcttggcagctgcttggattcgcg

SEQ ID NO: 9016 - DNA, 559 bp, Setaria italica
  Peptide Sequence Number=SeqID_74990
ttttttgttcaaaaataatgtacacatttcgttcgttcatgttaacagccatcatcatccatgagttacatcgctgatctttgtcatcctagctagatcgagttgagcagagcatcctaagaatggagataactactaatcaacggcgggcggacgggcgggcggcggcatggagttggttggtgagaaagatcaggcgacgccgaggaagtcgagcgcggacttggccatgacggcggcgaactcctggaagctgatgacgccgtcgccgtccgcgtcggcgtcgcgcatcatccgcgtgagctcctcgaaggtgagcggctgtcccaggcgcgccatggatctcgccagctcggcggcggagatgtagccattgccgtcgcggtcgaaggcgcggaacacctccagcagctggtcctggtccacgaggtgcgtctgcgtggtgagcagcggcgcgatggccgccgccagctcctcgaactccacggcgccgttgccgtcggcatccatccccgccagcagcgcgcgcacctcctcccccgtcgggcgcaggcccagc

SEQ ID NO: 9017 - DNA, 247 bp, Setaria italica
  Peptide Sequence Number=SeqID_74991
caagaaatacctctgttgcagtctcccaccattccaagcttgcaataggccacccattttcatcgcggcctaagccattgttggaatggatatcttttatgaactgatacatttccttgagctgtctaattctattagctatctgtttcctatcatgcctgagccctgacccgcagtaatacttttctatgatgagcttataccctcttgttgtcatactccctttgatgtagttacccatttctaa

SEQ ID NO: 9018 - DNA, 763 bp, Setaria italica
  Peptide Sequence Number=SeqID_74992
aggcttttatctgtttactgcgaaatgggcatcacagtatcatgtacttaactgatgaatgtattgaagagggatgccgactgttgcgcccatcgatcccgtacgacttcctttaattacaagccagattacatgtactgatgtacagaaattgctggtaagaaatgcatcctgttaaatgaaatctccttcccacaaaaaatgcaccaccaaaaccatttatgccaactgatcagtcagtaccaaaatttttgcattctcctttcacatgctgactcacatgaacaagaacaaagtcatccatccaaagtatacaagttctaaaactacctgtaccaaaatgcttgctagatatccattcatatactgccaaacaaatgaataacgactcagaaactcaaagatgtcagtcataaatcgctactgataatattctaagcatcctgtcaaatctcctttcacacactgaatgaggaacggatgtgaaagtctaacttcagtctcttcacttccttgtctagctatgaaggctttcattttctgagtctaggtttcttccctatccatgaaatctgccaaggctggcctgtggtagtctcagcagaaccagtcttttgtgcagtctcagcagaactgatgtttcgttctttggagtccgtcccttgtgcctttgcatgctttgtctgatttctacgtattgtagcagtctcaccaggatttctgttctgctcagccttcgttttcccgttgttaggtctttcct

SEQ ID NO: 9019 - DNA, 295 bp, Setaria italica
  Peptide Sequence Number=SeqID_74993
aatagttcagatttgttctcgattcagagaaacaaaatcttctgctgatatatgtctggttctagtgttgtagtgcagaagtagcagtatgcagtttagttaaggattggagtccagtgtagtggactgaagctcgtcattggagctgtgtcaagtgacaacattcattcgtttctggttcagtagtttatcacctctagtcttaattagatttgtttctttggaattcagatgggaaaatggcatgcagccccgtttatgttcacaaaaaaaaaaaaaaaaaaaaaaaaaaaaa

SEQ ID NO: 9020 - DNA, 657 bp, Setaria italica
  Peptide Sequence Number=SeqID_74994
ccattgtgtacatttggaccgcctcatgctgctttgatgatttacaaaaagagtaggaaggctggttgtgtaatatccttgaaagcttacaagcttttgctcgataggcttgctaaatttgggaagagcggaattgttttgaacatatgggaagagatgcaagagtgtggatatcaacccgataaagagatttatgagtttattgtaaatgggctttgcaatgtgggcaaggttgatgcagctgtgtctgtgatggaggaatcacttcggaatggcttctgtcttgggagaattgtttacagcaaactgaacaacaaactgttggaaatggacaaagttgagactgcatataatctgttcaagaaagtcaaagaggcacgagcacttactaactcacgcaattattgtcgtgctaatggttggcattcctgaattctgagcataataagtttgtatttgaatggtggatctttgctattccgcttgctggtgactggtgagaggcagatagcttcatatgcctttctgtcacaactgtgatgaagctaaaactctaaataaccatggtgaacggttcaagggagctctaaatttaaaaggaaaaaaacagctggaacctgaattttgagaacttgggcccccgggatgttgcagagg

SEQ ID NO: 9021 - DNA, 456 bp, Setaria italica
  misc_feature (1)..(7): n is a, c, g, or t
  Peptide Sequence Number=SeqID_74995
nnnnnnntttagctaactgaagaagttagtcgtcaagcttattccatttcggattcagctcatcatatcatacagaagaagaaaagaaaaacaagcgcctagtaggcgaggttcgatttgtccgcgcgcacgcagtacagatcgagcgaacccttcgatccgatgagatcaagcaaagaggcaaaccagaggtcagatcagacggcggagggcgcggcgcccgcggactcggcctcgagataccggcagatccgctcgacgacctccctccccttggcgctattctgcaggaacctctcggcgcaccgggtctcgaccttctcggcgacggcggcaagggccgcgagcgggcggcaccggatcgtggtctcctgcctgaactgcgtccactcgtcggggcggtccgggtggggcctgtatgaggccctctcctcgacctcgatgaggccccggagg

SEQ ID NO: 9022 - DNA, 726 bp, Setaria italica
  Peptide Sequence Number=SeqID_74996
ctttgcacgaatagaaattgggatatcctgaagggcagaagcttcggtgtagctgctttcatactgcaacctcaagtgtcctttgatctgctctcttatttcctttccaagtttatttctgttcatatatctgatcacttctttcatcttgtccctaaaccgctccgttctggagcctttcacaatgagtgcagtcatgttaccgatcaggtaagctcccagaatcatatcaaaggagacatagatcatgatgaatatcatttccctgatattgacagcatgtatgtcaccataaccgacagttgccatggtgacaatggcgaagtataacgatgttatatagcgcttggcaagatcgatctccctgaaatgtgcgtagctgtagtcccccaactgcaaactccctatccatgtatacccttccattgattcaggaagcgttgtagccaggtaatagaagatacaggctgctgtgtgggtacagtagagttccacaactataagctttactatccttgtgaaaaggtagttgacacgtatgtccttttgcaactgccagaagaactctgtaaccttcagagcccgtgtcaagcgaatccatagcaggtatcttacttcttctttacttccacaagccttgtagatggcatcccatgggaagcaaccaagaagatcaaaaatgaagcttgatttgcaataccggagggcaatagctgtgggatcata

SEQ ID NO: 9023 - DNA, 260 bp, Setaria italica
  Peptide Sequence Number=SeqID_74997
cggtcgcggtacgtgaggaggcagcccgaccgctcccgccgcccgcctcctctccctccgcctgattacggacacgagcactgcccagtcccattatgggaaagggaattctgcagttacgttggcaacatttcctggcaaaggttctgcgaaaacaagcaatatgtttcagtatataataaccttgagcagtggaatgattcaggagcctttgagaattttcagaatgcaaaggcaaggttctggtctaattatcatgg

SEQ ID NO: 9024 - DNA, 1137 bp, Setaria italica
  misc_feature (1131)..(1137): n is a, c, g, or t
  Peptide Sequence Number=SeqID_74998
tgcgtatatgaaaataaatgttagaattttatgaaaccgtcatggtaatacaggatgatacagaattctaacatttattttcatatacgcaggacacgagcactgcccagtcccattatgggaaagggaattctgcagttacgttggcaacatttcctggcagaggttctgcgaaaacaagcaatatgtttcagtatataataaccttgagcagtgggatgattcaggagcctttgagaattttcagaatgcaaaggcaaggttctggtctaattatcatggccaaccttctgatattcctttgccaggccctgatatgtacattgataaggtcgaccaccgctgcaaagttgatcctgagttggtagctgacctggacaaggtacggctaccatttgattcagattattcagccccggctactggatcgggcaatgccggggcagttaacaagtgtacccagaacgaatctggaaactgggacatctacatagaaaagccagctgaagtgaataagtgggactgggaggccagtctaggatccaaggctatttggggagggaacaatgaatcttccggtaaatggggtaatggcaactccggttggggtgctgctttggagaagcctagttggcgcggctggagcaatgaacagtatgcatcaaacaacaggaatgatagcttctatggtggatccaacaataatagatattgggatgaggatccaagtcacacgtctggaagaaaacggaacagcagcgggtactcccagcagaggaacaataaacagaggaaccaggatgacgggtaccaccaaagaagcggctggcaggatcatagaggaagaaataaggactggcgaccattgcacaacagggcctgggaatagaaggtggctggtccagtggcgaaatcgccaagtgttttgttgtgagatgagtagtttgtagcttttgttttgaagtagtccagtgggctgctggcaaattggtacgtgtaaataaacgtttgagttgtgctgttgctctttaggagctgtggtcctgtttttcttttgctgtaatgggagcatgcccccaaaaggagtttatttcaaaggaagttcaccttgaggttaaaaaaaaaaaaaannnnnnn

SEQ ID NO: 9025 - DNA, 748 bp, Setaria italica
  misc_feature (721)..(748): n is a, c, g, or t
  Peptide Sequence Number=SeqID_74999
ttgaggtagtacgtgttgaatggggcaaagtggatggaagatttcaattcaaggaaattgaaggttcacaagaaataatcgaggctgatcttgttttcttagctatgggattcccgggtgttaaagcggacattgccaagaaactgggtttagagcaagacaagcgatcaaatttcatggctcagtttgggaactttgcgactaatgtggagggtgtgtttgctgctggagactgcaggcgtggacaatcactggttgtttgggcaatcgcagaggggagggaagctgcggcagctgttgacaagtacctgtcaagagagagaacaaatgctgctgaggacgttgctgccccaagtccaagtgaaggtctggttcaacctgtcgcggcataagcaaagaaagcatttctgtaacttttgtagatatgtttttccacttcagtgctgagaaaacaattgcggtttttagctgtaaaaacataaagaaagggctcgtttagcatagagaaatgataacccttgtgttataaattaggtattaggttgacagcagtaggaaattcttttgggtgcatatatgctgttctttcctgcttgtgaggaaatgccggttcgtagttgtaggatcaatgtatatcttatagatgcaaaaattgttaacaattatttattaaactgtatctctcctcgggtgcatgtatagagctgatactaaccaaacnnnnnnnnnnnnnnnnnnnnnnnnnnnn

SEQ ID NO: 9026 - DNA, 1259 bp, Setaria italica
  Peptide Sequence Number=SeqID_75000
ttaactttagttaaactagacaaacttaagacccttagaccgacggactaaggacttcgtggccttcgctgttccacgctggggcatgtaggagaggaaatatacggaaaatttcttcttgatgtgcttcaggcagagggcattagtgttattgggatgcttgaaaataccgatgctactgcatgccgtcaggcctatgaaacacttctatgttgggttcttgtagacccatttcagaaacatggtttttgcagccgtgcagattttagtgaagaaccagctttcagttggatacgtaaactcccagcagatatcaggacagcaattcatcactcgaaaatactgttttgcaatggctatgcttttgatgagttcttccctgatgtgattgcatcctctattgactgcgcgattgatgcgggaacagcagtgttttttgatcccggtccccgtggaaaatctctcttaaatgggaccctggatgagcagagagcacttgagcatgccctgaggctcagtgatgttctccttttgacctcagatgaggctgaatctctaacgaatgtcaaaaacccaattgaggctgggcaagagttgctaaagagggggatccgcacaaagcaggtggtcatcaaaatgggttccaagggatcgatcatgataaccaagaatgctgtttcctgtgcaccttctttttagattaatgttgtggacacggttggatgcggagatagcttcactgctgctatagctttcgggttcctccatgacttgccagcagttaacacattaacactggcaaatgcagttggtgctgccaccgccactggctgtggggcaggtaggaatgttgctcacctggataaagtactacagttcttgagagaagccaatctcaatgaggacacagcatggggtgagctgattgaaggaagctctctctgtcctgatgtcacagttctgtgtaggacagcagtcaatggtttcagtgagcactttgtgcatgtacctgttggcgatgtggtttccgacctcctacctatgttcgaagctgtgtcagagcgaagcactgtccaggcttgaatccatgctgaatagtagatggctgtattcattttatcattcatatagattcttcctttacccccatcaccacgctgttttcaggtgatgactgatagttggaggctagcctccaggtaaagctatttgatgagaagaatgtggtttgtgaagcttatttgtttagtcttgttact

SEQ ID NO: 9027 - DNA, 345 bp, Setaria italica
  Peptide Sequence Number=SeqID_75001
tctcgtctcgcctcgcctcctccgcttcccaattcataaagcgatcgagctccttctcgcccgctgatcccgagccggaaggaggatgggctgcgccttctcgtcggcgtcgtcgtcggggtcgctgcggccctgccccgcgggggtccgcgtcatccacaccaacggctacgtcgaggacttcctcggccccggcgtcgtcaccgtcgcgcacgtcaccggctgctactacgccgacaaggacgatcaccccgcctcctcgccgcgctacgtgctgtgctcgtcggcgcacctgctgcagccggggcgcggtccgttccgccccgacgacacgctccagcccgg

SEQ ID NO: 9028 - DNA, 705 bp, Setaria italica
  Peptide Sequence Number=SeqID_75002
caagtgtatgaactatgaagttcacatgctgaatggctcaattgcatgtaagaatagatcagaacattagccggctggcaaaaaacaggagacacgctcctcaaatatttccaaatgaggggaaagtaagctggggaaaatcagctttagctctgaacgttgattgaaatgagaacacgtggatcagcggatgtattttggcgacatgtgggtttgataatctatgaccaactggcattgtgtctttcacgtaatgcctaccagctcctgtgtacctgcattaaacttgcatgaaatggatactacagcagaaggaacaaaattgaagaatggggtgaattttgatgcatcattcctagctatcatctgcaaattcaacaacttcaacgctggattcagctgctggtgcttgaaactttttcgagcaacaatgtgaaggtctcccgtgtgatcattcaccagtcctacaaacccagatgttgctgctgctaagagaatggcaacctaatcaaaatcaatacaaaggaagaagcaccttgatcgagcgtgagaggcttttgaaggtttggccctacttcaaactgaaattgaagccgaacatagattaacagagaggttagcagagagtaccctcgtgggcttgcaactgtgcactttgaacctcagcttctctgagacggcccaaatttggcgcgactttgattc

SEQ ID NO: 9029 - DNA, 1187 bp, Setaria italica
  Peptide Sequence Number=SeqID_75003
gaaaaatctgcttgtacaaacccaaggggaatgatgcagcaagatagtcttcataacagctgtatgcatcgtggaaaaaatgcgattgtgttctgaagctttgacaaagcaggggataaacagatgtgtgagacacttatgtcattcctgtcagggagaacttcaagtggcccaacaaccaaggatatccactgtgcactaacaggagtgttcaatttatacacataagtttttttgaaggatcttccttgcttaagacctggtaaagtaagtcaccgttgctgacagcgattaaatccgtgctaactgtaaactctaggtcaaatggacagcgttgtgtggtgctatcaatgcaaggaaaccaacaatgtgcccgtcttatctgactactgctatgcagaacattgccgacgaagtgaatgccagtttcagccttctccaaaatataatctatgtgaaccagttttatgttcttcaccttttcattttcagtttcaattccattttctttgaccttctcacttccatttccatttccattttccctttccttttgctcttccactgcagaaccattgcagccattaacagtttgatcatcagaagtttgaacaggtttcccaccatgttcttcaagcattctactattttcttcatgcctttcactgttttcttctacctgctgctcagtgatcgacttgaccgatctctcatatgacacaataagatttggtacagattctcgatttagagccaaagtatatgttgagcatgcagcatcagcagcagtcttcaaacatgatattgaagaccaatttggttgatcaccttcatttttccaatgaggggaatagtcaaactcaacagtttcaccatccaccagaatgctcctgattgtcatattatcagcatgtagagcaaatgtgtcgttatcggctagaagaacttttatctcggtgtacccgtagatcagctggttctccatgtcgatggagacgcagagcttctggtggagcacggtggcgcctccgcctgcaccgccaccatcacccttctgcttcctcgcctttgccatccccgaagctcctcctcctgctgcgctagggtttggaagcttctagaagggggttgttggtcggagacccgtggggctcagtgaggcggaggtggcgtcgaggtacgccacg

SEQ ID NO: 9030 - DNA, 495 bp, Setaria italica
  Peptide Sequence Number=SeqID_75004
acgggaattgatttacaggttgtccagggtaacaacaggacaaacggaacgttaatagggctatgctctttagatgacgatgaatttggatgcgatgagccgctgaccctcttctcatcgctcatagcacccagaatcaggttcttgcatcatctccggatggcggttgggagccgatcaaccctgcccaattgggatagttctggttcctgcagcagcaaatcttgcaggttctcagccctagcaacactggaatcaagagagagtagtctatgatgaattgagttatcagagcctacgtaggtgacaaccaggtttcctgcatctggatgcggccagcttcgggtggtaggaaatctgagaacaaatgttcctggctccttcaacagttccctggaacttcttaatgcattctcagcttcctgtacagtaatcaatccctctatccatctaggtgatgtgcaactcccacagtctttttataattttgtctct

SEQ ID NO: 9031 - DNA, 316 bp, Setaria italica
  Peptide Sequence Number=SeqID_75005
taaagaaacttaaactagaaatttacaaggctaatcgtaactagaaatttgggaggagagtacaagctgcttgacaaccctaagaaattttaaggctctatcgggatttgacagggacccaaatccttgagatctcaagttcgagccagctgttcttacaccacagacttacccacagcttacttttacattaccacgacagaaatattgctgttgctttatttatactccctccatcctttaatatatgacgctgattagttaaaaaatgagctaaccaacgtcatatactacctccgttctctattatatgacg

SEQ ID NO: 9032 - DNA, 1190 bp, Setaria italica
  Peptide Sequence Number=SeqID_75006
tttttttttttttgtactagggtaccctaaattcctttgtagtattcttctaagtttcgtagtcctagtcttgtttctttacaccacagacttacccacagcttacttttacattaccacgacagaaatattgctgttgctttatttatactccctccatcctttaatatatgacgctgattagttaaaaaaatgagctaaccaacgtcatataatagagaacggaggtagtatattttctgaaatgtccagacatatctacatgactacgtggcttgcagcatttccttttcatacagacatggctcagtacgcaccaagatatcaagccaggatggagcatcaggtggcttgatacagtttgtccttcggcaacaccagggagtgatcacttgataaggatgcatctgacgggtgaaccctcagctccaaccagcctgagaggtaagcaatgcagattgtatattcccgccgggacatcgtctagtttcagaccttcgactgggattatgtcctgacagaacaaagaaagcaaaatcaaccaatggtccaaatgctatgcgctctctttaggtacaagaaaaggttttgaaataaaacaagcacatataatttggaacctaatatattatgctacacttgtcaacagtcaacactgaactgctgacatgtttcctgagttatatagcagtaaagcttcacatggaaatcttctgtgctggaattggggaagaaacagaatgaaatattttaggtcaggaaactgcagtatctaaccggatttttgaagaagacgacatgggcagagatcaagtgatcaaatgctgcaactgagagatagtcaacccctgcacaattgccaatatcagtatgtcaagtgttaatcagtgcgctgagtaacaaaaggccacagaagaaactgaaaggctgcacagtgtacacaatttaaggttactaggacatatatgttatgaacagattgtgcaaagagggcgggaaaccaaattttattcaaccaatcaaatatcgccaactatttgatactgcagtaactctatgctgtcaggaaataatttcttaccaactagcttgatgtcagtgttgtcaaccaaccactgtgcaccatcctctgtaaatccaacataactaaggtcacctgccttcttccacatcagcttcctataaaccgt

SEQ ID NO: 9033 - DNA, 1689 bp, Setaria italica
  misc_feature (1)..(42): n is a, c, g, or t
  Peptide Sequence Number=SeqID_75007
nnnnnnnnnnnnnnnnnnnnnnnnnnnnnnnnnnnnnnnnnnaaaaggttagtttttttttttttttttaaacctgaacacaactattgccatcgttatattctgataaccttcttgggggcagtagcttctgaattttcaggctaatcgtaactagaaatttgggaggagagtacaagctgcttgacaaccctaagaaattttaaggctctatcgggatttgacagggacccaaatccttgagatctcaagttcgagccagctgttcttacaccacagacttacccacagcttacttttacattaccacgacagaaatattgctgttgctttatttatactccctccatcctttaatatatgacgctgattagttaaaaaatgagctaaccaacgtcatataatagagaacggaggtagtatattttctgaaatgtccagacatatctacatgactacgtggcttgcagcatttccttttcatacagacatggctcagtacgcaccaagatatcaagccaggatggagcatcaggtggcttgatacagtttgtccttcggcaacaccagggagtgatcacttgataaggatgcatctgacgggtgaaccctcagctccaaccagcctgagaggtaagcaatgcagattgtatattcccgccgggacatcgtctagtttcagaccttcgactgggattatgtccggatttttgaagaagacgacatgggcagagatcaagtgatcaaatgctgcaactgagagatagtcaaccccaactagcttgatgtcagtgttgtcaaccaaccactgtgcaccatcctctgtaaatccaacataactaaggtcacctgccttcttccacatcagcttcctgtcagtgttcagtgtcctgaatagcactcggcgaactcctttggggatttttaggaattccattgcttcagctgttatatttgtgttccttggaacatcaaccagtaatgcaggtccgttgaggacgtcgaggtcgagcgtgtcgacgtcgaggccggcggcgaagttgtcctggttgatgtgccccggcgcgtcgacgtgggtgcccgtgtggcactccatccgcagctccgacaggttgtactcggagccctccgccatggagtgcttgagccgcaccacgggccccgccaccgcccccggcgcgaacgcaggcaggtccggcacgtacgcgtgcgtgatgtcgatgatgcgcccggcggggccgcgctcccgcaaccaaaacccgccgccgccggcgtcggagtccaccgtgcaggtgccctcgccggaggggtaccccgggtgcgcgtcgccgcccgcggataggggcgagggtacgaggaggaggagagcgaggagcagggaggcgagcagcgccacggccatggcgcccgggccggagctagctggaatctgctactggtgggcttccgcttctgcttctcgttcgctggagactggtcactgatggttggcacactattctcccgcggcatttatggcctctcgatcacccgccgccgccgcaccagccgcacgatggcgacggcgcgcgatcctggctgtccgttcccgcggcccgccggatcaacgccgccgccgctgttgctgttgcagctacccgtgtcgtgtcgtgctacacctacctacactctgctctgctccagaagaaa

SEQ ID NO: 9034 - DNA, 637 bp, Setaria italica
  Peptide Sequence Number=SeqID_75008
agctgaggatgaggtcgacgaagaggcggcggaaggtgtggaagagccggtgcgcgctgcacaccaggtcgccgtacgccacccgcctgacctcgacgcgggcgtcgccgtcggggggccgctccggtacgatgacgatcttggccaccagcccggcgtccgtccgcgactggcactcctccacgaacttggcgtagttggggcccgggtccggcggcgtcagcatggagctgcggaggcttcccatgctcgccgcccggagcgccagcgtccgctcgccgtacttggtgacgccggccatgaacattatgattgccgggaccattagccggacccccgggagcgacttccagtagacgtagccggcgaggacgacctgcgagacgaggctgagcaagtggcgcagccagagctcgttgtcctcgacggcgaacgccgtgatggtgtcctgtccgccgaggtggaggatgaggaagggggcccagaacacgaggacgtgcatctcggcgttccgggagccgtcgcagagcttctggttctgggataggttgcccagtgcgtagatggcgatgtaatcggcgaggaggtacgccagccagagcggcatgcgcagccaccactcggcgatgcgcttgcg

SEQ ID NO: 9035 - DNA, 776 bp, Setaria italica
  Peptide Sequence Number=SeqID_75009
aagtctcagaacagaattggggagccgtgaaaaattcttgaggttccaattgcttttcccaagttgatcatgaggagaagaagagaaggcactcccatcaacatcacaagcatattctacgaaatccattttgccaaaagcaatttcacgccagaattcctcctccacatacctagctgggagacaactagcgctggaatatttcttagagaacactttgttggccattctctcatagtctctgaatgtgtactttcttccactcatgaagaaagtgactgtatcatcttcagcccattcagctagacgaaggggctgaaccctagtcatgaacttaaaattgggctgttccttcatcagcacaacaccagcaggaacagaagcacttactggagccacgattttgcaaataccatattttgcagcctcaggtgaaatcttctgtatataagcaatgggatcctcaaactcttccctggtgggagaatacacagggcactctggtatcttgttgatccattcaaggttggacatatcaaacttctccaccttgcgctttgcaaaaggatccttgtcctggacatttccagatacacctgttccattgtttgaatgcaatctgaccccacagtttacggggctccgcaaggcatccccgccgcttctagcagccaccgcaggattgtcgcccacttcattctgagcgctaagacgcatcctctcgagcctcctccgcttcagggtctcaaggccattcctgacctctgcggggagat

SEQ ID NO: 9036 - DNA, 219 bp, Setaria italica
  Peptide Sequence Number=SeqID_75010
gggtggaggtgcgcacaccgctgccgttcgccgcgtgcagacgagggtagccgagatggacatctcgctcgacatagtcaaggaggtccctggctggccgccggtgaggaagaccagcgtgccggcgccgcctgtcgccgggcagcaggcccaggagaggccgagatcttccctagggagccttctatggtcacacctcgggaagctatcgaataactt

SEQ ID NO: 9037 - DNA, 931 bp, Setaria italica
  Peptide Sequence Number=SeqID_75011
tcctagtcttctaggacctactgccccaatcgtctattgtcaatgaaaaaagccaccctcctttccagcccatttagctcgctaggtagggagtagagacagacagcgcgaggaacagggagcgcgcggctcagcgtagcagagctcgcagagcagagaccagtgcggggcccaatggctgctgctggttccttcgtggctttcttggccgtcttcgcggcggcggcggcggcggcggcgtgcctgtcagcggccgccatgggcgatggcgagcttctccgcccggcggggacgtcactctccttccgggagggctacacgcagctgttcggcgactccaacctcgcgctccacggggacggcaagagggtgcacatcaccctcgacgagcgaacaggcgccgggttcgcgtcgcagggcgcgtacctccacgggctctttagcgcccgcatcaagctccccgccgaccacaccgccggtgtcgtcgtcgccttctacatgtcgaacggggacgtgtacgagcggacgcacgacgagctggacttcgagttcctggggaacgtgcggggccgggagtggcgggtgcagacaaacgtttacggcaacggcagcacggcggccggccgggaggagcgctacggcctctggttcgaccccaccgaggacttccaccgctacgccattctctggagccacgacaggatcatattctacgtcgacgagacgccgatcagggaggtggtgcggacagggtccatgggcgcgcagttcccgtccaagcccatgtccctgtacgccaccatctgggatggctccagctgggccacctcgggcggccgctacaaggtggactacaagtacgcgccctacgtcgtcggagtttcgtccgaccttcgtcgtcttccgttcggttctttgttcgttcggtttt

SEQ ID NO: 9038 - DNA, 689 bp, Setaria italica
  misc_feature (651)..(689): n is a, c, g, or t
  Peptide Sequence Number=SeqID_75012
cctatcccctgtgtgccttgcctatcccccgttgcgtgtctcagtcatgcagcattcctgcgcctctctcgctcggatccacctccacctcaacgacctctccctctcgcgcacgccgccgccgccgctgcgatgggcctcttcgacgcgctctaccgcgtggtgatgcgccgcaacgccgtctacgtcaccttcgtcgtcgccggcgccttcgcgggcgagcgggcggtggattacggagtccacaagctctgggagatgaacaacgtcgggaaaaggtatgaagatataccagttctggggcaaaggccagcggaagaatgagagcatcgagctcagggttcccaggatgtcgctttccatgaaattagtttccatttgagcaacgggtttatcattcctttttgacataataacaaccaatgtaaaatcctaactctttctgggtgttgctactcattcatttactcgacactgctgttggagtttcgtggtgcatggttagaacctgttatccagccagggatcggcatgtttggttgccccgccctccgtcgaaaacttgtaatactatgaatgagaaatgttttgttggcaactgtgatttagagataccaaaaaagagaactagccaacggacgacacagggannnnnnnnnnnnnnnnnnnnnnnnnnnnnnnnnnnnnnn

SEQ ID NO: 9039 - DNA, 1874 bp, Setaria italica
  Peptide Sequence Number=SeqID_75013
tcggtcgcgcaccccaccccggccgccggctctcccgtcgcttcctccccgcgctcgccgctccccgtctcgtccgctcgttcgattggcggctagccgcgtgctggttggtggctgtcgggcgccgcggcccagtcgaggagatggactcggtcatggccgcccccgacgcgccgccgcaggccgtcgtgctcgtctccgccggcgccagccactccgtcgcgctcctcacgggcaatgcgctgtgctcgtggggcaggggcgaggacgggcagctcgggcacggcgacgccgaggaccggctcgtgcccacggtgctgagcggctttgacgcgcccgggatcacgtcggtcatctgcggcgccgaccacaccaccgcctactccgaggaggagctgcaggtctacagctgggggtggggggacttcgggaggctgggccatggcaactccaccgacgtcttcacgccccagccggtcaaggcgctgcaggggctcaagatcaagcagattgcctgcggggacagtcattgtctcgccgtcaccatggccggagaagtgcagagttggggccgtaaccaaaatggacagctaggccttggaactactgaagactcgctgctcccacagaagattcaggcttttgagggtgtttgtgtgaaaatgattgctgccggtgccgaacatactgctgcagtaactgaagacggtgacctctatggatggggttggggtcgatatggaaacctgggtcttggggaccgtaatgaccgtctgcttccggaaaaagtatcttctgtggagggtgagaagatggtgcttgttgcatgtggatggcgccataccattactgtttctgactctggtacaatgtacacttacggttggagcaaatatggtcaattgggacatggtgattttgaagatcatttagttccacataaacttgaagctttgaaagatagcactatatcccagatttcaggtggttggaggcatacgatggcacttacatcagagggaaagctttatgggtgggggtggaacaagtttggacaagttggagttggcaacaacgatgatcattgttcaccagtacaggttcattttccagaggaacagaaaatttcccaagttgcttgtggatggagacacacactcgccctttccgaaaagaaaaacgttttctcctggggaaggggtactagtggacagctcggcaatggagaaatagttgacaggaatacacctgtgctgattgacgccttaagcccagacggttctggctgcaagaagttagagtcatccgcagcagctccatttgcagccaaggtctgggtctctccgtcagagagatacgccatagttcctgatgagaatgttcccaaatcaggcgaaggcaccgcgcgcggcaacggggcggacgcgaacgtgccggagaacgatgtaaagagaatgcgcgtgcagtcgtagtcctaccaccatctccccctcccttaaccctagtacactataaagaaagaaccggttgccttagtccctgctgtttcctacccagaggtgttcgattttgtgcattctgttcagccgaagtgctccctctctctccggtgcgaacctcctcctgctgttgggacctgagatggtgacattgtctctcctggtgttaagaactcgatctgagatggtgccgttgcctcgcagcaatgtgtgattcgcctcgtggaggtgacttgcaaaatcaggcttacactgctgcaaaatcaggctcacaccgctctccagcatctgctgttaagatgtgtttctgggtcttttacattccgtggagggtacaataagcgcctcatcctcgttcctttcttctaaaaaaaa

SEQ ID NO: 9040 - DNA, 991 bp, Setaria italica
  Peptide Sequence Number=SeqID_75014
aaggaaataaggggacggaatagtgggggtttgggggtttcgaaaaaaaacgaccccatcgcctcctctcgctcctcagccttgcgtgtgcgcagccgcaacttttcctcctctccatcctctccgcgagggcgaaacccccaaacccccacatccgccccacccgcccgccggccgatccatccatcggcgatgacgctgggcagctccggcgccggatcgagcgtcgtcgttcctaggaacttcaggctattggaagagctcgagcgcggagagaagggcattggtgatgggacagtgagctatggaatggatgatgcggatgacatctacatgcggtcatggactggtaccatcattggcccacacaatactgtacatgagggtcgcatctaccagcttaagttgttctgtgacaaggattatcctgagaagccaccatctgtcagattccattcaagaatcaacatgacatgcgtcaatcatgagacaggagtggttgatccgaagaagtttggtttgctggcaaactggcagcgggactacacaatggaaaacatcctaacccagctcaagaaagagatggctgcctcacacaatcgcaagctagtgcagcctccagaagggacattcttctaaagaagtgctgggcgccccatcttgggattcaacaacagtaactgataagctgttttatgggggggaaacaacttcctacatctgttgcccgtgcttgtgttttccagtttcgtatgctatgttctatctgtgaacggctgtgaacaatcaaagtatctcccttgcaatcagcatggtggctgttggggatgttgcaagttccagggatgtatccagaaactgtcgtagtgccctgtttaagcaatagacaacatcttcatgttacctataaaatatagcttctgtgtgcgtgcgcttcaaagaaaaaaaaaatgaaactgttgcaatgtcttctatcttgttttaaaaaaaa

SEQ ID NO: 9041 - DNA, 654 bp, Setaria italica
  Peptide Sequence Number=SeqID_75015
ttcttctcctcggcttccctcacccaaaccttttgcatcccctccaccaccaccaccaccaccgccccccttcccctcctccccgacgaacacggcaccacgagaccccacccagatttagccaccctcccaccgcggctgcattcctctcccttcccccgttggcaggcgctcaggtcgtccccgtcaacccccggccctgcgtgctgatttcttcttcggttgtgccgcttgcatacaatatttaaatgaaggcaaatatgggtacaaaagctcgtccaccgcctgctgatgcagacaaaggggagattggtgaaatagatacaagggctccttttgaatctgtcaaagctgcagttagtttatttggtgaagtccgattttcttctgacaaatcagctgcgagaaagcccaaagctcctcaagcagagagggtgttagctaaggagacagagctgcacttggcccagaaagagttgaataaatacaaggaacagctgagtaatgctgagacaaccagagtacaggccctctctgagctagagaaagctaaaattactgttgaggagctaaccaccaagctggatgctatacaacaagtctaaagagctggccattcaggcaacagaggatgcaaagactcgaaccagcagc

SEQ ID NO: 9042 - DNA, 297 bp, Setaria italica
  Peptide Sequence Number=SeqID_75016
ttctttaaaagtttggtttgttcttgttggaagttgagggcctgaaggatgtctcaataccggacctgaagaaagccaaccagtggtactgcagaggaaggcgtgcccgatcaacatcctggacaaatgtcaatgacgtctcgagccggtcgcactgctgtcgtttgacaaggattaccataaggaggcagggagtcactgaagaagtcagcaagctctggctcatcgatcttggaggcagcgagcggttgcttaagactggtgcatctgggttgacaatggatgagggaaggccat

SEQ ID NO: 9043 - DNA, 1400 bp, Setaria italica
  Peptide Sequence Number=SeqID_75017
ccttatggtaatccttgtcaaacagtgcgaccggctcgagacgtcattgacatttgtccaggatgttgatcgggcacgccttcctctgcagtaccactggttggctttcttcaggtccggtattgagacagggagtcactgaagaagtcagcaagctctggctcatcgatcttggaggcagcgagcggttgcttaagactggtgcatctgggttgacaatggatgagggaaaggccataaacctctccctatcagcacttggagatgtcattgctgcacttagaagaaagagaagtcatgttccttacagaaacagcaagcttacccagattctcagtgattcacttggcgatcgttcaaaagttctaatggttgtgcacatcagcccttctgaggatgatgttggcgagacagtctgttccctgagctttgcaaaacgagccagatcaatagaatcaaatagagacattccagaagatctgaaaatgcttaagcagaagcggctcgcagagcttgacaacgaagtacgtgatgcagaggaagagcttaagcatctcaatgaacaaataaggatagcagagatctcacttgaagagaagaagaagctcaattcatctgtttgtcaggctctcagtgatgagaaggggtcaccaagaagcactctagtggtaagtcacattgatgccacagagagcccacacccaaccgagaaggcaaagatcagggtttctcatggtccagtacctcatttcatgtcaccgacagtgtgtagccggcaaagacatagcgcgggaagccattctgtcagtaaaccgaggctgacaaagtcagtgaatagatatccagctgagctgagcgggagccagtcattcagctactcaagctgcaagaatgcagcaaaggctaggtcagtggcattctcatctagtgtgtctaagatgaaatgcttgccagtgaaatctgatcagatcaacataagcagcaacagcattgactcgacagccgcatcagcaccacggcggggggaaagctttggctcccggccagttcaaagagtacccctacatcagcacaggagacggatgtctagcctaatctagccttacataaataccaattggaaagttctaattttaacttacttatttagtggtgaaaagattcggaaagttgtttgtggttttgtgggtgtttgatggtatgcttgttaagttcatagttcttggctgttgtaactattggaggcccttcgtctgttgttttttggtttgacatggaaagggcatttagggcaaaaaggatctgagggatatggtaaatggaaatggaattgtaattggtactaatgtttttgcttgtgaagtcttttgatgttttttgtaaaaagttaaaaattccta

SEQ ID NO: 9044 - DNA, 1277 bp, Setaria italica
  Peptide Sequence Number=SeqID_75018
tccctccggctctggaaggccgggggagtcgcacgctggcagaagactagaagagaaacagcagaattgagccgtaggcagaggagaaacagggcagggctgttgactcgcatgcctctgagaattcggggcagaggcatcgcgtagctgctatcggaaaagctcgaggtgaagacatggattggttgcctggagagctgtgcctcaagatcttccagctcctggatcaccagtccctcgcctccgctccccaaggtttgacgcctccccgatcagtcataattcaactacccagcgtggcagcgtttgcaattgttctgtaattctgaaattctccatcgtctgaattctcaactggtatatccaacttaagacgacccttacttggttcaccttgacaattccaattttggctggcaagtcaggacttactttccattctcaaactgtgaaattggatcggctgtatatactttgccgaagcctgaaacttatcctgccatttcatggagagatagatgtagcaggtagcaggtagcacgtagcacgtagcacgtagatgtagcacggcgttagtgtctcgttttggtgagctgcacataaccttttgactacgatgctgcttgctccgagctcagtttgcaggaaatggagggcgttgacctccgacgatgagctgtggcgcaagctgttcagcgacaggtggggagcggacgccggggcgttctacgcgccggagggctccaagtcctggaaggacgtcttcgtcgtgcaggaccggtgcgaccgatacggactgggtgtcaggatcatcagggaagggaaagactactacctgatctaccagggcgagatccagaggtacctgggctcgcgccaggacacggacggtgacggcggcggcaaggacgcgccgcggcaggacgctgaggacgagcagcggcagatatccaaccggatcctgttcttcctgggggatctagaggcagcctgtgcggacgccaaacgtgtcaaggcgtgaacgtgacctcctctgcggctgcgcccctgtccaggattccaggagcacattgccgcctgtatgatgcatagctcgtgcatagtgttgttcctatactaaatgtatagtgcttcacccacaatttatttcagttcataatcatgttaacattcacagttcattttgactctagtatggtcatttagattgtaagttgacttgatcgtatatgctttgtttgtatgaaactttcatctatcaatggttcaatgaacaa

SEQ ID NO: 9045 - DNA, 398 bp, Setaria italica
  Peptide Sequence Number=SeqID_75019
aagccaaaatgcatagaaaatcagcaggcaatatcgagatgctaagcatttcagattacatgagcaattgtaagtgatttttcttgataaaagtctcataactcaggtttcaagataaaagcatgttcagaaagcacttcttttctgaagactatgtctgaaacttctactactaccgcctaggaaccaatcctgaatatatcagtgtgaaatcagtagattatgccaaacatctaagcctctacatgagagacgaaacagaagagaataagtagccaagaaataatatatagcgtaacattggagtgtcatctcattcatgatataaagtgctgcagctgtactaatttagtcagtattctagtagtaactacgaaaaacaaaacaaagaaaaataa

SEQ ID NO: 9046 - DNA, 295 bp, Setaria italica
  Peptide Sequence Number=SeqID_75020
cttctcgccggcgaacctgctcgggcagggcgggttcgggtacgtgcacaagggcgtgctccccggcggcagggcggtggccgtgaagcaactcaagtccgggagcgggcagggggagcgcgagttccaggccgaggtggacatcatcagccgggtgcaccatcgccacctcgtgtccctcgtcggctactgcatcgccggcgcgcggcgcgtgctcgtctacgagttcgtgcccaacaagaccctcgagttccacctccacgggaaaggcagccggtgatggagtggccgacgg

SEQ ID NO: 9047 - DNA, 1007 bp, Setaria italica
  Peptide Sequence Number=SeqID_75021
aagctgacaagagtgatggttcagaatgcatcaacagcgagaagactgggtctgatgctgaacctaaacctaaagaggtgcagcagaaaaccgacgaaaggactgcttggaatccactaaacttgattaaaattggacgagattttgatactcttataactggggaagcagggcatgaagatgtgcctggtttgttggagcaaccaacagtaaagggtaggattataatatacacaaaactggggtgtgaagattgcaaaatggttcgtcttttcttgcatcagaaaaggctcaagtatgttgagatcaacattgacatcttccccagtagaaagttggaattggagaagaatactgggtcatttactgtaccaaaagtttatttcaacgaccttctgatcggaggattaattgagttgaaaaaaatggaagattctggcatacttgatgagcatatcggtgttcttttcaaagaagaaccctcatcttctgctcccttacctggagaagatgatgaatctggaagtgggaagatggatgagttggcaaccattgtcagaaaaatgagagagtcggtcactcctaaggatagattctataagatgagaagatttagtaactgctttcttggtagcgaagctgtggatttcttgtcagaagatcagtatttggagagagatgaggcagtggaatttggaaggaagcttgcaagcaaatacttctttcgtcatgttctagatgagaatgtctttgaagatggaaatcagctgtatcgtttcctggatcatgatcctgtagttatgactcagtgctacaacatccctaggggcattattgatgttgcactgaaacctattgctgaaattgcaacaaggttgagattattatcttatgccatttttgaagcttatgtatctgtggatggtagacatgttgactacagaagcatccagggctgtgaggaatttaaaagtatattagaacaatcgaggagctccaaagggtgg

SEQ ID NO: 9048 - DNA, 214 bp, Setaria italica
  Peptide Sequence Number=SeqID_75022
agctgggtttgtgagcacgaggagcaggggaggagcagagcatggtgggatgctggtgggacttgggaggaggcagggtgggtcggaggggggaggaatccgtgcgggccttgatgaaggcggtcctgctgcacgggcccctccaggagatagagccggctgaggcgacgaaggagcagtggaaggttctgcagaggaggaggaggattatgat

SEQ ID NO: 9049 - DNA, 400 bp, Setaria italica
  Peptide Sequence Number=SeqID_75023
actcagtcgcactagtgcgcaggcgcggctcgcggaggatgcgaggtcgaggccggggcccgggagctcgggagagggggccggagcagaagttgaagcgatcgagggaggagggcaagagatcttgcaggggcagcagaggattgaaggagaagaagaaggcgaagagcgaggataaggaaggcagcggatcaaagaagaaggctaagagatcgagcgagatggagggcagtggatcgaaggaggcgaagatgaagggcagcggattggaggaggaggcgaagattgagttcatagtcaaaatccgtcggcggagataggaagactaagatggagattaagaggatgctcaagaaggccttcctatctccgccgacggatttgactatgaactcaatct

SEQ ID NO: 9050 - DNA, 347 bp, Setaria italica
  Peptide Sequence Number=SeqID_75024
aaaggggtaactacctccttaaataactacattgtatagtctcgaaatgctttaagccggaaatagctagcgtagaatttgtctgatatagaacacttgtatcaataaaatagtttgaactatttacttagaagggcacgcatcctcttttaaaatgctaaagcggtgacctacgtataaaaaaggagatttctttttggatttgaagaaaaataaaggaattctatctattttaatttccatttatttactttgttttcttaatgaaattgaaattattaactaacagatggagggcagtggatcgaaggaggcgaagatgaagggcagcggattggaggaggagg

SEQ ID NO: 9051 - DNA, 1585 bp, Setaria italica
  misc_feature (1559)..(1585): n is a, c, g, or t
  Peptide Sequence Number=SeqID_75025
gtctaatctaaggcagccgacgccgccgcaacctctccttccacgtctaggagaagagctgaaccccggccggaggttaggagggcgatggaaagcgtgggtgagaggagggcgatggagaacgggggtgggacgatgcggaggttaccaggcacggggttggtcatgtgttccacatgctccggtttcttgctcaggatgaagcgcacatcggttcccaagcctgacgaggaggtgttggaggtggtgacggaagccgagaagatgcgggccttgatgaaggcggtcctgctgcacgggcccctccaggagatagagccggctgaggcgacgaaggagcagtggaaggttctgcagaggaggaggaggattatgatggagaccaagaagtgcccgacttgctccggttcgctgttacagaagcccgggcccgatgaggaggacaaggcgatggtagcggaccccggatcgaaggccggatcgaaggagaagatgagctcgagggaggagggcagcgagttcatggctgtccttccgtcgcagggcgggaaggagaggatgaagattgcgacggaggacgaggcgatggtggcagacgccagatcggagcagaagttgaagcgatcgagggaggagggcaagagatctagcagcggattgaaggagaagaagaaggcgaagagcgaggataaggaaggcagcggatcaaagaagaaggctaagagatcgagcgagatggagggcagtggatcgaaggaggcgaagatgaagggcagcggattggaggaggaggcgaagattgagttcatagtcaaatccgtcggcggagataggaagactaagatggagattaagaggatgctcaagaaggccttcgagattttgaatgagccccctgtcaagtctcaatcggaggaggcaaagatggaggacagcgaatcggctgtcggaaataggaagactaagatggtgacttatagggttgacaagaagaccattgattttttgaagaatcatccccctctcaagcctcctcccatcggcgcctgtgagcctgagctgcgccaacgctttattgatattactgctccctatgttgaggttgaacgtgtgctccttgagtacttgcaatgccattactccatcaaggggtatgctgaggtgcagctggaggtcaccgatgacgaaggcgatgaccacaagttggtgtagcactgttgtcacgtgtggttggtgtggtaacgagttaaggctgcctagcataataataattttagtataagtgatgaacaaccttcgcttgttcagagatattcagctttgttagcttgtactaagagtatttaagttgaaaagtggtatcttttgtcatatgagtacctgggtactgatgttatcatgcatgttattctcacatctgaagacttgagtttctatattttcctagaactcagctcgattcagatgttatttagttgatgtctctgtgtcattgtctcagatcttaagacgagttgctatatttcctaaagagaagctattgtatatgtactaaaccnnnnnnnnnnnnnnnnnnnnnnnnnnn

SEQ ID NO: 9052 - DNA, 1294 bp, Setaria italica
  Peptide Sequence Number=SeqID_75026
agcggatggttggtgtcaaagaatacactgtttatttgttaaaagtgaggagtggtgaagatgaatgggaaattgagcgaaggtaccgtgaacagcacaaggtacaccagcgtcatagcacacaagacattgctcagtgatgtgcacaagtatcctgttcgatatggtctgcaccttaactggaagtgctgcaaaagccccttttgagagatcaacaaggtcacgaagtgcaaagaagtcattcccatcaagaaggtatcttcgaactcctagtcctttaagtatggagttccggaaaggacattggacgcaaggaagcatagctgctattttcttccggacactcatgatattgagcagagctggcactttagagaacaggaaaggattgacagcacttacacagagcataggctggtcatagatggagtctaaatatgcttttgctaactgtgaaattggatatagtgaaaaatcccagtggtgcaaaactcttgctggcagaactgcagtgtcatttgtgtgacaagaagcacaaaacaattggccagtgtaagaacaaaatcgaggtttgttccatccaatagtttgcgccagttcttgcagcaatgttcgtccagcatccaaatgcctatggcatcctgcacagttgtagtgctgtaactctaacaactgtctggtcgacttccgtggcctatcctccacaataagtgatatggtcttgcccattgaggtagaatcatcatgggcaccttcattgcattctgaatctttggaatttaaatcactgcttcgcttttgcaaagatcgtggaatgagagttttcaaaaaactatattcataaccaggcctccctggtgacaaaaaattaaccagagggtcggaattccaaatggataactcgaaactagcaaagaacgcaagcagtcttgaattagaccacttctctccctgacgacatccggggatgcattcccaaatattttatgcactttatcgacaacttaaggacttcttttatgagagaggtttgagtcttccccctacatgggaaagtgttgaaaaagagtcaagtaaaatatttgggaatgcatccccggatgtcgtcagggagagaagtggtctaattcaagactgcttgcgttctttgctagtttcgagttatccatttggaattccgacccctctggttaattttttgtcaccagggaggcctggttatgaatatagttttttgaaaactctcattccacgatctttgcaaaagcgaagcagtgtattttaaatttcctaa

SEQ ID NO: 9053 - DNA, 635 bp, Setaria italica
  Peptide Sequence Number=SeqID_75027
gggaccttgtaccaccttcatagtattaatccaaggttcacgctgcattacattacattcagaaagaggaagaagcctcctctctaagcacggtatgaatgtatttgggggcaaaatcacgataatcaatggaacataaacacatacaactgagctcatatagacgtatctggcagcgaacccataaggattacaggactgctattttttggtctccaaagtttatccggccttgctttcgagagaatatcggagaaaaacccagaggatgaagagaatggtggaggttggacagactctgttgatggcatgcccgtgccaccagcttgctcaagtgccaccaccttcctgcctgcgttggatgccttaccacaagggcacacactaatcttcctaaagcattgcttgtggaagattgacccacacaaaccacactttgtagcttcatcctcctgaaatgggaatataagggaaagggggtcatcacaagcttgtcgagcagcacaaggtacaccagcgtcatagcacacaagacattgctcagtgatgtgcacaagtatcctgttcgatatggtctgcaccttaacttggtaagttgtctagacaattagacttagtaggaaagaattagaaca

SEQ ID NO: 9054 - DNA, 895 bp, Setaria italica
  Peptide Sequence Number=SeqID_75028
aaaagctagagattcgagaacgccaacatacggaaattaacccttgctcgtccaaacttttgcttgcagtacatacaatccatggaatcaactacaagcaattacgacaatgagataaacacagcacactaaaaactaaaatagattacatgcatatgcatttcctagcttggaccttggagaagaaaatctccatagccatacaattagagggaggaaggatgaaaaaggtgaaaaaggcaaaacacaaacaatcaactcacacattattgttgatccgtccgtggttctacattcagaaccaccgggcagacaaagcaagcagacaaaagaaaattcggcgaaaacaaacgcgatgcatgcagcatgcactcacgaacaaacactgcccgtattcatgcgtgcgtgttgcatgcgagtacgtaaccgcgtagctatcaagcgcatatgaaaccactggggaggttcttgccacagtagttgacaatgaggctgagcttgacagggatgtcgaggctgatgccgagcacgttggccttgatggcggtgcagaggcaggcggcggcctcgaggtcggcgaggccgccgaggatgctgcagcatggctcggcgggcggctggccgacctcggcgctcacgaggccggccacgttggcgcacgccgcgagcttgagcgcgttcttggggcacttgcctttgctcgacggtgacggtgacggcggcgtcggcgttggtggcgttggcgtcgggcagccgccgccgcaggcgttggtcaccgtgaagaggaccaggacgagggcgacgaggaggaaggccttggatgccatggcgacagtactgtaaaacccagagagtgctcttacacacggggggtaggagaatgctggtgcaactc

SEQ ID NO: 9055 - DNA, 474 bp, Setaria italica
  misc_feature (447)..(447): n is a, c, g, or t
  misc_feature (452)..(452): n is a, c, g, or t
  misc_feature (456)..(456): n is a, c, g, or t
  Peptide Sequence Number=SeqID_75029
atggaacttcgacattctcctttttttccttttgagaaaagctagagattttgttaatgcaacaacggtaaattaacccttgctcgtccaaacttttgcttgcagtacatacaatccatggaatcaactacaagcaattacgacaatgagataaacacagcacactaaaaactaaaatagattacatgcatatgcatttcctagcttggaccttggagaagaaaatctccatagccatacaattagagggaggaaggatgaaaaaggtgaaaaaggcaaaacacaaacaatcaactcacacattattgttgatccgtccgtggttctacattcagaaccaccgggcagacaaagcaagcagacaaaagaaaattcggcgaaaacaaacgcgagaatagcaagacaatagacaactacaacgaaacaaaacaactagaccgtaattanaatanatanatattatataattatata

SEQ ID NO: 9056 - DNA, 1334 bp, Setaria italica
  Peptide Sequence Number=SeqID_75030
tacattcaacttttttggagaatcaaaccattttatatttaaccaaaattacagagagaatcacacaaaatttatggcacgaatagatatactatgaaaatatatttaatgaagaaactaatggtacttattttttatcatgaatgttagtactttattgtataaatttgatcaaacttgagatgctttgagaaagtcatcactaacctttaaattcgccaaattcaagtcctcaaagaaagaaatcgttacagttttacagacgagttctcagttacacgtgagtactacctatctgatgagttcagggagcagcgactactggtgtatacagtgcgttttaggacaaaaaaacagcccctcagagagccggtccccaatggacgaaacaaaaactggcaacgcctatgaaacatagctttcttcttcaccaagatgccttcagcaagtctgacccttgttttttttttgtcggtttatgtacaccgctgaatgaacaagcacgctgaaatgttgttaacgtccgctggggaatggcaggaaacggagacgttttgtacaagataggttgcatcaatcccagctagttctgttccgcctaaattccttcttctgtgaaagcactttcttattctgaagtctcttcctttcagcaactgcagcaattttttcaatctttttcttctgctcttctgtggggggcggaggaacatatgatgcagcatcaatgattgcctgtatcttctgcagagcatcttcaatgttgcccttctgtgttctagtttttgtagaagatatcacaagctctccatctttattaatcctgttcttttccgcttgtaatatcctttcctttattctctctccaagccagtgagcttccttaacattgaatcgcatgtcaacctttgtattgactttattaacattctgaccaccagggccaccacttcttgcaaaattaacagtaacatgttccagggtgatcttgggggcggggtcggagcctgccgacgcggcacgctcctcggcgtcgcgcagcacctgctgcgttagcgccagccgcgccgataccttcttgcccccgtcgtcgccggctgcggccgccgagcagcggatgcgtaccagcccggcacggccaacggccaggctcggggctgggcacggggggacctggaacagaagggaggagacctggcggaagccaacacgtaggaggctgccactccgcatggcggccgccattggctagcgtgtggagggaggcgagcggcggaactagcgggcacggccgcacggcgaacgggtgaagggcaagcggaagaagaagaaga

SEQ ID NO: 9057 - DNA, 841 bp, Setaria italica
  Peptide Sequence Number=SeqID_75031
cacaggttgcctacacctttgatgctgggcctaacgctgttttaattgcgcgaaaccgtaaaaccgctgcacttctcctccagaagctcttgtactatttccctccacaagacaaggatttgagcagctatttggtcggcgacaaatcaattctaagcgatgctggattgcactccctagaagatgttgaggctctcccggcgcctccagagatgaagatacatgaccagaaattcaagggcgacgttagctacttcatctgcagcaggcttggggttggcataaacgttgtcgctgacgaaagccaagcgttgctcgattcggtcacggggctcccaaaagtggtgtgcttttagattactactcactccgttccaaattataagttattccaacttttttggagagtcaaactattttatatttgaccaaaattatagagaggatcacaaaggtttatggcaccgaatagatgtactatgaaaatttatttaacgaagaaaataatggtactcatttggtatcatgaatgttagtactttattctataaatttggtcaaacttgagatgctttgattctctaagaaagttggaatagcttataatttggaacggagggagtagtatatatgtgccatgtttttactgattattcggagacggacgatctcaatcacaggtccgagtattggtcaccaagtccaaaagctctcacatgttgtcagtaacacctgatgatcatagcccggcgtgcaaatttttgtgcacgtcggagcatcactgccctaaagtttgaaagcatacggcaacgtacgagaaaatctacaagccgaatcttcc

SEQ ID NO: 9058 - DNA, 285 bp, Setaria italica
  Peptide Sequence Number=SeqID_75032
gccaaatcctgagatccaccccaagcccccgccccgcgtcgccgccgcggcgcctcctcccgcaaactccgccgttttgcgggccgccccgccggaatccccgccacgggggcctgcggtataagacggccctctgggattggagggctccggttggtcggttagacgctcgccgctgccgcctcccctcgaccgcgaggctccgtcgccggcgatggcgtcgtcagccggcggcgagtctccggcgaagcccaagaccgtgctcctgcacggcgacctcgacct

SEQ ID NO: 9059 - DNA, 833 bp, Setaria italica
  misc_feature (1)..(42): n is a, c, g, or t
  Peptide Sequence Number=SeqID_75033
nnnnnnnnnnnnnnnnnnnnnnnnnnnnnnnnnnnnnnnnnntttttttttttttgttacaagaaagtatggttttttttttttttctatacaaggctttttgaatctggataatatagttgtctaccattgtattaagcaaacatgcacgcatcattacacacttcagaacaggcctgaacctgtgtacaagtaggtacaggcgatacatctcttattcatgtactacacattcgttcatcagacacagctgccatactactaaacacagtcttcttcagcttcaccttcacataaggcccaaggtccgcgtcgtgccctggtgagtgccggacccaggtccatggagctggtatgtctggcttggcacaacctgaagaacgcctggttgcttcttgagctcctcgacctgctggggagttagcttcgctgagaacccgctggcggcgtgcctgtagtggtagagcaccgcgtccttggccttctgctcgctgccaaggacggggttgaggatgcggaggtggaactcctccgggtcggcgccctcggggcggtccacgtacacgatgtgcacggccgcctcctgcgccgccgcgttctgctccggctcggccgccatggctgctgctgtcactgctgtgaggaagaggaggatcaggagagggctacgatgttggaggagcggggaacttgtcttcttcatcgccgtcggcttcgaggagggtctcgtctatatagccgtcagtgctggtggtgccgtggtggcgaatctgccgatgggggtcgacgggtcgttctcggcaactccgcgtcgcgttcttgtttttgttctt

SEQ ID NO: 9060 - DNA, 825 bp, Setaria italica
  Peptide Sequence Number=SeqID_75034
ctataccccattccggaagcaggttggtgggtccattttgtcagcgaaacttgcactcgagagaggatgggctattaatgttggtggaggatttcaccattgttcggcagaggaaggaggtggattttgtgcgtacgctgacatctctctgtgcatccagtttgcttttgtccgtctaaatatttcacgtttattgatcatagatctggatgctcaccaaggaaatggacatgaaaaagattttgctaatgatggaagggtttacattttggacatgtacaatgctggaatttatccctttgatttcactgctaagcaatacatcgatcaaaaagttgaattagctagcgggacaaaaacagatgaatacttggagctacttgataaggctctcgaggtctgcaaaagtaggtttcaaccccagttgattgtttacaatgctggaacagacatccttgatggtgatccattgggcagattgaagataagtcctgagggtgtaattaccagagatgagaaggtgtttagatttgcgaaagatcaaaacattccactgctcatgctgacgtcaggaggctacatgaagtcaagtgctcgagtaatcgccgattcgatcatcaatctcgccaataaaaacttgatagaactaggcagccagttgggttgagaaagaatatgttactggtgtttatcctaaagcacacatctcctgtatgtatatgacctctgaatagaagtgtatagtactttattttgttggtaaactatataagcacagaaataaagtactatacacttctattcagaggtcatatacatacagga

SEQ ID NO: 9061 - DNA, 1002 bp, Setaria italica
  misc_feature (995)..(995): n is a, c, g, or t
  Peptide Sequence Number=SeqID_75035
acatttacatacctgcaaaaattggactgtaacaagaaatatttatacagggtactagattaatgtttgaagtgtcaacttttgcatgatatacatcccaaatttcgacaagtgagcacagaatgattatcattttgacttctgatttgattaagtgcatctatcgatgatgctatatgttctttatatatatgtatatattcaactaagcaagaggtttgaaactgtgaaaaatctggttccttctacataggctgcatgaacatgatatcgcacttaccttctaaggaaatgatcatgcacacttcaaatgaacttatctgtaatgccagtttaatgatattgggactacattttgctttctccatatttttctagactttttgaacctagaataattcattattgttgtttatatatgtgcatttttaacaaacttgttattcacagttcctcttagaacatattgtttgcaggtctgcaaaagtaggtttcaaccccagttgattgtttacaatgctggaacagacatccttgatggtgatccattgggcagattgaagataagtcctgagggtgtaattaccagagatgagaaggtgtttagatttgcgaaagatcaaaacattccactgctcatgctgacgtcaggaggctacatgaagtcaagtgctcgagtaatcgccgattcgatcatcaatctcgccaataaaaacttgatagaactaggcagccagttgggttgagaaagaatatgttactggtgtttatcctaaagcacacatctcctgtatgtatatgacctctgaatagaagtgtatagtacttttattttggtggaaaacctatataagccacagaaaagttttgtacatagcacggggccttcttaaatcttgactatgtgaattcagatactcaatgcatataaagaatttcagaaaaagaagactactatcagtttggcacagatcagagatggtacctttttttcngcatctt

SEQ ID NO: 9062 - DNA, 1252 bp, Setaria italica
  Peptide Sequence Number=SeqID_75036
tcagtcgcactagtttgattccgccaaatgggggcgcatctgcaggtacctcaccagggaagggcacctggagaagaaacaggtcgtggagccattggaagcctgcaaggaggatttgctagtggttcacacggaggcgtatcttaacagcctcaaatgcagcttcagagtcgcctccattgtggaggtccctcctgtgtcgcttgtccctaattggatcgtgcagaaaaagctactatacccattccggaagcaggttggtgggtccattttgtcagcgaaacttgcactcgagagaggatgggctattaatgttggtggaggatttcaccattgttcggcagaggaaggaggtggattttgtgcgtacgctgacatctctctgtgcatccagtttgcttttgtccgtctaaatatttcacgtttattgatcatagatctggatgctcaccaaggaaatggacatgaaaaagattttgctaatgatggtacaaacttctaattttctgtggattttcggttcattatatttgtcagtatgacaccagtttatcactcacaggaagggtttacattttggacatgtacaatgctggaatttatccctttgtaagggtctacatctttggcactccttagacacctgcagtatatcaagctattattttcttttcttattggtggtgctcttatatagtattatcattatgaattacacatgatttagagattacttatgtaactttcttgtcacttcttaaacacaagttttgttgtgaaactctaaatgcatgatcatatttggaacaaaccttatttttcatccatagatgatgtaattgttcactagttaaaaaagaccagttccatccacctattatactgcaatgaattctgactgtctcaatggtctcatactacgattttggtaacattccacattaatgtgatatagacaccaaaagaaaagaaaagttttgtatttatcattccattttgtttgataccagatatattcctgattgtttgtttctttgtaaacttaaattggtccatttcaggatttcactgctaagcaatacatcgatcaaaaagttgaattagctgtaagtttcattttgcaaactgctaattatgcacgtgcttcaacttttgagttaaatttctcattatagagcgggacaaaaacagatgaatacttggagctacttgataaggctctcgaggtacatttacatacctgcaaaattgg

SEQ ID NO: 9063 - DNA, 378 bp, Setaria italica
  Peptide Sequence Number=SeqID_75037
actttgccctactttaccaaacaggttcaactacattcactggattgaggatcttctctcctcaaatctgataccgccaatacccagctcaagtgggatggttaggggctttgacataggaactggtgccaattgcatttaccctctccttggagcatctttactgggatggagctttgttggatctgatgtgactgatgttggtctcgaatgggctaagaagaatgtggagagcaacccacacctagcagagctaattgagatcagaaatgcaaatgcagcgtccttctcctctgaatctgaagctattgtcaaggaagctgagactgagaacatcttggagcctgtggaggattgtctagtagtatttgttcttaa

SEQ ID NO: 9064 - DNA, 244 bp, Setaria italica
  Peptide Sequence Number=SeqID_75038
tgctctacgcgggacggcagggtgcgtgatgcaaccggacgccgccttctcctccgcgcacgctgctgcgaacctgtgacggcgcaacgtgcatggcgattgagggttcatgggctcatggcctgcccctcggcgtccgagctcgccgcgtcgtggggactcaacctctgcaacgacggccgcctccaacggtggcacgcggcggttcggagtggcatcgtgcgaccagcccatggagtgatgg

SEQ ID NO: 9065 - DNA, 695 bp, Setaria italica
  Peptide Sequence Number=SeqID_75039
gggtggcacaagatcagcaactacttggataccttctgaattcgctgacaaaggatgtgctcgctcaagtagcgacactgacatcctcagcagaagtttgggtggtccttgaagggatgttctctgcccagtctcatgcacgcgcaactcatctgcgcatgcagttggcaagcctcaagaagggcgggatgaccgccacggtgcacgtcgcgaagatgaaggcaattggtgatgagcttgccaccgttggcaaggctgtcggggatgatgagatgatctcgttcatcctcaatggcttggactctgactacaactccctggtttcctctgtcatagggaggctcgacatgacactgagtgatctctacgctcagattgtggcctttgacatgcatctccagatgctggcggaaaacaacaatggtggaggcttccaatcctccgccaactctgcatcgcatggacgcggtggcttccatcctcgcgatggcaaccgtggccgtggtggtagtagtggttctggaggtcatggcttcaacaacggcttcaacaacaacgctggaggtgcacccaagcaaggaggacagtcaaccaaggtcgcccgtcagatctgcaagaagccaaatcatgaagctgatgagtgttggtaccgctttgaggaagattaccagcccaaggttgctggttcggccacc

SEQ ID NO: 9066 - DNA, 832 bp, Setaria italica
  Peptide Sequence Number=SeqID_75040
taaatcaacagcacgacttgcttccaggttgctttcaggaatgtgaataacatggcattgcaggtaacaaactttaaccgtgctgtcatacatatggttgtgagctacatctccaaactacatagcttatgaacccccaaggaggagattgagcttaatcttcagtgattatgatgattgttgaggcttcagagagcatctcgagcagcaatcctgcatacaatggcgtcgggcagtgtagatatcaacagttcttgggcaggtatcttgtaatgcttcaggatctgtggctggttcgctctactttccagttctcctaaatcgatttctgcaccgctgatgagtttctccactgctttcatctcctcatctgaagcatcaaaacgagctgcaaggatgtacatcgtgttatcagagatcccacatcgtttcagggattccgtaatatgcttcgacccagagtagttgtagacgagctcagagtgcagagtccttgtggtcagagactcccttgcctttgacagcagcgccttgtgcgccgctgcaagaacagggaacacatccggcaccagtgatgcgttgaggaacgcgacctccggctccagcttccctgactgcatcaagtcgaggagctcccggctgttggagacgtcggagtagagggcgagggagacactgcggcctccggccaccggaaagctcttcatctcccgcttgcggcgattgggagcgtgtggtctcttcttccggcgggcggcggcggcggcgcaaccctactcttctcgtcgtgtttcagcggctaacggggcgattaccaagaacgcccctatcg

SEQ ID NO: 9067 - DNA, 496 bp, Setaria italica
  Peptide Sequence Number=SeqID_75041
gctatcagtaagagttgtggtagcgagttatctagtagtaatagctaagggattaagcagcggtgtagtatcagatagatatagaggtaggaatttgtcgaacgaaccacactcttgtgactcggctcgctgtaacaatgatcttgtagtagaccgttcgtgcaggtttagattggcttgtcttcgtctccctcgtccaccacatatctcatctcagcttcgctggtggagccacgcgataccatccgtgaagcacttccggtacctatccatgccggccggctgcaaggacacgccgacctccatcccgccgatgcagctccggctctccgccaccgccactgcaccggtcctcgccacggacacgatgtccaccttcagtggccggccaaaaccgagtccagctcgtagacacggaacctcggtgagccagccacggacagtatgccatttgcgcttgcctccttgatgcggtccaaccaggcgtccatgctgg

SEQ ID NO: 9068 - DNA, 1289 bp, Setaria italica
  Peptide Sequence Number=SeqID_75042
aacatcattatcttaacaaaatcgcagtgcgttgtataaaaagcaaaaaaataggtcttgtaaaagaccgttcatgcaagctaaggttggccattggcttgttgctctccagcaccagcagacacacatgtcagctctggtggttgtggttgtggagccacgcgatggcgtctgccatgcacttccgaaacctgtccatgtcagccggctgcaaagagacgccgatctccatcccgccggcgctgctccggctctccgcgaccgccattgcgccggtcctcgccacggacacgatgtccaccttcagtggccggccaaaaccgaagtccagctcgtagacacggaacctcggtgagccagccacggacagtatgccatttgcgcttgcctccttgatgcggtccgaccaggcgtccatgctggatgtcccgatgtcgcgcacagcttcgtcaatggcggaggcgaccgcggcgcacgctgtgaagaggcctcctacgcctgccaccgccagctcgctcttgggtgccatcccgaatgctgggccgacgcagttgccgaggtacctttccgggagcggaggcttcatccgcgagcggtggttgacagggaagaggatgcaggtcattgggccctcgccggagccgcagctctctttggctcgctggtagcatgaccagacgaagccgaaggtggcaaccagagaggagcaccgtggcggcgcaacgccgcgcctcgcggcctcgtcggccacgacctccttgatgcgctgcaggtcgtccttggacagagtgaacgtggcgaagagctggtcagcggacattttggcgaactccatctcatcagtgctcggtgcctcttgataaaagacgttgtagaggcccctcgggtccgcgaggagagtccggtcgatgacaggtgggggcggagcttcggtgccgctgcaggcggctgcccaggtgtgcaggaagtgcgttgagttcgagccgtcgcaggcggcgtggtgcacggtcacaccgatggcgaggccgcggcgcgcggacaacagcgtggcctgcaaggcgaacagcccgccgccctccgccaacggcggcaccagcgtcccgatcttcgctacctctcgggggtcgtcggtggtgaggccatcgatgtccgcatcgccgtcggcgcactcggcgacggtgaaggtgacggcgtcacccgggcggtagtacagctcgtagcggtcggacgtgccggggatgaggcggaggcggccggcgagcgggtagaagacgcggaaggccttgtgc

SEQ ID NO: 9069 - DNA, 518 bp, Setaria italica
  Peptide Sequence Number=SeqID_75043
tgtcctaatggcccacaggatgtcatggcgtcaggagaagagaaggaaaataaaaggaactgaagtctatggcatggcatgctatgctgcatcaatggcaatgtacaatgaaccaattacatggctcccttgaggaggggtaataaaatgattcctaatgccagtttctgttgctctcctcgtctgcttcctctgcatcctgaaaacgttggtcattgatctggagctcaactacagcatgagtaatgtcgcggtcatcagtttgacctattgggttgacatctgaaaactctgcatcacttccatctgtcatatcttcatcaccttcatcaccatgaacccagccattctcttcgtcactctcagcattaggatcagggttcaactcagcacagagggagaatgcttcaaagagtccatccaattgaccaggatccgaaggtatgatacgcatctctgtgacttttgagacctctatttctccatttatttcagaatctgattcatcggactcctca

SEQ ID NO: 9070 - DNA, 602 bp, Setaria italica
  Peptide Sequence Number=SeqID_75044
acgccccgatcaccgaggtgctcaaccactcaacaatccccctctcttgatgatcccaatatataaaaagcttatggtacaattgcctctcttgctgatccccatttgtaccatgtcactaagtagaaaactgagtattagtcccggttagaaagttgcaaatctctcgaaaaactatccgggataaagcaatcgggacaaaagggggtgtcttttatcccgggtccctcaaccgggactaaatggttttgcaaaaaatttaaaaaataaataaattcccggggggtcccggggaggcctccccacacgcgcacgtcgcaaatcacaagtcacgcgattttcacgcgaaatatgcaccccttttatcccggttggtattacaaaccaggataaaagggtccgaaggatttagttttgtcccagccacacgtgggggacccttttatcccggttggaaacaccttttatcccgattggtactacaaatcgggataaaaggatccgagggctttagttctttttcagccatccgtgagggacccttttatcccggttggagttttcaatcgggataaaaggccccattttatcctggttgatgt

SEQ ID NO: 9071 - DNA, 268 bp, Setaria italica
  Peptide Sequence Number=SeqID_75045
ccatgcatgtccaactctgagctgaagcagtcttgagccgcaggacggcgccgccgacgtcggtcccgttgcggtccccgggcgtgagctcgatggcggcctcgttcaccgcgaagcacgcgccgctccaggcggccggagccggcgccccgggcgccacggcggcgacgaaggacggcagcaggtcgacggcgctgtggagcgtgttcatcacgggccacgccacctgccgcggcaggatggggagcacgtcccgtgggctgaaggg

SEQ ID NO: 9072 - DNA, 296 bp, Setaria italica
  Peptide Sequence Number=SeqID_75046
ggcgtccgcgtccgcgccggtgcagcaggaggccgtcgcgggggtccctggggctgcgagatcgagtccctggagagcgcggcgtcgctggagcgatggctcatagactcgggcctcccagagcaacgcctggccatccagcgcgtggacgtcggcgagcgcggccttgtcgcgctcaagaacatccgcaagggggagaagctgctcttcgtgccgccttccctcgtcatcaccgccgattcggaatggagccgcccagaggtgggggatgtgatgaagaagaacgcagtgccgga

SEQ ID NO: 9073 - DNA, 1094 bp, Setaria italica
  misc_feature (1007)..(1094): n is a, c, g, or t
  Peptide Sequence Number=SeqID_75047
aatcagactgtcacagcagttttgtggacaaactttctctactgccacgccttgctgagatggagctcttagttgtttcatgcattcgagacaacactgttcttccatgacggattcccgagcctcacaaaactgaagcttaaggaagtgtcgaccttacaggagctagtgataggcaaaagggcgatgccaatgctttccatcttagccatgtatgattgtgacagcttaaggacccttaaggccttgaatggcttggaacacatccaagaagtggcagtctacaatatgccagagattgtcgataatataaagcttgaggatgagaagcttttcggcaagatcaaacgcctgactacccccacgatggtaacagaccgaggagttgttcccggtcatttagtcagaagggcacgcataccgcatgaacaatgcgacgcggtggcttctgaatcatgtttcagcgtcatggagggtgctggtcctggtgtagggaaagcagcagacgacattcaagtacattgaggtcctcgtgtgtggagtggattaggtcatcatcggagtagcatgtttacatatcgatgcagcagaagcaaccacaagttctgtacagaatcaagaggtacaacctgcaggctcttcaaggtttccgtccgcccagaatgtacctgctgcctccttagaaaacctcgactcaccacctgtaaatctgtaacaagctcagaagcaccttcaggtgctccacaaggtactgaaccaggtgagagagaggtgaggcagtccctactgaacaaaggttcacccccaccatgcaatcagtttcttgttggtacggacttttgatgcaccttgctgaaacattttcgatcatcaacgacttccggtacaatgtagtttactattttataattcttcagtgtgcatagatttgttttggtttagcatcaaaaggtggacaaatctttgtagaaatttgttcatgtatacctagcgatcatgtaaccccnnnnnnnnnnnnnnnnnnnnnnnnnnnnnnnnnnnnnnnnnnnnnnnnnnnnnnnnnnnnnnnnnnnnnnnnnnnnnnnnnnnnnnnn

SEQ ID NO: 9074 - DNA, 399 bp, Setaria italica
  Peptide Sequence Number=SeqID_75048
agtaagattgtccggagacgaagacggtgacgtgtcgaggcaatcgtagacgaagttcgatgctgaagtcgatgctgtctaaccatcgggcgagacattcccgggtttgccaggcccgggaacacatccaggacgatggcacgcaccggtgttgccaatactggatgtgcaagggagagtgcacaaccaggcgttgttgtctgagggaccagcagagaaggcctccacagcggtcgcaggcgcagaagaacggcgaggtagaagatgccgatgcagcccgcggttgctagagtagacgaacgaggtggagattagatggcgacactggcgacgaggtggtgctggacgaagcgaggaggtagacccggacgtattcttgtattgtctaaggttcctaaa

SEQ ID NO: 9075 - DNA, 455 bp, Setaria italica
  Peptide Sequence Number=SeqID_75049
gaaggatctagtgatttgtgacgacttccttgattccttgatatgaagtgttgacctcggagatggtattactttgatgcatccttgattgctgttgctgctgctgcataaacttctacaaccatatataggtttgctcatgcatatagtatattattccccggtttccttggcttgctgctattgggagttgacatggcctgcccgcttctcgagtagatggtagcttttcagggtcggagcccgactacgacttcgacaatgatggatgggaagattagggatggtccctcgctcaagttgcctccggagatggtgctcgctataactcatgtttccgctacgtaggtattttatcttttatgattcagtcctgatagacttgtgcctgcatgtgccgaggtgatatactcaatatttatgatattattaccctgttaccactttttaaaaaa

SEQ ID NO: 9076 - DNA, 450 bp, Setaria italica
  Peptide Sequence Number=SeqID_75050
cggtgcgggagaacgcgtcggggctgctggaactgaaggagagctgcgcgaggaggcgggacgccgtggtgggggaggaagggaggagcgaaggcttggaggagaagaggcggtaggcggcgtcggtgtcatgggcgcggaggagcgccaggagggtgccgtcgtcggaggcaccatcctcgtcctggtggtcgccgtccagcgggtgggtgagtggcgcggtggagcgggaggtatttggggacagggcggccggcggatggagcctctggcgctggttgccggaggtggaagaagaagccgtggagcatgagcaagagcaggtgccgccgccggggaaggagggatggggttggaggagctggagcgagtagcgcccgcagcatagcatccctgcagcggttagtggcaggcaatggccgtatggtcggtccgatttggcccgccgga

SEQ ID NO: 9077 - DNA, 423 bp, Setaria italica
  Peptide Sequence Number=SeqID_75051
aaagtaaccggtggaccggtggaatatgcgcattttctctattaaaaataatatctttatcagtgataggctggtgcagatccaccaacaggaaagcaatcaggtagtttatttatttttagtaaagaaaacagcctgtaatttttacttttgcggcatgaaccctcgccatctgcacgggaattgttcaaaaaagctggaaactttatggcgaaaagaaaagagagattccgggattaggccagacaggcggattaagccaggtctagagattctagcccagccagaagcatccaggcgtcccgatttctttcgcgtcaactaatccccagcatccgcggcagatgaaagatgccggggaagcaattcggcgagcacccgtgatcccccggctcgggaaaatctcaccggcacccaataccg

SEQ ID NO: 9078 - DNA, 409 bp, Setaria italica
  Peptide Sequence Number=SeqID_75052
cctggaaaccaagctctgcaagagttttggcatcatcccctcttccatgaccatatgcgaatgttgaacccacctacaaatattcaacaagacaagtaatgaaaggttagcatgcagtggaaacactagtatagagaaatttacacgactaggcaggtagctagccatctgaatgaattaacaaggtaacaagcagcatttttcatgaccgccatgatgcgaacagtaaagtcgctttaactgatgcatgttaagggcctagagttgtgctaatgccattgagatttatgaaaaagattcaatggacacaagatcataatgatacaatccaacccaccagtcttgatgtgaaaggggctccacattttagcattaatgacacaagctcatttcgccacagtactagtaa

SEQ ID NO: 9079 - DNA, 890 bp, Setaria italica
  Peptide Sequence Number=SeqID_75053
ttctgttaccagatcggggcaagtacttgttggctttggaatatcagtcagccctactcagcatggaaccataggcacattacaattggaaaaaaaatcgtacgatgttcatatttgtaaactccaggcaccacagataagtaccatattaacaagcaatcacaccagacgccttgagggttcaaaatgccttgacagtacaagtattacagagaattttggtccgattccctagtgctaacagagattcaccccttgccacccagggcttttgacatcacagcagttacgtccagtgcagtcgttgatttcagcactggcattcgtcaagttcagcatgggcatggtttacattatcgcaacgctcaagtaatcaccaatctggaaaccaagctctgcaagagttttggcatcatcccctcttccatgaccatatgcgaatgttgaacccacctgtcttacaacaaaacgaccattcttgtctgggtacacaaatgcaaaagaaagcctagcgtttcttttccttgctggaagagcaacctctttcacgagatcagtgagctcacggagcgtggcatccttccatgtataaatttgaacttcatcttttggttctttccctctgacagcaaactcttcattttggtgatggccagcaaccctcgtaaagaccctgagcaggagaggacaggtcttctcgcggtcgatgggttcagggcggaggcgcgccatcggcggaggcccccggtgctgcagcggcgggcccggccgcgccggcctcatgggcatgtcgcccatgcccgccatcacacgtcctcaacaccaaggctcgcaggggaactcgccgccgccgccgccgattcgtcgcgggagaggtgggtggggaacgg

SEQ ID NO: 9080 - DNA, 515 bp, Setaria italica
  Peptide Sequence Number=SeqID_75054
ttaaagtctgcagcttactccatcaggctttagccttttgtgtatgttatttaaaattctatttttggaaattatctcaaagcttacatgagtttgagatgttgcagatatgtagtattcgttgttcacctattgatgttatttttataataatgattcttttatttcattttcttttgtcaggtcatcttgttctcggatatccttactccacttcctgggatgaacatacctttcgacatcgtgaaaggaaaaggtccggtgatttatgatcccttgagaacagcagctgctgtgaatgcagttagagaatttgttcctgaggagtgggtcccttatgtggggcaggctctaaatttgttgcgacaagaggttagtatatgcttttcagcacccaaacatcaaattgaaaatatgtgaccaacaggtcattcaaaaggcgtggtagtgtggaagtaggcatttagattcttatagtcaactcacaactttcttgtttcaaatgttgatgtcga

SEQ ID NO: 9081 - DNA, 469 bp, Setaria italica
  Peptide Sequence Number=SeqID_75055
gcaaatcatatcgtctaaattattgagatttcatgctatcatatcgtctaagtttgtcacaatatccattcctttttttgtgatcatctggggtcttgtacaaaatttggtcttgacaattgctttatgttcttgtagattctgcacaatttgctacaaaaattcacaacatcaatggctaactacattaaataccaagcggacaatggggcacaggctgtccaaatttttgattcatgggctaccgaactcagcccaactgattttgaggagtttagcctgccttatctaaagcagatcgtggatagtgtcagggaaacgcatcctgatttgcccttgatactatatgcaagtgggtctgggggcttgctggagaggcttcctttgaccggtgttgacgttgtcagcttggactggcagtcgacatggctgagggcagaaaaagattgggatctaacatagcagttca

SEQ ID NO: 9082 - DNA, 1650 bp, Setaria italica
  Peptide Sequence Number=SeqID_75056
gttagtcggtcttctagtcctagcctgcctgcctgctaagccaagtcgtcgccagttcgccacccaccgccacgtctccccactcctttccccgcgagcgcggcggagctcgacgaaccccgtcccgaatggcgaccgcgtgcccgccgctctcgctgccgtccacctccctcctccgcggcggcgggtccgcccgcgccgggcccaggcgccggcagctctccgccgtccgctgcagcgccgtcggagaggcagtggcggaggaggcttcggtcgtgacggcggaggagcctctgctggtcagcgctattagagggaagaaggtcgagaggccgcccgtctggctcatgaggcaggccgggaggtacatgaagagctatcaattgctttgtgagcgatatccaaatttccgtgaaagatcagaaaatgtcgacctagttgttgagatctctctgcaaccatggaaggttttcaagcctgatggagtcatcttgttctcggatatccttactccacttcctgggatgaacatacctttcgacatcgtgaaaggaaaaggtccggtgatttatgatcccttgagaacagcagctgctgtgaatgcagttagagaatttgttcctgaggagtgggtcccttatgtggggcaggctctaaatttgttgcgacaagaggttaaaaatgaagctgcagttctaggttttgttggagctccctttaccttggcatcttactgtgtggaaggaggttcatcaaagaactttacaatgattaagaaattagccttctcagaaccaacgattctgcacaatttgctacaaaaattcacaacatcaatggctaactacattaaataccaagcggacaatggggcacaggctgtccaaatttttgattcatgggctaccgaactcagcccaactgattttgaggagtttagcctgccttatctaaagcagatcgtggatagtgtcagggaaacgcatcctgatttgcccttgatactatatgcaagtgggtctgggggcttgctggagaggcttcctttgaccggtgttgacgttgtcagcttggactggacagtcgacatggctgagggcagaaaaagattgggatctaacatagcagttcaggggaatgtggaccctggtgttctttttggatcgaaagagttcattagtaagcggatctatgacactgtgcagaaggctggtaatgttggacatgtattgaaccttggtcatggcatcaaggttggaactccagaggagaatgttgctcacttctttgaggttgcaaaaggaatcagatactaaaggaccttggttgttgcctttctccccatcagcagaagtttgtagaatcgctggttgaggatagatgcagaaagccatgtctagcatagagtacttgaagaacacatttttgtgattgattttgttgtcgcatttcaagttcctatttcagagtaatattgtaagagaatttgagctaaggcgtaatgaagtgcctacttttgtttataccactataatagcagtatagttatgtagtaacagtccaatcttatctgtcccaatcaagattattgattacatgttcccatgatagaaataagtctttaacccaaataagaaataaagaaaaaaa

SEQ ID NO: 9083 - DNA, 381 bp, Setaria italica
  Peptide Sequence Number=SeqID_75057
aggagcgagagggcggagccgacggcgaggggagcagccagcggcggtcgacggcggcgtggagggactgggagaggaggggcttcatcgccggcgctggcggtggaggaggaggagaagcgggaggtcaaggaggagggggcggacggggagggcaaacagatcaaggggaaggtcgaggggggtctgaaggaggaggacggcggcagcaaaaaggtgtcggtgcgggtgcgcgcggccgacatgcccctgccgctgcagcgccgcgccatccgcctcgcctacgaggccatcgccgctatgccgcgcctcgacagcaagcgcctcgcgctcgcgctcaagaaggaatttgacacagcatatgtggttccttggctttgt

SEQ ID NO: 9084 - DNA, 263 bp, Setaria italica
  Peptide Sequence Number=SeqID_75058
ggaggcggagggcctggtgcccggtgctgcatgtcagatcgtgactcccgaggagcaggaggagggtacgggcacggccaggtcgcgaagccgctccaatggccgcagctgaggaaaaggcgaaggtcgcgtcggcacccggcggcggcaccgtgatggcgggggacgtcgcgccgcccaacaccgcgaagggctcgaccaaagggattccaatcatggcgaaggcacagagaagccacccgttggacccattgtctgctgct

SEQ ID NO: 9085 - DNA, 523 bp, Setaria italica
  Peptide Sequence Number=SeqID_75059
cgccctgtctatgtcaagtgtagtgatatgtaaattaagaacttggcactgaaatataagtgatttgggcgttccttattggtgaaccacaaacttcacacccacatcatgtaaccaggaagtacctcgaataaaacatcacactcaaaccaacagcacacacagtcactcatacaccgcaaatcaccacgaccacgatatagtttacaatgacacactcgaaccaggaaccaacaacaactgcagctccatcaaagcagccatcgcaaccctcactcagacatggctcacagcttgacaccaggaacatgaacccactccagctgcaccacaatcaggccattgtcgaccttcttcagcttcagaatcatgtcctggacgaccttgccatccttccattgaacatgactctctaccgcctaaggttagttttacgtcctaaccggtattagtatttgttctttgtatttctttgtttcctatttagttggtctatttggttctttcttagttattttcttaa

SEQ ID NO: 9086 - DNA, 233 bp, Setaria italica
  Peptide Sequence Number=SeqID_75060
cgccaaccggatagattgtcttgattcttgttccattagtggcatggctcagattcaactttgcagcatcgtatatgtcagttatgttgatctcagcaacacccatgctgtcatctgctgtgaatttgtcttcatcaaaaacttcctgcatggtattagcaaattcagaaattaaaaaaaatcctggtcattggatagttagaaatgtttgtggtcaacttggttcttatctg

SEQ ID NO: 9087 - DNA, 1289 bp, Setaria italica
  misc_feature (1)..(70): n is a, c, g, or t
  Peptide Sequence Number=SeqID_75061
nnnnnnnnnnnnnnnnnnnnnnnnnnnnnnnnnnnnnnnnnnnnnnnnnnnnnnnnnnnnnnnnnnnnnntttttttttttttttaggataaaatcaataaacgcccaaatcacttatatttcagtgccaagttcttaatttacatatcactacacttgacatagacagggcgttccttattggtgaaccacaaacttcacacccacatcatgtaaccaggaagtacctcgaataaaacatcacactcaaaccaacagcacacacagtcactcatacaccgcaaatcaccacgaccacgatatagtttacaatgacacactcgaaccaggaaccaacaacaactgcagctccatcaaagcagccatcgcaaccctcactcagacatggctcacagcttgacaccaggaacatgaacccactccagctgcaccacaatcaggccattgtcgaccttcttcagcttcagaatcatgtcctggacgaccttgccatccttccattgaacatgactctcaccgccaaggtagtttacgccaaccggatagattgtcttgattcttgttccattagtggcatggctcagattcaactttgcagcatcgtatatgtcagttatgttgatctcagcaacacccatgctgtcatctgctgtgaatttgtcttcatcaaaaacttcaaggtgcactggctttgtaggatgtgttactgagagctgcagcacttcgttccagactggattgggattcttcttctgaacactagtcttcaccttctggccgccgtactggaggacgacgtaggggtcgctggtgtgggtgagcgggtcgcagatggccaggttgttgccccgcaccacgcggacgttgagcttcccgatcacctcctccttggacgccgacgccgccatcccgctcggttcggtggtgagtgggggagctgaggaatggggacaagtcaagtcgatgcggggcggagactccgacgctggggagggggaggaggtgttttaggttgtttcttcctgcatggtattagcaaattcaaagaattaaaaaaaatacctggtcattggatagttagaaatgtttgtggtcaacttggttcttatctgcagtgataccagtggatgtatgacagaaacggttcatatcatccatattttttagaaaggggaaattctgttctcgaaaagttttacattaataatcgttaatttcaaaaactaaatggtctgttgcacatatttccacaatatgtttaatttcggagagcaaatgtgttggaccaa

SEQ ID NO: 9088 - DNA, 550 bp, Setaria italica
  Peptide Sequence Number=SeqID_75062
acgatctggggccgaatgacagcatacacaggtagggcaacctgttcatgaagtgagtctccatggcaagctgaaaagagatgtaccgtagcaagattcagaaattagaaggcccctaaaggccagaaatttgctgtcatctcgcgttccagtggacccagtcttgcctgaacttccagaatcgtaatggctgggctgccatttcttctagttcagtgtatgggctgtatgctggcctgctgcaatcattctacacataggcttttctttttgttttgtatttttgcagttcttttttgcagtttgacaaaaggcaggatatgcatcttgtttgtttgcatttttttgacaaaaaggacagaaactttaccctttgaatgtcattgattagcccatgcatggtctgagcatttctgggctgggaggacgcgtcgtgctgggcttatgaaaagcctaaatcctttttaggactgaatattcacccaggcccatccagtataccagcgagtttgccaaattgggatggggcgaccagattttcattgggctg

SEQ ID NO: 9089 - DNA, 1106 bp, Setaria italica
  Peptide Sequence Number=SeqID_75063
gccacgtccccactccccctcccacccaccgccgccgccgcctcctcatctacctcgttgccgccccactcctctacttcgccatcctgacaccagccctcgccgccgccgcggcacctccagcaccaccagcagaaggggattcgggcggagaaggcggcatcatcaggacaaggaccaggaccgccgtcgcctggcccgccatggcatggccatcaaaatgtacatggctgcccttaccaaacaatgcgaggtgtcattcatatactcttgtttccagataccacaagatttggaaggacacaaagggagttgtttctgcaacagaagttctgaagaaagaaccagttagcgatgtgattgctttaaaggattctatgaagtacttcgatgcaaatttcttcagcgattcaaaactacgtgagatggaagatggtgcaaaagaatttaatgtacctgcattcagagaaaatcggaaattggtcgccttggagaatggtgggttacataacccttctgttctactcttcaaatcatcatggagtggcgacagcattataagtgagactagaacttttaactaccctggtgcgcctgcagtacatcgtccaagtaatgatgaagatattgcctttatgtcggtaattgagctcggggagcttgttaggacaaagcaaataacatcgcgtgaacttacgaatatatttctgaggagattaaagaggtacaatcctgttcttgaatctgttgttacttatactgaagatttagcatacaaacaagcaaaagaggcagatgacttgctggcacaaggaaaatatcttggtcctttgcatggtattccatatggcctgaaagatataattgcagtaccacactacaagaccacttggggctcaaggacttttaagaaccaagttctcgatacggaagcatttgtgtacaaaaggttttttcgtttttcaggttatgcatcatgtttcaagctatcatgtgagatcagtgcaaattacctttcatgtctgccattgtccttcagacttaagtcagctggagccgtccttgtagccaagcttgttacaggctcgctcgcctatgatgatata

SEQ ID NO: 9090 - DNA, 1561 bp, Setaria italica
  Peptide Sequence Number=SeqID_75064
ttgtttccttaagtttaatttgttattgtaagtattatttgtccttttattgttcggttaatttgtagtcttcggggtagtctttgttaggacaaagcaaataacatcgcgtgaacttacgaatatatttctgaggagattaaagaggtacaatcctgttcttgaatctgttgttacttatactgaagatttagcatacaaacaagcaaaagaggcagatgacttgctggcacaaggaaaatatcttggtcctttgcatggtattccatatggcctgaaagatataattgcagtaccacactacaagaccacttggggctcaaggacttttaagaaccaagttctcgatacggaagcatttgtgtacaaaagacttaagtcagctggagccgtccttgtagccaagcttgttacaggctcgctcgcctatgatgatatatggtttggcgggaggacacgaaatccctggaacattgaggaattttctactggttcatcagcaggtccagcggctagcacctctgcaggaatggttccatttgcaattggttcagaaactgcaggatccataacataccctgctgctagatgtggagtaacagcattgcgcccaacatttggaacagttgcacggactgacgtcatgagcatatctgagagtttggataagcttggtcctttctgcaggagcgcagtagattgtgctattgtgctagacgcaattcgtggaaaggatgccggtgatccttcatctcgtgaggttgctttgggtgatccatttcatgtcgacatcacaaaactcaccgttggctatcttgatgacgctgaaatggaggttgttgatgttctttcctctaaaggtgtcaagctggtccctttcaagttaaactacactgtagaatcagttcagtccatcctgaacataacgatggatgtcgatatgcttgcgcattttgacaactggcagcgtgaaggacatgacgatgactatgaggcgcaagaccaatggccagtagagcttcgtcgtgcacggttgatcccagcagttgactatatacaggcgcagcgagcacggggcaagctgatccacgaagtcagagatagcttcactgttgacgcgttcatcggcaacgtgaccgactgggagcgcgtctgtctcggaaaccttgttggtatgccggtagtcgtggtgccaacgggcttgaagaccattgaggacccaccgaaaggtggcacaaggagaagaaccaccgtgacgacaggcatatatgctccccctgaccatgaccacattgctttggcactggcgatggcttaccagtccgccaccggtcacaacaaacagcggccgccaatcgacgatctggggccgaatgacagcatacacaggtagggcaacctgttcatgaagtgagtctccatggcaagctgaaaagagatgtaccgtagcaagattcagaaaattagaaggcccctaaaaggccagaaatttgctgtcatctcgcgttccagtggaccagtcctaggttcgttctttagtttcgtttagtttctttagttt

SEQ ID NO: 9091 - DNA, 1492 bp, Setaria italica
  Peptide Sequence Number=SeqID_75065
caccatcaagcaacaacagagaaggagcgacgagtccaggacaatgccctgtgactgtgatgatccattcatgggaaaaagagaacactagaactcggaaataatttccgagttctagtgttcaacctaggtacagacccaatataccctcccaaagttgtatgtgaacagtgtatgcacaggcgcatagccgatgggatcttcacttagaacgctggccaatactaggacggtgcaaagaatggctcactgctcgtcgatgccaatacagtaaaatcagaccaatggacatttcatagcttggatgtggcgagcttgatgagatccttcctcagtatcttgccggacgcgttcttggggatttctgccacaaacgccacctttctaaccttcttataaggcgctacctgtttcgccacaaactccatgatctcgcgttctgacaaattgctccccttcttcctaactacgtaggccatagggaactggccgacctcccgatcaggaaacggtataacagcgacatcagcaatttctggatgtgttagcaaaagagcttccaactctgccggaggcacctgataccctttgtatttgatcaactccttcagacgatcaactacgaagagatacccatcctcgtctatgtagcagagatccccagtcttgagccatccgtcaggtgtcaccgttgactgtgttgcctctgggttcttgaagtaccctttcatgacgtatggtccccggatccagagttcgccggtgcggttcaccggcagcgcctcaccggtctcggggtccacgatcttggcctcggtgttgggcgacagcagcccagccgtgccgtaccgtcggctctcctctgcagagtccgtggacgcgccgatggccgtgctctccgtgagcccgtacccctgcaggatctccacctgcgggtacttctccctgaatccctcgatgagctccttgctgagcggcgctccgccggagagcaccttgcgcaactggccgagcggcagcggcttggggtgcgccaccatggcgacgaggatgggcggcacgagcggcaggtaggtgaccccgtactcgttgatggcgcgcagcatctcggggagctcgtacttggatagcacgacgatggtggcgccgcagccgagcagccccgtggcgaaggcgacgagtccgtagacgtggaacatgggcacggtgcagaggaaggcctcggtcctgtcggccccctcgaggcggaatcgcgtcatgatgatctgcaccatggagatgaggctccggtgcgtggcgacgacgcccttgctgggccccgtggtgcccgaggagtaaagcagcgtggccgggtcgtcctgcgtgacgcggtccctccggcgcgcggggtcgggcggcgtggcggagatctcctcaatggtggcgacgacggcggcggggtcggaggggagacgctcgggctcgaggagcacgacccggaggccgtcgccgg

SEQ ID NO: 9092 - DNA, 442 bp, Setaria italica
  Peptide Sequence Number=SeqID_75066
gtcgtggccgagggaggaggaggcggaggggagggggagcaggtggcggaggaggagcaggtgagggagggcggagggggcgagggcggggacgagaaggatgcggcggtggtgtcgtgctcgatctgcctcgacgcagtggtcgccggcggcgaggagaggtccaccgcgaggttgcagtgcggccacgaattccacctcgattgcattggttcagcatttaatgccaaaggaattatgcaatgccccaattgtcgcaaaactgagatggggaattggctttatgcaaatggtccgcgatcatcacaggatgcaaacaatgatgaatggggctatgatgaaggcccttatgatgtcgctcaatcagatatggctacctttgtgccacttcgcatccagtggtgtcctattggccgcttacctgcgttgtttgaagaattag

SEQ ID NO: 9093 - DNA, 477 bp, Setaria italica
  Peptide Sequence Number=SeqID_75067
tttgagtaatgacggtaagacactgatactactggtatccagaactggaaattagggttccaggcatgccatggtttccttcaaattatttttagatgatagcattgtttcatcttggtgcttcatcagttccatcagctgtataacaaagtagtcatgaacacacatggtttagtatgcctgctttcatatacaacagtcttagatatcttgatggccagacatattcttggtttgttgcaggtctggaacacctaggatcccaagtgttcctccaatggcaccacaattcgtaagagcacatggcaacataaatgatcaactccagcagagttctagcttatttgctgggtcacagcgatcaggaggcatgcatccattgggagctggcgggtctgctgtggcacctccggataacacctcttttgcctgttcccaccggcttcatcgggccctagtacaatggagactgaggat

SEQ ID NO: 9094 - DNA, 451 bp, Setaria italica
  misc_feature (434)..(451): n is a, c, g, or t
  Peptide Sequence Number=SeqID_75068
aacccgactaggtagtaccgtagaaataaatagaaaggtaacctggtggagctcttcacaacaacagcaccctcatggcccaccagagcctgcatctgcctcaaggaggctgcctgggcagtggattggtggcgcttctaggttgccaccacaggaaaatagatcgatagacaactcgccattccgttcaatgcacatccctcggatgtaactcagcgatggcaaggcctaagttaatagtacagacctggaaaccctgttggttgtaagaagcagaaacactgttgtaagaaagtccggtcggatggtaaaccttgagataatatgtaggatgctgaagaaaatgacccaaggtgaaaacattttcgacttgggtttatgcgatttgatgaagtacatatttcccagtcaggttgaggctttttcaaaaaaannnnnnnnnnnnnnnnnn

SEQ ID NO: 9095 - DNA, 478 bp, Setaria italica
  Peptide Sequence Number=SeqID_75069
tgggggtaatgagggttgcaggggttgataatgatagccaacaacgaggatctctcccctcattttatggaagcgggtaagatcgttttcatttctcatcctgttattagctaactgtgttttccataattaaaaatagcacgccacctgtgtttgcagaaaatgcataaaattgcacatttgacgaccttcaatgctttatgatgttctggctgacatgacctagttctgtaaaattaccttcaccaattaggcagaaatgtggattcatggttcttgtgagttgctatgttttgcacacgtgcactgtggattatgaaatatgtgcaggccttttgctgatttgtgggagtaatttaggtacgattgcattgttaatctgttcttagagaaatgtctagaaaaatgatgattgtgaatgccgttcatgggcagaatgcacaagacagcaattgttacaaattaaggcatgaggatt

SEQ ID NO: 9096 - DNA, 1479 bp, Setaria italica
  Peptide Sequence Number=SeqID_75070
ttacggttaacctaattactagtaattggtccgtattctagttgtctagtactgatgtcgctcatcagatatggctacctttgtgccacttcgcatccagtggtgtcctattggccgcttacctgcgttgtttgaagaattagaggccgcagcgccagctacttttaatgatttcatgggtccaaacttcaactctgagcatgtggctgtacctgtacctggcacagctcatccaggtccatatctcgcttacttacaacccgtgccgccaccagcaccatcaagctcccatgtagctgagagaacagtggatggcacggcatatcatgatcactggaaccctctggccggaccatcagatggccgatcagtgcagacagtacatcccattgatttccatcataacccgtgggcacacatgccgcactcctatcctcaatccaacaacaataatggtgtagctgagcagccagtactccctgtgggggtaatgagggttgcaggggttgataatgatagccaacaacgaggatctctcccctcattttatggaagcgggtctggaacacctaggatcccaagtgttcctccaatggcaccacaattcgtaagagcacatggcaacataaatgatcaactccagcagagttctagcttatttgctgggtcacagcgatcaggaggcatgcatccattgggagctggcgggtctgctgtggcacctccggataacacctctttttgcctgttcccaccggcttcatcgggccctagtacaatggagactgaggatggcagaggaaaccagttctacgcctgggagagggaccgcctcgctccttacccgctggtgtccgtgaataatgaaggtacctggtggagctcttcacaacaacagcaccctcatggcccaccagagcctgcatctgcctcaaggaggctgcctgggcagtggattggtggcgcttctaggttgccaccacaggaaaatagatcgatagacaactcgccattccgttcaatgcacatccctcggatgtaactcagcgatggcaaggcctaagttaatagtacagacctggaaaccctgttggttgtaagaagcagaaacactgttgtaagaaagtccggtcggatggtaaaccttgagataatatgtaggatgctgaagtgaaggtgaaaacgacgcgatgaagtaatcgttttcatcctcgcatcctgttattagctaactgtgttttccataattaaaaatagcacgccacctgtgtttgcagaaaatgcataaaattgcacatttgacgaccttcaatgctttatgatgttctggctgacatgacctagttctgtaaaattaccttcaccaattaggcagaaatgtggattcatggttcttgtgagttgctatgttttgcacacgtgcactgtggattatgaaatatgtgcaggccttttgctgatttgtgggagtaatttagg

SEQ ID NO: 9097 - DNA, 457 bp, Setaria italica
  Peptide Sequence Number=SeqID_75071
cgaggggcgtatctgcaaaaagactcaaagaagctgatagccacggcggatggcctctggccgattcaaatcgatggcggtccggtggggtagggcaaggatgaaaaggtgcaggaggtatgggaggtcatggttgactcacaaggatgctcactggcaatggggaggcagtgcagcggccagaatttcgcccggcggtggatggcgtagaagctcggcggcagctcgggtcttcatgtgtgcgcggtgctccggtggggcattggcaacgaggactggtggcgcagctgcacctcgacgaggagtgatggcttgctccggcgggcgtccctagcaatgaatcgggcgaacaaggccgccggcgctccgcttctaggcgcttcgcttgacggcggcggcgcggcacagaggtgagggtgttagggttgtaggtcggtctaggggcgtgcgggggtcg

SEQ ID NO: 9098 - DNA, 394 bp, Setaria italica
  Peptide Sequence Number=SeqID_75072
tttttttaatcaaaccaagccatcttggttggagttgaggcaacgttcattccaggaatgagacacagagagaagagcatcgtctggttctgatgtatttacaagaagttgtggcagatttgagctttggacgtacaatgatacagtacacggcctgtgaaggacgccacctgccgtgcggccttcaaatccatcgccggcgggcacggatctcatcattcattagagaataacaacagctgcagaggaggccgtgcggcggcgccgggtgaggaggagatcgagctggggattactattattcaggtggcgtcgacggcggcggcggccttgaagaggaggaaggagaggcgctcgagggagaaggtagatgaaggtgccgctggtgtgggtg

SEQ ID NO: 9099 - DNA, 246 bp, Setaria italica
  Peptide Sequence Number=SeqID_75073
ccagcagcttgagggggttgaggtgcaaatgcaggctgatgtggacaagctggtcaatgtaggcaagtctaaaaggaaacgcctagaatcaacatttgaagagcaacaagaaaaattaaggattctccatgagaagttcaaggaggaggtcaacaaacagctgctggattgcaggacttctcttgaggattttgaatcctaccatgcagaacttaagggagtagctgacaagcaaaaatcatccca

SEQ ID NO: 9100 - DNA, 301 bp, Setaria italica
  Peptide Sequence Number=SeqID_75074
gaacagggcaggaattctcctcattagctgaaacctgggcaagattgataacctcgatgacacaagaggcccataaatccacacctgcattgaagaaaactcttgtattggaggagaaaagcaatgacatacagtcaaaaactcgttcgaagagctcaatagattcattgtcagcacatgacatgttgctatcaactctgctcaaaccatgccttgcaacacgactgagtgatttaagtaggttcagagagattgaaatggatggcttcttttcaatacaaactctcaaaattacccagca

SEQ ID NO: 9101 - DNA, 353 bp, Setaria italica
  Peptide Sequence Number=SeqID_75075
tagcagatattcgaggcatgccatgtttccaatcctgcttggcagtattgtagaccagtcagtgtataggaacatcaagtttcttagctgaacaacagtcggtggcaagctagaaatttggttacgcgttacgtccaaagtttgtagaaatgagaggtttcctattttctcggggagttgagcaatacttgtgccacgtagtcccaggtacctcaagtgaaataaattcccaagatgcttaaggctcacttgttgcaagctctttgtagtccaagtcatagaatgatcttcattggcactttgaagggacaacctccggattgtatttgatgatgtgttttccatatcattta

SEQ ID NO: 9102 - DNA, 429 bp, Setaria italica
  Peptide Sequence Number=SeqID_75076
acacgatagtcccgagcaccttctggtgtagacttggataaaactggagtttcaatctaccttaacatgtaactttagacccgaaataatagaaggttttaaagttaagtagtaaaaaaatagtagaaattgtaatgctattatagtcatagactcatggtagttgagatgtcctagcaactagcggtgcattaaatttagtgattcattgttaaaagatacaagcaatagcagactttaaagatgatgctaccataagaggctgaaatattagagccctgatttaagattgaccatctagcactaaattactaagtgaaaataacaggtatatgacaagaagtaggacatattgtggtaattcaagtaaaatcaatgtgtaataatagattaatcggtatacctcagcaaatcatgttcatcctccaa

SEQ ID NO: 9103 - DNA, 394 bp, Setaria italica
  Peptide Sequence Number=SeqID_75077
gactcacgatggcctggcatcaccatttgttgttccttcagctgcttagcaacatccttcgctgacgaaccagaaacttcaatccatgtctttgagaagagagcacaagcttgatggtgcagtaacatagtaagcaagaccaccaacaggaacagaatggccagagtactcagattccttccatttcccaagaaggttaacaaggaaatttccactgtatttcctgtagagaagctgggatatgaaatagaggttggtaatcagagcagagtgcagaatgataggcatgttggaagtgtagaacagcttgattgggtatgagccttgttgaccacgagcattctttgatctcactggagcacaacacggaagcctggagtagataacaatgagg

SEQ ID NO: 9104 - DNA, 622 bp, Setaria italica
  misc_feature (36)..(36): n is a, c, g, or t
  Peptide Sequence Number=SeqID_75078
tctcaaagtactggtatatgatggtgacagcaagcngaataccagttcctgagccaattgcacccatgaaatcagctagaacagtcaatgcaccaatgcatactccgccaaatgcagcagcagtggggatgtatctgttcagttccttctgcaggttcgactcacgatggcctggcatcaccatttgttgttccttcagctgcttagcaacatccttcgctgacgaaccagaaacttcattccatgcactgttctatgtggtcttcatgctgtcagcttgtgctctcttctcaagacatggattgaagttctggttcgtcagcgaaggatgttgcaagcagctgaaggaacaacaaatggtgatgccaggccatcgtgagtcgaacctgcagaaggaactgaacagatacatcccactgctgctgcatttggcggagtatgcattggtgcattgactgttctagctgatttcatgggtgcaattggctcaggaactggtattctgcttgctgtcaccatcatataccagtactttgagacattcgagaaggaaagggcaaccgagcttggtttttttggtttctaatctgcattagctgcgggagttggttgttatgggtat

SEQ ID NO: 9105 - DNA, 442 bp, Setaria italica
  Peptide Sequence Number=SeqID_75079
ttctcgaatgtctcaaagtactggtatatgatggtgacagcaagcagaataccagttcctgagccaattgcacccatgaaatcagctagaacagtcaatgcaccaatgcatactccgccaaatgcagcagcagtggggatgtatctgttcagttccttctgcaggttcgactcacgatggcctggcatcaccatttgttgttccttcagctgcttagcaacatccttcgctgacgaaccagaaacttcaatccatgtctttgagaagagagcacaagctgacagcatgaagaccacatagaacagtgcatggaatggatttgccagaacatcagccaagcttgatggtgcagtaacatagtaagcaagaccaccaacaggaaggaatctgagtactctggccattctgttcctgtagagaagtcttgggttatttattgtta

SEQ ID NO: 9106 - DNA, 1608 bp, Setaria italica
  Peptide Sequence Number=SeqID_75080
tttttttttcttaaagacgcttagtaaaatcaatgagcgagaatcgttgcaatcaatgtgcttacattacatttgcaatctacatagcatctagaaatctggaaaagaaataagagaggaaacacaaggtggccataagaacatgctctgttcaaaagtaactgaattgatcgcaaaacatccgattgtcaaggcatgaggcagaccacaggggactgatggagccatggaggacggatgagcatgcctacttagacaatgcacatgccaccacacccagctgaaaacacacgcagattctgctacatgaacatcctatccaagaaggcaacctaaacagaatgtagcctcaagttacagccataaccgctggccaagcagtactgcgacttacaagattgatcaaaaaccaaagaaaccgagctccgtcgccctttccttctcaaaggtctcaaagtattggtatatgattgtcacggcgaggagtataccagttcctgaaccgatcgcacccatgaaatcagctaggacagtcaatgcaccaatgcatactccaccaaatgcagcagcagttgggatatatcggttcagttccttctgcaagttggactcacggtggcctggcatcaccatttgttgttccttgagctgcttagcaacatcctttgctgatgaaccagaaacttcaatccatgtctttgagaacagtgcacaagctgacagcatgaagaccacataaaacagtgcatggaatggatttgcaatgacatcagccaaacttgatggggcagtgacatagtaagcaagaccaccaacaggaacagaatgcccagagtactcagactccttccatttcccaagaaggttaacaaggaaattcccgctgtacttcctgtagagaagctgggatatgaaatagaggttggtaatcagtgcagagtgcagaataatgggcatgtttgaagtgtagaacagcttaattggatacgagccttgctgcccacgagcattctttgatctcactggaagcacaacacggaagccttggaaatagataactatgaggaagactaagacggtagcaagcaaattggtcacatttggaagattctggcggtagaaagcttcacgaagagcacggactttatcagttctcgtaatcaacagatggaacaatgcaatgacagccccttcaaattcagcaccacggccactgttgatggttgtggggctaaacgccttccagatgatattctcacagatattagtagcaatgaacagagagataccagaacccaaaccatagcctttctgtaggagttcatctagacagattgtactaatgatgccagcaaagaaaagctgaagtataatgagaatagcattcccagttccaagttggctcacactgccatacattccagagagaacatatgccacagcttctccaatagcaatcaggataccaagcaacttctgtgttgtgcttccagtgagatcaaagaatgctcgtggtcaacaaggctcatacccaatcaagctgttctacacttccaacatgcctatcattctggactctgctctgattaccaacctgtatttcctgta

SEQ ID NO: 9107 - DNA, 244 bp, Setaria italica
  Peptide Sequence Number=SeqID_75081
ttctcatcacccgtgtagctagagaacgagaggaggacacgccggcagagagaagaggtttgcattgagagagctagaaattagaaagagttggcgcctagagcctagagagagagagaatggagaggaggacggtggtgtacgatgctgaatccggcgacgaccatgagaggcaagggacggtgtggacggcgacgtcgcacatcgttgcggcggtggtgggctccggcgtgctggcgctggc

SEQ ID NO: 9108 - DNA, 639 bp, Setaria italica
  misc_feature (632)..(632): n is a, c, g, or t
  Peptide Sequence Number=SeqID_75082
agagttggcgcctagagcctagagagagagagaatggagaggaggacggtggtgtacgatgctgaatccggcgacgaccatgagaggcattcatcgatcggtttgctcattcactggatcgtcggccatggacacacagggacggtgtggacggcgacgtcgcacatcgttgcggcggtggtgggctccggcgtgctggcgctggcgtggacggtggcgcagctggggtgggtggtgggtcccctcgtcctcctgggcttctcctgcgtcacctactacacgtccgcgctgcttgccgactgctaccggtaccctgaccccgtcgacggcgccgtgaaccgcgagtacatcgacgccgtccgctgctacctcggccgcaagaacgtggtgctgtgcgggtgcgcccagtacgtcaacctctggggaaccctcgtcggctacaccatcaccgcaagcacaagcatgatagcggtgaagcgcgtgaactgcttccaccgtgatggcttcggcgccggcgactgcaacccgtcggggagcacctacatggtggtgttcggcctcttccagctccttctctcgcagcctccccagcctccacaacatcgcctggctctccgtcgtccccgtcgccncctcctc

SEQ ID NO: 9109 - DNA, 809 bp, Setaria italica
  Peptide Sequence Number=SeqID_75083
gcaactctgatgccgttacctgagttatgcgcatcggtgaagcttcacagccaacaactgttttatgcagttacaaatctcaaagatctgagtcaatagtaaactgctcagattttctctctatccatctctctcttaatatcttatcatccgttccaatgctcatcttggtccataagtagtgaccattgaccagagagattgttttggaatgggcagttgtaacttgtaagtcagtaagtcacagtaacattctaaagccactatatcactgcctcgtcataccggaatcaatattgtgtcgataccgaattagaatagtccatctcatggaagtaactgctaaccactgagcaagtagcattaaccattatcccaagcaatggaagttcataggtatcaggaagatagccaaaatctttcagtagactcgtcaggttatccagtactgcatatatcgattctgcctgtgggtgctctgtacctcttgcaatgaacgtatgaacctccatcatcacctcaatccaactataacctggttccttcatcatcccagcataatccatccccaatcttagcttctgcacatcagcccatagccctttggaggcataaatatttgacagtaatacataaggtccactgtctaacggatctaccaagagtgccatctcagcagcatacctcccaatttcaacgttaccaaagagacggcaggcactcagcaagctcctccaaacagctgcagctggtttgattggcatcctttcaataaactccttagcagaatgcaatttacctgaccggct

SEQ ID NO: 9110 - DNA, 319 bp, Setaria italica
  Peptide Sequence Number=SeqID_75084
caatgatgctgggtgctgtctcaatagatattcctgttaaccggtgcagaatactcaaggcacacatgcatgcacagaaaagatcctattagttggacccaaaagggtagtcattggctagcaaagtggataaaggacatctagcaccagaaagtaggagaagttaatgaaagaacaggctggatgcataaagatcgcttacaatagcatgtggcccataagctgccactgcaccaccatagtatggatcggcatatgggtatgatatagcctgaaaatgtaagcatctcgtgtaactcacatgattgcctatcttgag

SEQ ID NO: 9111 - DNA, 659 bp, Setaria italica
  Peptide Sequence Number=SeqID_75085
cacggagctgtctccttcggagaattgcatggtattgctttgagtttacataaatgggctcttcagcagctggttcgattggtaatggcacacgagaggacggcaccatgcccacatgctgatcgtgcataatagcatgtggcccataagctgccactgcaccaccatagtatggatcggcatatgggtatgatatagcctgaaaatgtaagcatctcgtgtaactcacatgattgcctatctgagaactggcaaacagttggaacttaaaattagtcaaggactgcgacaattggaacttacaaaggactgagtacggtcaggttttggatatgcataagctgtttctggattgccaagagataaagctgacatcatcttattttcatcactcttcgagtaaccatcatgattacctgattgatcattatgctcgttaaggcttccttcgctcattccagacacttcttgatgactcccgctagttgattgggtagctggggagtcgtaatcaggcatttgatgaccaaattgaatcattatcgtgccattttctgtgagatgaggagggagcatgttccccttccggcagcccggcgcccttgctgcctctttcccaccttgcttcgcctccctgcaaggtctcctctctctctctc

SEQ ID NO: 9112 - DNA, 449 bp, Setaria italica
  Peptide Sequence Number=SeqID_75086
ctagtattacctggcatgcttgagtctttgggggtctggactccgtggagagcggagatgatgcaggcgcggcgcgaatgccagccagtccgatggtgaaactgaacttgtgtgacttgttctaggatcgtgactgctctaataattgaacagagcgaccgccaattcggacacacctagttacagttgcgggaaccaccaagttttcagtcgagagaagacgagagccgagtcgaaatcgctgataagccaaggatgagttgccagtggggggttcatcaagcaccccctctcgggtgatagtggcgatcgccgggcggaaggctgtgctcgtgcttcgtgaacaggccgccgttgcgctgcgcgtccgagctgccgccgccggggccctctgcctgctgctttgtgttcaggaaccgcccgcctgttccacgagccctcttcatggc

SEQ ID NO: 9113 - DNA, 1184 bp, Setaria italica
  misc_feature (9)..(9): n is a, c, g, or t
  misc_feature (17)..(17): n is a, c, g, or t
  Peptide Sequence Number=SeqID_75087
tttaatttntttatttntttctttagtttaattttacttttagtttaactttagttagttcgttttcagaatggtcatcaattattagagcagtcacgatcctagaacaagtcacacaagttcagtttcaccatcggactggctggcattcgcgccgcgcctgcatcatctccgctctccacggagtccagacccccaaagactcaagcatgccaggtaatactagaacagagcgaccgccaattcggacacacctagttacagttgcgggaacccccaagttttcagtcgagagaagacgagagccgagtcgaaatcgctgataagccaaggatgagttgccagtggggggttcatcaagcaccccctctcgggtgatagtggcgatcgccgggcggaaggctgtgctcgtgcttcgtgaacaggccgccgttgcgctgcgcgtccgagctgccgccgccggggccctctgcctgctgctttgtgttcaggaaccgcccgcctgttccacgagccctcttcatggcatgctggtgccgagactcgtgaaggtatggcttgcgacttttcaccagcttgttttcagcctctagttttgcacggagctgtctccttcggagaattgcatggtattgctttgcgtttacataaatgggctcttcagcagctggttcgattggtaatggcacacgagaggacggcaccatgcccacaagctgagggtgcataatagcatgtggcccataagctgccactgcaccaccatagtatggatcggcatatgggtatgatatagcaaaggactgagtacggtcaggttttggatatgcataagctgtttctggattgccaagagataaagctgacatcatcttattttcatcactcttcgagtaaccatcatgattacctgattgatcattatgctcgttaaggcttccttcgctcattccagacacttcttgatgactctcgctagttgattgggtagctggggagtcgtaatcaggcatttgatgaccaaattgaatcattatcgtgccattttgtctcatctcatggaaattctcaattcttgtttttcagttcatactgtgagatgaggagggagcatgttccccttccggcagccggcgcccttgctgcctctttcccaccttgcttcgcctccctgcaaggtctcc

SEQ ID NO: 9114 - DNA, 850 bp, Setaria italica
  Peptide Sequence Number=SeqID_75088
cgcggatgtttcgggagccggggccgaagcgggcacgtcggcggccggtccgggcgccggcgccggggacggcgcgccgccgaagagcccgggcgggagcagcaccttgtccaccgtgaggatgaccgtgggggtgtcgtcgagcacggtggacgcgacgcgggacttgtccttgccggtgtccagcgacacgtcgtcgccgctggagacgacggagaggtcgtacttacccgcgccggtggacgccagggtcgggatgtcgcccttggcgaccttgagcgaggacttgggcgtgtactgcggcagcgcgtggtactgcagcagcgtgacgaggtcggcgctggagagcttgctcagatcgggcaggtccttggccttgaaggcgtcgtcgttgggcgcgagcagcgtgagcgccttgtccatggcggcctggtacatcttgaccaccccggacgacacgatgaggcgcgcgaactgcttgcagccggccttctcgaggaggtccgtgaggttgaccgaagaggccgacggggagccgaagaggcccgggaaggtgatggggtcggagacctcgaggacggagagggtggagggctcctcgtcgacgcgcttggtgtaggtggactggaacttggcaccgggcgcggcgggggcgaatccgaccttgccgccgcggaggtcggtgatgttgacgtgccccatgttgccagcggcctggccagtcttctggtagagcgaggtggtgagctcggagccggagtcgagggagtgcagcttcttctcgtcgaagtagtcgaggagggtgaggaggcggagcgcgttcttgatgtcggcgagggagaggttggcg

SEQ ID NO: 9115 - DNA, 216 bp, Setaria italica
  Peptide Sequence Number=SeqID_75089
gcaaagtgggcatgcaaactggcagtgctcctccatttctttcaagcactttacatgaatggtatgaccacaaggcaggacagaaacatcatttgtcgactcgaacaagtactcaaagcagattggacagtcatgatgcattgctccttcaattgtgctgaagaataacaacatccacattttgagcagtggaagaaattctccctccctccaatt

SEQ ID NO: 9116 - DNA, 246 bp, Setaria italica
  Peptide Sequence Number=SeqID_75090
tttagtaatttaccaaccaagaacaagcaaagaagcccttggcacattcttccacatttagcttggcttgtccatgttgagcagcagcagactcaagatgcaggtccaatgcgaccattttgactgttttttaacctctgaaagctatcacgttgcaaacacaacacaaacacctgcaagtatcatgtatttagcaggactgtccaatctgctttgagtacttgttcgagtcgacaaatgatgttt

SEQ ID NO: 9117 - DNA, 277 bp, Setaria italica
  Peptide Sequence Number=SeqID_75091
ttcaagaatgcagaaaccgcataagaatcaaagaatcactttcttcagatctggcgggtgttgtatgatttgcaattctggcacttgtgcgcaatcagatggaactgcacctctgagattgccccgcagtcgttgcataatatgcggacctacaaggagataaaatctaattagaagtgttcagaacaggttgtgcctctagttcaatctatctagtacatcagcacagtcaagaaggattgaactagaggcataggtctcgaaggaccacaagttt

SEQ ID NO: 9118 - DNA, 810 bp, Setaria italica
  Peptide Sequence Number=SeqID_75092
tggtcctatcgcgcttcttcaagaatgcagaaaccgcataagaatcaaagaatcactttcttcagatctggcgggtgttgtatgatttgcaattctggcacttgtgcgcaatcagatggaactgcacctctgagattgccccgcagtcgttgcataatatgcggacctacaaggagataaaaatctaattagaagtgttcagaacaggttgtgcctctagttcaatctatctagtacatcagcacagtcaagaaggatccagaattacgggcataggtctcgaaggaccacaagtttcaccattccacgtcaataagcttagaataatctcattctcatggctaccgttcgagatgtttgacaaaagtcaatggtattattggcgaagaaacatggtatggtttctaaagccacaccaaacaaaaacactgctaagcctgcacccatttctactagagttgccttaccaactttcttttcaacctagaaaagcagggcttctagccttaatcgctgcattcataagagtttcagacaaaaagaaaaaaaagaataataccattttgtcgtcacaagaatcagagagagttgccagctccatgtcaagtctctcccacgccttggacatgtcacaaactgacttggagcaaagtgggcatgcaaactggcagtgctcctccatttctttcaagcactttacatgaatggtatgaccacaaggcaggacaggaaacatcatttgcgactcgaacaagtactcaaagcagattggacagtcatgatgcattgctccttcaacacatgcatgac

SEQ ID NO: 9119 - DNA, 1013 bp, Setaria italica
  Peptide Sequence Number=SeqID_75093
tctgtaatgtggacacccatagtgcattattcctttctcaaattttcataatcatcagcatctgaaccatcgatcttctcttctttgtaatttccaccagacagcaaagagcccttggcacattcttccacatttagcttggcttgtccatgttgagcagcagcagactcaagatgcaggtccaatgcgaccattttgacttgttttttaacctctgaaagctatcacgttgcaaaacacaaacacaaaacacctgcaagtatcatgtatttagcaggactgtcctcaatacagaatgcagtcggaggtcctaaattcaaggaaaccactgcgcacagttctggaatgccatataatgccgaagatcaggcatcacaaaaggtgaaagcaacgccgaacagctccagcagcaaaatctcgataaactgatcacccaacaatcacagatagcactaactatctggacagtgagtcgagaggggaataatactactcgataggtatccatccagtctccagagaactcccaagcaattcgaacacagcatccatctgcaccaaatttaccgcgttgtccacccccattctctggcaagaggaacacgtcatagcatcaaatgccaggaaatggggaagaaaaaaaaagaaacatgattctttcatgacatggtttcgacgtgttagcatgtaccactcgtgcacgttgttatactgggttcattaagacgttagatttcaaggaagcctacctccagaagacatcagcttcatcttcaaaatctctagttaacaagcacttatatccatacgagattttcaatccattgattctttgagcagaagtatcttggagaaaaccagcatgcctctttcacgcatcatcctaaggttctacttgagatttcactggttcagacctgaaatttaacctatatctacttcccaactgaatagagatcgtctcagatcactggtaacccagtgtttacgtgacctgcataagagaaattcct

SEQ ID NO: 9120 - DNA, 2860 bp, Setaria italica
  Peptide Sequence Number=SeqID_75094
tttttttttttttttgtcaaatggaaaggtggaaatggacctatcgaggattttcgaccgatgaagctgcaagctgaaagaacaagcagcaaagtagttccaagaaattacagaccaactcgaaaacaccaagaacagcactataataacatggaaaatctagaaaattggtgctaaaccacatagctctgatccttgcccaacacagacacatgcatgaatcgacttccaactacaagcttgagcaattatcttatctaggacctgaacctcaagtgatacaatcttgaagtgacaggaaatataacatgacccactggaaccacggagctacagaagcaacgaggctgaagcacccaacagcattacagcaacatgctgaagaggcataatcaatgacggcggctgacagcacagataatctcgagtaatttgcctctgcagaagcacccaatggaggagtcccgctagctgtccgtgagctcagcggcgaacgggcgcgcacgggggatgggccatcgcgcttcttcaagaatgcagaaaccgcataagaatcaaagaatcactttcttcagatctggcgggtgttgtatgatttgcaattctggcacttgtgcgcaatcagatggaactgcacctctgagattgccccgccagtcgttgcataatatgcggaccattttgtcgtcacaagaatcagagagagttgccagctccatgtcaagtctctcccacgccttggacatgtcacaaactgacttggagcaaagtgggcatgcaaactggcagtgctcctccatttctttcaagcactttacatgaatggtatgaccacaaggcaggacagaaacatcatttgtcgactcgaacaagtactcaaagcagattggacagtcatgatgcattgctccttcaacacatgcatgactattcttcagcacaattgaataacaacatccacattttgagcagtggaagaaattctccctccctccaattctacatattccacatccattgcagtgatactgctgtttagaaacatcatcgtcaaagagcttgcacgatccacagaagtacttccccatgcacacaccacaattgatgcatacttgccgaacctcttgttctgtgccacataatgagcatataacctgctgcacttcatggcgtggaagttcatgcctcttcattgtatcgactttaatggaattcttaacttcgttgtggcagtgccggcaatcaaaaatctcattgcagcaaggagctcgtatgcggcatctccttctgtaatgtggacacccatagtgcattattcctttctcaaatttttcataatcatcagcatctgaaccatcgatcttctcttctttgtaatttccaccagacagcaaagagcccttggcacattcttccacatttagcttggcttgtccatgttgagcagcagcagactcaagatgcaggtccaatgcgaccattttgactgttttttaacctctgaaagctatcacgttgcaaacacaacacaaacacctgcaagtatcatgtatttagcaggactgtcctcaatacagaatgcagtcggaggtcctaaattcaaggaaaccactgcgcacagttctggaatgccatataatgccgaagatcaggcatcacaaaaggtgaaagcaacgccgaacagctccagcagcaaaatctcgataaactgatcacccaacaatcacagatagcactaactatctggacagtgagtcgagaggggaataatactactcgataggtatccatccagtctccagagaactcccaagcaattcgaacacagcatccatctgcaccaaatttaccgcgttgtccacccccattctctccagaagacatcagcttcatcttcaaaatctctagttaacaagcacttatatccatacgagattttcaatccattgattctttgagcagaagtatcttggagaaaaccagcatgcctctttcacgcatcatcctaaggttctacttgagatttcactggttcagacctgaaatttaacctatatctacttcccaactgaatagagatcgtctcagatcactggtaacccagtgtttacgtgacctgcataagagaaattccctccctaattctctcacaaggaatgcagaaatgaatagcctgccagtagtccacaaactcctccttccattcgcatgtgtgtaactggggcacataaaggaaccatccagaagatgctaggtaccccattacgttgccagaactgcaacttcgacttcggctcaacagtatttgcaaaggacggtcaaacgaggatgcaaaacggcatagtattgtgccacaaggagagacgatagagcaagaaaaatgcggtatgcatgaagtcacaaaatgcgtttgcttatggcagtacataagccctgaacttctacatgcacaaagtgcacggggacttctttcacacaggcaatgttaaactatagcacatcttcttgcttacataatcaaccgcttacaggcatcgtggaaccattatcaccagatatcagagaactactggccaccatcaaccatgcaacgaacatgaccacgaacctagaggagcaagcagaacccttagaatcttcagtctcatctcaaataggacccaaagctatcggtacaaaccaaacgaatcaggcacatgcagtggttgcaaagaaattaaggggatggacatcttatacagctcgcacaatcaatcaagcgccaaatgtactgatattccaccgtatataccaaaataaatcaaacaatcagtcatcacaatccgcaatcaagtcgagcaattagtcaccatatccaaaa

SEQ ID NO: 9121 - DNA, 312 bp, Setaria italica
  Peptide Sequence Number=SeqID_75095
gttcgtaggtaggatgccgcggtgggtgaagagggggtggtcggagatctcaatgtcgctggggacgatcggctggccgcccgcggcggggccgccgcccgcccaggacatctgggagaaggtctcgaggccgcggatggcgccccatgacgtggcggaggagatgtcggcggagccggagttgggaggcacggagagcgtgtaggactcgtcgacgccggggccgagcgggacgtcggggtcggagacggagagcgccagcagccggatggggacgcgggcgagggtgtagttggctgggggcacaatcgg

SEQ ID NO: 9122 - DNA, 1828 bp, Setaria italica
  misc_feature (1)..(12): n is a, c, g, or t
  Peptide Sequence Number=SeqID_75096
nnnnnnnnnnnnttttgataaaacaaacacaggaagtgtgaagatttaataaaatcaggccaaaaatcggtgacctgctatccaggaggaaattacatagtgcagttccctgttgtattgtacatttcagtaaggccacatagaggagaatcatggcctcactaaagagtcctacaattgtgtttacaccgtgcatgacctatcagggaagttcatgtctacacataacttccccagatcacccatggaccacattttccgaaagaataaacagaactttacggagaacagagagaaccaaactactagaaactcctagtccgcctttgtcaactgcaaaaatgaaaggcaggaactggcctgcaggattggacagtaacaagggtaggatcacttgcattatgtaaagtataaactcctcgacatggacagccttgtgaatagctgagctatatcaaaagtacagtccctgatctccctttcttccgcccctatcaagtatgtgtcatcttgttagctgtggaccactgtgtctctcttctgatcgatgatggaatagctttgctatcgatcgcctctcacaatccttaaacatattgaggcgaaatggcttgtcaggattcgtccttcgaagttttaagtatgtgtatgcaaagctgagttggtcccgaggtgtgaagcggtcaacctcattgtaccacaggcaagagaataagttggacattggtgtgtgttctctcacgataaaagagccttcagggacatagctcggaagcagcttgttgggatctgatgggttgaaccttgtcagtccatctgcttggtaaaactcaaattgctgatcaatgattgtatgattgaacttattcagctttttgttctgtgctacttcctcccaaacacaatgccgatcatagtgattggaaatagcatattcataaccatgccgccaaagaaaatattctaggataaggataggatcagtttgcagccgcagtttgctgtctagccaaattgagaaccttgaagatgggaatagcctatgtgccaaaaattttggtattttccccaccctacgcatgtcattatacggcatgttcttaatcaatatgatcttccatataccgatgaaacccatattgtccatcttttggccttcagattctaaagtttgcaatgtcacttcatccaaaaacatagcaaagcaaactgtcttctttgagaggcttgtaatcgttttgccgaatggagtcctcaggcgatcggaatttccaaagatgcaggatgatacagcaatgtggcatttgctcatgtactttcggtcatcatctgatatatcaaaaccagtgcttgtaccatttggactcttaacaaaagcacatttcaactgttggtcacgggctttgtatgattcctctctttcttccagactttggtggccagcaaatctcggttcccaatattctgatccaacaggtttttcttcaacttctacatattccaaattaaaactagcaaatttctcatttctcacaggctccacaagttgagcagtggagttcagaaacttcatttcacaagttgaaccagacttcttacgtttagatttctttttggacccatgtttcttatcgctagttcctgaaaccttctttttgtccatggtattaacatcatggctatcaacaaccccagcacctgtttctgtgtgcctctcaacggcaacctcgtccttctcagcactttcatgactgccatcaccaagcttcctcccaccatcagctgaatgcaggtgagaatcctctaaatcatcctgcgtatcaattcc

SEQ ID NO: 9123 - DNA, 505 bp, Setaria italica
  Peptide Sequence Number=SeqID_75097
atgactgctgggccgacgttgagctacctcaagaaacgtcaggcttttggtacaacgtctctaaaacactagcggagaaggccgcgtggaaattcaccgaaaaggagggcctgcagttggttgtgctgaatccagggacgacgctgggcccattttttacaccatcagtcaacaccagcctcaatattctgctgcaactcctgaaaggttcgtcacttgatgagctgaaaatttgcaatatagtgaacaaatggtacagagagttctctaacggtgcaaagcttcaaactaagtaactaaccaggccaggagcttgagttggacgccgtctacacggggtgggtcgatgtcagagatgttgcgcgatctgcgattgtgctgtatgagaacccttctgcacagggacgccatctatgcttggcgtccatggaacgattggttgacttcaccgacaaacttgccgatatgtaccctgaattcccagtccaacaagaaatacaaagga

SEQ ID NO: 9124 - DNA, 810 bp, Setaria italica
  misc_feature (805)..(805): n is a, c, g, or t
  misc_feature (808)..(808): n is a, c, g, or t
  Peptide Sequence Number=SeqID_75098
aggaagaaaggaagctacctaggaagcctgcggtgaaagggcacgactacaagacgtcctccgcgccgccaaaagactgcggcgtcgcccgcgtcgtgctcatgtcgtccaagtcggccatggtgccgaatccttcctggcctgcgggtaaggcggtagcagaggatgactgctgggccgacgttgagctcctcaagaaacgtcagctttggtacaacgtctctaaaacactagcggagaaggccgcgtgggaattcaccgaaaaggagggcctgcagttggttgtgctgaatccagggacgacgctgggcccattttttacaccatcagtcaacaccagcctcaatattctgctgcaactcctgaaaggccaggagcttgagttggacgccgtctacacggggtgggtcgatgtcagagatgttgcgcgatctgcgattgtgctgtatgagaacccttctgcacagggacgccatctatgcttggcgtccatggaacgattggttgacttcaccgacaaacttgccgatatgtaccctgaattcccagtccacagaatcaaggaggacaaacaaggttggttgatgaggacgaaggacccctccaagaagttgatcgatttgggcgttggtttcatcccatttgaccagaccgtcagggagaccgtggattgcttcaggaacaaagggctcatctagcctgcaaacatgtcctattgtatgcttggttcagaaaagtgctgtgcgacagctgaaacggaataaaatgctagaatttgcatggacttaaaaaaaaaaaaaacaanganac

SEQ ID NO: 9125 - DNA, 1127 bp, Setaria italica
  Peptide Sequence Number=SeqID_75099
gccgccaccgccgctggccggagccgaatggcgctgctcacggcacagctcgctccccttctctccccggctcgccaccgcgtcgcgcctccaccgctcctggccgccgccacaacccctagccctctcatttctctcttcccccacggtcaccgccaccacgacgcactctgcaccaacggcaggccgctccgcctgcgtcggcgctccgcctccctcgaacgggaggaatctggcgcctctgaaaccaccttcgctccagaggaagacccaggaccgccggttccctctgatgatgacgctgaggatagcgtcacggcttccgccgagcaggcggaggcgagcccggaggacctggagaatatccgcgaagtcaaaagggtactggagctgctgaagaagaacagggacatgacctttggcgaggttaagctaaccatcatgattgaggaccctagagatatagaaaggaagaggacactcgggatagaggaccctgatgaaattactagggatgatttagctgatgctttggttgaggttaatgagggacggattccagagaatcgtattgcacttcagttgcttgccaaggagatggcagaatggcccgaccttgaggtagaagctccaaaagggaagggcaaacctgggaaatctgtctatgcaaaggccacggatactggcatcgatcctgagacagctgctaaaagacttaaccttgactgggactcagctgctgatatagatggggaagaggaggaggaggatgaaactgaagtgcctgctgcagtgggatacggtgctctgtatttgttaacggcctttcccgttattattggaatctcagttgttctaattcttttctacaattctctgcagtagcgaacccctgtgccccttcccttctttagcgagatgttgcctttgtaaatctgagttgcaaggctagttaatcagtatttttgtcccattttttccagcttactctcactgttgcagatgtttaaaatagtaacggcaaagatatgacgagttgtaaagatgtgaaattgccaaacttaaaaataaaccttgaagattagttttttcttatgaagaaaataaggaaaaaaaaaaaaaaaaaa

SEQ ID NO: 9126 - DNA, 1132 bp, Setaria italica
  Peptide Sequence Number=SeqID_75100
agtcccatcatacatttcatagcttcatccaagtttagagataaaatagatagcaaacctattgaggtaatgttgccaaatggaaaactgatccccattgaaaggggctgttttgacatggcatctgaggatagtggtattattggaatcaggtgtaccaatcccacacctggagttgagtgtggttttggaatgttagagccaattgaaatttgtgaagatcctgttcaagagcagcaagaagtctatacgtacagccaccattttaaggagaggctgcttacacctggttcgactatgttagtagaggaaaactcctttgatcatggctgtggacggttcatccacacacacataggaacagctgtagtcaacacagatgggcgtttcgtgggcttcaatttctcccacaaaggataccttaccgcatataacatgagagaggtagcagctaggatcgagaagaatcaaggaagacatttcaagagaatttcagatacatttcagcacctgcgtcagcaatgtcgtgtgcttgggtttcgtctctgtaatcttgatgtctttgtcaaaatccagttgataggccagccggaggactcagcatcatggaaaaatctggcggagttccagcaacagaactctgcatttcagtttgatgaggagactaagcaagaaattgagcaggcagtagcggatgtcagggatgccaggtttgggcgcttctatgtgcggaataggaaccgcaagcgggcagtagtggatgccaagtttgggcgctgctatgtgcggcgtagggaccgcaagtaagttggtttggtttgtttttaggagtatgtacatctccacaaacgagcgacagtcgtatttgtttcaaacctggtaagttggtcaggttgactggtggcatgcagctgtagaagtccaatggttgtcgtttactatttgacaacgtggagcaactcttattcctaggtgactaacgtctttttgtccgtccatttggtaaaagtagaagtcagcaaactaatttggacttggcattgtaacccaggaatgtaggaaatgcatttaccagtgatgtactaatggtcagatgctatatgctgtctcagctgttaaaaaaaaaaaaaaa

SEQ ID NO: 9127 - DNA, 494 bp, Setaria italica
  Peptide Sequence Number=SeqID_75101
taatgttgagaaacaatcattcttcaaggttcttccattctcatgccagcggaaaagaaaaaggtgaagccatgaacctgtcttcccacgagaaacattcagtgattcaatgactgggaaaaaggttctgggacacatttagattgaggcccttggcaccgaggcattagagtgccctccttgtctattttttcatctgggagggcattttattttcttctgttgcatcttttttcttcttttcctattaagctgctgagattttgccaagcaatttgtgctgtggtctaaagaaggcagtttgcctcgtggccgggtgtttcttagggtatgcttgttgatgtgtgggttgtcctctaggatgtggtatgtgttggatgttttttcttttagaatttgtgtccttgttctaaaaaactgacattgaagaaaaggaaaaaggggggaggcggtgagggattaggaattagactaagaaattaacaaataaaaaa

SEQ ID NO: 9128 - DNA, 1199 bp, Setaria italica
  Peptide Sequence Number=SeqID_75102
catcttctcctcctccccaagcttcgaacggacctacgaggagaaggacgcggacgcgagagactggaccaggagacaccgaagcctcggatcgatcgacgcgacgagatgtcttcgccggccgagtactacaattcactcccacctataagcaaggcatatgggacgttgtgtttctttaccaccgtcctggttcagcttcggatactggacccaaaatttattgccttatattacccctgggtgttcaagaactttgagatatggaggttatttacaaatttcttttttctgggcccattttccatcaactttggtattcgccttctgatgatagcaaggtatggtgtgcagttggaaaagggtgcattcgaaaagcggactgcagatttcttgtggatgatgatatttggagctatctcactactggtagtgtcagctattcccctatttgagttttcattcttgggaatacctatggtcagcatgcttctatatgtttggagccgagagtatccgaattctcagataaatatgtacggcctcgtccaattgaggtcattttatcttccatgggctatgctcggattggatgtgatatttggatcaccgttactgcctggccttctgggtatcatggttggacatctatactacttcctggcggtgttgcacccactagccactggaaagaattatctgaagactccaaaatgggtacacagcatcgttgctcgattcagaataggtgtgcaggcaaactctccagtccgaccaccagccaacaccggcggtactggtgccttcagaggaagaagctataggctcaatcaatagattgacctggagaacacaccctataatgtgatgctgatcagactgcaatgtagaagcagagctcaggacatagtaagggcaaccggggttaagggttgttttcttagaggctctagaaaatgcatgacttgttgcacggaatggcgaatttttcatgtgctgatttagttcctgaaaattatgtttcacacatgaatataattgtgtaatgcccgtttgtcttgtacttgtacactagctgtacaataactgtgtgccgcctgttttggggaaagggtctaaattgagttgggacgagctgttttgttttgtcgccagggcccaggaggggtcgcctaggccctgcaactgtttggcccgta

SEQ ID NO: 9129 - DNA, 588 bp, Setaria italica
  Peptide Sequence Number=SeqID_75103
ttcttcggcctcgcgccgccctgcgcgctctgctcccgcctcggcgtcgacagcctcttcgagcgccacgcgcaccgtggcgtcggcggcgccgagcctctgcgccgcgtgctgtgcgacgcgcacgccgccgagctgtcgtgcctcggctactgcagcgcgcaccgccggctcgcggacgccggggacatgtgcgaggactgcgccgcggcgcccgggaaggcgctgctgtcgtggatgggccggagcgagctcggcgagcgggaactcgcctgcgcttgctgcggcgtcgtgctcgtgagcggcttctactcgccgcccttcttgctccccacgccggcgccgcgtggcacagattgcggcaacaaggaagaggaagagacggggtcggagtggccgccggcgaggggctgagcaacggcgacgagtggaggacgcggccgcaggagggggagggggaggtggaggagcgcacgggggtgggcgccggggtcgaggtggcctccggcggggacttgagcggcggcgacggggggatttggtgggtggtgctggtggccaaggagagccattgaaagggatttgggg

SEQ ID NO: 9130 - DNA, 1148 bp, Setaria italica
  Peptide Sequence Number=SeqID_75104
ctccgcctggcgaagcgcgtggcggcgaagggcctcctcgtgaccttctcctcggtgtccagcgtgggcgcgaagctggcggcctctgcgggggtgtcgtccggcggcgacggcgtgcgcgtgggccgcggccgcgtccggttcgagttcctcgaggacggcgacccagcgggtcccgacctggacgacctcatgcggcacctggagtcggccggcccgccggcgttcgcggcgctgctgcgtcgccaggcgtcggagggccggcccgtggcgtgcgtggtggcgaacccgttcatgccgtggacgatcggcgtggccgccggcgccgggatcccgtcggcggtgctgtgggtgcagtcgtgcgcggtgttctcgctctactaccaccacgtgcacggcctcgtggagttcccgcccgaggacgacgcggaggcgcggttctcgctgccggggctgcccgagatgaccgtcgccgacgtgccgtcgttcctgctgccgtcgaacccgtacaagctcctcgccggcgcgatcgtcgaacagttccgcaccatcgggcaagcgtcgtgggtgctggtcaactcgttcacggagctggagtccggcgtggcggccgcgctccggggagtcacgccccgcccaccggagctcatccccgtgggcccgctcgtcgaggccgtcgggtggcaggacggtgacggcgacggcggaggcgacgaggtgcgcggcgatctgatgaaggcggcggaggagtgcgtggggtggctggacttgcaccccccgcgctccgtggtgtacgtgtcggtggggagcgtggtggtgctgtcccccgccgaggtcgcggagatggcgcacgggctggcgtcgacggggcggccgttcctgtgggtggtgcggccggacacccagccccacctcccgccgggtttccccgcctccgtcgccgcggggcgcggcgcggtggtggcgtggagcccgcaggagcgggtgctggcgcacccgtcgacggcgtgcttcctgacgcactgcgggtggaactcaacgctggagacggtggcggcgggggtccctgtggtggcgttcccgcagtggggggaccagtgcacggacgcgcggttcctggtggaggagctcgggatgggggtccggct

SEQ ID NO: 9131 - DNA, 260 bp, Setaria italica
  Peptide Sequence Number=SeqID_75105
gggagtggagctgctcgacgagcatggcctgcacgacgaaccggagtgggaggcgcgggttctggaccaggtgcatgaagaggtgctgtgacagcttggtgcagttgatgttgtagcacagccttcccttgtcttcctccgtcagcttccccttgtggttctccaggtagtggtccacgacggtgtacatgaggtcgtggtcgtgcgcgaaccgcgcgcgcatggcctccacggccaccaggaactcctccacggggagc

SEQ ID NO: 9132 - DNA, 336 bp, Setaria italica
  Peptide Sequence Number=SeqID_75106
ccatcgccgtcggccccccgccgccctccgacgacgacccggcgctcggggacctcgtggccgagtacgccgaccacatggcgcgcgtcgcgcggaggctgttcgacgcgatcgccgaggcgctgtgcctcgacgcggaccggacggcgagctacatcaacgagcacggcgggtacctgcgggtgcaccggtacccgcggtgcccggagccaggccaccacgggatccaggcccacaccgacagcaccacgctctccatcatcaaccaggacgccgcctccggcggcagcggcggcctgcaggtgcaccacgacggcgcgtggcgcgacctcgccg

SEQ ID NO: 9133 - DNA, 377 bp, Setaria italica
  Peptide Sequence Number=SeqID_75107
tcgaggagttcaaggtcatgatggccgggggcggatgcttcgccaagatcgcttaggttcatgcgcaatctgctcgatctttccttcttcctctcccttttttggttcccccctccctctctatagtctatcccagcgtgccgtgtgcgggttctccaaagtgtatatagaagcaacaattattactagcgctagattctttctgctaataattgggaatcgcggatcatgatgatttctgctcatattggttggaaattggagggtgggaagcagaggttcagagctagtttctgttcatctctctgatccgcgtattgttcctcagtttacgaagacaaaatgattggaatctactatctacggaataaaaaaaa

SEQ ID NO: 9134 - DNA, 1081 bp, Setaria italica
  misc_feature (9)..(9): n is a, c, g, or t
  Peptide Sequence Number=SeqID_75108
ttttttttnttttttaggtacagtacgacacattctttacttgtgcaaaaggaaaaaaaaggggaaaacaaagtagcatacatcatgatgacgtgatgttttgtgtgatcgaagaaagttgagctgaaattgtccttgtctggactgatcatcaaaatccctcgacaatgcaatgggagttactacagcacagtccagttatttgtcactagtggatccgctaaacaaggaaagctatgcctgtgtttttttcactcaaatggaacgggcgtgccctgcttcttgttgacaatggccatggccaggtacctggtgcccattccgatgggcgtctggccctggggaccttcccagaatggggcttccccatctccaactagacgccagtagcccgttcgcaaagattcagcctgctcctcagtgcaattctgtaggagagcttctaccctgaagttgataccaagagaacccaagaattgagattgagtaattggtccatggactgagatatcatctgaagcttcctgagcagagtgcctgattgaagcaaagtcgacataggcactaagatcagcagagccagggtcatctaatatgtggacaaacttgtgcttacggattgcctggagactatcggatactattccgtttttgccatagtcaataataagagcacctccgccatccgaactaattctatctgcgatttgttcagtaagctccattgccttggggcagacttcaatatgctcaaccttctcaagctcctcagagctagcccatccgcaacgcttggagaggtaaattaaagaggctgtaggctggggagacagaacaaagcgaaacgaggagtcttctgcaagatccaccatcttttcgcaccagccacgtgttgctttctgaaattgatggattggtaaggcatcatagaattcatgtgcaataattatggttggcaatcctgaaggaacctgttcgagggagggcatgccaacaaacaggggctccacaaagcttgctaactgttcttttgccatcatcaacaggttcattcttcacatttcaaagtatcatactgaat

SEQ ID NO: 9135 - DNA, 323 bp, Setaria italica
  Peptide Sequence Number=SeqID_75109
gacgagcccgccgggtggatgtaccaggagcgctcgctctactgtgtcggcaaggagaagctggccgatctccagtcggcgacggagctcgacccgacgatgacattcccgtacaagtaccgagcttgcgcgttgctggaggaggacaatgcggcgtcggcgatcgccgagatcagcaaggtgatcgggttcaagatggcgacggattgcctcgagctccgggcgtggttctaccttgcgatggaggagtacgagctggccgtgcaggatgtgagggcgatactgacgttggatccgacctacatgatgttccatgggaggat

SEQ ID NO: 9136 - DNA, 393 bp, Setaria italica
  Peptide Sequence Number=SeqID_75110
atccaagtgacccagactgtgtagaatatccacagtaatagaaagtgtcagctgccttggagaacttccactcccttcaagcaattgcaaggatatcagaaccagtgaaaatgcaacgagaagctttgtctccatctccgcactaccacgtctcaacaagctaagaaatcctgttttgctaacttgatcagccttggctatttcgctttgcagtctagtcttcaatggtactaggagtagttcaatatctgattgaatgatgttgataatgtgaggaagactgcgtactatgttggaccctcttgtgttgaacaagtctcctatggacttcagagacacaatcatctgacaaagagatttggctttctctcttctcagtggaaccttaagatg

SEQ ID NO: 9137 - DNA, 244 bp, Setaria italica
  Peptide Sequence Number=SeqID_75111
ttttttccttcattcacaaatgaagccttggataactctgctgccaccttagatgatggtgtgaatgcagctaaagttgcagctatgaaagctgccgaattagctatcaacaatgctgcttggtataaacaaaagggaaaattgtatttgttgattttgttgggctgaacattgcactgagtgctgacaattgataacacaagatactaattttccatacttccatgatggcatccagtgacat

SEQ ID NO: 9138 - DNA, 568 bp, Setaria italica
  Peptide Sequence Number=SeqID_75112
aaaattgtatttgtctttacattggcgcgttcagctatcaacaatttcccttttgtttataccaagcagcattgttgatagctgaacgcgccaatgtaaagacaagcacaaagggaaaattgtatttgttgattttgttgggctgaacattgcactgagtgctgacaattgataacacaagatactaattttccatacttccatgatggcatccagtgacatggccatgatagtgatctcttccctgacgatttgagtagtagcttacatcattgaccatccctttgtgttttatggcagtgaataggaacattgcagcatttggtgctggaactgggcgcctatccactgatcagaagaaaacttcttttggttgcccaaaagaagcagtccctcagaggagactagtaatcgctgggacttaaatttgttttctgatcgtgagcgccaagagaaattcaacaaactcatgagtctgaggatgccttggtggctatggcctatcacagggtgtgaagagcagtgccccagttcaggagagcaaggtcgagaacaaggacgggagctc

SEQ ID NO: 9139 - DNA, 1414 bp, Setaria italica
  misc_feature (1356)..(1414): n is a, c, g, or t
  Peptide Sequence Number=SeqID_75113
ggagtataaatgaaagaaagcaagactcccctcatgcctatcaaaggaatgatgttggagaatacaacaaatatacagatgcaagaaagcaagagtccagaggttctggagacgacagagatcatcgtagggttgttgataagaacaaagaaaccatcaaggaggaggaagtcctaaagaagagaaatggaaaggaaattgagaaagaaactttggtggaaactagggagaagagaagaagtctattcagttctactgggccaaatgtttatatcgcagggggttagttgattttttattcctgtactttcttgttggtgcataattttctatatccagtctcagagtaaagttatgaattcgacagatgtcaaaccatcctcagtcacaaatgaagccttggataactctgctgccaccttagatgatggtgtgaatgcagctaaagttgcagctatgaaagctgccgaattaggtaaccatgatcatcatgtttcaacaatttgtacattcctacttacctccaagacttttatcccttagctgatggatttttcttttgtgcttgtctttacattggcgcgttcagctatcaacaatgctgcttggtataaacaaaagttagttaagtatttgttgattttgttgggctgaacattgcactgagtgctgacaattgataacacaagatactaattttccatacttccatgatggcatccagtgacatggccatgatagtgatctcttccctgacgatttgagtagtagcttacatcattgaccatccctttgtgttttatggcagtgaataggaacattgcagcatttggtgctggaactgggcgcctatccactgatcagaagaaaaaacttctttggggcaacaaaaagagcagtccctcagaggagactagtaatcgctgggacttaaatttgttttctgatcgtgagcgccaagagaaattcaacaaactcatgggtgtgaagagcagtgccccagttcaggagagcaaggtcgagaacaaggacgggagctcagccgaagccaagaagctggaggagctcgataccaacctggagaagcattacatagctggactccgccggagagatggcaggaccgttggtcttggcctctagggaactctgcttgcaaatgctacggtatcggaaaattcaggagcctgctatgtacaatcttcagtggcttgtttattcttgcatgcagacggttaactaagagttttatttacctgtgttactgtgataacttattattctggaggactggttcactggtatgtttgcttattattgatcacaagctcccgcagctatttttactacaaaacnnnnnnnnnnnnnnnnnnnnnnnnnnnnnnnnnnnnnnnnnnnnnnnnnnnnnnnnnnn

SEQ ID NO: 9140 - DNA, 1128 bp, Setaria italica
  Peptide Sequence Number=SeqID_75114
gcaccggccggaccggaggggacggaggcagaagagaaccccgtgttccccacctcgtcaagctcccaatccatccctctctcctccgacgattcgtgctcgtccaattctggtgggtggtggtagacggccgacgacgaggatgaattctaagcgtaggagaagtcatagtccagttgaatacaaggaaggtcgtgataaagattatgagacttctggaaggaaggataactcaagagatctagaagagtcaaatgatactagattaggcagaggtcatgaatcgggtaggcactcctatggtacatcacgtgaatctaagaggcatgatgaccataggaggtaccatgataagtacagtgatgattatggtaggagccatccaagatcctctcggtcagatcgcgaatcaagggctgatacttattatgatcgctcaaagcgtgataacacatctggtagatcacgtggtgaccagcgagatgttgacagtaggtatggagagaaatctgtcaaccgagatcagaggagtataaatgaaagaaagcaagactcccctcatgcctatcaaaggaatgatgttggagaatacaacaaatatacagatgcaagaaagcaagagtccagaggttctggagacgacagagatcatcgtagggttgttgataagaacaaagaaaccatcaaggaggaggaagtcctaaagaagagaaatggaaaggaaattgagaaagaaactttggtggaaactagggagaagagaagaagtctattcagttctactgggccaaatgtttatatcgcaggggatgtcaaaccatcctcagtcacaaatgaagccttggataactctgctgccaccttagatgatggtgtgaatgcagctaaagttgcagctatgaaagctgccgaattagtgaataggaacattgcagcatttggtgctggaactgggcgcctatccactgatcagaagaaaaaacttctttggggcaacaaaaagagcagtccctcagaggagactagtaatcgctgggacttaaatttgttttctgatcgtgagcgccaagagaaattcaacaaactcatggtaattcctgcttcaagctctattttgaatatttctgt

SEQ ID NO: 9141 - DNA, 268 bp, Setaria italica
  Peptide Sequence Number=SeqID_75115
aagcatttcatcaagccaatagccaaatccagctcagtaacccacgaattgacagccaaaatacttgacactgtgcagtaccgtcatcaagctaacagcattcaatccctgaaactctgtgctgccaaacacaagtctggagaaattggactgaccaacagaaaagcataatatctccagttagcagtttaggtgcagtgactgcagacacattgaggccaaaatattcagcgtagagcaacctttcaagacaaggggcatcgtcgat

SEQ ID NO: 9142 - DNA, 1497 bp, Setaria italica
  Peptide Sequence Number=SeqID_75116
gcaggctcctcgacgaactcaaaagaggaagaagctattgacggcagcttcaaacaacaggctgcagcttaggcgtagtaaacgtttaacccccgagtcaaatgctgtagttgacactgggccattagaaacttatcctccagaacagcaggttgcttctccatatcaaaatcgatctgaccttccagatatagatgggatcattgccaatctctgccctggttcatcccctcagctcaagatgcctcagttacactctactgagtcagaaccttttaatgtagctgcattgcctgcttcagatccatatctggagtctcttaatgaggtcatcgaagagcatggcatggacaaaacaagaactgaagttgaatccaccttaatttatcagagacagggaaaggcagggtctcctaaactgcttagccctattgaacaggagccagaacattctgatgataacatcccgatgcatcaggacgaacctgacatgggacaactgagtgcaaaattgactcataagagcatgaagagaaatctggtgtcttctttaaatgaagggattgagcataggcgtagtaagcgtttagccaaacaatcagctgccactacatactatgaatctccagaaagtgattctgaggaaagtcaggctgcctctccaagtatttctaactctctagacattggccgagctagtgatgatagttcctctagtttacagcctcagcatgatacacctcaaagaagctcaaatgaagcagacagtgttaccatgcagtctgcttcttcaattcctgacatgtctgatcctgagagttttgcgcgttattacagtaaagtataccctccagaggttaggagggctcttgaaaggaattctaatgtatggcttgagccgcgcctcatacatcagagcccttctagttacttgcatgccggtggcaaggaaaagagaagacgcggtcgtggttctacattgtgcctcaaaatctggactatgcctgagggtgtcaggattccggtgtccttgaatgatctcggtcaacctattggaaacgaggcagccaccttgagttactttctgggcacaattgcacgagatgtaacattggcacctctgacatatacagattggaggggttttccggagaaaaacaaggatgtcatgtggcatttagttaacctcaagtttgtcatcgctccaattggtgaaatctgggctatgaaagctttgggtaaaaagtggaaggactggagagctaccttaaaacatgaacggtatgatgtccatgagacagatgaggaacgtcttgctgatcgagatgctcgtgtcccagaagaacaatggaaatgtcttgtagcatattggggcactgagaaggccaaggctgcaagtgctcgctgtagagctttgcgagcaaggcaacctgttcataaacatagagcagggtcgaagagttatgcgcggatacgcgaggaggagagacaaaaacg

SEQ ID NO: 9143 - DNA, 1331 bp, Setaria italica
  Peptide Sequence Number=SeqID_75117
cctctcgccagaaataaattgaattcattcagagtataccattcattcacaggcaccgaacagcatgatccgtgttagactttgatttgaatcccttcgtcaccgacgacaggacgtcccactcattgttctcctggactactacaatgcattttacagcaaggagacagtgccagctcggcctaacacaaaggtgatgatgtaacatccacatccctgggctggtactactaggatgctgccgtccttccattttaacagaaacaacttgaaaaaacaaccaagcgactaattcgtaattttatacggcagtaactctaagctctccattctgtctgtcagcagcgcatctcggtgtgcgagatagtaggctagacattacgaaccgacagtgtgcaccttgatgctgatatgttacgcattgcttgcgtggtcaggataccgacaacctgcagctgcctcagcggaactcgtcatggaaatagtcgtcgtcatcactaaggtacacactgccataaaatacataggggttctcaatcatctcgtccaaagctagcctcccgtcatgatccttgtctgcctctgaaatagcatggatggcttgctgtctagcataatagcgttcagaaagatagagcttatcaagaacaggttctagttcctgctccgaaataaacccatcattatctttgtcaagtttggagaaccgatcctttgcaactgtgatgttcccaatatgggaaatatctgcattctcatcatcataaccatgtatatggtcatgtagtccattaaagtattcatcaaagtttagctttccatcaccatctttgtccctctgccttatttcttgtttggagagcaaattgatgattttgggattatccgaatcacttgggttaaggaaatcattaaactcagatttatcaaggaaaccatcgccgtttgcatctgaagcgttgaagtgctcctccttccaccatgggaaccccagcatattaccgtctccatgggactcttggcgcagcgtgttgaaggtcgcgaaggagacgatcccgttgcctttcttgtcgtagagctccatctccctggcggagcggtggtgctggtcggccctagcctgctcgaggttccatctggtgagctcgtcgagggatacgaagccgtccgtcggggacacgtcgatcttggggaagagcgcgtggatgcggtcggcgaggttgaaacggtcgtcgtcgttgatgaagtcctcctcctccttgaggaattcctcccactccttcatgtgatcgtccggcccgtcgccgtcttcgtcgccgtcggaggaggcg

SEQ ID NO: 9144 - DNA, 1087 bp, Setaria italica
  misc_feature (972)..(972): n is a, c, g, or t
  misc_feature (1075)..(1075): n is a, c, g, or t
  Peptide Sequence Number=SeqID_75118
cgcagaaagtaaattttgggctagacactagggccatcaggagaagtgtgcaagcgatcacctgcagctgcctcagcggaactcgtcatggaaatagtcgtcgtcatcactaaggtacacactgccataaaatacataggggttctcaatcatctcgtccaaagctagcctcccgtcatgatccttgtctgcctgcatttttgataaaagcaaccacacaagtcatctccaaagggaaaaggcccgtcatatgatgaatggtcataaaaggaagtcgatgatgcaagacaattgcccttttgcttgaccatatttcaaagagaataaaacagcaccacttactaaacagcagaaacagcaaaaaaaaactgttgcgagctgtgctctattgcttcatgaccatcaggtcactaatgaagtataaacacaatatagtgtactacattcagtgatccattagtttggggttttctatactcaaagttcatttaaccccgaagtccttttggataaataggctgaaaaagcaccaatacaaaaccaattggacatttattagactacatacacattatacagctgttacacagtaatgccttctctcgaattttgtagggtatacaatctttccttctatggctctaccttactgaaatttgacaatggtgtacggattataatactttagctatagtcccaaaaagattaaatcaaatccacatcgcaccgacagaaaccatatacaatttccagacatctgcaatttctctatgcataacattgagttactcaacttagaatggaaccacaaagaaatgattttgcaactatgtgcataatgaatagccaatatctacttagtgtcttcctgtttgacaatgcaaacttaacacaatttatattaatgacattatttgcatgctatattgggttttggccatactggctcaggataaggtgttaaacgggttncaattataaggtcatccactgttttgtatggaaggtaaaattagttaggaccaaactgatatgaaaagtttggctatatgtgcagacatgattgaataattcngactcatatgag

SEQ ID NO: 9145 - DNA, 476 bp, Setaria italica
  misc_feature (209)..(209): n is a, c, g, or t
  Peptide Sequence Number=SeqID_75119
ctcggtggcacacaaagagctccatcttgacttgctgattatcctcctaagcgcttccttggcttcgtccagagtttctacgctgcgatccacctcaaatgctatcctctgaatgttgaactgtgcaccttgtcgaacgcggatatcgatacctttgctatccattgatataacagctacatcatctacctctccttcagttgataagngttctttcagaggctttgagaacattgagttgatttccttcaaatattgctcccctccatccattgaaatcttatcaggttgcagggactcgtattccttcacatctatccaagcttatcgtctccattctgtagtagtaaaagttaccccactgttgagatgcccactgctggtgctttgaaacatactgctgatgagcccattcctgttgttcagcaggcaacggaatgacatcaccaaagatagttactcgtgtatttgataat

SEQ ID NO: 9146 - DNA, 1338 bp, Setaria italica
  Peptide Sequence Number=SeqID_75120
aaatttcacgtttattcaacacggcacctcaaggcaatcgagtcttggccctaacagatcactgaaacgaagttcctttattacaactctggcatacaaaggctactagaacaaccgcactgtacaaaaatttcctgcttcagcttcaagggcgtctcaagatggagctctttgtgtgccaccgagacttgctgattatcctcctaagcgcttccttggcttcgtccagagtttctacgctgcgatccacctcaaatgctatcctctgaatgttgaactgtgcaccttgtcgaacgcggatatcgatacctttgctatccattgatataacagctacatcatctacctctccttcagttgataagagttctttcagaggctttgagaacattgagttgatttccttcaaatattgctcccctccatccattgaaatcttatcaggttgcagggactcgtattccttcacatctatccaagctacagtaccaaaacctccaatgaaatatatgtcgcttatcgtctccattctgtagtagtaaaagttaccccactgttgagatgcccactgctggtgctttgaaacatactgctgatgagcccattcctgttgttcagcaggcaacggaatgacatcaccaaagatagttactcgtgtatttgataatccactcgatccagttatctgtacaacaaggctgcatcttgggtctgccaacaaatttcttgtgtggatggctagtggggataacgacaagattgggtggcccaatgggtcaggtgcaaaatctactagagaaccaaatgggtatcctgcacgacgatgatgcatccgagacatgacagtgcacagctgagcaaaccttgcctgttccatgagattgcgaactgccaaagctggcggtggtaaatcatgaacagcagttgcactgtgcacaccgcctgaaataggtgttctgaatagtccagtccttgagccaccaatgttactcccaccatttccacaaatgccaatctcatcttgtttagtggtatccatatgatggctttcatgtagagttacattattctcgagtaagggagattccttccgcatggccacccgcatccaccggcggggtccaggacccgccttcccctgacccagcgagcaggcgggcgccgccacggcggggagaagcacgcggccagcgcgtggagatggcgagggtggaagggctcctgagggacctgggaagtgcgacggacacccggatacgcgatggggagggagacgcgtctccggcgaccgccgccggcgagagcacggaggagcgcgcgacgagcgtctttcctatt

SEQ ID NO: 9147 - DNA, 162 bp, Setaria italica
  Peptide Sequence Number=SeqID_75121
gcgccactccctgaaaaccacgggtttcagacaatcactacatttgctgatatcttatgaattacggatatgcaacctgccatacgcacaaatgtgttatctccaaaagggaaggacctaatttcagaatttttatatgtaaccggcacagttaacaattta

SEQ ID NO: 9148 - DNA, 331 bp, Setaria italica
  Peptide Sequence Number=SeqID_75122
ggcgtcgaagacgatccgcaatgagttctacaacgccgccatctggtactggaggaagaagcgcgcggagctggtgcagccactgcagtggctggcgcagatgttcctgccggcgccggaggtccgcagcatcacgaagtgctgagctgaggcctcctgtcgtgggatgctgtttgcagccatgatccagacaaagtgaaggaaggacaaatgcgtatgcatcccttgtaaatttctgatatatatagtgcagtgtcgataggtgagatagttcctcgtttttgtgtggaaattggttggagtgtgaattgttattggtgtggcaaggcca

SEQ ID NO: 9149 - DNA, 2345 bp, Setaria italica
  Peptide Sequence Number=SeqID_75123
ttttttttttttgccaatgtatcgagtaatgctttaaaacttgacccaagcgatgtatccctccacccatgtacaatttaaaagatgtgccgaagacagacaaagcaaataaatgaacgagatctaaaataacaaaatttgattctgtattaatgtagaaactactgttgatcgtcccgtagactactcttttgctcctgaggtgtgtgtttgtttactcgatactgtgtaggtgtgttctcgtccagtttgttgagcgtcattttgtgaaagacaattcacaggcaatggcgatgtgatcacttccccatttctttgtcgggaacccaattgtttgtttcaaaatttgtttgggaaatgtatccaggacttgaacagtctgcagatcttccgaggcccatatgtagtccactgttcccatgaatttactgttgtagctggttactagtggttccttgttggcgtcttttgtcccatcaaaatcctccacatcagtatagacactccttaatttcaaactgtgttccacagaagtgcattcaacattcccagtggcagcttttatttcttctggagtccacctgtacggatcataatagtaatacccttcactggacctaaccacctgctgaggtggtgatgatctatctgaagttgccggcagctgggctccctcttcatataagtgatcattaccaccacataactcttcaaagaaggaagggtcagaattcacatctgagcaggtaacttcatcaattgttatatcatccttgaaagcatgagcattgctttcagaatcatctccacaagagactgaatgcttgtttatcacctcagcagaacattgattgccacaggcatccgaaacagcgccatttggttgatgtactggtgctgctggcccaatactactttctcctagcctcacattactcatatggtaaagggcatcagcgacattctgagaaccattgaaatgagatgattctggctcattagttgcgcaattatcttgagaagacaacatggattcaatagcattttccttttcatcggacttatctttcgaggcagccaaaagctcatctgattggaccccgtttgcttcaaaagtacatgtaaattcttcagaaatctcattgccggataagttgtcagaagaaagcagctgactgctaccaactatttcacatgagccagcacaaactgtggctggagcagatgggacatctgtaatgtcaggtccttctccagattcagttttgatccctccaaaacacccttcattgggtttgtcaatggatgcagattcttcgccagcatcagaagcacagtcatcatttacaggaccttccaaacagttcaataatccatgcttgtcaagattagaagagccagaacaaggtatattattgccacagctgttacttgatttggagtcaaggagagattctgaagaggtatcagttacaggttctcttccagcagggcaagaattctctaccaactttgttgtctcagtctgaggctcacgaccatttagaagagttatgtttccctctctactgttggttggataaaaaggtggatgggatcgatatatattagggccagtatatagcccctgtgaactaccactagtttgctgtccagatatagtatttttcgcaaggccagacaaattcaacttttgctctgacacaaaattgtacagcggactcttgggtgtagaattgaaatctccacaaagtatcactggagcatcattccacatcttagatacagtgtaagctctatcaagaagtgtcctgacctgaccaagtttgatatctcctctcttcggattataaagaacgtgaatattacatacaacaacttgtttagcttgttgtggatgactagagcttgtagatagattagttgagtcagtttgcacattttgtgggaccaccgactctaaaacacagagttgcgcaacattatcacgaagtccaagtttgttgaactcaatgtcctcttcatagcgcaactggaaccttgttgttctccaaaagatagcacatccatcagcagcgtttccagtccgcatcttccatatgccgttgtatcctcggcttgccatttcttgttcaaggtctgtaaatctgtcaacctcctgaagacatagaatatctggagaccacagtccgaactcaaacactaacttgtccttgcgccagttccaatccaggatgaaagatggtattcgctcataaagaaatcggtgctcctgggccagatagtccgcaagtatattgtacgatagaaccttaaacctctcagcttggcgtggcggccgctgc

SEQ ID NO: 9150 - DNA, 893 bp, Setaria italica
  misc_feature (807)..(807): n is a, c, g, or t
  misc_feature (809)..(893): n is a, c, g, or t
  Peptide Sequence Number=SeqID_75124
gccgccgagctcgccgaccaggccagggccttccgcttcggctcctcgctcgtcgacctccccgccgtctccgccgcgcgctccctcctcatcctctgcgcctacaccgcctgcggcggcggcgcggcatacatgtgggtggccgtcgcctgcagcgtcgcctccctctgctacgtcctcgccaaggccgtcgccgtgttcggcgtcgccggcgccgccaccgggctcggcctgcaggggaagggccatctcgtcgccgtcgaggccatgttcctcatgtcgctcgcgagcgccgccgcctgctcgtctacagaatcgacgtcgaagctgtgagactaaagggaggtcaaacacccaaggcgctgaagcaatgcatggtctgacgacgctcgtctgctcctcgcagctgggtggcatggcatctgaacgcatggcgcggcagcagccggcaggcttccgttcagagttcagacacacagacagggccctgcacgcattcagctgcagggctgttccgtccggtcccaaattttggttcgagaagttgtgtatacaccgatccgatcgacacgtccatgtactccctcactgtaccaagtgaaaaaaaatagtacgtagtatgaatctgtaaatacgtatggaacatttgtgattcggcctcctgcagccaatgcaaaacaggatgagccgttcagcagatgcttgttggccttttggcttggaattgtgaatacctgtcgcatgcagagccgaggtggcaatgggcatctttaaatttgtttttcgtgaaaaaaaaaaaaacaaatnannnnnnnnnnnnnnnnnnnnnnnnnnnnnnnnnnnnnnnnnnnnnnnnnnnnnnnnnnnnnnnnnnnnnnnnnnnnnnnnnnnnn

SEQ ID NO: 9151 - DNA, 1115 bp, Setaria italica
  Peptide Sequence Number=SeqID_75125
gcacgagcgggcgccatgccatcatcaccaaaaattagcctgatctatgttttttccttgaagaagcatcgatcgagtggtggtactatagtaacaccattttttgaccaatctcgctgcaaatccaggtcaaactcaagcgattagtttctaatcccattcaaagctctccgccgcccgtcctccttcccccaagcggcttcgcggctgctcggcaactctgcgccggccggtacgagcccacggcgagtcgctgcgcaccgaccgactggcggcggcggcggccatgggcgccggggccttcgacttcgagctcaagagggacgcgtatggattcgcggtgcggccgcagcatctgcagcgattccgcgaatacgccaagatttacaaggaagaggaggaggagagggcgcacatatggagggacttcttggacaggttggctgagtccgcaaatgtgcccgccacacccagcgtttcgccatatgctgttgcaggagatggtgatgaaggagcagggaaggcggaagagaataatggtgctggaatgcatagtgataaagaaggagatgaggaagctgataatgcagaagataacaataaattggaaggcctgaatgaagctgatgctagcgatgaatcacaagaagcaaatggtgcgccagaagatccaaaagatgtaactgacaacttggacaaagtgaaagaggaggagactagtagtaggtctacagaggggtccaaaggctcagaggacttgaaggaagtgaatgtggactccaaagaactaaaagattcgaatttaggctccgaagaatttgaagacaggaatagtggcaacttggaaaagctggtagaactcttcttggacaaggggttgttggatgaactgaagccgataaaagttgagtcccagaggcgtgtacgtgcagcgctaagcatcattgagaaaatgatgagctctcgggtggtgaaaagagataatggtgcgaataacattcatggaaaggatgcaacacagcttgcttctattgaagaggaaggagggactgcagaagtgagttatgaaggggatccagcagagcctgtgtcttgcattgcagagaatgatgaac

SEQ ID NO: 9152 - DNA, 229 bp, Setaria italica
  Peptide Sequence Number=SeqID_75126
tttttccgtgatacggcgtccaaggggattgctgtggatcagtatatggctgttgctctgctcacttgctccggacgtctgaagaatgcatttctcgggaggtcagttcatggtgtcatcgttaggaggatggacccaggagattggggattgattctgatgaatgctcttttggatatgtatgcaaaatgtggggaaatggatgcagctatgagagtctttggtgaag

SEQ ID NO: 9153 - DNA, 1581 bp, Setaria italica
  Peptide Sequence Number=SeqID_75127
tgttggatgggctagcacagaggggaaatctaccaatatcggatgcttggcttgcaaatccggctttgcctgatgacattctgagggaagctgttcctggaaacataaggagagctgagcattttcttgctgtcttgcggcggcttgtgagattccttgatggacggctggaaacagaaaatgttgagaatgaaatgcccattgcctttgttgcttcgatccattcctcggctggaatcgaccagaaaatgctgaggttttgttatgaccggctacactcactaatgatgacattagagataaccgatacagatgagttcatgcacattcagaccatctgtgactttgccacattgattggaacttacacacgaggcttttccataataatagaaccatatgatgaaagaatgcctgacattcgtgatcctgtgattcagctgagttgccatgatgcttcactcgcaataagacctgtttttgatcgttttgaaacagttgtgatcacttctggaactctcagcccaattgatctttatcctcgtctcttgaattttaatcctgttataagcagaagtttcacaatgtctttgacaagggattgtatttgtcccatggtcttgactcgaggaagtgatcagctacctgtgagtacaaagtttgatatgcgtagcgatcctggtgtggtgaggaattatggccgcctcttgctggaaatggcttctgctgttccagatggcatagtttgcttttttgtcagttattcttatatggatggcattgtcaacagctggcacgaaatgggaattctgcaggacatcatgcaatataaattagtattcatcgaaaccccagatgtcgtcgagacaactttggctcttgataactacagaaaggcgtgcgactgtggaagaggtgctgttttcttctctgttgccaggggcaaagttgctgaaggtattgattttgaccgacactatggcagacttgttatcatgtttggtgttcctttccagtacacactcagcaggatattgcttgctaggttggagtacctaagagaaacttttcagataaaggagggtgacttcctgacatttgatgctttgaggcaagcagcccaatgtgttggccgcgtgattcgctctaaagctgactatggaatgatgatatttgctgacaagaggtacagtcggcatgataaacggtctaagttgcctgggtggatactgtcacacttgcatgatgctcacctaaacctgagcactgatatggctctgcatatagctcgagagttcctccggaggatggcgcagccatacgacaagacagggagcggcggcaagaagacgctcctgactgaggaggacctgcagaatatggcgcaggacgaaatggagatgtgaaaccacggatgagagctgagagggctatatgtggtagataactcacttgaagccactgatgtacaaaaattttgtagccaaaattccttttgcggtcgataacttaattgaagtgtggattcaaacctcaactgcgcatgctactaattaatgttactcgagttcacatggattt

SEQ ID NO: 9154 - DNA, 288 bp, Setaria italica
  Peptide Sequence Number=SeqID_75128
gacgcagcgagcccggccagccaccagcccaacgcggcgaacgcactgaggaagccataccgccgccgccgctgtaggcacgcccgcccgtgcggcgcacagctgccacactgcccattgccacgccctgacctcgccagtcagccgctgctaggtggagaggagagagaggagaggagatcaggaaccttgagctgcggcggcatggcggggggaggagggccagggccggggaaggtgaaggcggggagacggccgccgtgggtgggctggcggcggcggtgtggg

SEQ ID NO: 9155 - DNA, 240 bp, Setaria italica
  Peptide Sequence Number=SeqID_75129
ggaaggtggctccggtgctggtgccggtgccgtcgaggcggtagacgccggtggcctcgaacgaccgcagctcgtcgcagatttccatctgcggcggcagcagcaagagattgggagggcttaccctaccctccctaaacctgagctccttccttcggacctgcgccgagcgccgcgccgccgtgggagtgcgcgggccgcctccctccacctcaggtaagcggcgccgccaagcagcac

SEQ ID NO: 9156 - DNA, 248 bp, Setaria italica
  Peptide Sequence Number=SeqID_75130
tccctcacagtcatctctccgatgtggaggtcatgctggctgatgtacgcggccgtcctctctggaacaaactccgtcatctcgtgcccattgtaggtcactttgcccgtaaccttgaggtctttgtcaagccttccggccaacgcgagcagcaaagtggtcttccctgatccgggtgggcctaacagaagggtcatcctgcgaggcttgatgattccgctgacgtcgtggaggatgggcatcgtccg

SEQ ID NO: 9157 - DNA, 574 bp, Setaria italica
  misc_feature (321)..(321): n is a, c, g, or t
  misc_feature (388)..(388): n is a, c, g, or t
  Peptide Sequence Number=SeqID_75131
ccaaacgtgtcggcgagatgtcatgatgattgccacccctcaactaacgggaggggggcgacgggccgtgctgcctttttcaggaccggcgccgagcggccgccggagcctcctccggatctgtctgatagggtagggcgcccggaaagaaattggtggtggcgaccgcggggcgccatgccgttggatgcacggccgctgcatgagcgctcctctcgccgccctatcagaaaaatctttcttgctcgtgctcgtgtcaatttccagattttctgacacgttcttttttggaagccgatgtgccgccagctgcaacttgcngaaatggctctgcctgcaggttgcttgctgcctgtgcgtacagcgactaatgttcagtagcagcgcngtttttgttcagtgaggacgaatattgtttcgtgtagcttcggctcttctttcgtgtagcaaaattcactcttctttctttttcgagaatgtaaactcactcttctttcaggcttgctttgcttcaaagctctgcctgtacttgttggtgcttagctatcatgctacccactttttttgcaatcca

SEQ ID NO: 9158 - DNA, 1084 bp, Setaria italica
  misc_feature (1045)..(1045): n is a, c, g, or t
  Peptide Sequence Number=SeqID_75132
cgctgctgtgggtggtggtggaggccgccacggacgtgccggccaccgcgcggctgctgcgcaccacggggctcatgtaccgccacctgacctacaaggacaacttcacggccgccgacgccgccgcgggcaaggagcggcaccaccagcggaacgtggcgctcgggcacatcgagcaccaccgcctcgccggcgtagtcgtcttcgccggcctcggcgacaccttcgacctccgcttcttcgaccagctccggcagatcagcgcgttcggcgcgtggccggtggcgacgatggcgcgggacgcgaggaaggtcgtggtccggggccccgcgtgcagctcgtccgcggtcaccggctggttctccctggacttcagcaacggcacggcggcctccgcgacgacggcgaggccccccgaggtggacgcccacggcttcgccttcaacagctccgtgctctgggaccccgagcgctggggccgctacccgacctccgagcccgacaagtcccaggactcgatgaagttcgtccagcaagtggttttggaagattttagcaaggtgaagggcattccttccgattgttcagaggtcatggtatggcacgtcgattcgaccgccccttcttcctcttcttagcaaccatctctggagaacaagagaagatagaaagggtgatcatagaagaggtaaatggacgagctagaggacggccccagagtggtgtacattgtacatgcatagctacactatcgaggtgctggttgtcctcaagctgcaaagaagggaaattttgggtttctcaccaggggaatcgatcaacctctgaccccacttctccatcatattgtacaatttttcactattcttttttctaaaaaaatgtgatatatgtataatttcttcttttctttttttttctcaagagggtttaggtgaatacatacataatacccccttgatgtgtctctcaaagctgtaatggattagaaggcaagctaaaaaaatccagttaacaatgatgatacacaaattaaaacgtaaanaaaaaaaaactaaaaaagagaactagaccaaaggacaca

SEQ ID NO: 9159 - DNA, 330 bp, Setaria italica
  Peptide Sequence Number=SeqID_75133
ccatatagctcgatccattttgcacattaggtcataactaactcccttttaaattaaacagaacaggcgccccaccttgtctgaaattcagaactcaatcaacatacgaaacaattgaccattgactttgtacatgttttcttaaaaatattatcggaagaacaggttactcaggtaacttgtgataaactattcgaatggatgtgttgaaccgatcaacaacacagcaatcaacaccatcaacctgatcaaatgtgcccttagaaggaagtagaaacaaagaacagcccttgtaattgataaggaggctaaccaatcgaattaatgcca

SEQ ID NO: 9160 - DNA, 449 bp, Setaria italica
  Peptide Sequence Number=SeqID_75134
cgaactggtggcacttgtggctgattgtttgacattgggtacattgactgtgttcgtagatttcttgaggctgcctcatagctcccaaaattgttatattgaaatcctctgttcggcacaacctggctttctggaacagtgcgtgcctggtggaaaggactgagatccattgagagcaccattgtgcaatgcccacatttaacggtcacgatgttgtaggagcaattgtttggcacattcaccaccaggatggtgttgcaatagttgcagttgacatagcaaacatgctcggatgcaaactggcctgacatttctccgatctcgaagcgcctacccgccgtcacaaaggcaagatctagagggagggagaaagctcaggttgttatcctctctccctctctctctgcattcttctttgttggtctattccggtcttgtcttgttctttt

SEQ ID NO: 9161 - DNA, 1637 bp, Setaria italica
  misc_feature (1608)..(1608): n is a, c, g, or t
  misc_feature (1614)..(1614): n is a, c, g, or t
  misc_feature (1623)..(1623): n is a, c, g, or t
  Peptide Sequence Number=SeqID_75135
actacaataatttactaagtaagtagaacgtaacaactacaacttaaaacttaacagaaacctcggtagatcggatacacatatagcacgcagctctaattttatataattaagctgatgatgaagagttcttcgatcgataaccctcgcttgcagcacgctcgatatggatcctcttcacttttgtagaaagcacaccgccatcgagctctaactgctgccgccaccgccatcggcgacgctcaggccgaaatggagccgaggaagatgagcccaattctttgctgctgcactgaatgcctccctgtggctaatctctggattgctcgtctttatcctttgtattttcttccttgataaatctgttgtatgtgtacggaacacgctgtctcttctctgggggtcgaactggtggcacttgtggctgattgtttgacattgggtacattgactgtgttcgtagatttcttgaggctgcctcatagctcccaaaattgttatattgaaatcctctgttcggcacaacctggctttctggaacagtgcgtgcctggtggaaaggactgagatccattgagagcaccattgtgcaatgcccacatttaacggtcacgatgttgtaggagcaattgtttggcacattcacctgcatgtacatgtgcacacatgaatgtatgataataagaaattagagtgttccattgtaaacttccgtttgaaattcttttcccaaacaacgacctttacctaagactaaacaaaaggaagtgcaatttaaaatgttaagtaaaatggggaaaaataacagaggaagggtttccatggcaccacagaatacatggcaatgaggcattgatattgtttgtttgaagtccataaataaaaagtatgatcgaacagtgcttcatatactagaagtaaatgcttggtgagtaatatatgtagcagcaataggccctgtttgggacggagtctccagcagcgcggccgccataatcgcttcacgtagaagcgtgcattggcccgcgtttcgattctcgcgttttgcagtagaaaactcactgcgagcagctagtgattttgcaggacgcaggtctgccgcgatgtctaccacggccgcgagaaacgccgtcccaaacaggaccataggctatgcctaactggatgcctaactggacccgtctttgtaaatggttctccctctctctccctctcccgctctctctctcatccagaaaaggtgagacttgtaggaagctagaagagggaagcaaggggcagatcgtgcatcatggcagccagtgcctggcgccaagtaggaatgggaaagtagcaccatgccttcatgtacatccatgtcgtcttttgactgcgtgcaacaccttttcaagtgcctacctttcgactttcgagtgctatatatctcgctgcctgcctggagatgctggagctagcgtaacaacagcctgcatctgatctcgtctccaggagacagacatgacatctcaggtctaaacgagaatctctctcatcagacaaagacagagagaggagagagatagaaagatgttattagaagaatagagagaggaagagagaaagagaggnggaggnggatgtagngtgcatgtagaaca

SEQ ID NO: 9162 - DNA, 1031 bp, Setaria italica
  Peptide Sequence Number=SeqID_75136
aacagccccttggtgcacaaatcttttcatttatttagcaatatacaccatcatctccaatgacatgcatgcaggagatgcacgcgcacacaactagcactactagaaatatgagcatttgtcctcgaccttagtaccggttgctttttgatccggtactaatattagcattagtaccgagtgaaaaagcaaccggtattaaggttgaggatgaatactcatatttctagtagtgacgtacactcacttaaacttacagaaacctcggtagatcggatacacatatagcacgcagctctaattttatataattaagctgatgatgaagagttcttcgatcgataaccctcgcttgcagcacgctcgatatggatcctcttcactttgtagaaagcacaccgccatcgagctctaactgctgccgccaccgccatcggcgacgctcaggccgaaatggagccgaggaagatgagcccaattctttgctgctgcactgaatgcctccctgtggctaatctctggattgctcgtctttatcctttgtatttcttccttgataaatctgttgtatgctgacggaacacgctgtctcttctctgggggtcgaactggtggcacttgtggctgattgtttgacattgggtacattgactgtgttcgtagatttcttgaggctgcctcatagctcccaaaattgttatattgaaatcctctgttcggcacaacctggctttctggaacagtgcgtgcctggtggaaaggactgagatccattgagagcaccattgtgcaatgcccacatttaacggtcacgatgttgtaggagcaattgtttggcacattcaccaccaggatggtgttgcaatagttgcagttgacatagcaaacatgctcggatgcaaactggcctgacatttctccgatctcgaagcgcctacccgccgtcacaaaggcaagatctttggcgctgtcgtcgtctatggtggaattgagagaggtttgtggaggaagcagcagccggatgccacaag

SEQ ID NO: 9163 - DNA, 1021 bp, Setaria italica
  Peptide Sequence Number=SeqID_75137
agacttaaattaataataaaaattaagagctgcgtgctatatgtgtatccgatctaccgagtaagatcacacattcactaacagccccttggtgcacaaatcttttcatttatttagcaatatacaccatcatctccaatgacatgcatgcaggagatgcacgcgcacacaactagcactactagaaatatgagcatttgtcctcgaccttagtaccggttgctttttgatccggtactaatattagcattagtaccgggttcaaaattatgggtccccattggtggtccccgggtaccgggtggtgttacgacccggtactaaaagacctccgagaactcccaattttggacccggtactaatgttagcattagtaccgagtgaaaaagcaaccggtattaaggttgaggatgaatactcatatttctagtagtgacgtacactcacttaaacttacagaaacctcggtagatcggatacacatatagcacgcagctctaattttatataattaagctgatgatgaagagttcttcgatcgataaccctcgcttgcagcacgctcgatatggatcctcttcactttgtagaaagcacaccgccatcgagctctaactgctgccgccaccgccatcggcgacgctcaggccgaaatggagccgaggaagatgagcccaattctttgctgctgcactgaatgcctccctgtggctaatctctggattgctcgtctttatcctttgtatttcttccttgataaatctgttgtatgctgacggaacacgctgtctcttctctgggggtcgaactggtggcacttgtggctgattgtttgacattgggtacattgactgtgttcgtagatttcttgaggctgcctcatagctcccaaaattgttatattgagaaattccttcttgttctacttaacctttggttcttttctttggtttaacttattaccttagaataaaataactaagttaagtaaataagaactaagaaacggaaaacaaacga

SEQ ID NO: 9164 - DNA, 247 bp, Setaria italica
  Peptide Sequence Number=SeqID_75138
taactgttcttttgccatcatcaacaggttcatcttcacatttcaaagtatcatactgaattttttgcaatgtagggctgcactcaaccaagttaatgttgagcgctttggtgaaattaacaaactttgctgaaccacgaagtaaatcagccaagagggttcctcgtcctgggccaagctcaatcagattcaccttctctggctgtcccatttgctcccagaggcacatggcccatacaccaatcat

SEQ ID NO: 9165 - DNA, 518 bp, Setaria italica
  Peptide Sequence Number=SeqID_75139
tgcaattgaaaactctagagatagtgtagcttactggacaacaacaccaaaaaggattgaaaagtttgaggagatagcaaagtatgttcatgttaagattgataagaagataggccttgattgcaaaacatgatggaattcaacttatacaatgcttagtactgcactgccgtacaaggctgttttcgttagagcaactcgtgtggataggcaatacacttgatgccctactgagcaagaatgggaatttgctggttatgttgtagaaaggaacttaaaactaagtttaagtagaacatatcaacactattttctggaactgattatgtcacagcaaacatgttcttctacaaaatttgtgagattagaagtaacattaaggagtggtcagtttgtggtaatttttgattgaagaaatgtcaattaatatggaagcaaagtttaagaaatattggactgatattcaaggcctgatgggcattgctactcttcttgatcctcgattcaaacacattatg

SEQ ID NO: 9166 - DNA, 686 bp, Setaria italica
  Peptide Sequence Number=SeqID_75140
ttttttttttttttttttcttaactcaagcaataaaagattatcaaccattatatcgatgagaatggacggagaattgagagtgcacaattgcatgatagcaccaatcataaatcacaatggctctcagaaataggagtccatcttattctctcacatcacaattacagaatggataaactggaccactgttcgagtacttaacagactgaaatatgactgtcaagagacacaagagaggaaagaaagaccagactccggacaggaccacttgataatccacatgaaaatagcaacttgactctactatgcactgcaaagctcctaggcgtgacacgagcaaatgggctacgcaagggtatagtattccctctcgtgccggtcagagtcgagagcaacaaggacgtaaatcgcgtagatcattccagggacatagccaaggattgtgagcagcaagcagatgcagaactccatgctgcagcagccgaatcgaaggaagacgccgagcggcgggaggatgatggcgaagaggatctccaggaacctgcagcagttgccgtcccccatggtggcctcggagctgatcggatcggaagcggcggggtggagaccggagatctgttccctgctctgtccccctggtgcgcgtctcgtgagtggtttcgtcaacgtttccttagtcggtcg

SEQ ID NO: 9167 - DNA, 567 bp, Setaria italica
  Peptide Sequence Number=SeqID_75141
agtcacgatcattctcaactggtggcttccacagggctgaatggtgcgaggaagtgccagctgataaggtcacatctcagtgctactcatgctgaagataccaacaatcctttagagagcagatcttgttcctctaaggatgttactgatagttgtagtcatactgaaagagttcagtgcagcagtgaggcctgcagcagtaaggcctctcttcaaattagttcactgacgaggaacagaaaatcaagaagaacaccgagctacagtgatctaactgtatctaacagagtaacgagtgctaataggcacaagaataatggcaaagatagttttgctgtgtggcagaaagtagaaagaaatgacaaaatcatatctaaagcaggacattcaagtaatctacctattcaggaaaagagtgcacatgagaacagtaacaagggtgtatatgatgatcgaacaagaaatcgggcaaaacataatcataataggaaagcatgcaaacaggtgtccccaaatgggacagttgaactggagtctaccaaagaagaacaagatgcattggattca

SEQ ID NO: 9168 - DNA, 246 bp, Setaria italica
  Peptide Sequence Number=SeqID_75142
gctggagttatctatgttatgacccacgactctattaggtactacggaagaaagaataggtaccgaacccatcagcccattgagcacttggtgagtttccgcgcaatgcccaacatattgatgctccgtcctgctgatggtaatgagaccgctggagcatacaaagttgcagttctcaacaggaagaggccatctattctcgctctctccaggcaaaagcttcctaatctgcctggtacctctaag

SEQ ID NO: 9169 - DNA, 309 bp, Setaria italica
  Peptide Sequence Number=SeqID_75143
ctgattgctttctatgatgacaatcacatatctgttgatggagatacaggtattgcgttcacagaggacgtaagcgcccgctttgaggctctcggatggcacacgatctgggttaagaatggaaacactggctatgatgacatccgtgaagccattaagcaagctaaggcagtaactgacaggcctacactaatcaaagtgaccactacaattggtttcggatctcctaacaaggctaactcatacagtgcacatggaggtccattgggcaccaaagaggttgaagcaacaaggcacacaggggatagg

SEQ ID NO: 9170 - DNA, 335 bp, Setaria italica
  Peptide Sequence Number=SeqID_75144
atgacactacttaaaaatagttttgggcgacttccagagggatacacctgaggagcgcaatgccgttttggagtcagggagcatggaatgggtgccatttgcaacggcattgctctgcacagtccaggtctcgttccatattgtgctacctattttgctttctctgattacatgagagctgccatgagggtctcagccttgtctgaagctggagttatccatattatgacccatgactctattggtgtgggaaaaatggtccaacccatcagcccattgagcacttgatgagcttccgaactatgcccaacatattgggtgctccgtcctgcaga

SEQ ID NO: 9171 - DNA, 398 bp, Setaria italica
  Peptide Sequence Number=SeqID_75145
cgcaaatgctgttgggactagcacttgcagagaaacatcttgctgctcgtttcaacaagactgatttgaacatcgtggaccactacacgtaaattattagctacatgcttgataattgtagcaacttttgtaatgcacatatgggacggtggtaatatgatgttgttacttgatgctcttaggtatgtaatccttggggatggttgccaaatggaaggtgtttcaaatgaagcggcctctctagctggtcactggggccttggaaaattgattgctttctatgatgacaaccatatatcaattgatggtaatacagatattgctttcaccgaaaatgtgtctgccagatatgaggcactaggatggcatactatctgggtgaaagaatggcaacacgg

SEQ ID NO: 9172 - DNA, 512 bp, Setaria italica
  Peptide Sequence Number=SeqID_75146
ccaccgcgctccgcgccagggccccgccggcggcgcccaagctggtggagcagtcggtgaacacgatccggttcttggcggtggacgccgtggagaaggcacagtcgggccacccgggcctccccatggggtgcgcgccgctgggccacgtcctgttcgacgagttcctccgcttcaacccgaagaaccctgcctggttcgaccgcgaccgcttcgtgctctccgcgggccatgggtgcatgctccagtacgcgctgctccacctcgccgggtacgacagcgtcacgatggatgacctgaaagcttttcgacagtggagaagcagaactcctggccatccagagaatttcgaaacacctggagttgaagtcaccaccggtttacctgctgaaacgttctaatttttttcctatactctgccttttcttttgtgaacgatactgatttctgagcttttctgttgtcatataggtcctctgggacagggtttcgcaaatgctgttggactagca

SEQ ID NO: 9173 - DNA, 2287 bp, Setaria italica
  Peptide Sequence Number=SeqID_75147
agttcctccgcttcaacccgaagaaccctgcctggttcgaccgcgaccgcttcgtgctctccgcgggccatgggtgcatgctccagtacgcgctgctccacctcgccgggtacgacagcgtcacgatggatgacctgaaagcttttcgacagtggagaagcagaactcctggccatccagagaatttcgaaacacctggagttgaagtcaccaccggtcctctgggacagggtttcgcaaatgctgttggactagcacttgcagagaaacatcttgctgctcgtttcaacaagactgatttgaacatcgtggaccactacacgtatgtaatccttggggatggttgccaaatggaaggtgtttcaaatgaagcggcctctctagctggtcactggggccttggaaaattgattgctttctatgatgacaaccatatatcaattgatggtaatacagatattgctttcaccgaaaatgtgtctgccagatatgaggcactaggatggcatactatctgggtgaagaatggcaacacggggtatgatgacattcgtgctgcaatcaaggaagcaaagagggttaaagataagccaactcttatcaaggtgactaccacaattggttttggatctccgaacaaggcgaacacttatagtgttcatggaagtgctttaggatccaaggaagtagaggctactagaagcaatcttcagtggtttcatgagcctttccatgttccagatgaggtgaagaggcactggagtcaccatattgatgagggtgcttcgcttgaagctgaatggaatgcaaagtttgcagaatatgaaaagaaataccaccaggaggctgctgagttaaagagcataatttcaggggaactgccttcaaggtgggacaatgctcttccaacctatactcctgaaagctctcctgatgctactaggaacttatctcaacagtgtttgaattcacttgcgaaagtaatacctggatttcttggaggtagtgctgatcttgcaacatcaaatatgacattgcttaagatgtttggtgacttccagagggatacacctgaagagagaaacattcgttttggtgtgagagagcatggaatgggtgccatttctaatggcatcgcagttcatagccctggcctgataccttattgtgctacattctttgtgttcactgactatatgagagcggccatccgcctttctgccctaagtgaatctggagtgatctttgtgatgactcatgactccattggccttggagaagatggaccaacccatcagcctgttgagcagttgttcagccttcgagcaatgcctaacattttaatgctccggcctgctgatggaaatgagacatctggggcttacaaggttgcagttcttaataggaaaaggccctctgtcattgccctctcacgacagaagcttccacagctgaaaggaacatcggttgattctgtttctaaaggaggatatattatttccgataactcatcagacaacaaaccagatctcattgtcattggcactggctccgagcttgagattgcagaaaaagctgcagatgagctgaggaaagaggggaggactgtacgagttgtttcacttgtttgctgggaattgtttgaagagcagcctgagaagtacaaggaaagtgttcttccaagtgaggttacttctaggattagcattgaggctggggtcacatttggatgggagaaatatatcggacagaaaggcaaagctattggcatcgacagtttcggtataagtgctcctgctgggaaaatattcaaggaacttggtttgacagtggaaaatgtcattgcagcagccaaggccctgtgaacgatcattgcgttactgagcatacatgatttgaaaggtatgtttgggtcagatctggataatgtcagctgcttttaagcactatacataccgatgtggttatatgtgaacttttgaggatattttctactagatgcaagttgtccgttaatacacctaataatgcatagataatctggcaaatttgctcgttgctcctaggagcacaagagtttcagcatatccggagaaactcatatagcatgcacatcactgatgtcatgaaataaaatgctagtgatactatcacctgtaatcgtgatccaaatttgagatattgtggtattcacttcttcaaccttcttactaaaaaaaaaaaaaaaaacaaacgtagaacgtacgtaccgaaccggaacggaccaaccaacggggaagggtaaggt

SEQ ID NO: 9174 - DNA, 505 bp, Setaria italica
  Peptide Sequence Number=SeqID_75148
ttaccgtaccaggccaggcttgtgcacccaattgctctgtctgatcaaacaacccattgctcaagcaaaatcgacggtaaaaaagggacacaatcaggcaatgaacacatcaattccttctcggttgaaccctcgtaatttacatggtacaaactgaaaccagtgcgcgctcacatccggacaccctacagatcgaacggtgtggcaccgacgcctcacttgccgggcacgaagttggtggcgtaggcccaggcgttgttgttgacggggtccgcgaggtggtcggcgaggttctcgagcgggcccttgccggtgacgatggcctggacgaagaggccgaacatggagaacatggcgaggcggccgttcttgagctccttgaccttgagctcggcgaaggcctcggggtcgtcggcgaggccgagcgggtcaaagctgccgccggggttagagtcgggttcgacgtaccttcgtccgtagtcgggtccgtccggtctaattgtct

SEQ ID NO: 9175 - DNA, 632 bp, Setaria italica
  Peptide Sequence Number=SeqID_75149
tttaccgttaccttaggtccaggcttgtgcacccaattgctctgtctgatcaaacaacccattgctcaagcaaaatttttttttaattttttttttttttttggcaatgaacacatcaattccttctcggttgaaccctcgtaatttacatggtacaaactgaaaccagtgcgcgctcacatccggacaccctacagatcgaacggtgtggcaccgacgcctcacttgccgggcacgaagttggtggcgtaggcccaggcgttgttgttgacggggtccgcgaggtggtcggcgaggttctcgagcgggcccttgccggtgacgatggcctggacgaagaagccgaacatggagaacatggcgaggcggccgttcttgagctccttgaccttgagctcggcgaaggcctcggggtcgtcggcgaggccgagcgggtcaaagctgccgccggggtagagcgggtcgacgacctcgccgagcgggccgccggcaatgcggtagccctcgacggcgcccatgagcacgacctggcaggaccagatggcgaggatgctctgcgcgtggatcaggctcgggttgccgaggtagtcaaggccaccctcgctgaaagaatactagggaaacccgaccta

SEQ ID NO: 9176 - DNA, 595 bp, Setaria italica
  Peptide Sequence Number=SeqID_75150
cgggcgccgtcgagggctaccgcattgccggcggcccactcggcgaggtcgtcgacccgctctaccccggcggcagcttcgaccccctcggcctggccgacgaccctgaggccttcgccgagctcaaggtcaaggagctcaagaatggccgcctcgccatgttctccatgttcggattcttcgtccaggccatcgtcaccggcaagggcccgctcgagaacctggccgaccacctcgccgacccagtcaacaacaacgcctgggcctacgccaccaacttcgtccccggcaactaagctcgccattcgcctctgcaactccattgtcttccggccgggaggggcgtacgtggattggttgatgctgcaagcgagctgccgcatgcgtgtcttgtttcacgttgcatttcaggggcaagtcgagatgatgagtcggcgttgtacactaagatgatgtttgtgcaatagtagtggttttgttccctggtggttaacctttgatttgtctgattaagggcatctcttaatttgttactgtctacaactccttttagatccttgagctaaagtttattccttatcgtataaaaaaaaaa

SEQ ID NO: 9177 - DNA, 341 bp, Setaria italica
  Peptide Sequence Number=SeqID_75151
tagacaattaagaaattaaagcttcagtaaatcatatttgaaggattgtgtatattgttttatggtcagtttggccctacaaaagttttttcacaagagtacaacatttcaagtgctcattgtgggccagataggtatgctccagttagggaaggaattgtaacttgcaaaattaatagtaaagactacagaaaagcattgaatctactagccaaaatatccatacagaaacatatgatagaaaatatatattcaagcagaaaagctgtgggaattttctaaaatcaggaaataagaactatgacaactaaagtcgttaccgctttgatcatggaactgag

SEQ ID NO: 9178 - DNA, 585 bp, Setaria italica
  Peptide Sequence Number=SeqID_75152
actttctttcccaactccctttctactgattttgacaagaactacttctgtgcaagctaaggatgatagttttttattcttaaaatattgcattgcagttttgtagctatatggaagatcagattcagctgcattagatttcacagaccaagtataaattctgcattccccaaccaacaaataaagctagaacagcaccagtacacaaagagaccttaaatccatcagacttgcgcagttgcgcttcaattcaatctgcagaaatgcctagtcgcttccacaattggagataacacgattggttatagagaaataaaaggggcagttaggacacccaagctacaccccaaaagcgtcaaaatcacatctttatgatttcttttcttctggcgataagcacgcacaaagcaggcaactgattacttgaattgaatcagccaggtacacaaactcacataggaccacatgactaaacgaggaccatataccagagaaaagaaatccgcatgggcaaaggcaggtagaggccaacacccacttgaggacgcagcccaaaattcatctcaccgatgctacacgacggat

SEQ ID NO: 9179 - DNA, 486 bp, Setaria italica
  Peptide Sequence Number=SeqID_75153
aaaggatcagcctcggccatatcgtcagataaaagaagatctttcctagaagaaaggtatgtcttgaaatatgtgtcaaaatgcataaataaaggcttccagtggtggaaatttcccttattaaattcccaacggaaacctgatagtggtatggcaatgtcatgtagtggaatattgattactcgatcaataaattctttgacttttgcaggcggctcggactcgaccttgatcgcgggcgagacggcgcggcacacagggctaggatctgctgcaggcgcagcgggaagctggccctgtgcgcggccatggcggccgccgccatctccgatcgggacccctcacctgcgcgtcacctctagggttttggcccggcgaggcacacacatcggccgcgggggaggccggcggcggaggaagggggcttgggggattcagaggcggcgacgtgagggaaggggggagagggggcttgcggtgtttggt

SEQ ID NO: 9180 - DNA, 1260 bp, Setaria italica
  Peptide Sequence Number=SeqID_75154
gctacacactcaatcaacaagagttaatattgcttgctaaccatctctcaattaaaattcgaataggctggctagctaggtcccctcctctctcttcttcttttcataggctgcctctttcatccctcctgagatctctccacgaagaacagcatcagcatcacatttattcacagcagctagcaggctggcaacacgcggcatggaccaccagctcttcgacgaccccttcgcgagcagcatctcgtcgctggaggcggacatcttctccgccggcggccagctgccgtcgccgccgtggccggacctcgacctcgacgacgacgacatccacgacctctccgcgccggccgccaacgccacctcctcaggaggctatggctccggcggtggctccggctcccacaggaagctcagccacaacgcgtacgagcgcgaccgccggaagcagctcaacgagctctactcctcgctccgctccctcctccccgacgccgaccacactaagaagctgagcatcccaacgacggtgtcccgagttctcaagtacatccctgagctacagaagcaggtggacaacctggagaggaggaagaaggagctgaccaacgccaattgcaaaccaggagttctgaacgcgagcgagatcataactcccattgtttctgcgacttgcctcaacgacacggagatcatggttcaggtcagcctgcagagcaatatggctgccacaactcttcctctctccaagtgcataaaagtgttggagaacgaaggcctccacctgattagttcatcgacttactccaccttggacaacaagacgttctatagcctacatcttcagagaagtcaaagaacgatgaaggaggagtgtccaggattctgcgatgaattggagaggatcgtcaggaagaaagcaggggcgtagctgcagcgcatgcgtggtactcacatacagcactgtctcgtgcattcgatcctataattaagctaagctaataagggcatgcgtcttagtttgtaaatgatggattatatgtgttgtcatgtggagtgatcgatcgttattagatcgatgggatggctaaagcataggagtataatataggactggctaattaagagagatatagtactagtactaatgcacgcagatccatatatacgtgatatagtgtatgtccatgtgtgtttcctgttgacatgatattgtaaactgtgtccaaaatgatatggtgttcgatcagtaaaaaaaaa

SEQ ID NO: 9181 - DNA, 1954 bp, Setaria italica
  Peptide Sequence Number=SeqID_75155
caaaacaccaggatagtacgcgacaagattagaagttttgtgatgatgtacaagtctaatctacagacaaagtccaacaatctacaatcaacgggagccccgggcatgtccattgtcctgtactacaattcactgcgtgccgttccattagatcctactacaaaaagcaggctcccggagagccccacaaggcccagaaacatcagctcctctctgtctatccgctcatcaattgcagcatagcagaccgcgtgtaccacgaggcacgaccgcacgaggcaatggagccacccgtgtacgtcggcctcacagcaagtagaactgcgaataaagatgctccctgatcttgtaatagtcctcgcacagggggccctcgatcacgatctgctgagaacccgtgctgcccttctgggagtcaccaatcttgcgcaccgtgatgtgttcgccacatcgtaatgcaccaccggaaaattcaacctgccaacctttattttccagaaattgtttaaaatcagacaactttagatcacccacaagaactggcttgtggggtggcggttttgacgacgtgggaagcagaataagcttttcatcttcttttccaacttctgcatccacccaagcaatttcatgctcacccaactttttacaaataatgttactcattaacttctctgaaagttgtaccttataggcacataaatccgatgttacatcaattgtttcctcaatctgaggagcataaacatgcaagtctaaattctttgcacaatgcattttcaaatgttcagtagcttccgctgatccatgcaccaaaacaagtttcagtggagccacatgagctataactgactttacagaacgcccatcagagcgaccttcaaagtccatataaaccaatgagcatttcacttgaacagtcatctcattggaaataacttttgagggcgttgaatcaagaagcaggcgtgctgaaccatcgtcaattttaccatctaaaccatctccagaaccaagcatcagagtactatccatttcttcttgtttcatcgtataatcatcaggatcgatgacctcaccaaagtcatcccattcggcagtattttcaaagaagggaaacattggagcaacactggttgaaggagggacaaatccatcaatgaaaatatcattgctcccaccaaaatgtgaaccagccttggtggatttacgagatgagcttgaatcaatgagcattgggtctgaagcctttgcatttgatccatgggaagcctttagttcctcttctttgacaaggctagccttgattgcttcttcctttttgatccgttcctgttcttcttcataagcttttagctcatcacccaccaaaggaattcgcttgctcatagtgacctttacagctttagggggtgggtccacttgaagcatgtgtgcaagtacaccaaactgtcccttctcagtaaagagcactagattccttgcttcattcgccatctcaacaaatatgtcatgagaaaagccaacctccaaacttgccatggacgccagaaccacctttggagtatctcccaacttttcaagatcttctttgttaattatcagtgtgaccttttttaataagaaggcattagctctactgctttcaaaagattttgcaatatgatcacccatccattcaagaaaactcttgacatagtcgactgtacttgtagaaacatttgtcagaaagtagatagggtactccaaacgccggtcaccccaatacttatccaatatcaaaagaagttccaacactctaccagcagtatcaacaggaagtaacacacttccaccacttcctagaactttaactaatgaatcaatgaaatcttgatcctgtttctttctgtagccttgattgttcaaagcgttgtaagcatcagttatcagaacagctggccgcaacaaaaga

SEQ ID NO: 9182 - DNA, 433 bp, Setaria italica
  Peptide Sequence Number=SeqID_75156
cgggcagagtgagcgaggaaacgtgctccgtttcactttccccaacgcacccgagcccccgcagaaatcaccccccacctttctccctcccctcgcccacgcgcgctccgatccccaggcgagcgaggaggggcctcgccttcgcctgcctctcgagcccgctactcctccgcccccgacgacccccggtccgagcgggttgcatggtgcgcggccgctgcccgtaagccccatcgatggcgtcggtggaggcgcgccgcctcgcggtcgtgccgcagctagacattgagcagatactgaaggaggctcaacaccgatggttacgccctgctgagatatgtgaaatacttaaaaactacaggaacttccgtattgctccagaaccaccaaacaggccgccaagtggttcccttttttatttgatcggaaagta

SEQ ID NO: 9183 - DNA, 463 bp, Setaria italica
  Peptide Sequence Number=SeqID_75157
tgacggccacaatgcaacgggcgccgagcctttgcaacgcctgcgtcgatggctacgagcgtgagcgctccgagatggcttccgccgaccgtgctccctgtcacgccgagcagccgatgtcgcagtggctgcagatcgggacgccgagcagcgcacgcccggtagaccgcgcgcaggagaaggcacgggaggctgacgagctgcgacgccggtggcttgaccggtgcgcgcagctgcactcgcatggccggccaccaccgttggtcacttgctcggagtggaacggggctagtattcttggcaacatgcaggcgccgccgccgccgccgccggtacggctaccggtgcagcctaaggctacggtggacacggatcttgcgcttggcctggcggcggcggggccggcgtgcgagacggacgacaagctgctcgcaagacggctaacggaggcggtgagatggca

SEQ ID NO: 9184 - DNA, 658 bp, Setaria italica
  Peptide Sequence Number=SeqID_75158
ttctgatatttagatgacagctctgacaatttccctgaccataagtagttccaagcaaaaaccataacaataacactaggaacaagcacgatctggttcaatatgaccttagcggacaaatttacaaatgtctgcttgggcatgcaccgatcaagaaactgataccatgcataggatcctggaccataaagaaggaatccataggaagtcatacgaagtgcacgaagccaatcatggttcagcaatatgtctggtatcagttccttgctgtcgggttcggtgccgcgtcttcggcggtcgacgatgcggccgcggacctgcgcgatggtgtcgccggtgaaggtgagacaggcggcggtgaccgcctgcctgaagggaaacttgatgggccagccgctgctctggccgatggactccgaggacgacgagagcggctctcgcgggggaccgcggcggcggccccgggggtcggtgttgcggcggccgcggcggcgggagtcggacttgcggcggagagacgggaggttccaccaccactccccgccgctcccgatggccttcatgttcgcgccgggcaggcggcggcggcggcggcggcggcggcgtgagcagggtgctgagcgctcgaagcctgcgacagagcgaggtccgttttgta

SEQ ID NO: 9185 - DNA, 1753 bp, Setaria italica
  Peptide Sequence Number=SeqID_75159
tagttttaatagttagacttttttgggtacaaattctcaacacacaaattcacatgtcttgcgttctgcacactgcacttgtgcattcctattcattcactgtgccttggcctgttggccattccggcctttaccattccaggtttccaatttccaaacatgcccacaatttgtcgtaatactcttatttccatatacatacagaagcaacaaactggtacaagggtacagcatttttttaagtacacatggatagaatgctatatgcccgaatgacatgaatattgagatcgaccggtatgagaactgatggagcaagaactttgcttatgaattatgattgatggctcagagagaggagcccattgagctccatgctttcttggtctcctctttgagcgtctcatacagctcctgagccacactcaggaggaaccggtccgcgccatggcatgccacgagtgagactgacactggaacgccatcgcgcacgccaagaggaatgctcaactggcaaaatccggacagtccagcgattgacagaagggaaaatgctcttgcccggaagttttccagcgcagcagcttccatgcgcagctttggtggagaaccaggaactgttgggattgcaaggattccatcatccttgacaagagcagcaagtgcagacttgaattcagtcctcagagcatgaaaatcctccatgggtccatcttctgatgtaatggcctcgtgcacccgctctcggatgcctggacctaggttaggctttacagtgttgatccactctgcatgattggctttgaattcagacctttggaggcatctcatgacatatgaaataacagatagagcaggtacagaaggtgcttcgtttttggagaagtcgctaataaattttccaatggttgggacattgttggagacgaattcaccaaggttcctattatctactgcatcactaccaaatctcttagctactgaagcattgagaatctgatatgtctggtccttcagagaacctaagatttcaaaacagtctttaggaattgtaaattgagttggttgcttgatattgttgtcagcaggtagcggcaacaacacgtcgcttacacgagataacgtggagagatctctagcaaaccacccaacagtatcaaacatctgtgacattggggtgacattttctgtcgaaaccactccatgggaaggcctcagtccaaatatatcacaataggcagcaggtaccctcacgctgccgccagtgtcagttcccagagcgaaatcgacgagttttgcagcaactgccacagctgatccactggaggatcctccgggaactctatcgggagcacacggattagttggcgtgccgtaatgtgcgttctccccatttatgctgtaggccatctcatccatgacggtcttgccgacgctggtggcgccggcggccagcgtggccaagacgacgggggaggtggcggcggcgggggcatgcgtcctcgcccagtccgggttgccgaacccggtgacgcgaccgctgatgtcgaagatgtccttgatggcgaaggtgaggccgtgcagcgggagctcctcctgctgctgagattgtggaggcagcagctcgaatttctccatgaaggcgccgtagtctccgccctcgatccccatcgccatgccttcccgcgctctcgcaacccacgcagcagagcagaacggtgaagatgatccaggccggattgtggataatctc

SEQ ID NO: 9186 - DNA, 1212 bp, Setaria italica
  Peptide Sequence Number=SeqID_75160
catggtaacaacagcatgaaaatttttatcaaacccccgttgggcaaaccatacattagggcaaacgccatcaaaccttagcgggcagcatcacagattaaaccccctgtcatccccgctgtaataacccaaaatttacacccggtgaaaaagtcagtccagctccagctcctcgcacgtacgccgcgtcaggtgggtgcgtgcgtggttgcttgcagctccgatccctcatctccacatcgacttgtccgagtcgtcggcggccgcgacgttctccgacaggagcgacggccgcgtgcccgtcgacgtccggtgagacgcccgcggcgagcggtgttccgtgcggaaggggaactcgtcgccctcgagcatgtgcacgatctgccccatccgtggccgcttgtgggcgtcggcgtcgatgcagcggaggcagacgaggagcacccggttgagcacccttggcggcggcggagcggcgacgcgcgggtccacgaggtcctccacgcggcggccgcccaccatgccccggaaccactcgaccaggttcacctcgccggcggggcggttgtagtcgacggggctgcgcccggagacgagctccatcagcagcacgccgaagctgtagacgtcgctgctctcgttcagcatccccgtcgaggcgtactcgggggccacgtacccgaacgtgcccatcacccgggtcgtcacgtagctggagccggagcccaggaccttggccatgccgaagtccgacaccttggggttccacttcttgtccagcaggatgttgctcgacttgatgtcgcggtgcaccaccttgggctcaaggccttcgtgcaggtacgcgatgcctttggccgttccgatggcgattttcatccgaatgtcccacgtcaacgggctgacaggaccgacgtcgccgtgcagccactgctccaagttgccgttctcgacgaactcgtacaggagcatccttttaggcccttctgcgcagtaaccgatgagcccgacgaggtgcttgtgcctcactttgcctatggcttccacctccaccttgaactccttctcggcctgacccttgtgatcaaacaagtccttgaccgcgacaacctccccgccggcgagcacgccgcggtacaccgtgccgtagcctccctccccgaccacgttctcagcgcagaacccgcccgtggccgacctccagctccgcag

SEQ ID NO: 9187 - DNA, 559 bp, Setaria italica
  Peptide Sequence Number=SeqID_75161
gaaaagttctcaggtatgacaagatcagtctaaagcacaaataatgcagttactaatatcaatgagttcatattttcttcctagtgagatagcaatctaactttccaaaataatatatgcgtcctcttttctggaatgacattctggtactatatagcagagataaacatttcctttcatctttcatagttttccaaggttggtcggaattacttgcaatgcccactagatgtttaatattgcatacaacatttcaaagagggacagtagcacataacagttcttgtagtaatcatccactgacctctagattattgcttttaatgtggtcccagacacgcttaacagcctcagaatggggcatctctctttctccagtccccaaaaaggtggccagagcatcagaaatgacaaagggcagctgcttaacatcagtttcaacaggagaaacaggagaaataggttcaccaccctctgacttcaatttctttgatttctcgtttcgaatcattggtagtctcaagaggacgtatatgcttagacaaaagcttgttcatct

SEQ ID NO: 9188 - DNA, 565 bp, Setaria italica
  Peptide Sequence Number=SeqID_75162
tcgctccgacactgctttctatttaacaaactagaaagtcagatacactactacgtctgaccttttgcgagcatcagacattcaggctagactatgtaacaactcccattccttgctactgtgaagagattagccaccatttctcacaggtaaaccagcccaacaataagaaatagttaacaaacactttcagcagatttctgtcgtttcatcagtgcctactaccaggatgttagcccagagcccagaggacattttgtctgcagccaaaagttaaaccaccaccaatttctgcattagaatattagacaaacgagctaataccaagctgcagaataaaagaaatggtaacgatcagcagtcaaggcacttaatgcaagaaatctggtgagataaaaacaattaaatttggtcaagtcaaagctttacagtaccaattcgaccgctttcaatagactccttttactaatgcaacatatttaaaacgggtaaactaggacttgaaagcaagcagctgcgggcatatggatgttctccagcaagtagtcaagtactaggcagggca

SEQ ID NO: 9189 - DNA, 1253 bp, Setaria italica
  Peptide Sequence Number=SeqID_75163
ttgtttgtttatttaaatttttttggatgtgataaaggattaccaatgaacaggggagcaaaagatgatcgttcgataactgtataagttaggtatcacccacaggaacataatattgggggtacaggtgtctcaagtcaactaaggactagcaatgtaagaggctttcaggtagcaaacgagaaagcaacttcttaccagaaaacgcacctacgatagctgaatttacatcaggcaaagtacatcagctctcgctgtccttttagtttcgctccgacactgctttctatttaacaaactagaaagtcagatacactactacgtctgaccttttgcgagcatcagacattcaggctagactatgtaacaactcccattccttgctactgtgaagagattagccaccatttctcacaggtaaaccagcccaacaataagaaatagttaacaaacactttcagcagatttctgtcgtttcatcagtgcctactaccaggatgttagcccagagcccagaggacattttgtcagtcagatcttggtaggttgcttaaaaaggtgatctgaaaccaactctgagacaccctgagcagtaagactttcacatccaaatagttgtttaagtttcgagtcacaaagtatcactgtggaattctctggatcctctagattattgcttttaatgtggtcccagacacgcttaacagcctcagaatggggcatctctctttctccagtccccaaaaaggtggccagagcatcagaaatgacaaagggcagctgcttaacatcagtttcaacaggagaaacaggagaaataggttcaccaccctctgacttcaatttctttgattctcgtttcgaatcattggtagtctcaagaggacgtatatgcttagacaaaagcttgttcatcttgaacatgtcagtgctatcagtctcgaaaactaatcggagctcgtcattgcatatgatctttctcttattgttaggatcctgcaaattgttcttgcgaatgtatgcccaaagctgcttaacaatctcagttctagccatggccggttcaccaacgatagcttgcagctctggagacacaccgcagactttgtttaatcctcctgggccacctcttcgttttgctccagcactagcactgctgtccttcttcgagccagcaggcgccgccgctgcacggggactctcgcccggagtggctgccgcagcagatgcagccgccgccgccgccgccgctg

SEQ ID NO: 9190 - DNA, 590 bp, Setaria italica
  Peptide Sequence Number=SeqID_75164
cacacgatgagggcgctgctcgagtcggcgcgcgttgtgccgcccggtgagctacactgctcccaggtactctttgccttgatatctagctggtttgctggttgatgagaaatggattgttaaaaaaattgtttatcatgcatggaaaaccaatgcattgggaagagtagagtcagctcagtgtttgatttaatggaagtctattcgatccagggctcatgtaactattgagctaatttgatatttttatgaaaatttagagcaaatggaagtcttgtcattaaggcttttcaggctaactccagagcacataattgcccacttatgcccacatttgattcttttttctaaaataactgtgagtcgactctgaggagccctgaggactgggatgtagaacagaccagcaagcccttcaaaaaaaaaagaacagaccagcaaaggtaggaatatgaaacatattcagaattaagatctgcagtgatatgaattattgcttacatcttaacaagattaggaatagaaataagatctaaatatgaactctgcatccaatctatgtccaaaatcgaaacctaaatggaaagaat

SEQ ID NO: 9191 - DNA, 1097 bp, Setaria italica
  Peptide Sequence Number=SeqID_75165
agtcaggaaaagcatggaagtgaatatattctggagtcaaggaaaagcatgaaaatgaacatttacacgatgatacctaatgtcctaatatgcaagagatgcgcataaatatccatctgaaattaccagttgcctacagaatagaaaaattcggcaaaaaaatcccgcctcccctgcaatcttagagccagaatttgcgcacttagttacagtagcaaatcctaacataccatccatcagaataacaggaccgtatccaatcaaatcaaacaactaacttggcccaaacagccaatctacaatgcttaaaactcaaagaaactacattgcaaagatcagggtagctgacgagcacaacttgtcggggatagatccgcagtacccgcaaggaaggaagaagatgactcctactaggattccccctgtaatcctactaggactcataccatgtaatcatactaggactcataccatgtaatcatactaggactcctaccttgtaaccgactagtaatcccaccccctgagtatataaaggagggcatgaatccctagataggtagtcaaagacctcatagaaccacaaaagaggaatcaaaatcctcaacaccaaacaatacccaagcgcaggacgcaatatacaacaccccaaacaggatgtagggtattacgctactgtacgtaggataccaagtaaagttagcatgtaaaaattccttttgtataacttattttagcctatttgatcagcaagatcaatgctgaagcaaagggtaaaatcagtgccaagttgatgtttggagatacagaaagcaactgaagcataagtgaaaacaaggtttcactggtaaattgttcactgaagagatgctacgcagttaaattatttgctacattttgtttgttaatcacttgaatcagtacactaggaacctcaaagatatctgtgacacaatgcataccagtcagcactagcgaagtaccacaatgttttcacaaggtataacaaatgggcataatttacacgtgatcaatttgttatgcattggaaaaagatgaaaaatcaataaagagactactgccattcctaaatagag

SEQ ID NO: 9192 - DNA, 540 bp, Setaria italica
  Peptide Sequence Number=SeqID_75166
ggggctgattagctacacccaacagttattttttcaagatagaagaagattcaagattttatgaccctcagactgattcttcgattcaacataaagctcgggggctactccatatggagtgcgactttcgctgccctccatatcagcaaagatgaagattaaaaaatcaagacgatcaaacgcttgaccacatcatagccttgtggcatccttgaaacactttgaagattcagtcagacaaagtacttgaagagcactagaactactcggcgaggatctaaaaaatactcaaggattgctacactcgactacgaagcgctcgggggcttgtcggggatagatccccagtacccgcaaggaaggaagaagacggactcctattaggattcctctataatcctactaggactcataccatgtaatcctactaggactcctaccttgtaacctactagtaatcccgtcccctggagtatataaaggagggcaagggttcctagatcggcagaaccacaacagaggacctaaatttctttctta

SEQ ID NO: 9193 - DNA, 845 bp, Setaria italica
  Peptide Sequence Number=SeqID_75167
gtcgtcgtctccgtttcgtcctcttcgctccgccgccgccgtcgccgccgctagggttttcggctatggacgcgacgcggcagcaggagcagcatacaggagatggcggcggagaccgctacggcttgcttctctactacaagtacgccgaggtgcccgacgccgccgcgctcgccgcgttctacgaaacgcactgccgcagcctctcgctcgtcggccgcgtccgcgtcggccccgacggcgtcaacgccacgctcggagggcgaatgacggcgctagagaagcacatcgccgagatgagctccaaagccttgttcgacggcaccgacttcaagctggcgtcctgcgaggaccccgttgacgagagggtcgccagggaatgcggcttcacctctctctccgtcagggttgtcaaggagctggttaccctgtgctccaatcccacctcggcacccccggagattttgggtgcagggaaacacttgtcagccgctgagttccattcagtgctccaaaatgttgctgggactagttcggatgcagtggcatctgcagagaagaatgaagtggttgtcgtggacgcgaggaatgtgtatgagacgcggatcggcaagttcaatgtaccaaatgtggagactttagatccggaaatcaggcaatacagtgacctgccttcatggatagatgagcatactgagaagttgcgtgggaagtcaattctgatgtactgcactggaggtatacgatgtgagatggcatcagcttatattcgctcaaaaggtgaaggatttgagaacgttttcagctatatggtggcatccagcggtatctggagcaatttccag

SEQ ID NO: 9194 - DNA, 301 bp, Setaria italica
  Peptide Sequence Number=SeqID_75168
tattatactacttatcacaaattggtggaagaatcattggcagagctgaagagaaaggaggattgccttctttgccccactggattttccgccaacatggctgtgatgacagccctggggagtatcagctctcttttggctgctgggagaaaacctgcagaggatgagagaatcgcaatcttctcagatgcactgaaccatgcttcaatcattgatgggattcgccttttggagcgacagcaagaagcggtagtgtttgtttacaagcactgtgacatgttccatcttgattctgctgtcc

SEQ ID NO: 9195 - DNA, 1309 bp, Setaria italica
  Peptide Sequence Number=SeqID_75169
gctaagctcaaagtcaaggtcactagctgtccggctacgtcatctcgcccaacgcccacaagtcacacccgccagcgcggtacacgtcacgcatgacctctgcaaatcgcaaccaaggattcactaacgccgccgccgccgctgccgcgtcgccagctgctccgttgccccagcgggactagcgcacggagggggtcctcggccagggcaaccgtcgcggtgcccatggccgaccatggcaagcgcagcgtcgcggagacattctccagactcagggtgcagggcaagactgcattcatcccattcataactgcgggtgatcctgacttggcaaccacatcgaaagcattgaagatcctcgattcctgcggttcggatgtgattgaggttggtgtaccatactcggatccactggctgatgggccggttattcaggcatctgcaacacgggcacttaagaacggcactacactcgattctgtcttagggatgctgaaagaggttatacctgagctatcttgccctatagttctcttcacatactacaacccaattctgaagcgtggggtgcgaaacttcatggctactatcagacaagttggtgtaaatggacttgtagtacctgatcttcctttggaggaggcactgttgctgaggagtgaggccattatgcacaacatagagctggtgctgcttacaacaccaaccacgccaacagagaggatgatagaaattgcaaaagcttcagaaggatttctttatcttgtgagtgctgttggagttacaggtgcacgttcaaacgtaaacttacgtgtggaacatcttcttagggagatcaagaaggttacagacaaacctgtagctgttggttttggtgtatcaactccagagcatgtgaaacagatcgcaggctggggagcagatggtgtgattattggcagtgcaattgttaggcagttatgtgaagctgctactcctgaagaagggctgaaaaggctagaggagtacaccaggaatataaagtctgctatgccattaaggtgatcacgcccatcatgaggaagcttattagaacaaaacagaatgacagtttcagtggtagtctggtcaaggattagcctcctagttcagctagtgttgtttggtgcttctgctgtgctgagagctctatccctgcctagaatgcaaaaatgaataaaggcggtagtttgttaattatctgaagtgtaagattgtgatattttatcatggttttgacattttttgagggaaatgattgtagaatttcatatgctgatgcttaaaaaaa

SEQ ID NO: 9196 - DNA, 231 bp, Setaria italica
  Peptide Sequence Number=SeqID_75170
aagcaacatgtgtggggaactgcctgtgatgttagagatggaaaggatgtaaaggcacttgtggagtttgcacgtgacaagcttaagcatattgatatatggatcaacaatgctggatcaaatgcatatacatacaaaccgctggtggaaacctctgacgaggctctcatggaaattatcaccactaacacccttggattgatgatatgttgtcgtgaggcaataaacata

SEQ ID NO: 9197 - DNA, 554 bp, Setaria italica
  Peptide Sequence Number=SeqID_75171
ctgatgatcaccaggtttgctgcatatggtgcaacaaagcgaagtgttgtgcatcttacaaagtcactacaggtaaagacaaccctttatgaggataaaaacctcaaatgcttggtttcagtttgaaattcccagtgaagtatgtgattgtgatgaaccatttgctttattgcctcatttaattgttaattgccttgatgaagactatacactacactgcaaatgcgtaacaactatttctccatgttcagaaccatttgagtatttttttttattgaacatgcaggagagcttttagacatatgtcatgtgtatgggtccagtgcttttgggctaacagcccggccggccctggatatgattgaatagagatatgaggagatcagagatctcaaccggctctgtttccataagccacaagatctcctcacccctttgtatatgtaacccatgtctttcaataaatctaatatactattccactcaatctccattgctttcaagagctgtgtatctttatattaaagatagaaaggatcatttgagagttattg

SEQ ID NO: 9198 - DNA, 1242 bp, Setaria italica
  Peptide Sequence Number=SeqID_75172
cggcgagagggacgacacgctgcccgagtttgacaaggctgtcctccgccagcagcgcgagcgattggcaaagttgaaacgagaaagtaaatacaatctacctgatgatgatgacgatgaaatcaatgttcatagcatgctctcggagaaggatgattttgatgaagaggtgccttttgatgatgagagtgatgaggaaggtaaaatggttctctcaaagaagcggctatctctccaaggtggtgaccgcccttcagagactgatctaccacaggaaacacatgggcataagagcaagaaggaagttatgatggagatcatttcaaagagtaaattttataaggcccaaaaagcgaaggagagggaagaggatgagcatcttgtagataagttagacagcaactttgcatcgttggcccagacacaggcgttattgtccttgacagagtcagctaaggttaaggtgaacaaaagcgattcaagtgctggcttgacagggaaggagatttttaccaaggcaaagtcggacacatatgaaaaactggtgaaagaaatggtgatggatcaacgtgcccgtccatcagacaggactaaaaccccagaggaaatagcaaaagaagagaaagagcgtcttgagaagttggaggaggagcgccaaaaaagaatgcttggaactgctgattcatctgatgaggatgatgacaacgaggatgatgaccacatgaagctggataactcaaaacctatatctggtgatgatcttggcgattccttcaccgatgattcaataaggaagaaaaagggttgggttgatgaaatttatgaaaaggagggtagaaagcttggtgatgatgcagcagcatccgatgatgaagaaaacgatgatgaacatgctgatgatgatgaatctgatgatgaggaagatgatgatgatggtgaacaggattcaagtgacaatgacttcggtaatatgtctgctagagattgggagcaaagtgacaatgatgaagttgatgtaggggacaatgaaatggaggatttccatgagaaggaacaagagatcagtggtaaagtggtgaaaaaagatgcacaaaatttgaaaaaagaatctaatgtgaaaacgcaagtcaaggatagtggcgttccttttgttatcgacgcaccaaataacctcaaagatctatcctccttgctagatggtcgttctgaaactgaaataattgagattagaattagaaggta

SEQ ID NO: 9199 - DNA, 1282 bp, Setaria italica
  misc_feature (1248)..(1282): n is a, c, g, or t
  Peptide Sequence Number=SeqID_75173
taataacaatagaaagaaattggaaagtaggaactcatctgcacaatcagatcaatgatcaatttatggaactcaagacacttaaaccatggctcagtatccgtgagcaagtgcatgaggtgaatccagtgaatatccttgaaatcatgggcatggatcctgacgccccttatttctcatctgatgattttaaggctggtgtactcctttctgtggccgagtgtttaagaggctttgttattatacatgaagaactaagctctttcccagaaatcttccttccaatatcctctctgctgcaagaaattttggataaatctgaagtgtctggcctgttacgagacattttccatgaagtcattgacttgattaaaaagagaagtgatgaacaccatgcttcaagagagccactccaaatgcggaagaagctgcctgaaccaatcaagcagttgaatccaaaattcgaagagaattacataaagggtcttgattatgatcctgatcgagatagggcacaaaggaagaagatgaacaaacgcctcaagagtgagaagaagggggcagcgcgtgagctgcgcaaagataatcatttcctctatgctgtgaaggagaaagagaggattaagcaagagcaagagaaagctgagcagttgggaaaaaacctagcgttcctccaagaacaggaaagtgcttttaaatctggacaactggggaaaggaaagggcagaaaaaggaggcggtgacactttcaccgtattcagcagttcagccgatgtaaatatacgagttatgttgcccttgccactcagtttgtgcatcctcctcccgtggtactagaagtagtgtgatctgctttgtctaactttgagctggtggacgcaccgaactataaaaggagatggtcaagatatccctgttagccgtatagagcataccccctttcatagctttgcctggaacagcaaccatagctatctgcaatgcttccagcactttacaaggggtctcgttgattcaactgattaccacacttggcaaaggctttagttctcttgttgctctgctctgtgctatactagtgtggctgcaattttcattagcacagtgaagaggttttttcccccagttttcttgtactctgatatgtcagctgtatgggtatggcaatcttgaaacactgaacacagttttgtactagtcatttcccccatatttgaagcaaatccttgatctgaaattgaacttctnnnnnnnnnnnnnnnnnnnnnnnnnnnnnnnnnnn

SEQ ID NO: 9200 - DNA, 308 bp, Setaria italica
  Peptide Sequence Number=SeqID_75174
tacaagagtaacaaggtctactacggaaaggtggccttaacttcttcgctgaatattttaagaaacaaggtcattgagttaggtggcagaaagtatcagatcaaaggatctcctggcactggtgcttttgctaaagtatacaaagcaactgttgatggtaatgcagaagaaatggttgctttgaagattcagaatcccccatttccttgggaattttacatgtatcgccaacttgatatgcgtatatctgaagttgagcgaccaagcttcggatatgctcacgaaatccatatcttctctgatgtcag

SEQ ID NO: 9201 - DNA, 396 bp, Setaria italica
  Peptide Sequence Number=SeqID_75175
gcggtagtaaggaacaggaggagaagtgaaggcaacaagtagcaagccaacaagaaaaataccccggggaaaaacggtagggctacgtacagcgcaccagcagcaatggccaaagcacaagcaaacgaagcatgcaccaactccgacgacacggcgacgaccaggacggacggagaacgggcgggaggaggagccgaggaaggcagccacggagccacgcaccccaggcgctccctcgctcgctcgagtccgtccccaccctgctccacatggggacggtcggaggtggacggcagaaacggacgacggcctgtgacgactgacgagccgagagcgtaccatgtacctactccccctggcttgacgcggcgctagctgtggcgccggtggggccgc

SEQ ID NO: 9202 - DNA, 562 bp, Setaria italica
  Peptide Sequence Number=SeqID_75176
caaaatgcctggccccaaccaccgccaccgcttcctcccggtctgctgcccaagcttcccggccgccggcgatccgtctccggctgctgcagcctccacggggcgcctgagggcgaccagcagcaggaagaagcggaagcggctgaagcctcgccccagctgcgagcgccgcggcgctgctgttctgtgacggcgctatcctcaccgagcttcttctaccacaccctatgccctccgctctcttccatagccgttcgcctctctttgctccggtgggtatttctcatccagctaaaagccaagtcttcttgaccttgcaagacttttcgcttgaagatgaattcctacctcgcaatattctttccttcgcgcctacctctcctcatctcacacctatcaatcctcccatccctcctgtccccgtctatccctcttgagcttggaacacttgcagctagctagccactactttcgtgcgaactccgctgttcagtgtactggaaaagaagttaaagtttctgatgtatccccgtgtcgtgctgccgttgtcgtttgtttggta

SEQ ID NO: 9203 - DNA, 809 bp, Setaria italica
  Peptide Sequence Number=SeqID_75177
gttcagtgtgaagtacttccattcgcccctcacccaattctgtgatcaaccgttcgcggcctcaaattacaaggtaactatgcaagttcggaccaagaaatgaaactgttcagataaatcattttctccttggtcacatcgtaacactacgatgaaggtaatgttgcttatgaatcagcatgcattgacttgctaaaatgaaaaacaaagcaatcggacccaggtgctaatgacttaatgtgttaagcttgtatgtaaatggattggatggtgtgttcaagaaagccaaacctttgaggttgttgtcgagccatttggactgcttggtgcggacatggctcgcccaccaccatgagtaggcattgctcgccgcccgctgcagcatcctgttcctccctccttccgctcaagagttcttcagcagggtatctggcgcttctcttctgtggcaagaaagggcgaggttatcagaatccgcaaaagaaaattaaaagcaaggggaaaaaatgtcattaatggtcaatgtttggtacctgcatcctcttagttggctgcacaagagagtaattggtaggtggtagtggagacgaagtggcaggactcgtaagaagtagtctctgggtcgtgggccccttggctgtgtgaggtactgttcacggctggtgatgctcggcacgtccgcattggctcgaaatttcttctgggatttgttcctccctctttcgagtgaaacttgtgatttggccatgcgtatataatcctgtaaaatttcttggggcctgcagttatgcgcctccatactgttgatt

SEQ ID NO: 9204 - DNA, 1045 bp, Setaria italica
  Peptide Sequence Number=SeqID_75178
ccccaattcccctcctgtggcacgcgcttcccatcggaatccatcgccatggcctccgcaccgacgccgccgcccctcctcccggtgaccaaccccgcccccggatcgtccccggccacagccggcggctccgacgcgccgatcgcgcagccggccttccggctcttcctgagccggctctccgactcggcgcggcgctcgctgtccgaccgccggccgtggggggagctcctcgaccgctcggccttctccaaaccggactccgtctccgacgccacctcccgcctgcgccgcaacctcgcctacttccgcgtcaactacgccgccgtggtcgccttcgcgctgggggcctccctcctggcgcaccccttctcgctcctcatcctcctgggcctcctcgcggcctggtgcttcctctacctcttccgcgcctccgaccagcccgtcgtcctcttcggccgcaccttctccgaccgcgagacgctgctggggctcgtcggcgcgtccttcgtcctgctcttcttcacctccgtcgcgtcgctcatcatctccgggctgctcgtcggcggggccctcgtcgcggcgcacggcgcgttccgcgttcccgaggacctcttcctcgacgagcccaacgcggccgcaggcaacagcgcggcccaagggctgctgtccttcctcggtgcacccggatctggggtttgaggaggcggacgcaagatctggtagggttcttctgctcgacaagttcgtcttaagctggaaattgtgtggatctagtcttgtagctgtagcttattgcttcccctattcgtccttgtgtacctccagatctactggcttagtgttggtttcgatcaatacacggcttttgcaaagacctgcaaatctatcctgagattttactttatggttcggtttagtgctaagtaatcaagtaatgtgagttcatgacgtcgaattatcaatgcagatggtgtcttcattcctatgcagtgatgaactgataataccttaatgagtttcgcttgttctgttattattattc

SEQ ID NO: 9205 - DNA, 571 bp, Setaria italica
  misc_feature (496)..(571): n is a, c, g, or t
  Peptide Sequence Number=SeqID_75179
acgccggtggcgctgcactcggcggtgggcatgttccacggcacgacggcggggggctggaaggcgctggacccgctgttcctgctcatgaacccggtgcccgcctacatcgtgcagttcttggacaccgtcgattgcggcggcggcggcccggaggcggcgcgcgccgtggcgaacgaggtgcagcggcggatcgcggaggcgctggggtacacgtgcacggggctgacgaggagggacaagtacctcatgctcgccggcaacgaaggcatcgtcgacgtcgaccacggcgccaggaagaaaaccgcttactagtagtgtgattgcaggcttcagcgaagggaagccgaggaattggtggtgtgcggtttgggatattccgtgttatatatgatctgtatatactcaactcagggtagtgtattgcaaaagtcacgtgtgcgtgtaaaatttacggaattcatagagatgtaagttaggataccccttttttttnnnnnnnnnnnnnnnnnnnnnnnnnnnnnnnnnnnnnnnnnnnnnnnnnnnnnnnnnnnnnnnnnnnnnnnnnnnn

SEQ ID NO: 9206 - DNA, 490 bp, Setaria italica
  Peptide Sequence Number=SeqID_75180
tgcccgaatatgaagtgtttctgcctgttaattgatcagacagactatcttgaacgcaatgtactatatgttgaaagatttttcagacatctgagttggatggcctgcaatttgtgtattgcttctggcattgttcctcctttcagtgaacaatgccagaagcaatacactaaagtctacttaggtgtcaaactattttagccatctggaactaaaatgcaatatgttgcatcttcttccttttgctgaagcttatgccaactttggagcaaaaggccgtccagcccaatcaaaatttccacgccattcctcttatcttgatgtttcccctagaacacatggtgagaataaccaatttgcggcatcaaacatggccaataactggggcattgagaggcatgaagcagatgtccgttcaagccttaagttgatgtgccatcccatcaacaaaccttggaagagcttgaatggagtttaagaggaagctaac

SEQ ID NO: 9207 - DNA, 339 bp, Setaria italica
  Peptide Sequence Number=SeqID_75181
gacttcttactcccaaataggttatccaggtttcgagcagagaactacacatatttcagctgcacttcaaccaatggattcaaagagcacatatccatatgcttctgataactattcagccccgaaggctcatgcagcatatggcaagtttcagcacgaaagacatggtgatcttgggaggacctatgggcgatattagatgttgactagtgggcgattgtgtgaggaatcagtgtcaatggtgtgctacttagaccctcttagcacctatttgctgttatgtagtttgtaggaggtaagggactcatatttttgtcagaactgtgtcttccagttgcg

SEQ ID NO: 9208 - DNA, 645 bp, Setaria italica
  Peptide Sequence Number=SeqID_75182
ctggaagaagaggaaggaggaagaaatgatctgtaaaatatgtggagactcgggccattttactcagggttgtccatccacacttggggcaaataggagaaatgctgacttttttgaaagagttccagcaagagataagcaagtcaggaatcttttcactgagagtatgataagccagattgagaaggatgtggggtgtaaaatcagaatggacgagaagttcctgtttgtcagtgggaaggataggttaatattagccaaaggtgtagatgctgtgcataaaattattcaagagagtaaaggtaaatatagtcaaagcagtccaaaacgggatcgctctaggtcacctgtacggaacaccactgagtttcgtcccagacactctgattctcatcagtcccatagcccaagaatttctgattctcgacggtcctgtagcccaagaatttctgattctcgacggtcccgtagcccaagaaatgcatcacgctctcaaagtaaaggatactataatgaaaggcatctagatggccgattgcatgacagtatgcccaagttttcaaaaggatctccacaagcttatgccaactttggagcaaaaggccgtccagcccaatcaaaatttccacgccattcctcttatct

SEQ ID NO: 9209 - DNA, 1334 bp, Setaria italica
  Peptide Sequence Number=SeqID_75183
agacttactagaataaactaattacaagaccccgaaaggactacaatagacaagacaataaatggttgtagtaattaacctaagcggtctaccacgctctcaaagtaaaggatactataatgaaaggcatctagatggccgattgcatgacagtatgcccaagttttcaaaaggatctccacaagcttatgccaacttggagcaaaaggccgtccagcccaatcaaaatttccacgccattcctcttatcttgatgtttcccctagaacacatggtgagaataaccaatttgcggcatcaaacatggccaataactggggcattgagaggcatgaagcagatgtccgttcaagccttaagtttgatgtgccatcccatcaacaaaccttggaagagcttgaaatggagtttaagagggaagctacagaattagctagagcccgtaatcaagaggaggatgaagagaactacaagcatcgagagtcgctgagagtgatgcgagaaaattacatggacagagtgactaccatgaggaatatgcatgcaaggacgtgggaagaattttttgaacaaacctttaaaaggcaacagcaagcacagacttcttactcccaaataggttatccaggtttcgagcagagaactacacatatttcagctgcacttcaaccaatggattcaaagagcacatatccatatgcttctgataactattcagccccgaaggctcatgcagcatatggcaagtttcagcacgaaagacatggtgatcttgggaggacctatgggcgatattagatgttgactagtggtgagtggacactcattttagattttgacgttaagatctgcagttcaaatgtattaagaggtaacatttttgtggtttgccgaactgacacaacggtaagctaatgttccactagttaggtttgtgactgacaatagatgcagacttggtagcctccatcttacgacaaaatgttcccatctatttctgagtcctaaaagcggttcccgcattttcagggcgattgtgtgaggaatcagtgtcaatggtgtgctacttagaccctcttagcacctatttgctgttatgtagtttgaggaggtaaggactcatatttttgcagaactgtgtcttccagttgcttccttttgcagctgaggtagtagcatcacaatgggctgttgaaattgtccgtggaatccagattattttattgtaaaaagctgcttttcaatgaattttctgattgctgtaaaaatattaactccgtatcggtcattcctgcttttcatctgctgcacagaaattagcaaaatttccctta

SEQ ID NO: 9210 - DNA, 510 bp, Setaria italica
  misc_feature (15)..(15): n is a, c, g, or t
  misc_feature (33)..(33): n is a, c, g, or t
  Peptide Sequence Number=SeqID_75184
aacacaagaaattgngtttttccggcaagatcncctttacaggatgcggcggtcatgtctcattccaccaacaaccgaagaaacaagtgacccttttgagcatctggtagcaactatcacccatcagagtcatctttgtccattgccccttactgttcaacctatcatatggaattatgatcattgccttcggctgtatccaactcctcacgcaatagtattgggtgacaagagcgagcagaaagccttcaaatacactggaattacttgctttaatccaggttcgtttgcgaatgacagcacctttgcagcataccgaccttgcactaaggaggttgagctttctgcactagaaggctaacataatgggagaattaactgaggctctcaaattggggtggcgtactgaagtgtatcatccaacccagcatttctcgaagtctggtgataaatgcacatcatccatccagattgtcatttctggctctgacagatgaattaaggagcagg

SEQ ID NO: 9211 - DNA, 263 bp, Setaria italica
  Peptide Sequence Number=SeqID_75185
tgtagattgggcccttcttattggtgctaagccccgagaccctggaatggagcgagctgcgttactagacatcaacggccaaatctttgctgatcagtgcgctcatttgcttgaaaaatgctccaaacattccagcgaaaaattttcatgcgctgacgaggttggacgaaaatagagcaaagtgccagctagcaactaaaagcaggcgttgttttatgaacaaagtatcgaacgtgacttagtttggggggaaaccattcgac

SEQ ID NO: 9212 - DNA, 251 bp, Setaria italica
  Peptide Sequence Number=SeqID_75186
ttcccctctcctgtaagatgggcaacacatttcttctcagcaagcagttcagcttcactctttttaatccgttcccagtgaaagaagccattaaggatacaaagtggttagaagaagaattcaccatgacagttcaaaagcgcggtggtgtgctcatccaaaaatggggcagatcttcagctgcatcaaccgctgtttcaatagttgatgctattagatcccttgtaactcctaccccagaaggcgattcg

SEQ ID NO: 9213 - DNA, 241 bp, Setaria italica
  Peptide Sequence Number=SeqID_75187
gcgagctgcgttactagacatcaacggccaaatctttgctgatcaggggaaagcacttaagtgctattggttggtcttgcccaaaaacctcaccagaggcaagtttgaagagcagatgatttgatatcatgccagccgcgcctgacacagcaatgttcactagcttcttccatgacttggtcttgtcatccgccttgaggtcgtaggtggtgcagaagaccccgaagcactccgcgtggcg

SEQ ID NO: 9214 - DNA, 332 bp, Setaria italica
  Peptide Sequence Number=SeqID_75188
cagtaaactacatctctcctggtagcatggtatcttccgctgtacgtaaactacatctctcctggtagcatggtatcttccggaagataccatgctaccaggagagatgtagtttacgtacagcggcagtaccggtggaacgcacctatgtatgttactagtacagtttcgggcggaaacacggatgataatctacgtacagcagctgcttgcatgatgcaacagttacatatatgtatattcaagaagtgaggctatgatgcaaactttatgcaccaataaagtaaccagacatgacgctaagaaaaaaaaaaaaaaaaaaacaaaaaaaa

SEQ ID NO: 9215 - DNA, 840 bp, Setaria italica
  Peptide Sequence Number=SeqID_75189
taacagccaagtatatatctgggtacaatgaacagacggtgtcgaaataacttggattcttgctatgctcttaaattttgaattgtgtcaggggaaagcacttaacgccgtggcatcgcggaacgtgaaagttatagttgttggcaatccctgtaacactaatgcgctcatttgcttgaaaaatgctccaaacattccagcgaaaaattttcatgcgctgacgaggttggacgaaaatagagcaaagtgccagctagcactaaaagcaggcgtgttttatgacaaagtatcgaacgtgactatttgggggaaccattcgacaactcaggttcctgatttcttgaatgccaaaattgatgggagaccagtgaaagaagccattaaggatacaaagtggttagaagaagaattcaccatgacagttcaaaagcgcggtggtgtgctcatccaaaaatggggcagatcttcagctgcatcaaccgctgtttcaatagttgatgctattagatcccttgtaactcctaccccagaaggcgattcgttctcttcaggggtttatactactggaaatccttatggcatagcagaggacatcgtgttcagtatgccatgcagatcgaaagggggatggtgactatgaactagttagtgatgtgttaatggacgtattttctctgggaacggattaaaaagagtgaagctgaactgcttgctgagaagaaatgtgttgcccatcttacaggagaggggaatgcattttgtgatcttccggaagataccatgctaccaggagagatgtagtaacatacataggtgcgttccaccggtactgccgctgta

SEQ ID NO: 9216 - DNA, 1498 bp, Setaria italica
  Peptide Sequence Number=SeqID_75190
atgacatgccccttctcggcgccgccgccaccgcgcgccgccgctccgtgcagcccctccgcccgcgccggcatcacctgctcgccaccgtccgatgctccgtcgacgccgccaagcaggtgcaggacggcgcggcgacggtcgcggcggaggcgccagcgtcgcgccacgcggagtgcttcggggtcttctgcaccacctacgacctcaaggcggatgacaagaccaagtcatggaagaagctagtgaacattgctgtgtcaggcgcggctggcatgatatcaaatcatctgctcttcaaacttgcctctggtgaggtttttgggcaagaccaaccaatagcacttaagttacttggctcagaaagatcaatacaagcactagaaggtgtagctatggaactggaggactcactatatccattgctgagggaagtcagcattggtatagatccttatgaggtctttgaagatgtagattgggcccttcttattggtgctaagccccgaggccctggaatggagcgagctgcgttactagacatcaacggccaaatctttgctgatcaggggaaagcacttaacgccgtggcatcgcggaacgtgaaagttatagttgttggcaatccctgtaacactaatgcgctcatttgcttgaaaaatgctccaaacattccagcgaaaaattttcatgcgctgacgaggttggacgaaaatagagcaaagtgccagctagcactaaaagcaggcgtgttttatgacaaagtatcgaacgtgactatttgggggaaccattcgacaactcaggttcctgatttcttgaatgccaaaattgatgggagaccagtgaaagaagccattaaggatacaaagtggttagaagaagaattcaccatgacagttcaaaagcgcggtggtgtgctcatccaaaaatggggcagatcttcagctgcatcaaccgctgtttcaatagttgatgctattagatcccttgtaactcctaccccagaaggcgattcgttctcttcaggggtttatactactggaaatccttatggcatagcagaggacatcgtgttcagtatgccatgcagatcaaagggggatggtgactatgaactagttagtgatgtgttaatggacgattttctctgggaacggattaaaaagagtgaagctgaactgcttgctgagaagaaatgtgttgcccatcttacaggagaggggaatgcattttgttgatcttccggaagataccatgctaccaggagagatgtagtttacgtacagcggcagtaccggtggaacgcacctatgtatgttactagtacagtttcgggcggaaacacggatgataatctacgtacagcagctgcttgcatgatgcaacagttacatatatgtatattcaagaagtgaggctatgatgcaaaactttatgcaccaataaagtaaccagacatgacgctgatctgctaggaacaaaaaaaaaaaaaaaa

SEQ ID NO: 9217 - DNA, 827 bp, Setaria italica
  Peptide Sequence Number=SeqID_75191
taacaactactacaatcccaaatccagggtccctttccaagatcaatcacccggaaatgcctctgtcttactacacaggtgctcttggcatgcctgggcttagtgcatacgctggattttatgatgtggccaagcctaagaaaggcgactacgtcttcgtttcagcggcagcaggagctgttggtcagattgttggccagcttgctaagttcactggctgctatgtggttggaagtgctggttctgatgagaaggtaaatctcctgaaaaccaagtttggctttgacgaagctttcaattacaagaaagagcaggatctgaatgctgcattgcagaggtacttcccggagggcatcgacatctacttcgagaacgtgggtggcacaatgctagaagccgtgctgctcaacatgcgcgtgcacggccgcatcactgtgtgtgggatgatctctcagtacaacctggagcagccagagggcgtacgaaacctgttgagcttgatcaccaagcgtgtacggatggaaggtttccttgtctcggactacttgggcgagtaccacaggttcgaggaggagatggtgagttacctcaaggatgccaagattgcctatgttgaggacgtcgccgaagggcttgagaatgcaccagcagcactcattgggctcttcgcagggcgcaatgttggcaagcaactggtcgccgttacccgggagtaatgtcatgttgcgtcgctttcagcaaccatgttctgcatgccctatccacctcgttatctcaccattgcccgctcctgctctcccagagacgccctaaatccttcaaatttg

SEQ ID NO: 9218 - DNA, 249 bp, Setaria italica
  Peptide Sequence Number=SeqID_75192
ccgccgcagccgtccgccgcgcgttcctcgtcggtgtgggacgtgccgcgggagccgagccccgccgcagggcccagaagaccacgaggatgtggacggcgagcatcagggagacgcccgtgatgagcagcgccacggagaggatctcggttgggctggtcatcctatgctgctagtctacagtgatgttgtcgacaggctatggaggagctgccctggcacctggcaggctaggcttgcaagtcttca

SEQ ID NO: 9219 - DNA, 195 bp, Setaria italica
  Peptide Sequence Number=SeqID_75193
tgctgcatgagtacaagtcatggcgacaatcttcgcctgtttcgtcattagataatttgctctctccaccgttgacttgtactcatgcagcattaaagaggcgagactttcttcaattaggtttcaaatttgacaatttactgatggaagaaagtgcacagatattggagatagaaacttttagtccctatgctg

SEQ ID NO: 9220 - DNA, 868 bp, Setaria italica
  misc_feature (844)..(844): n is a, c, g, or t
  Peptide Sequence Number=SeqID_75194
cttttgagcctcttagccctgaagaggctgcgaaatcaactgtaccagaaaggctaggattgcaatatgtacgtgggtgtgaggtcattgaaattcgtgatgaggaaggaacactcatgaatgacttcacaggaaagataaagcgagaagaatggaaaccacccaagggtgagatgcgtactgtccgaattgcactagatactgcacagtaccacatcgatgtaactgaaacagcagagaagggtgcagaaaatgtctatggaacatttaatattctaatgagaaggaagcccaaggaaaataatttcaaagcaatcttggaatctatacgtgatctaatgaatgaaacatgtgtggttccagaatggttgcataacatattcttgggttatggaaatccttctgctgcgcagtggataaatatgcctgatcttctggaagttatagatttcaaggacacttttcttgatgctaaccatgtacagcagagttttccagattatcaggttacatttatcaattctgatggtacagaaaacctgcatccaagccctcccttttaagattaggctgtccaagaaattgagggaaagcagtcatgccctacccggcaatgtgaactccagtttatctgttaagaacaacgataatatggctgatggtgagtctcagaaagagaaactaattgttgagacttacattccagctgatcctgggccatatcctcaagataaacctaagcagaactcagtgaggttcacaccccaacagattggtgctataatatcccggtgttcaacctgggttgacaatggttgttggtcctcctggtacggggaaaacngatacagctgtgcagatattaaat

SEQ ID NO: 9221 - DNA, 2646 bp, Setaria italica
  Peptide Sequence Number=SeqID_75195
gcagaactcagtgaggttcacacccacccagattggtgctataatatccggtgttcaacctgggttgacaatggttgttggtcctcctggtacggggaaaacagatacagctgtgcagatattaaatgttctatatcataactgtccttcgcaaaggacactgattataacccattcgaatcaggctttgaatgacttgtttgagaagataatgcagagggatgtgcctgctaggtaccttctccgccttggtcagggcgagcaagagcttgccactgatcttgattttagccgtcaaggtcgtgttaatgctatgcttgtccgacggctagagctgctaggtgaagtttctaaattggcgagatctcttcgccttccagaagatgtgggttacacatgtgaaactgctgcatatttttggttattacatgtttatgctcgttgggaacaattcttagctgcctgtgcgcaaaatcaagataatcccacttttgtcaaagaccggttcccattttcggagtttttttcagatactccacagcctatttttaccggtgagtcttttgagaaagatatgcatgcagccaagggttgtttcaaacatctttcaacaatattccaagagctggaagagtgtcgggctttcgaactacttaagtcaacggtggagagagcaaattatctaatgacgaaacaggcgaagattgtcgccatgacttgtactcatgcagcattaaagaggcgagactttcttcaattaggtttcaaatttgacaatttactgatggaagaaagtgcacagatattggagatagaaacttttatccctatgctgctgcaacgacaggaagatggccatgctcgtcttaaacgttgcattttaattggcgatcaccatcagttaccccctgtggtgaagaacatggcttttcagaagtacagtcacatggaccagagtctgtttactaggtttgttcgtcttggtatcccttatattgagctcaatgctcagggtcgtgcaagacctagtatcgctaaactctataactggagatacagagagctgggagatctgccttatgtgcgtgagcaagcgatcttccataaagctaatgctgggttctcttttgagtatcagttggttgatgttcctgattataagggcaaaggcgagtctgccccctctccttggttctaccagaatgaaggggaggctgagtatattgtcaatatatatatctacatgcgcctgattggctaccctgccaataagatttcaatattaaccacctacaatggccagaagcttcttattcgtgatgtcataaacaaaagatgcaagccatggaatattgagccacctaacaaggtcaccactgtggacaagttccagggtcagcaaaatgatttcattttactctctcttgtccggacccgttttgtgggccatctccgtgatgttaggagacttattgtggctatgtcccgtgctcgtctgggcttgtatgtgttctgccggcgttcactgtttgaacagtgttacgaattgcagccaacattccagcttctcctccaaagacccgataaacttgccttgaatcttgaggagtgcactccatttacagagcgacctttgggggaaactggaaatatccattatgttactggtattgaagacattgaacatcttgttaagttcagactggaacatcttagtcagatgcaatatatgcagtattatgctcctccagcaaatgagctacctccagcagcgccagaaaatattgctgatgtagtacctccagaaaacggcagtgttctgaatcagccaaaggagcacatggcagtggaagaaaatggtggtgcaagtgacaccacggtcagtaacaagatggaggaagatgcggttgaagcaaaggatggaacgatgcaggaaggaaacaagatgagtgaagggaatcgtgacggtgacgtggctgcaaaggataagggcgaagaacatgatgatgcaaatgacaagatggaggaaggagatgcctcgttgaaggacaagattgaggaagaaaattcagagccgaaggacaagatggatgaagagtgaggtgtggtggtggccagttcggaaattggcgaaggctgatggcccctggagatgtgggcagcaccaagatatgttgcggcagttaatgatggtaaaggttgtttactatcttggtcagcctgtgcagggaaatgttcaggcaacggtgtcttcatgtatcccacatgtgtttaaatggtgtaggaggtttttggcagtttgtctgaatcgctcggatatcagagattcggagctagcgttagcgtgcacaaaaaagtttcgtcaggagctctctccttgacatgactgctcgagcacacagccggaacgtgattttgtaaacttgattgttgtaattttggcccgactagcgttggaatttttgcagatttgatagccctactagactactgctgtcatgtgaaggcatataaattaggccaaatgttaccgaaaaatggtgttaaaaaagttttgagctccgtgctcgtctttacagtgtatcttgacaatttgttgcctaaatggctgaatctatgggcaacggttctcaacaaaaaaaaaaa

SEQ ID NO: 9222 - DNA, 698 bp, Setaria italica
  Peptide Sequence Number=SeqID_75196
gcatgatgaaatactagaagaaatatcaagcgaaaagtcatgaagctattaccagtttcaggtcgtgcaagaataattcaggtttatgcccataacttccatttttcattcttaaatctatcacatcaaaatcaaatatctagttcttccctcatcttgatgtacagttctgcaaagcacactgcacaacacagcaaagttctccgaccttaaaatgttcataagaacattctggcacttagcggtgttcgcagtcactgttttatcagaatccatttccactttgccagctactgtgccaaattcagcacagccatacagaagtgcatcacggacgcatgtcgcaattccagcatccccttgtataccaggcatatgcaaacgcattagcccgtccaaaacatatctccaccatccattagttctagagtcacttctttgctcctcagagttgtttgtgtcaccacataatccattccccactggtacttccataattggctgcagaatgaaggttagttcagcagaaatgtgtaaaagaatgatagtaacaaagcctttttatcccaaacaagtaggggtaggttgtagatgaaagccaacatgaaccaccagaaaaaaggaaaacattacaaaaaatattaaaggtgttgataatagtaatatttctaagggatctaaagactagtctattggtt

SEQ ID NO: 9223 - DNA, 1129 bp, Setaria italica
  Peptide Sequence Number=SeqID_75197
gctcccacctcttgcttctttgccacattggttgcagttattatgaacatcagagagatatgaaggacctggttgatccaattggttgaagccctgtgaggttgagggtaccaacgcatctgattgaacaaggctttggggttcagagatggtcacgacagctccattgggctcaccatcacttgatagcctcgctcttccaaccagcttttcgtaggagtcttctgtaaggtttgatagattatttgctaggagaataatattttgaccagccactttaagattttcccataacagtttcaggtcgtgcaagataattcaggtttatgcccataacttccatttttcattcttaaatctatcacatcaaaatcaaaatatctagttcttccctcatcttgatgtacagttctgcaaagcacactgcacaacacagcaaagttctccgaccttaaaatgttcataagaacattctggcacttagcggtgttcgcagtcactgttttatcagaatccatttccactttgccagctactgtgccaaattcagcacagccatacagaagtgcatcacggacgcatgtcgcaattccagcatccccttgtataccaggcatatgcaaacgcattagcccgtccaaaacatatctccaccatccattagttctagagtcacttctttgctcctcagagttgtttgtgtcaccacataatccattccccactggtacttccataattggctgaatgggacagcattctggaggggttgcaagctccttcccctgttgctcatgagagacctgaggattagcactctcttgtgaaagaagagtagtgttggataacatctggcatgccattgattcactgttagcttgatcaacagccagggaagaacatctgtcatgcattgttgtagtgagatggtcctgatcaagttgtgaactcttaggagagcacagcgcgtcacaactgccattaccgacaaatgaacctgatcttcttgctttcttcttctcctttgacatcatttgatcccttatctttttggcaacatcctttggaacatctgggcactgagggagattcttccatccaacaagatgccattcaatctagttacacc

SEQ ID NO: 9224 - DNA, 1855 bp, Setaria italica
  Peptide Sequence Number=SeqID_75198
aaatgtttttttctcactctaattggagattttcccgcaaacttgcctctgcaagtacatagctaaataggatacaaagctacataactcccttgcagttctgataccggtaaactgttttatatatcacctcatgaaagtgaaataaagcaaaaggaaatataaacaagaccaatatcctacaggattgttatccttgtatcatcagaaactgtcgataacgagttcagtgagaggactgcagctaatttcttgactgctcctgtcagtctctgaaactgaggcagggctcttcaaacaacaaatccttcaagtctcagtctctcagaacagcaatccatttacagagcaaaagaacagagttcaggatatactgcaatgaagattataaccaagctccatgctaatttggagtcaccagcagctcgtctgcgctgagctgctccactgcagatactagcaagtccaaaccttcataattcctactttgctgtccagcgttatccttctggtggagcttcagtgttctctcatactgtctcattccctcctttgctctcgccacactacacgatgagcaataccaccgccccttgggtattgaagtacggcgaggcgttatgcagtagagatggtaagcctcatcacagctatcgcacagaatggtcaggtcatcatctttgtcagagagacaaactcggcaaaggcaagatgggcagtaccagcacggtttgtcctgctgaacatcaccagcaatctgcttggacttcaagcaccgaatgtggtagtacttgtatagacagtggatgtggccacatatcaagaacctcttgtcatcctcttcaggatctccacatatcttgcatgagccacctgtatcaacctctggcagttctgggtccccaacagagctcacactggaaataaccattgctcttgagtcatcattaggtgcatcttcacattttggagacctgcacacctcaagcctatcgcagacaacacaatttccatgcaagctattgtcatcttcaactggttcgatacatgtagcgctgcagtttttacaacaccagcttccagttgaaatggatggattaggaggctcaatacatgaaatgtggcaagataccatgcacctactgcatttgagaacgctcccacctcttgcttctttgccacattggttgcagttattatgaacatcagagagatatgaaggacctggttgatccaattggttgaagccctgtgaggttgagggtaccaacgcatctgattgaacaaggctttggggttcagagatggtcacgacagctccattgggctcaccatcacttgatagcctcgctcttccaaccagcttttcgtaggagtcttctgtaaggtttgatagattatttgctaggagaataatattttgaccagccactttaagattttcccataactgtatcaattcgtgcaatgctgattaacatactatggaaaattttataaaatatatgcccatcaaaaacaaaatgtatattcagcttaggtaaatagcagtgctaaaacacacaatgtttactagggcagaaaataaacaaattgtgtatctgaacagacacatatcaaagatagttgttatttgatgcaagatatagctgtctactggacgtccaagactctgatctgttaagtgtgggcaccagtactatatgaggttaggcatccaatccctgtttagacgtgtgctagcacacattctctaggttggaagagataaccttgagcatgtgtatgtccaacctttttttctcgaacacgcaggagagctgcgtatcattatattaagaggaaaaagggataa

SEQ ID NO: 9225 - DNA, 341 bp, Setaria italica
  Peptide Sequence Number=SeqID_75199
agcggcgcgacgtgggccgacgcggagatgcagagtgaatggggcgaggtgggtgccgggggtagggttgaaggtggtagtagggagcggaggcgcgtagccggaggggggaaaggccgctgccatggctgccgcgacggccatgagagagaactcaatccctttcgcctgctccaccaggggggaggaggatgcagttgtgcgcagcctcgcacgtgctcgctgccgacgccgacgctgacgccgccgccgcgtcccgtgcgtgtctcgcctcgcgcacaaccccgccggacagctcctcgccgtcgcagcctcgcacgtgctcgccgccgcgtcccgcg

SEQ ID NO: 9226 - DNA, 431 bp, Setaria italica
  Peptide Sequence Number=SeqID_75200
gttcagatacgggttggggattggcgatgagcagcatcgacggggcggtagcaaaactgcgggggtggccttccccacctgtctctccgcctgctgccgccgctgctggaaccgccgtggatcatgtcactggaattattagcatattggcgattcgggaagcctcttcctcctgttcctcggccgccgccgccgctgctggtgccggtggaattgctccagccggccatggaatcgaatcgatcggtcgggtggaatcgttgaggaagcccgcgggacagtcggagacggtcggagtcgacgtcgatcgggggtcgatgacggcgaagaggaggaagaaaagggacgaagcagccgcccggcgagagggggaaggcgtcggattccgcctccgtctgaacttgccttccttcccgcacggaggaggaaag

SEQ ID NO: 9227 - DNA, 650 bp, Setaria italica
  Peptide Sequence Number=SeqID_75201
aaagaaagaaataacaaacaagtagtactaagaatgacaacagtgaggtattaatttcatagttattcttacatatcactgtggttttgtctttcaaatgatcacattgattgttctggactctggagtatgattgagtgatcactaacttgtaggagaacgcactctcagcactggagagtgctggacttttcaggacaggtggcttgatgaaagaaaaggtgctcttctgcagcactgaagttggaagaacttcatttgtgcgacaattggaggcagattttcacattgattcgagccttgatatagtttctcaactatctgtatgttatcttgtatctttacttctccttggtgcagggtttcgatattcatgttttacatggtgctgtgtttttggctaccagcgattcatccgatgccaactatttatttcctctatggaaggcggacaacttgcagccaacatattcaattctccaagtcttgagaagttcttctcttgaatccgggaaaccaacggattctccggagcataaagctagcagcacaggctgtttggtgtcatgcgacgccaatttggcagtgtgccttccaattagatatctcaggcatacagtggagctcatgtcgagatcgtccttgtgctg

SEQ ID NO: 9228 - DNA, 412 bp, Setaria italica
  Peptide Sequence Number=SeqID_75202
aaaccaatacttttacctacctaggaaatacaattagccggatttggatgcttatcacaataagatggctaacattggcactcacattgagttcttcactaatagaatattcacttcaagtttttgttaacaatagttcccctcggttatagttagacacttagaccagatgtggatacctgtgaatgtttaagatggtttacttacctgtttctctctcctgtatttgtctaagtgaaaaaaatcgtgtactttctcaggtgctcttctgcagcactgaagttggaagaacttcatttgtgcgacaattggaggcagattttcacattgattcgagccttgatatagtttctcaactatctcgattcatccgatgccaactatttattcctctatggaaggcggacaactt

SEQ ID NO: 9229 - DNA, 933 bp, Setaria italica
  Peptide Sequence Number=SeqID_75203
tcaaacttggagtccgcccctctcccgcgcacgcaatgccgggcctcgccgcggagcaggacgccgccgtctcgctggtgcgccgcgtcgcccgcgccctcaaccgccgggtcaccgacatcgtcgcgctgctcttcaaccacaagagcgctggatcgctcggcgccgtcgcggggttcgccatcgccgtcgtgttcgcgtggaggttcatgcgcccctcgcagggccgcccccgcaggcctgctcccaagcgtcccccgcctacccctgcaggggcgcccgaatctattgtttctgatgcgcccgagcctgtcggtgactcaggcaaggtaacgcggcacattgtggcgaagcgattgagcgggtgcagaaaggttacctgccgacttctcggtgttatttttgaggagaaaactcctgaggagcttcagaaacatgccacagttagaccttcagtggtagagctactactggaaatatctagacactgtgatctctacctgatggagactgtacttgatgacaacagtgaggagaacgcactctcagcactggagagtgctggacttttcaggacaggtggcttgatgaaagaaaaggtgctcttctgcagcactgaagttggaagaacttcatttgtgcgacaattggaggcagattttcacattgattcgagccttgatatagtttctcaactatctcgattcatccgatgccaactatttatttcctctatggaaggcggacaacttgcagccaacatattcaattctccaagtcttgagaagttcttctcttgaatccgggaaacaaacaacggattctccggagcataaaggtgctggtttagcagcacattatttgaagctgtttggtgtcatgcaattttatgacgccaatttggcagtgtgccttccaatttagatatcaaat

SEQ ID NO: 9230 - DNA, 597 bp, Setaria italica
  misc_feature (544)..(597): n is a, c, g, or t
  Peptide Sequence Number=SeqID_75204
tgtattattagttttcttctaacttattcttcgtatttctattccgtattgtcctaacttattttattttccttcttattggtaaggtcggtactaactttgtctagtcctgatatagtttctcaactatctcgattcatccgatgccaactatttatttcctctatggaaggcggacaacttgcagccaacatattcaattctccaagtcttgagaagttcttctcttgaatccgggaaacaaacaacggattctccggagcataaaggtgctggttttagcagcacattatttgaagctgtttggtgtcatgcaattttatgacgccaatttggcagtgtgccttccaattagatatcaaatcgggcaggcatacagtggagctcatgtcgcgcggcaagtagtgcctgctcttccaactggtccatggttgagtgtgctgtatatagtgagaacgctaagttagatcctcctcgccgatactgtaacatgaataatattggagtcatttcctttttctaatcagccatctttagttctagnnnnnnnnnnnnnnnnnnnnnnnnnnnnnnnnnnnnnnnnnnnnnnnnnnnnnn

SEQ ID NO: 9231 - DNA, 427 bp, Setaria italica
  Peptide Sequence Number=SeqID_75205
aaagatctagcaacctacatatctataaataagtgagagaacatgtgatttttcttttctccaagtacagtccagtttcgatccttttcactgacttagttgccactaatcaaactgcaccaggcatatcctgcacaagtatataaatgaggatgtttcactgggttcttggttcatcgggttagatgttgagcatatcgatgacaaaagactttgttgtggtactccacctggtaagcttctggtgcttcgtgccttaccaacttcattttgcttgatcgttaatccatcaccatcaggcttgatcatttaaattgccttcttaaagtgtaatgtttggaagtaccgcatagacaagaagggtgagtcacatatcttttttacttgtatccaacaacagattgcgaatggaaagctcaggcaggcc

SEQ ID NO: 9232 - DNA, 1725 bp, Setaria italica
  misc_feature (1700)..(1725): n is a, c, g, or t
  Peptide Sequence Number=SeqID_75206
cccctccgcgtccggctccatggattcgatctcgatccgggcggcgaggagctgaggccgggagggggaggaggagctgcttcttggaccgggaggggcggcagtcgtagcagagcactgcgcgggcggtggcaggcatgagctggagacgcggcgggggcgggggagtggatggaggcgtctccaggaggtgggccgtcctgctctgcgtcgggagcttctgcctcggcctgctcttcaccaacagaatgtggacgctacctgaggcgagcgagattgctagaccaaatgcaaaagtagaggaaggcaacatgccagttgctgcagagtgtggttctaaaaaggtccaagaaaaacaagattacagggatattttacaagttcaagatactcatcatgacgtgcagtcactcgataagacaatagcaagcttagagacagagctatcagctgcaagatctctgcaggagtccttgctcaacggtgcgcctgttgcagaagagttcaaagtttctgaatcaattgggaggagaaagtaccttatggtgatagggatcaataccgcgtttagcagtcgcaagaggagagattccatacgttacacctggatgcctcaaggtgaaaagaggaaaaagcttgaagaagaaaaggggatcataatccgttttgtcattggccacagtgctatatcaggtggaattgttgatagagcaattgaagcagaggacagaaaacatggggatttcatgaggatagatcatgttgaaggatatcttgcattatcgggcaaaacaaagacctactttgctacagctgtttcactatgggatgcagatttctatgttaaggtcgatgatgatgtacatgtgaacatagcaacactgggaaatattttgtccaaacttgcattgaagccaagagtatatattggatgcatgaaatctggacctgttctatctgaaaagggtgtgagatattatgagcctgagcattggaaatttggggaatcaggaaacaagtatttccgacatgctaccggtcaattatatgctatttcgaaagatctagcaacctacatatctataaataagcatatcctgcacaagtatataaatgaggatgtttcactgggttcttggttcatcgggttagatgttgagcatatcgatgacaaaagactttgttgtggtactccacctgattgcgaatggaaagctcaggcggggaacatttgcgccgcgtcattcgactggagatgcagcggcatctgcaattccgaggggaggatctgggaagtgcacaataagtgcgccgagggtgagaaggcgctgtggaacgccacgttctagcacaaacaagacatcgacagaaatcaaatactagatccatccattttgactgctgtttgtaaattgtcccaccgtttgtatgtaattcgtttgtaggtagtttgtgattttgtgacgggctaacaccaacgaaagcggaccacaattttaggtagtgtctgtctgccggtggcggtgaagaagccgaagaaggttgaagatgtggtgcattcttttgcgcgataaaggtttaaggtggtcattttgtaccgatctcctgtactgtatgtatggctgccaatatgtgagaccaaaaataaaacaaaaacttttctgcctccctggggctacaaaaaaaaaaaaaaaaaaaannnnnnnnnnnnnnnnnnnnnnnnnn

SEQ ID NO: 9233 - DNA, 1140 bp, Setaria italica
  Peptide Sequence Number=SeqID_75207
tttttttagaacattgatctgtcttgtgcaacagtgcaaggggatcggggttcataggacgcctaaaaatgtacaatgcaatgtgcaatattgttctagttccaatagaagaccatggatgcagagagtaaacgatttgaacttgagggaaacgtgattgctagatgtccttcaggaaagggaccgattctttccaggtattcttgatcatgtcaacaactttcatagtgtatctctcatcctctggatagtaagctatcgggtcatccagcagtggggcatccagatccaaaacaccttccagtgttgcatgcagacagtatgctgagtaactaatgtggtaacccccttcctggacaatcaatatttgcccattgctatgttgatcagccatgctccgcattatttgcccaattttcctatagccttccatggtcaagcattgccttccattgggatcaaacgcactagaatcttgaccgactacaaaaaccagaagttgaggctgaaacttatcaattgccggaacaaccaactcattcatagcatattcatacccagcatctccacttccattaggcaaaggtatattgagattgtacccaagccccttgccttcaccaatctcatcgacagagccactctgcggatgcgatggaccccatgacccatgcctcatgtgaagagaaatcgtaagcacattgtccatgcgatagaagccctctgctgtaccattcccatagtgaacatcaatatcgactactgcaacctttgagcgcccgctatccagagccaagtgcacagcaagcccagcattgttcagaaagcagtagccatcagcacggttgggctgcgcgtgatggccaggggggcggaccaacgcgtaggccaggttcccgtgcccgtctagtatatgcttcaccgcggagagcgtggttccggccgccagaagcgcagcgccccaggaaccggggttcaaaaacgtgccctcgcagaacttcttggctccggtggcgttcgcctgcacgagctcctctatgtattctgaggagtggaaggagaggagctcggaggcgtgggcgggcggccggagtgccaggagagaaagggcgcgatgggcccgcggcggaggatggacga

SEQ ID NO: 9234 - DNA, 321 bp, Setaria italica
  Peptide Sequence Number=SeqID_75208
aatctggtcaagtcggcgtgtcctgtaccgacatatttggcttgaagatgctcaagctgagagtttatgttgaacctatcgctagcctgcatggtggctgattgctttggtccggcacctcacgcgagagctgggaacttcggaatcaaaagcgtgcctgcggtatggcgggagccgggaggtgaaagcagccggcggccggcgtcgcgggattcacggtggtccgcggcagatgggcggaccggcggaaggcagcgtcggagcaaactagggtttgggaaattcgggggtcgatggccggtggggaaggctggagaggaa

SEQ ID NO: 9235 - DNA, 683 bp, Setaria italica
  Peptide Sequence Number=SeqID_75209
ttgtttttttttttttatagcagcaaccggttgttaacaatgcataaatattctgaaaaatgggattcgtgatgaagatccatgtaggacaagccaaaagcgtacaagcagccttttctcatgacaagggaattcaaagtttcgaacatagccacagatgatactagggtggccaatctagtgcgtcccttcggtagcagaccggagctaaacataagctatcgtagcaatgcactaggatcatgcagaaggtcctcagtcttcgtctctctcaggagggaggccacatggaagcaacattttctgcataaaattgtaacgctctcttccaattgattcattttcagcaatagcaaaatatgccaacattggatagtgcccaatataagaggcatagctgtccctctggatgtttacagcccattcaaatctggtcaagtccgcatgccctgtaccaacatatttggcttgaagatgctcaagctgagagtttatgttgaacctatcgcttgcctgcatggttgtcgattggtttaggctgttgcctcaatgcaagagccaagaatcccagaatcagaacccacctactcaacctcttaggttgctggtgtggttgctgtcgaagtcgctgctctcctggcggccgtgcgggacgaagacgagcggcggacgacgacctcccg

SEQ ID NO: 9236 - DNA, 833 bp, Setaria italica
  misc_feature (54)..(54): n is a, c, g, or t
  Peptide Sequence Number=SeqID_75210
acttcccctgttgttgtcctttggtctagttctcttttttagtttttttttttntttttttttttttttttttttcaacagacaacagctacattttcttaacagtgcatacatgttccaaacattcatgcatcgtaatagattgatactccctccgtcccaaattgtagctcgttttgacttttttaggtgcatagctttggcaaagctatgcacctagatatagtatatgcctagatgcataataatatctgtgaatctagaaaagccaaaacgacctacaatttgaaacggagggagtagaagacaagtcaatagcatacacaatatgctttaaacttgagttgcacatggtatcacggtggctaaacatatgttgctctcttgctaagattgaaattatgcaccagctcctcagtcttcgtctctctcaggagggaggccacatggaagcagcattttctgcatgaaattgtaacgttctcttccaatagattcgttctcagcaatggcaaagtacgccaacattggatagtgcccaatataagaggcatagctgtccctctggatgttcacagcccattcgaatctggtcaagtcggcgtgtcctgtaccgacatatttggcttgaagatgctcaagctgagagtttatgttgaacctatcgctagcctgcatggtggctgattgctttggtccggcacctcacgcgagagctgggaacttcggaatcaaaagcgaggactagttagacctacaaatagacaaagaagaccaaagaaatacccaagaaatacaagaaacccaacctaactacaaacctacttaaggta

SEQ ID NO: 9237 - DNA, 594 bp, Setaria italica
  Peptide Sequence Number=SeqID_75211
caaggctaacggaatgattgagcttgggagctttcaatcatctaattcaagtaagttggttcaatgtctgtggttagcttttccttgaagtaacttggcgacctgactaagctgcggtttgtcgctatctggattcagggtacagaacatgttctaaacgtgaatttcttgcctaatagagcataggccaagtttgttactgaagtctaaaggcatggtctatgttgttagttttttgcaagaagatacgaaaggattgcgtaaagcatcactgcatcagtaaactaactactccctcattttttgctatgcacctagatatagtctatgtctagatgcataataatatctataacctagaaaaagctaaaacgacctacaatttgaaacggagggagtaaaattgattgtagtcacatcgaagcatgctcatttgaatgttaataactgcaaatgaaataaccttgggaaggaagcgaggagttagctttgaactctactgcatatctgatgcctcagcaacagtaacgagagttagtaaaagaaatgcctttgtgatgagtttatgtattggtgtccattggtaaacagggc

SEQ ID NO: 9238 - DNA, 292 bp, Setaria italica
  Peptide Sequence Number=SeqID_75212
gggttggggttgtcggcgtcgtcgccggccttccactctgcttgacggaggcgctgatcggaagctggagccgcatgggcatggcaaggaggagcggtggtattattgttattcatggcctggttgaggtcgaggattgccatgtattactactatacgtgaatccgatcgacgagataagtggtgtctgccctgctcaagttcacagtgggatcggatgaatcgagtcacgcaacaagctagcttagctctaggatcggatagagattggctatggcgcgccgagcttgtg

SEQ ID NO: 9239 - DNA, 286 bp, Setaria italica
  Peptide Sequence Number=SeqID_75213
ttgcgtgtctcaggtacaagccaggcaaatccccatggcggcgcaagcgctgccgttcctccggtggagccggagcgcctcctccctccgcgcgcactgctccgccacagccgcgccgcgccgcctcttctccgccctccgccgccctgccgccgccgccgcccgctgcgaggccggctccaaggtcatgctcaaggggatggattactcggaactcgagaattgggtgcaggcgcaggggtttcggcccggccaggccatgatgctgtggaaatgcctatacggg

SEQ ID NO: 9240 - DNA, 1884 bp, Setaria italica
  Peptide Sequence Number=SeqID_75214
ttctaagatacggagtatataatattatatataataaagaaaagaccaccctctcaatcacccgccccaaatcctcggaatccctagggtgcagcggccggcgtagccgtggaaagtcagggagtgggtgtggtgcggaggcggaggcggacgcatgggtgctaccagcgatcgggcggcaaggctaggcaggcagcagcgggagcagatgctgagagaggattaaggctgtggaaggataggaggaaagggaaaaagcaagcattcaaaagaggaagaagacttcatcaataaacacaatgcgtaagaggtggaggactccgtctcggtttaacttcaagcgagaagacctcacgagtgcattacgcaaggtgcaccttccccgtggctatcctataccatctgaacattctgtgggcatgcgattggtgaatacatttgaagagcattttggtgacttggatggcaacaatgaagaacatgctagggttaaattacttgcttcaagcatttctaagtcagttgtctcccttgcttcatttaaggggagtgtgaggcattttgtatgcactggtattatttttggacacatgccatctgaaatgagtattctaacttctgctagcttggttagatgccttggagataaagctaagtttgttaataagttgaagattaaggtgcgcctgcccagtggcaagttagttgtagggaagttatggaaatatgattataaatataatattgctgttgtcaagaccaagtctttcccggaatttcatgcagctcacgttcataatggtgtccaatttaattctgagttgtttcaagctaatctggtagctattggacgtggttatgaatccggagaactaatggcttcaggtgggacactactgcataaaactagcagacttgatagccaagaacttatgatctccacttgtaagatcacaaaggctgggattggtggtcccctaattgattcgagtggaaacttcgttggcatgaacttttatgctaaggatgaaacacctttcatgccagtcagtatacttctgaaatgtttgaagcactttgagatatttgggagagttgtacaaccatggcttggcctcagggttgggtcgcttagggctgaaaaactgagtatctgtgaagaaatacgcaatagatttccacaagcacatggcatttatgtggagatggtttccgagggatctccagcagcaatttctggaatcaaagttggtgatcttatttcaacgcttgatggagttgccctgtcgaatgcacaagagtttcatgagttgattttggacaaggcagagtgtgctttaaaatgttctgaaggattggttttcgaggtttatgttctcaggccaagtgattgctctggatttgttgtcactcttaatggtgaggaggtcactatgatcaagcaaaacagctggcctgtacctgaggttgagtggctggatccaagcacaaatgacaactcagattttactatgtggtaaaatcctgtgacttacagagctgtgcctctctgaattatatgtgaagaatcctagcgggtacgaactacactatgaatgaggagcagtgttgtgtttgtccggtcgctgttcttaaatataatttataagtatttgttgtctgattcatattttgcagctgagttagagaacatgtttgcacccttgatagtgcctcggccgttgtcagatgtaagatagcgctaagcaagattcgtcctaatattgtgtaagactactgtttttatgtagctagcttattattaaacttgctagcataaggactgccggcacacaggggataggtttagttatgctgcccaacattgtttcattgcggattttt

SEQ ID NO: 9241 - DNA, 1515 bp, Setaria italica
  Peptide Sequence Number=SeqID_75215
ttttttttttttatgaactctataccactgtaatttccatgtccaatgaaatctgttcaattccaattatgggcaatgagggtggtaaggaatatcaaatgggctgccaggctttatccagctcggctgcctgccctgaacaaatgtactagacctactgaaaagggcagggatttgtatgtacacatagatgtctagggttcggactaaaccagaaacaatcagatgtttgcaactcgtcaattcaaacatctgaacagaactccaagctatccaggtgatgcgcaaacgattcagccaatctgtcggcgtcctggacccgcaggcgcgtgccttgctgcccgacaacaacagcagctacccgtgaggccagcaggccgatgcctttcaggtctgaagcaccccggaggatgccatacagaatcccagaagcgtatgcatcgccggcgccacaggtgtccacaggcaagcagggtggcggagggatgtatattgcttcacctttcaccccaatgtaggagccatgcacgccatcggtcacggatactaacggaacagagtggcttaagtatcttgtggctgacatggggctgtctgttgaaggtagctcgcagaatgcccttgcttcgttggcattggcgaacagaatgtcagcatagtttcctacaatgtcccaaaaatcattgtagcatctcttgatgcaagatacatctgatgctgtaacagcaatgagtgcaccattcttgtgagcatcttcacacgcttgcttgatagcttcaattgtgtgaggaagctcaaatagataaccttccacaattagtacatttgatttggacactaaattggccaagtctgaatcataactcagagttgacgatgtaccctgatatgcaagcatagttcgctgagcatccggtgttgttaggacaatgacagttccagtagtcccatctttgaccggcttagacaagaaatgcacattagcacgacgcaatttcgccctgtagaaactacctagtgggtcactgcccacactgccagccattgcaattttaagctcagggtagccagcagaccggctacttccaagccttgccagcgccacaagtgagttggacagggaacctccggctgcagccttgtagctgcacccatccatggcgcgcaagacccgtcccctctcctcatggtttacgaccttcctcgtgcccttctctatgcccaatctctcgaggaactcatcatccaccgtccctgagaaatcaaccatggcctggccgaggccgagcacgtcccatctctcgggcgcggcggccgccgcggcgggctcgacggcgtcctcgtcctcgtcatcgtcgtcgctctcgctgacgccggcgtccgagaatcccccgaggagcgctcgcgcccggcccttccaacgcaccacgaaccggtggtagctgcaggcgcgcggggagctccgggcccctgggcgcgcggcgagggggagtagcgagggaggaggtggggagg

SEQ ID NO: 9242 - DNA, 1156 bp, Setaria italica
  Peptide Sequence Number=SeqID_75216
tttttttttttttttgttttaaaattgcatgccaaattatgcattagtccatgagtctgtgaaaagctgttttcgctaaaaaatagacatatttatttacataagctgtaccgttttaacagaagcagctacccagtcagaagaacctatccagagaacccggaagaatcgagctcagctgtacaccaccctccatgtcagtaagttggaacaagcgtagcagtgctatttgcttcgacaatcatgctttcagaacttgaaacagcaatcactggcaccctggtgcagctgtgacattgcaggtaacttcctgctggggctgattcaccacaggatcccaaccgctgacggcttgtaagtttgtcatggctgttccaggtgcagcagtcagattgcttagagtgggggtccataacacctctcgtatgtgctttgttgataatgagaattggcattgccaggatgatatggatcattctgataatagggggcagtagaatagacaagctgaaacataatgtggcatggagtattggttataaagagaacatggagggggtgcttgcgcatactgataggtagaaggcaatggaccacatgctgcatatccagcataaaaaccatacccagttgttggtacatggcaagtatgtgtagcggatcgagtaggacatggaggtgcataggcttcaggtggcattaaatgagcagctggaggagcaacataggcagttggatgatgtgcataagcaggtggctgtgctggaagagctggaggcagaaaagcaggggcagagggccagttatcaacatcatgtgaggatgacgattgtggcagcgaagtaattggctgaaacaatgccctcagtttctcaacttgtgtagaggtaagctctgggttgaactttcctttgaaatagttctcctttatagctctttttaggctactctcagggatgggcatgaaatcaccatcgatcataaatttaacctgagcggggaagcggccatggaaggcgccggggccccaccatcagagtcagcgtggtagggcccacagaggtgcttggcgttgaagtcgtagaggaagaccgctgcccctcgctggatccgggagacagcctccagactccctggtggcaggcccagcacccgg

SEQ ID NO: 9243 - DNA, 304 bp, Setaria italica
  Peptide Sequence Number=SeqID_75217
cctgcgtcttcttcacgctcaccgacaggatgcggttcggccgggcgcacttgccgtcgtcggtgaggagaggggcgaagatggcgaaggcgaggatggtggcggtcgggaggaggacgttgaggcgcgccgtgccgcccaggacgaggttgaggagcacgatgaagctcgagttgtcgtcttcatcgtcatcctcgtctgggcgtggtggatcagcagcgtccttgctggattgctcaatgagaaccttgcattcttccttctccgccattgatgcggcgcgtgtaagagcgaggagggggag

SEQ ID NO: 9244 - DNA, 285 bp, Setaria italica
  misc_feature (272)..(272): n is a, c, g, or t
  Peptide Sequence Number=SeqID_75218
caagaacaaacaactcgtcgaagctgctttagttcattcaatttaaatcaaatttcgtgcctgttttttccacagatcagttcgccacggtaagctgtgccttcgagtggcacttgcttcgtccttatgggctgtggcgatggtcgaataatattattagtgcagtagtgctagctaagtaaattgtactgctttgttggacatgtatcagaagtatttttgcccttgcttcagagggtttgaaataacaaaaaaaaaaaaaaaaaaaaaanaaaaaaaaaaaaa

SEQ ID NO: 9245 - DNA, 145 bp, Setaria italica
  Peptide Sequence Number=SeqID_75219
agttatactctggaccctgtcacaaggtagttgctatcaggggacagcgcaaggcatgtcactggagcaagatgtccagaagcagtttcaattgtcttcgctccatctgaagatacctacttctctaacaagtccgttggtttct

SEQ ID NO: 9246 - DNA, 3092 bp, Setaria italica
  Peptide Sequence Number=SeqID_75220
gggaactcataatcttctgcagaaccagcagatactttgaaaatacgcatgagtgcgccaccggttgaatttgcagcatttcgaccatgatggaaaggaaaggtgtcccttgaccatctggagtattaggctgccaatggtgaagtgccacacgagctgctggagcatttacatctacaactacaatagagtcgtttgatacaagcatagcactggcaggaacattgcagcgatctggatgtggaagcacataggatttaagttcatttggattccgaaatattgtctgtagttgcaagacctctgccaatggcttcctcttcatgtgaggaacagtgagcagttgagatggtgtttgtccaaagtaagctatttgatcttgtgtagctctccgttccactgggtctgtaattttgtcaatgtcaacagttccctcatatgtgatgtagaagaatacattattggccattaccgcttctttgcccctctgtttgtatccaaatattagatcaatccactcatgcaaatgagcagagacatgttcactctcaagagccttccggtgtttatggacaaaatccacgtggttctcagcccagggaggcaattctacagaatctagctttcctccaagttgagttgtcccaaagtcgataccatttacgttagtaaatacctcagggaggtaaaacatctcaggtacaagctcttttacatcactcatgtcttcgagaacactatcccatgtaccagaaagatcagaaaacatgcgatcagcatggtcaaattttccgccttgcagttgtatagacagtgtcgtaaaaggctccaccctaaaaaggtaatacaggaccgtgccagcactggagtagtgtgagccgtaatgaaactttgggatgattggatcctcgaatgtagtgtaccgttcttggaacttctttagacgttcagggtttaatgctccaattggctttgaaagatcccgatacgtcgaaggatcatccaggttcaacactccggatttgtaatctgctactatccagggaaaaacagggtactgagtaatgtcattgtaactgcgcccagccagtgtgttcagttccatcaagtactcaaagttgctaatctcccaattagcccagcgctccatcaactgagttcttttaagaatctgctcagctctctgggtagctagaaagatgtcattcaagttgggaggttttgtgtgaacaatggcccgataagcatttttacgtgcatcaatatccccgaagtcaaaaaagaaattcgacctatctaccatgaatagttccaaagcgcttcgacgtagtaagtatcgtctgctgtatatctgatgaagcgatgagatcaaccagcttcgatctttatcttgttgatcgcattggccactagtagatgcagcatcatcaatgttattgtcacttgaacgctcatcaattataaagttaatcctctttgaagttacttggaaggttcctcggacaactttcaatggtcgcaccatcaaggatgggagttcaacaataattctctcatccgcttcgctcggcacataactgggtgcaagaactgtagatctaaccaaattccgatcagcacaaatatcagaacttcttgaacctactgatccttttactgattgtttatcagctgctgaagaatgctgaagctgatcatcatcaacactgctgtgagtagtgtcagtttctaactgctcattttccgcatttctttcatccatcgacatggcatcagccataattacagaagcagatgatggaagtgcgtttgctagtgaagagttagcatcctcagagttgcattcatttgactgcgcagcagtactaagaagcttccggtcctcataatcagcagctgcgcctaaatggtcagatcccttgtagtttcttttcataaatcttctcatccttgaagagctttcggtaaaatctaatttccagaaaacacgaacaggagtgcacagaggttctccaaaaggtccatatagtctacccatctctgttaggcaatgaagaagatgccgccatgctcgaagtccagttgatgcacgatgccgatttaacacatcaactagtgtttgcctctccatctcaactcgttgtaagtttcgtgctaaggccaaacaagatacaagaaccgcgacatatttgtatgaaagggctgaaaaatctcttccggcaactgatttggaatcagctgattgcaggcactccatccaagcagcactcatagcttctgatgtattccacctctttgcacgctcgatatcacctgaactcctccgttgtcctgatgttgccattgctacagcactaagaccccttcttgaaccaatcttagcagttcgctcaaggtcacgagcagctgccaatgcagcagcttttgctgctgctttgtcctttggggtggacccaggcttgttagctgctgtttcgataggcttctggaacttgagaaagtctgtagttttgatgctgctttgcgctccggcaatgatgtgtcacgcctattcacggtattcctaggaggtgttcttgtttctgtccctgaggcaccggcagccatcatggccaatgccatcgcaactggtggtgacgcaaaagcagcagcccaaccaggtgacaccatcaaaagagcagcctcaataggtaatgcatctgctgccaaagcacgatcatcagcaataagtggattttgtccatctgaagaagtaagctcatgaataccagccaaaagaggccgccatcttctaaggatggctacaaatggtggtaaaatcagctcaatgtattgtttccttaggggttttctgtccctgccaatagcatgccatacctctgaatagagaatagaggaagcaaccaacactctctgtcgcttagactctgtaattggcatattgaggatggggccaagcacactccaaagaagtgcagaccgaggctttcttggagatgaataactgttgccatcaaatggcatcatgcttccagcctggtggcccattccttctgttactacatcttttatgaaagacaataacataaagg

SEQ ID NO: 9247 - DNA, 1953 bp, Setaria italica
  misc_feature (1)..(48): n is a, c, g, or t
  Peptide Sequence Number=SeqID_75221
nnnnnnnnnnnnnnnnnnnnnnnnnnnnnnnnnnnnnnnnnnnnnnnntttttttttttttaggaaatgaaacacttcgatccaccatttcaacactcgttaatggctgctgccaagtcataacaggttcaaaatttcacatatacaaagtattacaggacactggcaaactgcagacaagcactgtacgacagaacaaccaaagaatgcgtagcaaaactgtgtagaattactattcacccattctacaaaatcatttaagatttttacagcctacttctctaacaagtccgttggtttcttccttatctaaatgacctgttggatacaaaatatatgacctagcctttgcacaaacattctaatcctcaattttgtacaaatggcgtgtcccacgccttccctttcattacttttactactgcctatgataactaatagactataaatcttgaagcaggcaatgatctactgaaatcagttcttactgaagcagcccatcaccttcccaaccaagacgtagcatctgatccactaccttcaagctcaaagctggatcagtgaagactattagctgcttatcagcagtagaaactagaagatttgtgttctctttgttcagagcaattgctgtgatgtcctgaccctttgccagcttcagtgtatgaaaaaccttaagtctatgcagatcaacaaagcatgctgaaggcacatgaacagactgctcagtttcagactgttttgaatcttttgatacatcatccttgccactgggtccaagctcatgatccccactttcagtaatctcatcgcatttgtagttgttgaacgaagatgttccgattaaagcaaaatgtccatctgtagaaatctcaatgcaactaacttgtccagagaaaggtgtcagaattgaggtagcaatagggagtccattgacagtgaaggtagataatgttttctttgattcattccaaaccaaaatgattccctgagaagataagcatattgcatgtgcctcacagacatcaagcctccttatcagccggcctgtgcgcaatgaatgtagaagaacacctgatgtgtttgatgaggaagcaacaagtcccaggtcaggactaacagaacagcaggttacttccccaagatgtcctctcattatatgcataggaccttcgatgcgacgtctctttgtttctgaggggttgctcacactgctagtattgctcgatagaggactgcgcggtgtcgttggcgtagtcggtggaggttctggagcatttttcttatgggaggagcctgtccgatgaaccctccagagtataactgtggtatctctagaccctgtcacaaggtagttgctatcaggggacagcgcaaggcatgtcactggagcaagatgtccagaagcagtttcaattgtcttcgctccatctgaagataccaacttcaacgaaccatcaatatgcccaccagtaattatctctttgtcacatgtgacagcaacaactgctgaactgcggattgcagaagcggcgaatgctatagcccttgggaactcataatcttctgcagaaccagcagatactttgaaaatacgcatgagtgcgccaccggttgaatttgcagcatttcgaccatgatggaaaaggaaaggtgtcccttgaccatctggagtattaggctgccaatggtgaagtgccacacgagctgctggagcatttacatctacaactacaatagagtcgtttgatacaagcatagcactggcaggaacattgcagcgatctggatgtggaagcacataggatttaagttcatttggattccgaaatattgtctgtagttgaaattaaagggtcaagctatgccaaatattagtgacccacataacctataatactatgaatatgaagtatgacagtacaagaacacttaattaagttacttattatt

SEQ ID NO: 9248 - DNA, 749 bp, Setaria italica
  Peptide Sequence Number=SeqID_75222
ccaaccggcaaccgctgcggcggcgcggccctgctccccggtcgccatggactattcgctcgcggcgctgaagatcttcggctcccagctcgccagcgccaccgaggcaccgtcgtccgagggcgcctcccccgcgcagatgctattcggcatccgcttccagcgcgtctggattcagggcgttctcctgtcggcggactacaacgaagccggcggagggcgttttgtgctggatgacggctcctgcattgccgacctcttcgtctcgcccagagaagccgagggccggccgtggagggcagggatgtatgtaatggtggtcggggcatacattgcaggagagtctaaggaaaacttcccagctatcaaggtgcataagatggtcgacctctctgcccagccggaccgtgaagcaatgtggtacatggaagtagctgaagcgtacaatttgttctacgagccattcttggctgctagtccctcgtcataactcataagcattagccctttgcccctttgatctctggtagttgtaattgtaggcctttaatcttttagaaatgttatgaaactatataccatggtcaaagggtattgtcttatggctctgcgtctagcaatgtgccatatccatggtcatgggtttgggacccaatcgtatttttaggaccacctaagaatttgggaagtcaatccaactgctgaaaaatggaacagacatttgtaaatattcgttgattaaaaaaaaa

SEQ ID NO: 9249 - DNA, 345 bp, Setaria italica
  Peptide Sequence Number=SeqID_75223
cgatcgacccgaccgtccccaaggctcaagcttccgcgctcattcgcgcaggcggtcagctccccgcacgccgccggaacacgagctctgtttctacatacacgagctctatttctgcattgcaggtcgcccgcgtcgggtatacaagcaaagcaaagcgaagcaagcaaggcgcagccatggagatggtgctggtgatctcgctgcctctggtggccctcgtcgtcatcatcgccatcatcctctgcatcatctgccgctgatcgccgacgccggccgcggtggcgcgcacaccatgagtcgtttgcagcgtcgtcgccgacacccgttcatcatcatcaggac

SEQ ID NO: 9250 - DNA, 473 bp, Setaria italica
  Peptide Sequence Number=SeqID_75224
tgacttagcaaatgcatctgtacattgatttacttgattttgttcctttctgtctcagcatgctctaagtgtcggctaaaggtgacacacagtggccagaggtcccaacaaagagggaaatctgtggctaagcaacttcttagaagccaaaatgataggtaatctcagtaccacttttttgcttaaactaatttagtacaaggaaaaaatatctcaccacggttcgtcccttttctcatttctactttagagcgttataagaaacaaaacaaaagaaaggacatgatagtagcattttaatttgtaagtaccaacaagtaaaatatctaaaatgagtggagttgatgagggtgaagacctgaagaggagcacaatgattgcaagaatcatcatggaggaagagttgccaacagcgagaaaaactggaagggttgttgcacagggtgataatgcagggacaaggacgagaccag

SEQ ID NO: 9251 - DNA, 927 bp, Setaria italica
  Peptide Sequence Number=SeqID_75225
tttttttttttttttttttcttacgcagtttccacaatatattcactatatcagttgatatgcctttctggctttgctgggaaggcagatgaactcagcatgggtcgataatcagatggtatacagcaatcattgttcggacggttaggggaacaacataaatttttgacacaaacatatgcaacttcattcactatctactagtcatctatggagacacgagtttccggtgcacatgctcatggagagagtgctcatcaccgtcgtgatgatggaacacatatgttaagattccaacaaggcacaggaccgtgccgacaaggatcttgtcatatcgctcgacccagtgaaacttgatttggctagcaccgtagaatgagagggccaccagggatgtcatcacagtgatggtgctgaagaggagcacaatgattgcaagaatcatcatggaggaagagttgccaacagcgagaaaaactggaagggttgttgcacagggtgataatgcagggacaaggacgagaccagcaacagccatcttttccattggatggttatgagcatggctatggccaccttttcctaaggcaaacaacagtatataacttcctccaagaaaaatcagcaacagcgaggcaagtttatgcacagtttcttcgccagctatagtgtttgccatagtaactgcagttatcccaagaagagccgtagaaacgacatgaagaacacctccaaatgcagtgacgaggagggtgcgggagagcggccaccgctgcgcgcgcgcgacgatggagaaggggagccagtgcgtggggatgaaggagtgcagcagcgacaccgtggcgatgcccccgatcgtggacgcctcctccgcggtccaccgcagcccgcccagccccccgccgccgtccatcccttggtcggccc

SEQ ID NO: 9252 - DNA, 254 bp, Setaria italica
  Peptide Sequence Number=SeqID_75226
ggtcgggcgagctcttctagccgccggccacgcaggagccgctccgggcgctcgcgctggcgtcaaccgcgtcgcctcgggtgacgtcctctcggacctctgcctggcctctcgttagccagcccggtcgcctcacgtccgtacagctcgtggtctcgcagcagcagagcgcagcgcggcgacagcgagcaagcatggctcactgccttaccggcagcagctctcccgccttcttctcgcgctgcccacctcaa

SEQ ID NO: 9253 - DNA, 2647 bp, Setaria italica
  Peptide Sequence Number=SeqID_75227
ccagtccaagcaagcgttgcttgtacctctggctgcagcaggcatggactcatatatgcgtgcgtatccttatgttgtaaagctccatatgttgcgtgagttggaagacttcaattccttgttgggagatgagtcatttgttgataagtcattcagtgcagaagatccggattttctgaagttaacgaaggactgggaaaatcgtctgagatgtacacaaccgtctctgtggacaagggagcctttactcgctctccgaaggatggtttttagtcagagtcatatgaacactcaagttgggaactgctggcttcagtatgctaagctctgccgtttggctggtcattatgagacagctcaccttgcaatactggaagcagatgcttcaggttcccccaatgctcacatggagaaggcaaagtatctctggaatatacggaagtttgatagcgctatagctgaacttcagcaaacacttctcaacatgcctgcagaaattttgggaagtgctgtcctttcatctctttgtagcctctctcttgctttgccaaatgcaccgatctctgcaacacaagcatcaaaagagaatccagatgtgtctaaagcccttcttctctatactagatggatccactatacaggacaaaaacagagtgcggatatcaaatctctctattctagagtaacagaattgcagcccaagtgggaaaagggttttttctgcatggcaaagtttgttgatgatttgcttgttgatgctaggaaacggcaagaagatgagaagattgcttgtaaagttggaccagtcccttctagctcttctaactctgtaagcagggcaactgaagagaaagagaagccttggtgggaatcgcttcctgtagtgctactatgttatgcaagagcacttcacaaagggcataagaatctttttcaagcactacctcgaatgcttactctttggttcgaatttggaagcatgcacacccgagatgtatcttcatctgatcaacgcatgaaagagattcacggaagggtgttaggcctcatccgtgggtgcttgaaggatctaccaacatatcagtggcttactgtgctgtctcagttgatctctcgcatctgtcaccaaaatgatgatgttgtcagaattgtcaaatatatcatcacgtctgttttacgggaataccctcaacaagctctgtggatgatggctgcagtgtcgaagtcaacagttcctgcaagacgggatgctgctgcagaaatattacaatcagcaaagaaaggatgtcgacgtgggagtcaaaatagtgcactgttcaatcaatttcctactctcatagaccatctcattaagctctgctttcatccggggcagccaaaggcgaaaacaataaacatctcaactgagttcagttccttgaaaagaatgatgccactaggaattatcttacctgtccagcaggctttaacggtgactctgccatcatatgattcagatatgtcggatcaatctggttttcaccccttttcagtttctgagcatcctacgatagctggaatagctgatgaagcagaaattcttacctcccttcagaaaccaaagaaggttgttttcgttggaagcgacggagttgctcgcccatttctatgcaaaccaaaggatgatcttaggaaagactcacgcatgatggagttcaatgccatgatcaaccgtctcctctccaaggtccctgagagccgcaggagaaagctttatatcagaacctttgcagtggtaccccttaccgaagattgtggaatggtagaatgggtgcccaatactcgcggtcttcgtcatattcttcaggacatctacataactcatggaaagtttgataggatgaaaacaaatccacaaatcaagaagatatatgacacattccatggaaaaatgcctgacgatgaaatgctgaagaaaaaaatccttccaatgtttcccccagttttccacaaatggttcctgacaacattctcggaaccagctgcatggtttcgtgctagagtggcatatgcgcataccaccgcagtgtggtcaatggttggccacattgttgggcttggcgacagacacggtgagaacatccttttcgactcaacaaccggggactgcgttcatgtggatttcagctgcttgtttgataggggcttgctactggacaagcctgaggtggtgccatttaggcttacacaaaacatgattgatggcttgggcatcactggatatgaaggcatatttcttaaggtctgtgagatcactctgtcggttctcagaactcacaaggagaccctcatgaccgttcttgagaccttcatccatgatccgctagtggagtggaccaaaactcagaaatccagtggaggcgaggtccagaacccacacgcacagagggccattactaacatcaaagcgaggctccagggagttgtggtgggtgtgaaagccactccgtccctgccgctttccgtggaaggccaggcacgccgcctgatcgctgaagcagtctccctcagcaacctcggcaaaatgtacatctggtggatgccgtggttctaacagtaacgggcccttccttccccttgctaagtattaggtatgtatataagcatg

SEQ ID NO: 9254 - DNA, 407 bp, Setaria italica
  Peptide Sequence Number=SeqID_75228
catctgtgtttgattgaaatagcatggaactgcctacccaggtcaacaccagctgtaggactagcacaagcgtcaatgacgctagagattgtgaactcatttggcttcacgccatgcatggacatcttgatgaatacatttgtggcaccatcgcaatcaccagcttgggcatagcaagtcaacattgcagaccacgcaacaacatccttctggtcgatcatttcgaatatagaaaagggcttcttgagtgctgcaaagcttcgagtaagagtgcagaagtgcagttccaacagttggcaaacactgataatttgtcttgatcacctgggcatggatttggggaggcaagctggccactgatgctatcagcattgtcgagtaggtgaactcatttggagcaacgccat

SEQ ID NO: 9255 - DNA, 311 bp, Setaria italica
  Peptide Sequence Number=SeqID_75229
ccggcctccccctcatctctattttttcccccgttcccttctctctctgtctctcctctcttggtctgcctctcctggcggcgacgattgggccagcggcggcgccattcgccacgtcttcgccgggcccttggccggcgacggcgacgagcacccaccaggacctcatgctgattgagtgaacaccagtaccagtagcatgtcaacttgcctccacgtccaagatcccaggaaaagtgctatgtctcgtccgctcgattttgctgtacttaaatacaaaaatcaaaagctttcggaacaattggaagttc

SEQ ID NO: 9256 - DNA, 584 bp, Setaria italica
  Peptide Sequence Number=SeqID_75230
gtccacgtgctaaaatactctcttaatgaaagtaaattagagcaacgtgtaattgcagccaatgaagctgaagcaatgtctcagcagagactagcaactgctgaagctgagattgctgaactaagtcagaagctggaagcttctaggaggtattccattcatattcactcttcctttagtatttagaaatgcaattagaaaagagaattcatttctactttttataatgggtgggctcaagactgttgaaatagtaaagaaggcataatttcctttataaaattttcaagtaaagtgatatcaagtgctggatttctatggctcagagatctagtgagactatctgtatacactgaagtctaaacatgaagaatgtgaagcatatgtggtagagattgagagcattggccatgcatatgaagacataatgtcacaaaatcaacaactactacagcagatcatcgaaagagatgatcataatacaaagggtcgagtcgtagcttggtatcaatggttaaggagtgtcttgttataattggtgccataaaataagtgaataagatgaaatgtatggcaaggaagcc

SEQ ID NO: 9257 - DNA, 500 bp, Setaria italica
  Peptide Sequence Number=SeqID_75231
ttttttgtttttttactttttttaaattttttactttttaaaatttttcttttaaaagttttcttttttcggtttaacttaatttggtagttcacaaatttgagttccgtgctcttgagagtagattcaatgatttaaaagagaagcagaggacacataatgagacacttgtcctggtcaaaagttattgggagcgacttgtagcagatcttgagttagattctgtttgcaaaagtgaatcttcgaatttgagctgcagtacaggccacaacaacgtacgaaaggatggtatatgcatggccctagaaagggacttcttaaatagacttttggaggctggtgccacagaaagttcagattgttctcccagttgccatccgggaaatgatgtccctccagaacaatcatcaacgattaatgttctgcagaagttcttccttccatcaagtgatctgtggcatgtaaataacgagtttgtttctgctgctctcactaaactg

SEQ ID NO: 9258 - DNA, 311 bp, Setaria italica
  Peptide Sequence Number=SeqID_75232
attgctcttttgaaaggaattttgtaacaaatggtttacatgcttgtctgcagaactacctgttatcagttgatgattattaaaaataaattatttattcgaatagcaggctaactagatggcccttgcgattttatgctgtctgctttagatgtttcttattttgtccttcatatacatggaaatcttatttatcggatggaatatgcttgcccccctagaaagggactttttaaatagacttttggaggctggtgccactgaaagttcaggttgttctcccagttaccatctgggaaatggtgtcgctc

SEQ ID NO: 9259 - DNA, 1180 bp, Setaria italica
  Peptide Sequence Number=SeqID_75233
taaacctaaaacaaattaagttaaaaagaaaattaacaaggttagaataacggaataagactttagtttggacaagaaagacaatttaatcaaaaagttgatctggctgaaatccctcagaaggtttctgcatactgtgtgtctagaattgctgaccttgaaaaggatgttctgaaactatgtaatgaaaagaatatgctggtgctgaaacttgaagaggcttcaagagaacctggtcggaaccaagttatctcagaatttaaagctctggtgtcatcactaccaagggaaatgggtgccgtgcaaagtgaactgtccaaacacaaggatgcttccttacagttgcattctttgcgagcagaagtttcttcactttctagcatcctaaccaggaaggtaaatttcatttgttagtttacacaatcagtgtgcaagtgttgtggcattggtttgccgatgcgtcatttctgtttttttgtttgtaggaacaagaaattgaagagatatcatgtaaatctggccatgctgattctgacataacccaacttcaatatctggttcgtgatctaagggaaaatgcagaggagcttaagctatttgtggaattgtataagcatgagtccactgattccagacagctgatggaatccagagacagggaactttctgaatgggctcgagtccacgtgctaaaatactctcttaatgaaagtaaattagagcaacgtgtaattgcagccaatgaagctgaagcaatgtctcagcagagactagcaactgctgaagctgagattgctgaactaagtcagaagctggaagcttctaggagactgttgaaatagtgcggaaggcatattttcttttataaaattttcaagtaaagtgatatcaagtgctggatttctatggctcagagatctagtgagactatctgatacactgaagtctaaacatgaagaatgtgaagcatatgtggtagagattgagagcattggccatgcatatgaagacataatgtcacaaaatcaacaactactacagcagatcatcgaaagagatgatcataatacaaagcttttcatggagggtgttaaagcaaaacagtcacatgatgctttgcacatggaagtgtgctccttgcaaagaaatttgcagcatgcaaacactttgatggatctgt

SEQ ID NO: 9260 - DNA, 771 bp, Setaria italica
  Peptide Sequence Number=SeqID_75234
tacttactaaaagtaaaagtacttgtaacttggttattgtcgttggtagtaggtcttcctaaagtcttctaggtctagttcaatggatgaactacaagctaaggttgggagcaatcgactggaagttgccgagctgcttatagaactagagaaggagaggttcagtaagaagagaatagaggatgacttggatctaatgtcaagtaaagccaattctctaagagagaagaaagataattcagcagtcctgcaaaagcttcatcatgaagtcaaggaatataggggaatattaaaatgcggtgtctgtcatgaaaggcagaaagagattgtgattgccaagtgctaccatctcttctgcaatcagtgtatacagaagtcacttggcagccgtcagaagcggtgtccatcctgtggacttagctttggtgttaacgacgtgaaacctatctatatatgaaacagaacgttgaagtttgtgtggcacgcatctaggtcaactgcttttggtgcttattaatttcagatatatggtagaggaccatggtggtttagttggtgatggaacataagcttttgtagcttgtacaacagaacgtgtaagatatactagatgtgattactggtgcatgcaggcatgtataatgccggtgttgcttcatgcaccttttgtaaagtctgtttgccctgcccaagctggtagacagaatagcctgaccacatcatctattcagttctttcaagggggcagaaagatccagcacaaatcaaaat

SEQ ID NO: 9261 - DNA, 3590 bp, Setaria italica
  Peptide Sequence Number=SeqID_75235
tgtaaccagtggcattggtgggtaattaccgaccaactccacgagaaggttcaacagagaggtttctggagcagcaaaagaggtgctccaaaactccacctccatttgcactacagctccatggagttggcaactccatagagttttggagttggggtgtttggctgtaattttttgatagagttgctggagtttaggagtggagccgtgccaaacagggcctaactaggggaagcctccagctccttggagttgagttggttgttccagagtttcatcgagttggggtgtttggggatggagtcaattcgatggagctgaaaaatgtggagtggagcagtcccaagcagggctaaactttctactaaagagcagtgaactagcaatattgtgaaaatttattatttgaggtgtttgtttcattgctcttttgaaaggaattttgtaacaaatggtttacatgcttgtctgcagaactacctgttatcagttgatgattattaaaaaataaattatttattcgaatagcaggctaactagatggcccttgcgattttatgctgtctgctttagatgtttcttattttgtccttcatatacatggaaatcttatttatcggatggaatatgcttgcccccacccaccagcttggcaatgactgctgtgcgtgcgtgcttcaggacctcatgctgattgagtgaacaccagtaccagtagcatgtcaacttgcctccacgtccaagatcccaggaaaagtgctatgcgtccgctcgagctgtactttaaacaattggaagttcacaaatttgagttccgtactctcgagggtagattcaatgatttaaaagagaagcagaggacacataatgagacacttgtcctagtcaaaagtcattgggagcgacttctagcagatcttgatttggtttctgtttgcaaaaatgaatctttgcactcgagctgtggtacagggcagaacaatgtacaaaaggaaagggactttttaaatagacttttggaggctggtgccactgaaagttcaggttgttctcccagttaccatctgggaaatggtgtcgctccagaacaatcatcaacgattaatgttctgcagaagttcttccttccatcaagtgatctgtggcatgtaaataacgagtttgtttctgctgctctcactaaactgccagaaaatgaacacagcaggcaactacgcagtgctaccagtgacgtgttatccaagcttaataaagtgatacaggtagtagataatcttcacttgaaacacaggcagttagcagggaactaccaaaaacaaagagattcgaatgcctggaatagagctgaacagaaacgtctgaaagaggagttgaccagtactgttgccaagttggaagaaaccaagcacgaactggcagcactgaaagcacagggagacaataagcaagggactccgattcttgttcctacagttggaaacaaaaatgcaactgcagagaaggtgagagataaacaaagagaactgcaagatcttgaagctacccacaaggagttaatggaactgagttcaaagcgtctggaggaaattaggagactgcacaaagagagaattgaaactttgaacaagttagcaacttttcagaatatactgacagatttcaaaagcattcgttcttccaaagcttttcagcttgttaatgatcaacttcagaagtctcaagcagagttggatgatcaccgaacattgttagagaaattacaggttgatatggatagctttatttggcaagaaaggcaatttaatcaaaaagttgatctggctgaaatcccccagaaggtttctgcatactgtatgtctagaattgctgatcttgaaaaggatgttcagaaactatctaatgaaaagaatatgctggtgctgaaacttgaagaggcttcaagagaacctggtcggaaccaagttatctcagaattcagagctctggtgtcatcactaccgacggaaatgggttctgtgcaaagtgaactgtccaaacacaaggatgcttccttacagttgcattctttgcgagcagaagtttcttcactttctagcatcctaaccaggaaggaacaagaaattgaacaaacatcatgcagatctgcccatgctggatctgatataagccaacttcaatctcttgtccttgatctgaaggaaaacatagaggagcttaagctatttgtggaattgtataagcatgagtccactgattccagacagctgatggaatccagagacagggaactttctgaatgggctcgagtccacgtgctaaaatactctcttaatgaaagtaaattagagcaacgtgtaattgcagccaatgaagctgaagcaatgtctcagcagagactagcaactgctgaagctgagattgctgaattaggtcagaagctggaaacttctaggagagatctagtgagactatctgatacactgaagtctaaacatgaagaatgtgaagcatatgtggtagagattgagagcattggccatgcatatgaagacataatgtcacaaaatcaacaactactacagcagatcatcgaaagagatgatcataatacaaagcttttcatggagggtgttaaagcaaaacagtcacatgatgctttgcacatggaagtgtgctccttgcaaagaaatttgcagcatgcaaacactttgatggatctgtacaagcagaaaattttccgcctagaggaccagctgcgagtttggtcagagcgggcgaggagactgtcggaggatggaatgcagcaatctatttcactggtcaattctcaaagaaagctgactggtatgcgtggagaggctccaaagctcaggcagtcaatggatgaactacaagctaaggttgggagcaatcgactggaagttgccgagctgcttacagaactagagaaggagaggttcagtaagaagagaatagaggatgacttggatctaatgtcaagtaaagccaattctctaagagagaagacagataattcagcagtcctgcaaaagcttcatcatgaggtcaaggagtataggggcatattaaagtgtggtatctgtcatgataggcagaaagaggttgtgattgccaagtgctaccacctcttctgcaatcagtgcatacagaagtcacttggtagccgtcagaagcggtgtccatcttgtggtctaagcttcggtgttaacgacgtgaaacctatctatatatgaaacagtacagtgaagcttgtgtcagcatgcatccaggtcaaactgcattcggtgcttttggtagacagacatggtggttcagtcggtgatgtaacatagcttttgtagcttgtacaaccgaacatgtaagataggctaaaatgtgattgctggtgcctgccgacatatataatgccagtgttgtttcatgcaccttttgtaaagtctgtttgccctgcccaaacagttagaatagcctgaccattcatgaggataggtgcttcccgccatagtgagcaatgtacaatccatagctttagttagtttaattgatgtagctgacaataagaatgtagg

SEQ ID NO: 9262 - DNA, 271 bp, Setaria italica
  Peptide Sequence Number=SeqID_75236
acggacggacgtactacctccgacggcggcgacgccggacgctggctccgcatctccctccgcgccggcggccaccgccgaggctcccaccgcgccgccgccagtttacagcaccacaggagctggatcgaaggcgactccggcgactggagcggtcttgtcgcacgccggcgtagctaaatccgcggcgatctccgtgtctttcgtcgtcgcaatcgcgtccatgatggctttctgagttcagtataacgtagtgtctttgattggttca

SEQ ID NO: 9263 - DNA, 320 bp, Setaria italica
  Peptide Sequence Number=SeqID_75237
cttcgtcgtcctccttgttagctcggaagcatagcaagtcgtcgttcagcgtcacgagccccaaggtggcgcgcccggaggcggcgctgataccgtccaagggcgcgccgtcgccggacttgctgggcattgacgacttcaagctcgatgagcctagcccagcagtggaggaggtcaatgaggagcagcagaaagagccggagcgcgagcccgaggatgcgaaagccgaggactcggagttcccggagttcgacatcgtggacaagggcgtcgatgagcctagcccagcagtggaggaggtgcagcagaaagagccggag

SEQ ID NO: 9264 - DNA, 295 bp, Setaria italica
  Peptide Sequence Number=SeqID_75238
tcggcagctgcgagcactacgagcacatcgacgacggccggcgagtgcatcggtggtggtggagatgcatcggcctcgacggtgagattccgagtcttgccgccgccttcttgtcctccacatctcggcggaactacgcacgggcaggggcagcactccaaatcaacccaagcctaatctcgcctctcttctcattgctcgatgttgtggtgatgcaatctctctcctgctttatgctgggtgaaattcaaccgattgtgaatgggatttgaatctctttggtagcatattttcg

SEQ ID NO: 9265 - DNA, 314 bp, Setaria italica
  Peptide Sequence Number=SeqID_75239
tagatgttggacagcccacatcccacgaccctaagaaaagttgacctactcatggcacaaagaagtctgaccagaccagcaacctagcctatcccaaagcaggacttgatccgcaatcccaaaacatcatgaaagaaaagagaattgctaccacaaggtttgccaaaaatagggaacagctatatctatatatttaaaatcacaattttggtcgaaccaacagtcctccaatgcaatggtattctattactccaagttctgctttgcaggttagaaacatgtgctcaggtgccgtgtaatcaagtaacagtaaa

SEQ ID NO: 9266 - DNA, 272 bp, Setaria italica
  Peptide Sequence Number=SeqID_75240
cggaagcgaagctagatgactggagtggagctagatggctgtggcggtggcacgaggtcgagcgaggcgcgcgggtgggtttaaataacggatggggcttctaaaaaaacaaaataacggatggggagtcggcgagtgtgtgcacgggattgcacgcctcatggcggatggaaagggggctttttttttttcaagcggagggcatgtgaccggcggcgaatcacgaatgcaaggggagggccgaggggcagcgctgcggagcgatgtgctcg

SEQ ID NO: 9267 - DNA, 372 bp, Setaria italica
  Peptide Sequence Number=SeqID_75241
tacggccccaatgctgagccaatgtgagtaggcctgttttcctctcttaacatgttgatatcctgttatttgcgacatgcttgtagctaggtgtttactttgttaacataacaacatatgaagcctgttcctgaactcatttgttgtaaaccacccttgatttgatttgacagattatatgctaggaccagggaatatgattaggttgatgtgtctgtatatatatatatattttgtgttcttgttgatggttttatgattgaccatctatcttatattacccaatatatttttaatcttctgatatgagcatatgaatgttgaatgtactagttcagccttcattcatttagtcttgataatgtgaatgaa

SEQ ID NO: 9268 - DNA, 869 bp, Setaria italica
  misc_feature (288)..(288): n is a, c, g, or t
  misc_feature (818)..(869): n is a, c, g, or t
  Peptide Sequence Number=SeqID_75242
atgcaacagaagcaagacaacacacctggcagccccaaggtccaaagcttaaactcctcccctgcaccctccccagctcccactacctattaccctttcagtgagacgcagacagaatctcaggttgttggctatgaggaagatctgaccggcaggcaaaagatcatcgacagagttcgctctcagagcattaatgtaactccatcaactgagaatccttgagttagtccggaggcgagctacacacatcttgcttgcgttgcagcgagatctgcccctcaattcgtnagggggggatattgttcggccttgttggcatcagcatgagcagcagggatggcgttgtgaatatggaggcgcgcctattctcaaccagaggatccacgcgtagcataggtggagaaagattctcatggcatgacattcggccgaagtaccacgatttggtataagtaactcacccctgttctctagattggataacacgcggaacagagaccctgaaatcaaatctttgctgctctgtgtgatcctgtatattaacaagttggtatgtagcaaggaccgacgaaacaggctcttgttcagtattgtggatatcccagtggtttggtgtatctggtgagcatatgagaaagccctacaattgctttgtgtatgtaatctccttttcctgtagacaacgcttcccacttagctgtttgttccggacatgtgagtaggtgctgtgagtgactcttctacttcgaatcctggattggttcgtatgtttatgaatgatcacacaaacaaagtcattatctttaagttaaactttnnnnnnnnnnnnnnnnnnnnnnnnnnnnnnnnnnnnnnnnnnnnnnnnnnnn

SEQ ID NO: 9269 - DNA, 1426 bp, Setaria italica
  Peptide Sequence Number=SeqID_75243
tctccgacctcgccgactttcgttcggtccgacgcggatgaggtcccccgcagcgtcaggcagctggccaagctcgccgcctcccccgaggtctccgccaccgtctcctccctgtcggaggcggtggcctccggggtacttcgcggcgcgggatcctctggcgccgcccccgggtccgccggcgccgtggccctctccgatcgcctcgtggacaagctcttctccgaatccggtgagcggcttgcgtccgcggtcgccgggagcttcgcccgccatctcgtgctcgccttctactccgccccgtctgctccgggggaggtcgtcctccccgacgatgtgggtcaacgtggtcgccactggaaagtgccggaaagcaattagcaattgggttgaggtcttcgtgggtacagctgtgagggagttcattgacaagaccatccatatcaacacctacgagcagctcttcgaagggctcaccaatccgaaacatgatgccaaggtcaaggaattgcttgtttcggtgtgcaatggggcagtggagactctggtgaagaccactcaccatgtcctgtacaagaccgatgataaattggatggcagtggcaatggaaatggaaatgctgaaggtggggaaggatgggtggagacagtgtcgagcacgttggcagttcctagcaacaggaagtttgttcttgatgttactgggagagtgacatttgagacagtaaggtcatttctggagtttgttctttggaagctacaagacggggctaggaagggtggagacactgtggttgataatgggctgcgtgtcgtgaggtatatgagcgataagtcgatggttattgctacaatctgcattacattgtgcttgcatgtgttgaatgggactaggctcttggtaaccgcttgagggtgtgttatgatagcttgggggttgttcaacttgcatgatctagcacattgcttgtataaaactataggtaatcatattgaaactgtaaacacaaatacgaagaagagtggaagaagatgaattgtgctgcaaggttctggtgtactacctacctgctggcaaccgaattaatggtttgagattggtttagcacagggatattgagagaatggttgttctgttgtactacctgttggcaactgaattaacaggattatttggcatttagatgtgtggtatgctttgaaaattcttttatcagtgtaacatcactggtgtatcacggggatttccagcgtctccagatcaattggcatttggatgtgccatatgctttaagattttcttagtcagtgtaacatcactggtgtcattgggatttccagtcgctccactaaattgtgtgcttttgtacctcttgtcatctatgtgtatagctgagcttgccttctcacaacattatcgaactgt

SEQ ID NO: 9270 - DNA, 1479 bp, Setaria italica
  misc_feature (1)..(25): n is a, c, g, or t
  Peptide Sequence Number=SeqID_75244
nnnnnnnnnnnnnnnnnnnnnnnnnggtttctactgcattctcgatttccttggaccattgcactatatgtgaggtcacttgcaaatagttgacagctgcactgaattacgatttacttcacgatttgtaatttcctaaactgggaaaaatacaactgcaaaagtctgtgcacgtttcgtatgcattcttcctgttcttcccatctgcacatttctgcattttgttactctatggtaaattggccatccaaaaatacacaccaatgcacagagatccaatatggcgctccattttctggccagatcacgagttactaccatcaggattcttcttgcgcctcccattagagcctctattccagaggacctcagagtcaattgtgctgagatgggcatcatcaagcctcttccatgtcttgatggacttcactcctcgccattcaccgttgtctgtcttctcaagttgcacagacaccacccttgctctccttgaccagccggccttcccataggcatggtaaccaaatccgccagcatagcatagctgaatgccactaagcttcccacagaagtcattaaggtgatcatgtccgacaaaggcagccctcacatctccagcctccaccatggacgcaaagaacccagagttgattgatgctgagctaataccctcctgttttactcctgtgaaattgactgctgtaaagctgctgaactctggcagtggaatatggaagaacacaaggccaggtgctggctccttctgcttcggattttcattcatatattttctctgtaggcttgaagatgtttgttggaaccaaacttgctgtgaggccttgatccaaccataacctttgattgatggtacagtagaatagtcaccactgtctaggaaataaaggttaagcactgatttttcagccagtgatgttccttcaacaccagaaacttccaaattgtaattgccgtagccatcaatttcaactccttcgggattgagtcctgaaaggctgttcttcatgcccacaaggtgacgcattacaccctcacgagatagcgtaccctcttggtcatgattcccaataacagcagcccaaggaagcttcatgtcaatggctggagcaatcgctgcatccatagacttggccgcatcagttgaatccgcgccatagatgttatcaccggtgaagatgacgaggtcggggtcctctgcgcggaagacgcggtagaggaaggcggtggtgttgaggtcggagcacccggccacctgggacggtggcacgtcctcgcagcccgtggtccggccgtcggcgtagtgcatgtccgccacctgcaccaccttgaacgtcccgctgtcgcgccggaactgcagcctgccgctgctgctgctaccagcgtgcgccccctgcttccccttccccgcggcggcgacgaggaccaggagcagcgccagcggcaccggccggtcggcgccgc

SEQ ID NO: 9271 - DNA, 378 bp, Setaria italica
  Peptide Sequence Number=SeqID_75245
ctcgaacaggagctcaagtcccgtaaactccacttttgttacattccttgtgctgctagaacactgaaggttattattgaagcaggcctggaaaatgtcaaaccaattttgtccaagatccgtgagtttattcttcaaaccaattcaaatcaggagatgatggaggattttaagcactggactgaagtttatcatgaaggctcatggaaactcccctttgaccattcagcaaattggagcagcgattataatatgcttgatgtggtaaagaaggtattgcatagtccattcctgtacattttgtcatctttggtctttggcaatgtagtttaactcttcagttcggtatacctgttttcctttaggcacctaatgcaa

SEQ ID NO: 9272 - DNA, 298 bp, Setaria italica
  Peptide Sequence Number=SeqID_75246
gtttccgccctccgctccatttcccggcgcattaaacaaagtcgcgaggtgcgccggcggcattgccgagatttccgtgattcttgcggtttcttggccgtgctgctttcttggctcaccttctacttcttttcttgggtttgtttgttttggttgcaatttggttcagtttcagttgggttcagttcctgtgttcttggagttgaggggtcgagtcggcggcgatgggtatcctctcgctcatcaccggcaaggcgggcgccagcgggttcgggtcggcgtccacggcggagcaggt

SEQ ID NO: 9273 - DNA, 847 bp, Setaria italica
  Peptide Sequence Number=SeqID_75247
tgtgtgccttggagtctcagcctcagtgtttctagcggcaatgatgctgcatcagaagcaaggaagaccatcatggagaagaacccaatggcacgtattgatgttctgaagcttgacctcagctccctcaagtctgtcagggcttttgctgaccagttcaactcgatgaaacttcctctgaacatcttgatgtaaccctctacagctcttgttatgttttcctttctttgacatgaaaaattcctgtgcttccgttaaatttattttcagtgttgtatgtatattacttgcacacctattttagcattttcctcgtctatattacactgaattaagaattacattttccttctctgttctgcagaaataacgcaggtgtaatgttctgcccttttcaactgtctaaagatggagtcgagatgcaattcgccaccaatcatctcgggcactttctgcttaccaatctcctccttgataatatgaaagccactgccaagtctacgggtattgagggtcgcattgtgaacttgtcatcagttgcccaccaccatacatacccaaagggaattgacttcgacaaactcaacgatgagaaaatgtatgtgcctttaatttattggtctttgtggggattgactgttgatagaactgcaagtaatgatcttttattggcagatacaatgataaaatggcttacggacaatctaagctggcaaacttactgcatgcgaaggagctctctagacggctcaaggtattattttgtcctcctagtattgtcccttttactttaatttcgggaaggatagaaacctgaggacaaatatgcccatcatggccctgatgc

SEQ ID NO: 9274 - DNA, 1511 bp, Setaria italica
  misc_feature (1446)..(1511): n is a, c, g, or t
  Peptide Sequence Number=SeqID_75248
tggtcttctaaggtaagtaaggtagtcttcctttcgtctattgtctagttaagttttgtcctagtctttagtatttgttccgttaagtcctacctacgtttccgccctccgctccatttcccggcgcattaaacaaagtcgcgagtttcagttgggttcagttcctgtgttcttggagttgaggggtcgagtcggcggcgatgggtatcctctcgctcatcaccggcaaggcgggcgccagcgggttcgggtcggcgtccacggcggagcaggtcaccgacggcgtcgacgccagccgcctcaccgtcgtcatcacaggaggagctagtggcattggtctggagacatcaagagtcttcgcccttagaggagcccatgtcatcattgccgctagaaacactgaggctgcatcagaagcaaggaagaccatcatggagaagaacccaatggcacgtattgatgttctgaagcttgacctcagctccctcaagtctgtcagggcttttgctgaccagttcaactcgatgaaacttcctctgaacatcttgataaataacgcaggtgtaatgttctgcccttttcaactgtctaaagatggagtcgagatgcaattcgccaccaatcatctcgggcactttctgcttaccaatctcctccttgataatatgaaagccactgccaagtctacgggtattgagggtcgcattgtgaacttgtcatcagttgcccaccaccatacatacccaaagggaattgacttcgacaaactcaacgatgagaaaatatacaatgataaaatggcttacggacaatctaagctggcaaacttactgcatgcgaaggagctctctagacggctcaaggaagaaggagcaaacatcacagttaacagtgttcatcctggattgatcatgaccaatttgatgaggcactcctttgttctcatgaaggtgcttcaagttgcaacttacattctgtggaaaaatgtgccccagggagcagcaactacttgttatgtaggactgaacccacagttgaggggagtgacaggaaagtactttgctgactgcaacgtggagaagacgagcaaactgtcgagaaacgatgagttggcaaagcaactctgggacttcagcgaggagctgatcaagtctgcgcaatgagagccagaagagctagatcagagaggtgtcccgattctgattggcatgtggcgttactagtgatgactggttaatgtgtagcagtggttatagtaacctgagcaatggtggagctcatggtgttcaggaataaatctccatgcatgctttcctagattattctggtgtgacaaagatcaacatgtgtgttcttgttaatattcgtccaatatatgtgcagttcagttctggtttgaaagtaaaaaaaaaaaataaaaacaagaacaaacatgttgatctttgnnnnnnnnnnnnnnnnnnnnnnnnnnnnnnnnnnnnnnnnnnnnnnnnnnnnnnnnnnnnnnnnnn

SEQ ID NO: 9275 - DNA, 1116 bp, Setaria italica
  misc_feature (1077)..(1077): n is a, c, g, or t
  misc_feature (1100)..(1116): n is a, c, g, or t
  Peptide Sequence Number=SeqID_75249
tttctttagagtgtataatcatcttttgcaaagtgcctcaagctttactgtgtgtgctttgcttctgggtcacattgtactgaatcatgtggatgcgaaccttgtcttaacaagccaatgcaaggggctccaaggactgcactagttttacctctgaaacctgtccaaacattggagactggtcaagattcaatggaacaacttataagatcccctatggatcttattagaagaaaatgcacctgcaagaagtcaggctgcctaaagaagtactgtgactgcttccagggaggggcaggatgctccatcaactgtaaatgtgaagattgtagaaatccgtttgggagaaaagttggcgttattttggatggtaaaagtgctcttgctgcgcctgtactgaatgaaagaaatggggcagaagttgactcgagtgatgacgaagatgattattacatgaatcgacagctctcaccaatccctccatctccagtatccagggagtcttcattccaacaggagacactagtcggtgtcgaagtccagaccatgaacgggcacctctacccaaaaccactgactcaagtgcggcctgagccgccatcctggcagctctccaggagaccagttgaggaagcgcgtggagaacaatggcgcttctcgaggaggcccagtgaggatggaacctctgatgccatggaagcacatgcaatggcccagagggacaacaagaagccggagatccatgtggacaggttcagcatcccgcggtgcatcgaggtgatgagtgccatggcagacctctcaccaattgagaagtcgctggcgcccgacgtcttcttggacccgagcaaccgggagatcttcctctcactgagtgtagatattaggcccatatggctgaggcgcaagatgaagagcctcgtttagctagagatagcgtgagaaattttcgtcggcttataccttaataaacctgtgatatactgctgtagatatggatggcttgatgatgagttatgaactgatgtatgtacctggcgctaagttatggtgcatgttgccacgttataaatggancccagcctattattagaattagnnnnnnnnnnnnnnnnn

SEQ ID NO: 9276 - DNA, 2194 bp, Setaria italica
  Peptide Sequence Number=SeqID_75250
aagatggagattgtcaatgacacactactttttccattgaaagcatattgcaattttcatcttcagttgtgcgatgcagcttgcataaggtacaatggatattcttccttttcaaattagctggtcgagttcaaagatgtgtattgtgaactggacatttacaaaatccataaggaaaagaaagagctaatcacattctgaatttaatgaggcagagtaacagcttccagacccaaataagagatttcctatctggaaaattatcgttctgggatttcacccaatgtcgcacttgttaatccaggtgaggtcaaaacaaactaattggcatttaacttctctccaaggattttattcaacaaaacagggttggccttacccttcgatgctttcataacctggcctgcaaaaaatccttgcaacttggttttcccagcacggtactgctcaagttgctttggattgtcagcaattactttatctaccattgcctcaattgctgctggatctgctatctgaactaaatctttctcctctatcacacccttaactgttccacctttggcgataagctcaaccagtatctccttgccaatcttcccactgatagttccgttcttgatggattcaataagttcagaaagctccagaggtgttaatttagtttcattaatggagagcttttcattttttagataagcagcaatgtcacccatgatccagttgcaagccagctttgcatcagctccatgttcaagagtagaatcaaagaaatgagcaacattatcgtcattagcaaggaacagaacatcttgcatgctaagtcccatattctcataacgcctgcgttttgcttctggaagctccggcatggacttgctgatttcatcaatatagtcagtactgagaacaacttcaggaagatcaggctcaggaaaatatctgtaatcggcaagtccctccttttttcgcattgtaaaagttttctgagaagattcatcccatagacgggtttcttgcacaatttgatcagcctggccttctttatggagcataatttgccgggagatctcataatcaattgccctattgatctccgaaaatgagttcatattttttatttctacctttgtaccaaattctgattgtccaacaggtcggacagaaacattcacatcacaacgaagggaaccttcctgcatgttaccattactcactccaaggtacctaacgatcctttgcagctcagcaccatactcagcagcctctatccctgttctcatgtctggctctgagacaatttcaagcaaaggtacgccagccctgtttaggtcaacctgagaataactcctggattcagaatgaagcagcttgccagcatcttcttccatgtgaacccttgtgatcccaaacttcctatgcccgccgccaaattccaccggaagatccaaattgacgtatcccttcttggcgatgggaatatcaaactgggaaatctggtaccccttggggaggtccgggtagaaatactgcttccgatcaaacttggatatcattgagatctcacaattgagagcgaggcccagcttcacggcacactcaacaaccttctcgttcagaaccggcagcgcccctgggtggcccatgcaggtggggcagattgtgctgttgggctgggagccgtagttgtacgggcaagaacaaaatgcttttgtgacggtcgagagctggacatgggtctcgattccaatgacagcttcaaaaccctgtgtcttctgctctgccgcctccttggtcgccagttgaattgacttgggcgctgctttgggctcagtagcctgtgcactctccgccctggtcgtgaagcgggacaaccgaggtcgtagtacagtaaagagcaggccggaattcgatctaaatgagatcggcgtcctcatccctcggaggagggttagagccattgcgtgtggccaatgcgcctctacaaatcgcaatcagttatcgccggtcacagcctgatcgtgcagcctcggttgaagctagcggtaatggggcggcggagggcggggtgaggagaagtccggcgagagattgagtgctccggcctgagggtgaggaccggagcgtagcgggagagctgcgagcggcggaggcggcggagggcgagccgcgcctgcgagtggcggagcggagt

SEQ ID NO: 9277 - DNA, 307 bp, Setaria italica
  Peptide Sequence Number=SeqID_75251
gtcctttatttagttaccttggctctcgttggacgacgacacgataccagagttccagagcgcaggcgcagtgcaaacatggacgtctcaccgtttgctgtggtgttgctcgctgctctgctctccctcctcttcttcgccaccaggaacaggaagccttccgatggctggtgccgtctgcctccgtcgccgcgggggcttcccctcctcggccacctgccactcctcggccccctgccccaccgcaagctccagaccatggcggcctcccacggcccggtcatgctcctgcgcctcggccgcgtcg

SEQ ID NO: 9278 - DNA, 1078 bp, Setaria italica
  Peptide Sequence Number=SeqID_75252
caaaagatgcattgcagttacactatcgatttttgctgttgtagtatgccgtgttctggccactgtgccaagttccatacgttcgtcacatccaatcaatgcaattgcctggagaggaacaggaatggatgatttttctgcttttacctgcatatcagcatatgatgaagtattgtactaatattgttgggaagataaagtgtatttcaataaacttatccatatgggtttgttgtcaaatactattttcactacagataaagcagagagattgatagcagaggctgctgggtatggttcacagttaattgtgtttccggaagcttttattggaggctatccccgtggatccacttttggctatgggatcagtatttgtattgctaatccaaaagacaagggaaaagaagcattcaggaggtatcatgcagctgctatagatgtgcctggtccagaggtgacacgcttggctgctatggctggaaaatataagattttcttggtgatgggggtgattgaaagggaaggttatacactttattgttcggtgctcttctttgatcctcttggccgttacctgggtaagcaccgcaagctcatgcctacagcattagagagaattatatggggatttggagatggatccacaattcctgtttatgatactccacttggaaagattggggcccttattgctgggaaaataaaatgccacttttgaggacagcactttatggtaaaggtaagaattagagtcttgtgctgataaatttccgacagacagcttaccaatacgtatcattatttcctgagttcattggattggatggaatccttggattgaaaaggaaatatactttcagcacaaatcacattgctgaagcaatggtacaacatgtacttgagtttcttcccttatgttgtatgcaggtattgaaatatattgtgcccccacagctgattccaggcctgtttggcaagcctccatgacacatattgccttggaggggggttgttttgtcttgtcagcaaaccaattctgccgcagaaaggactatcctgccccaccggagtatga

SEQ ID NO: 9279 - DNA, 1540 bp, Setaria italica
  Peptide Sequence Number=SeqID_75253
gagtatccacacgcacgcgcacaaggcacaggcacaagtccactggcgatccactcccccgccgcgctcgtcgcctcgtccccacctccgcttcgtccccgagcaagtggcagtagcaggcccacacggatggctctggtgacatcgggctcgggcggcgggccggtgatcgccgaggtggagatgaacggcggcgccgacccgagcgcgaccacggtgcgcgccaccgtcgtgcaggcctccaccatcttctacgacacccccgccactctcgataaagcagagagattgatagcagaggctgctgggtatggttcacagttaattgtgtttccggaagcttttattggaggctatccccgtggatccacttttggctatgggatcagtatttgtattgctaatccaaaagacaagggaaaagaagcattcaggaggtatcatgcagctgctatagatgtgcctggtccagaggtgacacgcttggctgctatggctggaaaatataagattttcttggtgatgggggtgattgaaagggaaggttatacactttattgttcggtgctcttctttgatcctcttggccgttacctgggtaagcaccgcaagctcatgcctacagcattagagagaattatatggggatttggagatggatccacaattcctgtttatgatactccacttggaaagattggggcccttatttgctgggaaaataaaatgccacttttgaggacagcactttatggtaaaggtattgaaatatattgtgcccccacagctgattccaggcctgtttggcaagcctccatgacacatattgccttggaggggggttgttttgtcttgtcagcaaaccaattctgccgcagaaaggactatcctgccccaccggagtatgaatttgctggtttaggcgaagagccctctgcagacactgttgtttgccctggaggcagcgttatcatttctccatctggagaagtcttggcaggtcccaactatgagggagaggcgctcattacagctgaccttgatctgggagaaattgttcgggccaagtttgatttcgacgttgtgggtcactatgctcgacctgaggtcctgagcttggtcgtgaatgaccaaccacagctccctgtgtctttcacttcttccgctgacaaggcttcagatgtgaagagtgacaacattactaagtcctactgattgacgatggtcatgaaactcagttgtaccaatgccttggtgactggtggttgggtctgtcttggatgggagttgggagctgcaacttttgaactctttagtgtaatgtacaagagaggcgaaaaacatggcgggcgcacttaatattccttgtgttgcttgtaaaaggaatgtacagtgtctcaaggataaacatcgtctatgcaggatgtgccctctcatcaacaaaaatagtcctcgcagtttcgcaccttttaaacgtcctaataaaaaaaaaaaaaaaaaactactcacactgaagttttcttcctattcttggtagtaa

SEQ ID NO: 9280 - DNA, 285 bp, Setaria italica
  Peptide Sequence Number=SeqID_75254
ggcgggagtttggggcgcggggcttggtccggagggccccgcgcgtgcattggggattttaggcggtgagctgcggtagtctcccggtggagcgaattcgtggggctgaagctcggggaggagtggcctgcggctgcttcgtgatctgatgagctcggggccggcggcgtgcctcggtttctccgcgtgtttgctccgtcggctgtcggaaacccagctccttggatcaggccgtgcttgtttcggcgctttccgtcggttctttggggaaaggttggagctttg

SEQ ID NO: 9281 - DNA, 280 bp, Setaria italica
  Peptide Sequence Number=SeqID_75255
accagccagaccactccctctgaactctgaagtctgcgcccaattcgaagctccaaattgcttgctcgcgatctcccatggcggcggcggcggcgaccaccaggaggccaagtgggccggttctctcagccgcgcactaccgctccgcctcacccacgcgcatcaagctcgccggcgccggcgcccggtcaccggccggccagtctgtcagcgtctcgtcccctgccggcggcgcgcggagccggcggacctgcatgtgctcgccgacgaaccacccggg

SEQ ID NO: 9282 - DNA, 607 bp, Setaria italica
  Peptide Sequence Number=SeqID_75256
tttgctgagtgaatcatccatcatttgttcggagaatacgtttgctcaggctggctggcataagctgtgagattgtacttggtcactagaaacagtactggtagtagctttggcaaattgtttatgtgttgagccggcagtcagcacacgtagacacgctcctacccacccactctctctcagcaggaccagtccaaatgtccctgagctagattttctttttctttgcgaagaatgtccctgagctagatggctccaaggtaaacttctttagcttgccatgtgcattgtacagcagagcaaaacagtaggagcctagaacattttagcagcagtgagttccactccatgtcatggccagattggacagacctgaacatgcagagagccacagacagcgtgtcttgattaccgactactagtattagtattacattactgaatggcacatttatcatcagccagatctatgtacccaaaaaagaccaaagttctgtcagtcaaatctgcacataaaaggccagagttcagcatgatgcatgagtggcgtttagtgggttgcatcatgggcaaaccaaatgttagggaacttacttaaccttgtcat

SEQ ID NO: 9283 - DNA, 361 bp, Setaria italica
  Peptide Sequence Number=SeqID_75257
ctggcaggcgaacgacggcatcaagagcagcgtggtcggcctcctcagcggcggcctctccgggttcccgctaaaccacagcgacgccggcggctactgcaccgtggacctgccgttcctccgctaccgccgcggcgaggagctcctcctgcggtggatggaggtgaacgccttcaccgtcgtgctccgcacccacgaggggaacaagccggcctccaactgccagttctactccaacagcaggacgctcgcgcacttcgcgcgctgcgccaggatgtacaaggcctgggagttctaccgcgcggagctcgtcgcggaggcggcggcggcggggctccccgtggcgcggcacttgttcctg

SEQ ID NO: 9284 - DNA, 811 bp, Setaria italica
  Peptide Sequence Number=SeqID_75258
tcttgttctttatttactttttcttttgttctttgttatttgttccttagctgctatactttcttgctgatgccaggttttattcaagttctatattattatttcttctctagccaagttcgtagaagtgttgtatatggagatcagccaagaaacagattggacttgtatatacccactagtacaacagggttaaagccagtcgtggcatttgtgactggtggagcatggatcatagggtacaaagggtggggggcccttttaggcagacgcttagcagaaaggggcatcatagttgcatgcattgattacagaaactttcctcaagggactattggtgacatggtagaagatgtttctcaaggaatttctttgtctgcaacaatatagcaagttatggaggtgatcctaacaggatttatcttgttggacaatcagctggtgcacatattgccacgtgtgccctcttaaacccaggccattagagaatgtggtgaaggagatacttcctcttggagtgtttcacaaataaaagcttattttggtatttctggcgggtataatctccttaatttggttgatcatttccatagacgtggcctttatcgatccatctttctcagtattatggaaggtgaagaatcactccagaaattctccccgcaagtgatgattaaggcgtcatctgctagatctgcagttcctttgttgcctcatattatccttttccatggaacaggtgacaattcaataccatcagctgaaagccaagcatttgcaccatgctcttgtaaagcatcaacaaatgctt

SEQ ID NO: 9285 - DNA, 295 bp, Setaria italica
  Peptide Sequence Number=SeqID_75259
taaaacgaaaacaaaagtcgtacttgtaagttagtgtgggtaattctattgtagtactaattgtaagaagccataaaacaaagcacagcttttgaggagcaccggaaggttcactacgatgaataccataagatgaaggagctgcttcagaagggaaccatgactgatgatgcagatgaagatgaaagtgaaccagacaacaggaagagtgacagttctgtcccggtccgaacgcggaactgtgattagaagatcttcagcatcatgagacagttggaagcttggaaaagtttga

SEQ ID NO: 9286 - DNA, 523 bp, Setaria italica
  Peptide Sequence Number=SeqID_75260
attcagaaggtattagtacatagaaacatcacctatcatgatctacttgctgtgtatggtatatcaaatcttttcagcatgctcggttttctcttcacttcagtcatgacttcttctaaaccaccgattttcaacaattaactgcatggtgagaagatgtgaagccagtttggtttaacatgacaaattagcgctttttgtgggtaactaacaatggttcggctaactttgattatcacaaatggagaaatttgtcccatatatttttccttttgactattttgtgttcggagcaaggtagaactaacaactcatgtccctttgtagcttttgaggagcaccggaaggttcactacgatgaataccataagatgaaggagctgcttcagaagggaaccatgactgatgatgcagatgaagatggtattgattcggacaatagtactgagtaacagttctgtcccggtccgaacgcggaactgtgattagaagatcttcagcatcatgagacagttggaagctt

SEQ ID NO: 9287 - DNA, 961 bp, Setaria italica
  Peptide Sequence Number=SeqID_75261
caaggctgtttcttgagttgacttgcagtttgttggcacgcaatgaaagctaaagaacccaagaaggcagggggtcgtgtcaaatgggatgaagagaacttgaatgacatcgagtcaaacaaaccagaaagagagaagatcaccgagcccaagacaccttaccaccctatgattgatgaggatgaagggcctgtgtcaccattacaactaagtgaagagccagtggataaatctgctcatgctgatgccatcaagactgctctagctgaagctgtttccagtggaaagattttcgacagaaatagttgggaatcatgtgacaatgaagaagccataaaacaaagcacagcttttgaggagcaccggaaggttcactacgatgaataccataagatgaaggagctgcttcagaagggaaccatgactgatgatgcagatgaagatgaaagtgaaccagacaacaggaaggagtgacagttctgtcccggtccgaacgcggaactgtgattagaagatcttcagcatcatgagacagttggaagcttggaaaagtttgaggtttcgagtacttcaggactactagatgtattaaccatgcacaactgttttcaccctttcctgcacagagctatactgttctcttccttggcactagttcggaagtgtaagccatgactcaatctttgcagctaagactttgagagtatttctgtagtcggtcttacggaccgcaagctggaacgtggtaagctgcatgcgaatttttgtgacgaatgaccggtcagatgtaggcggtcattgttttagcttgcaaaaattcagagttgcagctggtagattgttagattgtaataattcgaactatggattgttgttacaatctgattacaatttgggacttgtttgttcaccttgcagatccacaatctgcatgctgaacacaaacgggccgtagacgagc

SEQ ID NO: 9288 - DNA, 649 bp, Setaria italica
  misc_feature (1)..(42): n is a, c, g, or t
  Peptide Sequence Number=SeqID_75262
nnnnnnnnnnnnnnnnnnnnnnnnnnnnnnnnnnnnnnnnnngtgtattcaacagtttgatcacagagaagaaaagcgtcgtcagtgaactgcaactggtaatacatctgcaggctgtaattaaatcatctccccttcaaacccctctacctgaacatattccctgacggagaagagttcgtatatctgtacaaaagtccagttttcagatgtaaaactgcacaggatgtcagctaactggggctccgctacaaccgcttggagtatccagaaccagcacacttcttgcaaagtatcagccctgctcctctgcatacacggcactccacgactccattttccaccttcattttgccatcgttgcagaacacacacttcgtgcccccgtttccagcgcacctgtcgcacggcaccgggtcccccttgaggccgagcacgagggagagggagaccgcggatacgacggcggcggctatgatgattgtctgcgtgtcgataggcctgagcaggtcgccgccgccgtagccgtaggaggccgcggcgagggcccgcggcggcggaggagaggcgactgggggcgcaagcgggactgatggtgcgccgccgtggtgctgcctgtaggggaaggacggcggagcgggagaggagg

SEQ ID NO: 9289 - DNA, 309 bp, Setaria italica
  Peptide Sequence Number=SeqID_75263
gacatcgccgccgcgcgcgcgcccatcccggagttcgagcccatcgacaccggcagcgacctcgagaacgatgatctgaaatctgcacttgggaagaaaaggaaggatggcaaatctgcaccattgcaaccactgactaaaattcaacgtgtttgcatcggcagattaatagagaagtatggtgatgacttcaaggccatgttcatggataccaagctgaacgcaatgcagcactcagtgggtactctgaagaagctctgcgaaaggtaccacgctgatggcaagccttttgtgtatccactgtagtat

SEQ ID NO: 9290 - DNA, 805 bp, Setaria italica
  Peptide Sequence Number=SeqID_75264
gaacccggacgccttcgccgtgttctgcccgaagctaaccctgacccagcgttcgggccccgtcgccagcaaggtcttcgacatcaccaaggaccatgtcgccgcccttaagcaggcctgcggcggcgtcagcaccttttgcgcgctgagcgcccacgtgtggcggtgcgtgtgcgtcgcgaggggcctgccggcggacgccaccacacgcctcaccctcccggccaacgtccgccgccggatcaagccaccggttcccgacagttacttcggaaacgcgctcatctgggtggggacgtccggcgtcgtgcgcgacgtcacctcggaggcgctggccgacaccgccggccggatcaggggcgccgtccgccggatggacgacgacgtggtgcgctcggccatcgactacttcgagctggcggagaacaacgggaagcccatccccggtgacatgccggagacggagctgagggtgatcagctggctcggcatgccggtgtacgacgcggactacgggtgggggaagccgcagatgatggtgcgcgccgagtcggagcgctcggggttcgtgtacctcatcaacgacggcgccggcgtgcaggtggtggtgtgcgcggaggccgcgagcctcaaggagttcgagaagctgctgtatgcgaacatgtggccatgaagttggagcacttcttttgttgaacataacggaagtgctagcgtccggacgtccgataatgttctgtcgcaacattgaaaaataactatcgaaacatcaaaaattaacacttgcaataccgaggattgcaac

SEQ ID NO: 9291 - DNA, 430 bp, Setaria italica
  Peptide Sequence Number=SeqID_75265
agaaccaacaataaaattaggactaatacaagacaaaacaatagtttagtacaaaccggtagggtcagataagtatgcagtttgccattccacttgagtccacagtttgtttagaggttcaagtaaccaggcaaggacttcctgttgctgttgaatcccagcagaggatgccatcacaagaaacgcttcacatagatgattatgttcaccacgtagtaagcgaccctctccttgaaggtaagccatggtatcagcaatgttcttcatgtgaggcagaagtgctttatcagcagctctagatatacgaatgaatgatgagcatatctgtaaccttgctaagcgagaattgtttgatggatcctgaaatgtgatccatacagacaatggcagaaatgacaagtgtaaacaacaaacttgtataatatggcaa

SEQ ID NO: 9292 - DNA, 2746 bp, Setaria italica
  Peptide Sequence Number=SeqID_75266
aatccatccggttggaaggtccaagttgttccaaggatggaagtccactattcaagcctggtgatgctaaagcccaaagcacagaacacacttcgcgagtcaagtcacgtagcaacttctcttccatgacctctaccttcagttctgacccagaaagattaccaatgttgtctggaaccttagcccggccctcatgaagaagactggaccatgaatagtgaagagcttgctgacagtgaacaactaatggctgcaaaaggttcactagccacacttgccatagatcagcagggcaatgtttaacaaatggaataataacaaggtggataagttggcgcaaatgtcgaaactccataacttgcacattctccataagagcaagggtgacggaggaagcctctgcacatcgaaagaatgcttccccaagagtagctgccaatcctaaaacattgtacccgctgtctcggatcccgcgcaaccagttttttatgttattttccttagattctccatctctttgaacatccagcaatccatcagcaggagcaacctggcctttggtaagtttacctgtctctcctagaaggctagcctgctccgcaacagtcatgctttttgctgctttgatttcccccgtctgagactgagcaaacggctcagcccaaagggcatgtatgcatcgcagcagccttaagagagggggcagaatccatgctagatgtgaagacattggatgcagatagccaggtgctgctgttgtggtgggtgcttgtggagttgcggtagactttttggttccactcctcttcagggccttttcaaagaatgtaactgtgtgataaattgaccacataaattggctatcagcaaacatgtttgtcaaaccggtagggtcagataagtatgcagtttgccattccacttgagtccacagtttgtttagaggttcaagtaaccaggcaaggacttcctgttgctgttgaatcccagcagaggatgccatcacaagaaacgcttcacatagatgattatgttcaccacgtagtaagcgaccctctccttgaaggtaagccatggtatcagcaatgttcttcatgtgaggcagaagtgctttatcagcagctctagatatacgaatgaatgatgagcatatctgtaaccttgctaagcgagaattgtttgatggatcctgaaatgtgatggggagagacgtcaacagttcaaaaagcttattaacaacactggcaactgcatctggataatgtctcaagaaaggacccaaagcatccaaataatgaccatgaataaccgcaaggttaggttccgtccactttaaagaaagaagctgctgaagtaagccttcaaaaatcttgtgcagttgggatttcatctcctcttaattctttccacaatcaactgagccatcaaatatagcactgacaactgcttcaagtcccagttgagccccttccatagcatcaagatactggggggatttagttgcttgattagcatctccaaaaacaatatttattctctgaacgatgcttgccgcagcaatcacaggtctttgcgaagcaatgactttaattagatccaacaatttggtgcggtagttgcagaagtcacttttcccctcaagttcttcgctccatagttctaacaacccggaagatgcacttccactgttcttgagcattcttttgaaagaaacatccaatattgtactgtatatttcatcagtaacaaatactgatacccctttcttctccttttctgttgataagtcaccagtggatgcagaattaccagcagcaaagttgtcaccagaaacacgcgcaacagacttagctttcgatggttctctcaataccaccagccaaaataataaagactggaaatgaagcgcgattttgtaatgtttgtaatactccaacatttgttgcaagaactggaaagttctagctccatcagctagtatgcattgcatgttagaagaccctagagcaaccattgtctcacaaacacatgttgcaaactcatactcgctttcatcaatagaactaggctgcatgccaggtctggtcaaaaattgttgtgaaatgttcatcaacacctggaaaatgttgcacattgcagcatcatactcagaaactgcaacatccacaggtctttttctctgacatatttctttaaaacactcgcaagcatggaggcgaaaatcactgtaagaaagcaaggatccacatccatgaattaaaccatatttggctagatctgtcacaggagcccattcagcatatgcattgacagcatttagaaccgctgtcactgtccctgcatgttgtttagccaagttcatttgctgcttcgagtgctcacttaaagcagcaaccaaatgtttctcgtccactttaaagaaagaagctgctgaagtaagccttcaaaaatacttgtgcagttgggatttcatctccaaatcagtctttccacaatcaacaaggacttcctgttgctgttgaatcccagcagaggatgccagttgaagtgttcagttggacagatagtgatgctgtgactaaagttatccccttttgtggtgcacttattcacctcgctgttgcttcaaaccaggctgagttgaggcagtttgttgcaaaggatttattttcttctataatacagggtttagctgttgaatcaaattcagtcatgagcgctgaacttgttgggctttggtcgggag

SEQ ID NO: 9293 - DNA, 1384 bp, Setaria italica
  misc_feature (1347)..(1347): n is a, c, g, or t
  misc_feature (1357)..(1357): n is a, c, g, or t
  misc_feature (1366)..(1366): n is a, c, g, or t
  misc_feature (1384)..(1384): n is a, c, g, or t
  Peptide Sequence Number=SeqID_75267
ttattccatttgttaaacattgccctgctgatctatggcaagtgtggctagtgaaccttttgcagccattagttgttcactgtcagcaagctcttcactattcatggtccagtcttcttcatgagggccgggctaaggttccagacaacattggtaatctttctgggtcagaactgaaggtagaggtcatggaagagaagttgctacgtgacttgactcgcgaagtgtgttctgtgctttgggctttagcatcaccaggcttgaatagtggacttccatccttggaacaacttggaccttccaaccggatggattctttaaagaatctggagtcttttgcttcaagttctctcactggatttcttatgcttcatgttggcacagcccttcctgcattgaggatatcagttgaagtgttcagttggacagatagtgatgctgtgactaaagttatccccttttgtggtgcacttattcacctcgctgttgcttcaaaccaggctgagttgaggcagtttgttgcaaaggatttattttcttctataatacagggtttagctgttgaatcaaattcagtcatgagcgctgaacttgttgggctttgtcgggagatatatgtctatctgtctgatagagatcctgcacctaggcaggttcttctttccctcccacacatcaagcaggaagatttgctagcgtttgatgactcgttgagtaaaactgctagtcctaaagagcaaaagcaacatatgcgaagcttacttctgctggctacagggaacaaattaagagctcttgctgctcagaaaacaactaatgtgattactaatgttacaactcgaaataggagctctgctgcacaccatggatcaattgccgaagaagatggccaaattggattggccgcactatcatcaacatgacctgctaaagtttttgggcgtgtaaaaaaggtagcagaatatagaaatgaatcctaatgtggtaactattggaggatgacagattcttgcagcgtcattatgtgaggatgaatgcatgatgagatgtacggctataccctatacccttccgtcatgagcaactgaccgattctttggttttgacggttttgttttcgtatgtaaccttgcatctgcgtgtgggtttggggagatggtgaaagtgtatatgtaattacttgtagttcacagttattacatactaatagtaatatccttgccctgtggtgtatcagcctgcgttaattttcaggctcatcaggctgcaccgatcttgttacagacatggttggtacccgtagatataattaagcatcttgcaataaccaaaaaaaaaaaaaaaaanaaaaaaaaanaaaaaaaanaaaaaaaaaacaaaaaan

SEQ ID NO: 9294 - DNA, 551 bp, Setaria italica
  Peptide Sequence Number=SeqID_75268
cttttgctaacaccaatttcctccatgtctcttcctagacgggtaaatattccgaccatggcatctaagcttactccttgctgtcctttgatcctctgtttgtcacagagaatcaagccttctttggcacagtctgggtgaagtggccctactgaaggtgcggggagtggatcctttggtgtgatatcaatgagtgtctccattagaagaccagactgattgacctcaaccagtgaattgcgtggtataatgatcttatcatcttcgacctcgactagcgcatcgatgctccttagggatgagtcgacgcggacgacggatccgacggtgacccctcgtatgcgtacgggcgtgccgacgcagatcccgcaggcctgcgtgaactcgaaaacggtgttgtacttgcggaatcgggagcggagctggaatcccctgagccaggcgagggcgagggcgaggagcgcggccccggagaccatgaagaggccgacgccgccctcccagacgctgcgcttgccgaagccgtacgtcccccaggggctgggagggtg

SEQ ID NO: 9295 - DNA, 341 bp, Setaria italica
  Peptide Sequence Number=SeqID_75269
cgagggtaaactgaactgtggccattcttgttcaccgtgatcagttgtactattagattctcatcttagttcattacaggcattctttttgaagtttcggtgtgagttcatgaacttcaatcccttcaaaacgtgtgctctgtctctgctgaaataaaatagcacatctgtgttgagtgtgagtgtatgtctgaactttcatgtttagaagttcagctttggcaattttatcattctggatattagtgttgtattctcctccaaagtgaactagtaaatttgtaatgtaattctttctatttatcatcaatacaaagaagtaaatttgacaaagaaaaaaa

SEQ ID NO: 9296 - DNA, 710 bp, Setaria italica
  misc_feature (63)..(63): n is a, c, g, or t
  Peptide Sequence Number=SeqID_75270
ccttcaagatcatctcaggaggtagagctagcagaaaggactgaaggttggactgtgctggcncttgaaggaatcgaggctctatggtggttgaactagtagggcactttgtaacacaagcggtttgttatgccgttggtcatgattggaatgatgagctaaagaaatttggttcataggtaggacaaccccagattctgatgccttgacaccactttggttgagcgtggcgcacacttctgagggtgccagagcctcaggtcctccagacaagtttgctgggggcagatacaggccatttctcattgacaacatctgcacttgtagctgaagctgcttcaggtactcaatggcatcatcaagcatggaggccttgtccgtcttgctggagttggggatgagggtctgcagcgccttcatcttctcgttgatcctgctcctcctcctcttctcggagaggttgtgcacctcggcggcgcggctcctcttgccccgcgggcgcgccggcctcgcgggctccgactccgacgaccccagcgcgtcctcgctctcgcagacgttggccatgctctggtggtggtgacgcaggatcaaatccagctgctgcgcatccatcgcggccgcaccagcagagcagctcagctcagctcgcaaccaagcaccacgaagccagccagccaacccagacgagaagtggtcgccgctctccg

SEQ ID NO: 9297 - DNA, 1207 bp, Setaria italica
  Peptide Sequence Number=SeqID_75271
agttactccaacttggtttggttgaaaccttggatagattaatgtttggttgaggctggagctacaagccaaagggatagattaatgtttggttgaggctggagcgatacacggtatcctgacgctttttttattgcctgccaatcgcaaaatgtccttgaaacaacacgcccggaccacacgtcggtccggtgcctatcacgtgatcgccaacggtggaacctagaaaaacaggccaccaaagccagcctctgaatctcactcctacctgtcacctcggctggatgccgcctctcaccctcagtctctccctggcgaactcgccggaaaccggcgcccgtctataacgcggagccgccaccgtcccgaacacctgcgcctcaccctgggtcctggatgggctgggtttcgccgccggctcttcgccgtgcgcctcgtccgccgccgcttcatcatctgccatggcaccgccatccaccgagctgctccagccgaactccaccatgcgctgctggtacagtttcatggccaccaccagcatgaagaccgcccagacgcgcgccaccgtggaggaaacgttccagacgagggtgaagacggccgccacgacagccttcttgtgggagcatgactcccaggcgtcactgaacctctccagccaaaacttgccgtatcgtgccagctgcgtggagtaagaggcgcacaccttcgggatgatgaagaccccaaagaacaccagtttggccagggtccagagggtgacaaagttgccacaccgggccatcgcaaacagtagcaatgccagcttcatggtggtggcaggttcgccagagaagagacacctcagatttaggagcacctcattgatgtatggcagcaccagcctaagcagccagatggcctcctcttccccaactaggtagcacctctcctcgtctctctcatcatcacactccacagtttcacctctgttcattatggacttgcgcaggaaccggaggccaaggtagattagaccggcatatgaagctgctgtgattgtgttgaaatttaggtctttggcgtaagaggaggaaatcagcaagaaagtccctaatccaaacaccagtgcagactttgacacgtctctccacatcaccaaattcacaatattttgcattctttcatggcttctgcttgggcttgagtttttacttaatttaggtta

SEQ ID NO: 9298 - DNA, 245 bp, Setaria italica
  Peptide Sequence Number=SeqID_75272
agaagtggggggagagtgaatggtgggagaacaccagcctctggactcttggcggatggagattttccgtcaagtgtgagcgccattgcagcctgctgcttgttgagcccatccattatgcatgagaatgctgcgaaggtgacacagctgtggaacattgcttggggcgcacctggaaagctcaaagcaaggcctgtacagcaaccagccataccagcattaatcatgtcatctttccctcgcag

SEQ ID NO: 9299 - DNA, 853 bp, Setaria italica
  Peptide Sequence Number=SeqID_75273
acatcgcaacagagcctaagcactggatatagtaattatctcttcaatgcgccttacaaatgcaccatcatggatactagatacaaaaattgccgctattgcaccactatagttaccaaacccaaccaagttcaacaccgaaatggagctacatcactggccagaaattcagaatgctaaagaagcgcacatagagaacctatggagctcttctcttttggggatcagacttcagcaaagcctagtgattgggcttaacaagggtctggcagaatgaagctaaagcgtccgaagcatccagaagtgggggagagtgaatggtgggagaacaccagcctctggactcttggcggatggagattttccgtcaagtgtgagcgccattgcagcctgctgctcgttgaaaccatccgcttgttgagcccatccattatgcatgagaatgctgcgaaggtgacacagctgtggaacattgcttggggcgcacctggaaagctcaaagcaaggcctgtacagcaaccagccataccagcattaatcatgtcatctttccctcgcagtcttctcaacaagcacatgatgaaactttggacaccagcaagagctgcaaaagtcttggcagatgatccagcattgctgagtgaagccttcataccttggttcatgatcaaacctttcccgtatccgacgagcgagccgacgaaggcaccggcggcgagttcccctgcggagcgcaggaggcagacgacgggcgcggcgagcggcgtcggcggcgggccgcccagctcgtccccggtccccactcgcgcccacgccgagccgccatctttccccttcgttgccttggtgcgct

SEQ ID NO: 9300 - DNA, 514 bp, Setaria italica
  misc_feature (513)..(513): n is a, c, g, or t
  Peptide Sequence Number=SeqID_75274
ttgcggtgggaggccaggaaggacgcgacgccgccgctgccggacgccgcggtgtcgtcgacgaggagcacggagaggtcggagagcgccttgcgcgcgcggcggagctggccctcgtggatctcccctggcgcccggaggacggaggcggcgatgtcggcgaggcgctcccagcggcgcacctggtcgacgccgtcacgcgccgcgttgcagacgtcgagcgccttgacggcgcgctcgtggaactcggccaccatcttctcggccgcggcgggcagcgccccgcggcggcgcgcctgggccaccacgacccggaactcctcctggcagatgacgaagccctcgagcaggcgccggatccacgcgacggagaggaactcctcgcccccggcggttgctgctgcggcgtcccctcccgcctctcccccgggaaccagctccgcgagggtgacagcgacgtggcgctggaacgcctcgaggtcggcctcctcgcccgacggcatggcggtggtnt

SEQ ID NO: 9301 - DNA, 819 bp, Setaria italica
  Peptide Sequence Number=SeqID_75275
gacaagaaagaagaggttagcattcacaacttaagtgggacataccgagtagctgcacagagggggtttgaggcttatggggactttacaaggagatgctcatacagtttcgtggggttgttgtgtatgattgatggattagcatcttccagacgctctgcaagggatctgagcatggagaccagatgccgcgtgttcttcgtgcatcggcatacaaggtctaagtaatgcacagcctcctgcggaaggagaccggtcatgaagaaggggaagagcttcgagtgtgtcacctccattgtagctaccgcctctgaagcccatgcggaactagacttgtcagaaaccttcccctcctcccgctgcatacgccgtactccttccaaccgtgggagcatgtcaccctcttcttccttgaagtgttcttttgtgtgatcctgcaatgctttgaggcgaaccgaaaggttgaccagcacttcatggaacagggggctgcctaattccaatgtcagcagtgtttttatatcctccttgattccattcatcattggcaggtgcctcccatgctgctcattaactttatcgcatactcctggaaatgatgccctctgtatatcaggaaagatgagcgtctcctccatcctggcgtgctccagcatcacctccatggcgtccccgtaccacttgccgagcctcctgacctcggcggcctccacgacgctcctccccttcccggacttcttccccttcttcaccatctccgccaccttcgcggccacgccctcgaggtgccgctccgcgctgcggtgctgcaggtcgcta

SEQ ID NO: 9302 - DNA, 452 bp, Setaria italica
  Peptide Sequence Number=SeqID_75276
gcgcgtttccggtcaacgatggttagtggatgcacccgtctaagaccccaggaagattctttgaacatgcctgttgacatggttgttggtactcctggaaggatcttggatcatattaaggatggtaacatggtttacggtgatattaagtatctggtatgttattaagtttgtgtgacagatacataccattttgtgacatcttcactgttctcctaatagtcttattttgattttttttttttgcgtttgcaggttctggatgaggcagatacaatgtttgatcaaggctttggaccagacatacggaagttccttgctccattgaaaaatcgtgccacaaagcctggtgatcaggggttccaaactgtattagttactgctaccatgacaaaggctgtacaaaagttgattgatgaggaatttgaaggtattgtccatttgcggacatc

SEQ ID NO: 9303 - DNA, 1002 bp, Setaria italica
  Peptide Sequence Number=SeqID_75277
tgttctgtaatactttaaattcaagtcgcgcagtggaccattttctgactgagaatcagatatctactgttaactatcatggagaggtcccggccgaagagagagttgagaacctgaacaagttccgtaatgaagagggggattgcccaacattggtatgcactgatctggcagctagaggtctggacttggatgttgaccatgtcatcatgtttgacttcccatcgaattcgattgattatcttcacagaactggaagaactgcacgcatgggagccaaagggaaagttacaagccttgtggctaagaaaaatgtggctttagctacaaagattgaagaggccatgaagaaaaatgagagcttggaagctctgacaactaacaatgtcagaagggctgcgaacccacagagtgcgagcaccaaaggaaggacctcaaggtcggctaagacttcaagtgctcttaaagttgtcaatcagaagggtagaagaggagttgtgctatctagcaagtcatctaggactcccaaggacacgacttcaacccgaaggcgcttaccaccaaagattcagccaaaagcgaaaaaatcggcagcaccccagaaagcgaagctggtgaaacccgcaaataacagcgtgaaggattcaaagagcaaagcaaaaccagcgggtcgaaaggcgaagggtgatattctgaacaagttgggaactaagctcagcgtggtcggatttagaggtcgcagctcaggcaaatctgcgcaatcttcataagaggcctggagatttttgtccctgcttaagaaaaggttgagattttggatagggcaccctgtaaatatctggggcttatttcttcagttttttttttccttgcgggcttacaagttaaagaatagaatcgagatcttaacacaaatcttgtaatatcttacttctgcattagtacttttggtaattaattattgtttgttatttactttttacccttactaaaaaaaaaaaa

SEQ ID NO: 9304 - DNA, 2056 bp, Setaria italica
  Peptide Sequence Number=SeqID_75278
cgaagctcctcctcgagcgcctccgcctccgccacctcaaggactcctcctcccccggctccccgaaccttcccccgcggggaaggcggcgaggggcggggagcggacctcgcagcacccgcagcaggggaggagggtcgaggccgcggagagcttcgaggagctcgggctcggggaggaggtgatggccgcgctcggggagatgggcatctccaagcccacggagatccagtgcgtcggcgttcccgcggttctggacggcaccagcgtcgtgctcggctcgcacacgggatccgggaagacgctcgcctacctgctccctcttgttcagctacttcggcgtgatgaagcaatgttgggaatgtcaatgaagccaaggcggccaagagcagtagtactctgccccacaagggagctaactgagcaggtctatcgtgttgcaaagtccatcagccatcatgcgcgtttccggtcaacgatggttagtggaggcacccgtctaagaccccaggaagattctttgaacatgcctgttgacatggttgttggtactcctggaaggatcttggatcatattaaggatggtaacatggtttacggtgatattaagtatctggttctggatgaggcagatacaatgtttgatcaaggctttggaccagacatacggaagttccttgctccattgaaaaatcgtgccacaaagcctggtgatcaggggttccaaactgtattagttactgctaccatgacaaaggctgtacaaaagttgattgatgaggaatttgaaggtattgtccatttgcggacatcaacatttcaaaagagagttgcaacagcacgacatgactttatcaaactcactggctcagaaaacaaacttgaggctcttctgcaggttcttgagccaagcttggcgaagggaaacaaaattatggtgttctgtaatactttaaattcaagtcgcgcagtggaccattttctgactgagaatcagatatctactgttaactatcatggagaggtcccggccgaagagagagttgagaacctgaacaagttccgtaatgaaaggggggattgcccaacattggtatgcactgatctggcagctagaggtctggacttggatgttgaccatgtcatcatgtttgacttcccatcgaattcggtatgcgttacacttactacatggtctgattgcatttactcccatcatagtgattcttatgcacatctatcttgtaattatcttttgtgtttttagattgattatcttcacagaactggaagaactgcacgcatgggagccaaagggaaagttacaagccttgtggctaagaaaaatgtggctttagctacaaagattgaagaggccatgaagaaaaatgagagcttggaagctctgacaactaacaatgtcagaagggctgcgaacccacagagtgcgagcaccaaaggaaggacctcaaggtcggctaagacttcaagtgctcttaaagttgtcaatcagaagggtagaagaggagttgtgctatctagcaagtcatctaggactcccaaggacacgacttcaacccgaaggcgcttaccaccaaagattcagccaaaagcgaaaaaatcggcagcaccccagaaagcgaagctggtgaaacccgcaaataacagcgtgaaggtttcaaagagcaaagcaaaaccagcgggtcgaaaggcgaagggtgatattctgaacaagttgggaactaagctcagcgtggtcggatttagaggtcgcagctcaggcaaatctgcgcaatcttcataagaggcctggagatttttgtccctgcttaagaaaaggttgagattttggatagggcaccctgtaaatatctggggcttatttcttcagttttttttccttgcgggcttacaagttaaagaatagaatcgagatcttaacacaaatcttgtaatatcttacttctgcatagactttggaataatatgttgtattacttttacccacaattctgtcgagtactcgggtgtatgtatgctcattgtttttaaaaaa

SEQ ID NO: 9305 - DNA, 145 bp, Setaria italica
  Peptide Sequence Number=SeqID_75279
aatgacacaatcagctcctgcaaaacacaatggggatttgtcagacttcaaatggaacacagtgaatgcttaacttcgtgagaaattagaaaccaacaaagggaatagcagattaagaattgtagccatcatacattccgatttt

SEQ ID NO: 9306 - DNA, 1002 bp, Setaria italica
  misc_feature (1)..(83): n is a, c, g, or t
  Peptide Sequence Number=SeqID_75280
nnnnnnnnnnnnnnnnnnnnnnnnnnnnnnnnnnnnnnnnnnnnnnnnnnnnnnnnnnnnnnnnnnnnnnnnnnnnnnnnnnngacaatcccatccatgctaaaaatacggtatggcacaaaacgaagccatgtttgaatatcagcatcgcctacatggtgaccgtaacaacataaaaacacaggtcccggccatcacatttctcgaactcaaaatgtacactagactttagtccggaattggtacatgggaacaaagagaagctttgaaccgaggtcacaaaagtgggcgtggagaacaggttttacaactctgcatcacagctggatccaaaacttccaatgtaaccagcggcaggcgaaccatggacattcttcatcacggatgggggatggcccaatttgcatggctcgggaggaatgctttttgaaacaggcggcaggatcacaacacagggcagaatgacacaatcagctcctgacctagtgagacggctgctgaggcaccggcgcgtaccagcggccgacctcgtcgtcggcgttgtcctccgccttgtgcagcgcggcgtgcaggacgacgagcacgaggccgatgagcagcgaggagaggatgttggcggtggcgccggtgaacagcaacaggccgagcgtgacgacggcgagcacggcgaggacgtagccgtcggcgacgacgcgtccgaagaggacgagcggctcgtcgcggaggaagtagaggacgagccaggcgagcatgcagacgaggaagacgatgagggagacggggtgccagagcagggagaggaagacgacgacgaggacgacgatggcgtagttcatggcgaagtgggcgaggttggcgcgcacgcggaggtaggcgtcgccgaggctcgggggcaggccgatggcgtggacgtccccgagctcgcgccagggccggcgcgtggccagcgccgaggcgccccgggcttggcgcgggagatgaagtcgagcggggagccgcccc

SEQ ID NO: 9307 - DNA, 549 bp, Setaria italica
  Peptide Sequence Number=SeqID_75281
agctgcttgctagcctttccataggcctcctgcaagcctccagtatgtagtgtaattgccaagcttgattttcgcccttgtgcccttgcagcgccttccatggaggatgagttccagtatatctgggttttcactgcttgtctttccggttaccatcccgagatctcttccggcgctgcttggagcagccggacttcggttgggcagaccgggcatcaggaacaggcacacgatgctcaccagccaaagcagggaaaccagcggcagggtttctgcaataaaagattgtcttagcatcagtacttaagaactgaccttcatgttgcaagattctaacaaaaatctgcttgcacttgtactttcaaatggtcacttagtaattattgactgtgttcgagaaaaaaaaagcaattattgacttagcatccatgattcaagccagaggacttgttgatggtaacaatgtgattcatctaagctcagagcacgaataagaggatgataggcttgatgtgtcttacccgtgagtacggcagactcctgcatggc

SEQ ID NO: 9308 - DNA, 649 bp, Setaria italica
  misc_feature (1)..(62): n is a, c, g, or t
  Peptide Sequence Number=SeqID_75282
nnnnnnnnnnnnnnnnnnnnnnnnnnnnnnnnnnnnnnnnnnnnnnnnnnnnnnnnnnnnnnctttgaactacttttcttaaagcacatcagcaaggtgtcaggaaaagaagggaacaaagattcacagcgatggtgcatacagaggcgttccaaagtgccaacacgtttagcaacagctcagagaaggcttgcaagatgaccggcgtcccgcggtagcagctactgcataccaaggcaaccaaggtgacttgatcctcgcccttgcgcatctgcagcgtctcccaaggcgaacgagttccaaactcctaggatcatcacggtttgttgccactcggaacatctttacaccttttgttgatgttctggccagctttgcgagatctcttccgaggctgcttggagccaccaggcttctgttgggtacgccgggggtcaggaacaggcacacgatgctcactagccaaagcagggaaaccagcggcagggtttccgcgcgcacggcacgctcctgcatggctgtgggggcaccaaccggcctatccttcaacaaactctggcgaagcgccatgttctcagcagcgcaacactggagggcatagcttaggcggcagcactctgcctccagtattactttacttctttctatt

SEQ ID NO: 9309 - DNA, 1253 bp, Setaria italica
  Peptide Sequence Number=SeqID_75283
cggaggtggaggcggaggaggggataacccccagttagaggcggcgccggtggcgccggcgcccgctgagggggaggctctgcaggaggccgtagcgcaagggacgggacaagaatcggagggggagaaggcggatcgagagggggagaaggacgacggcgcgtgcagagatctggtcctggtcgaggatccggaggcggtcgccgtcgaggatccggaggaagctgcagcaatagcagcacttcaggaagaaatgaaagctctcgtggcatcgatccctgatggtgctggtgcagcattcacagcaatgcaacttcaggagctagagcagcagtcccgggtgtatcagtacatggctgctcgagtacctgtgcctactcacctcgtcttccccatatggaagagtgtaaccggtgcatcctctgaaggcgcccagaagtaccctaccttgatgggcttggcaacactatgcttggactttgggaagaaccctgagccggaacctgggaggtgccggcgaacagatggtaaaaagtggcgatgctggagaagtactatcccaaacgagaaatactgtgagcgccatatgcatcgtggccgcaaacgtcctgtacagcttgttgtcgaagacaacgagcctgattctgcatcaggatcgaaatccactcctggcaaggctaccgaaggtgccaagaaggctgatgacaagactccaagtagcaagaagcttgcagtggcagcacctgctgcagtgcagtctacataattgatgcagcattagtagtcgcagaaagagcataacagcgctggcaactagcgcccgcttcttattgcatgtaatccgcaaaagactgtagtgtggtcttagctataacctcactaagcaagcacagtgtcttgtgggaggaagccgcaagaacttccctttagctgtcactgaaaatttcactcttaggtgtatagtttgatttagctttgtcgtgccttcggccttcaggtaggcgatgcggcatgatctgataaatcctccctgaactgacaatgtcgcattgtgacccaagaagccaatggaagaacctgagactggatactgtgctttttgatgttttacctttattggcctgtgcacaattgtgtgatttgtcagttgtataacaagtggaagatccttaatttgatgccctgtggagattcaattacctcctggatgtgcggtgattctgttctgttaatgtggattatatttcaggttt

SEQ ID NO: 9310 - DNA, 476 bp, Setaria italica
  Peptide Sequence Number=SeqID_75284
ctttgccaaaccagtcatagcggttctttgcgatgtaatcgtagactgcatcccgcagtggggtggggacgatcagcaaggagctcaggactgagtagggaagaggcaggtatgatgcaactttcagagcagccgtagagccctcatagtaagcctcaggcccctcgatgaagagcacacgccgcaggacgtcctcccggtccatgccgaccagcctcaggtacggctctgcggccttggactgcacgcagcagaacttgatcttggcgtgcttgtccgcccggatcacccacttcaccccccggtggcagaggtggcagacgccgtcgtagatgagcacgcgcggctgcagaacggtcggcatggtggccgccatggtaccggtggcggtggcggtggcggcggacggcgaggcggcgcgcggcgggtcctcgtcgattacgagaaggtccgaggccgcggcggacgaggagggg

SEQ ID NO: 9311 - DNA, 287 bp, Setaria italica
  Peptide Sequence Number=SeqID_75285
agttgtgttggatggggtggtacagttgttagcttcccgattctctgattctctgaaagaagtattttttgttaaaagtaattctttttgattctctagtataaactcttaaaatcaagatggagaatcacttcacaaaatcaaagaagctacttttcagctcccaacatcttagttcgtttcagataatcacttcacggaatcaacagataatatttctttctaaaaaaactgttttgacagaactctggctggattcagagaatcagtaggtctgccaaacttac

SEQ ID NO: 9312 - DNA, 420 bp, Setaria italica
  Peptide Sequence Number=SeqID_75286
tcaaccatatgttcttcgactcattatcagcagcaagaccagatttctcatcaccaccaaagtatgtggcataaattctgtcagtaggcaatttgtaaaccttggtgaggagctcccaggcccagccgatggcctcctccttgaagtagtcgccgaaggaccagttcccgagcatctcaaagaaggtgtggtggtaggtgtccttccccacatcgtcgaggtcgttgtgcttacccccggcgcggatgcacttctgggtgttgcaggcgcggcgcagccggcccagcggcgagtccggggcagccgtgccgaggaagaccggcttgaactggttcatcccggcgttggcgaacagcagcgtggggtcgtcgacggggaccacggggctcgacggccaacgggtgtgcgacttagactcga

SEQ ID NO: 9313 - DNA, 2851 bp, Setaria italica
  Peptide Sequence Number=SeqID_75287
tttttttttttgcaataatgccacacgaagatgtcttaataattaaagaccttgatacgtcagcagcaataagatactgcagatagtttggttacatgtcatcctgtggtttgaatggtatggtatgtaattcaaacagcaaacattatggaattcctgttaggtgaaagacggcatttaaaagtgaagggcactggatcaacagcagccgcacataagcttggaaggggagtgcactggaccaacagccgcacccatcagctgagtttcattgcagcaatgttgttcgcgagttccattgcctccttgagttgagaagcatcacttccctggccctgggcgacaccattcttgccaccaccacctcttcccttgagtggtgcaattgaaggtgtcagccaatccaacaccttgaagccattgggagtgttgggtggcacaccagcgtagataacagccttgttcgatgcctcatctttgctgaatagcattataggcaaacccttttggtccatgaccttgataactgcttcccgtacagcagtggtatcaagacccacatcaacatgagtaacacaaaagggcttctttttgaaaagaagcagcttcagctgcatccattgcagtcttgacagccttttggatattctgttcacccattttcttcttggccttcctaagttgatcctccaacttggaaaccttgcctcttagatcagcttttctggcagcagggatggcagctgcatcaagcttattcttgatggaagcaattttcttctccaacatggctccctccaactgagatgctccactgatatcacaatcaatagatgatgctaactccatagcatctgcagcacatccagcagtaacagctgttatcctcctaacaccttttgcgataccctcttcggataaaagtgcaaatgctttggcatctcttgtgttcgagatatgtgtacctccacacagctcagttgatatggataaccactctttgttctctggatctgcaagcagatcttccaccttccggccaactgagacaactcttactggatcagggtaaatttcaccgaacacagctcgtagaccatttatgcgctttgcatctgctaattttatttcactagcatatacatccagctcgtcctttatttgttggttcactatggactcaatttttctcaaatcttcaggctgaaccggttttccatgagaaaaatcaaatctcagcttctctggtagaactattgaacctttctggtcaacatgatcaccaagtacttccctcagagcaaagttcagcatatgtgtacatgtgtgatttggagcaattagagtacgccgatcgtaatcaaccttgcatattacagtatcaccaacagataaagctttagaaccttctgtaaatgaaccaatatgcaaaacatagccagcaaacacttggacattgttcacattgaaagttccaaaagacccttcaattatcccagtgtcatatatctgaccaccctgttctgcatagaagcttgtactttccaacacaaggccaaagtccacatcaccagatgcagtagctatgtatgctgagccagtatagatggccttgaccacacttccatgttccttgggccacataaactttgggctatcatctgtgctggcaaacccctggttgcgcagctgtgctgtagcattggcatccataacaatagaattccctccagccttgttgcgagcattcctagctttttgccttgcttcttccatagaagcactgaaaccctctttgtcgacagccagaccatagtcgatcgccatgacctcagtcaaatcaatcggataaccatacgtatcccacaggataaatgcatcctgaccactaagcactgtccccccattctcctttacagcatctgcggctttcttaaatttctcatacccctttgctagagtgttctcaaagctttcttcttcatctctaattatatcctggatcttcttttcgttctcttttacctcaggaaacacatcacccatcacttggacaaaaacattaacaagggagctaaaaaactttggctttgtcttcaacttctggtgaccaaagtgaacagcccgtctgagtatacgcctcagaacatattctcttccctcattaccaggttgagaaccatcagtgatagcgaaagaaagagttcttatatgatctgcaacaactctgtaagccatatcaactttgccgacatcatcagatcctactttaccagagtaaggttgaatcccatcaccggctaacttgtggatagcatcaaataatggcatgaatacatctgtgtcatagttgctcattttattctgaaggatagaagttaatcgctcaaagcccatcccagtgtccacatgttttgctggcaaagttcttaaactaccatctgcctccctattaaactgaatgaacacaaggttccatatttcaatacatgtaggatcatcattgttcactaatgaagctgcatcacggttgccaatacgatcaaaatgaatttcagtacagggtccacaaggaccagtgtcacccatctcccaaaagttgtccttgcacccaaaaggcaaaaccttttctttcggtagatatttcaaccatatgttcttcgactcattatcagcagcaagaccagatttctcatcaccaccaaagtatgtggcataaattctgtcagtaggcaatttgtaaaccttggtgaggagctcccaggcccagccgaataggacctacctaaccttaagaaaagtaaagtaacgaaccgaaaaaggaaaaccaaaagttaaacccgaaaagaaa

SEQ ID NO: 9314 - DNA, 574 bp, Setaria italica
  Peptide Sequence Number=SeqID_75288
cggtaaaggcatggccagcagaagagatggccgcaaagcgtcactattggctcttgtggcagctcaaagcatatgttgcactcaaaactccccccagctgcgtcgccgctgctgccagcactcgttgattcaccaacatttgctgacatcttgcttatagtcggaacgaattaagctgcaattcccaaggattacaggatgaagaacatggctaccaataaaattcataaaaatgactgaagatattaatcctagtacaaccaacaagtaagaaattattacacataactacaaacagcaccccatttttctacttagcacagtgaaagccaccaaaagggtccatgtttagtggaagggtaaaattctcatggtcctaagtagaattaagccacagacccataagtatagcagcaacaaagattgtccaaatagttatgatatagacgacatatcaattaccatgatcagaaactctcccgaaatctaaagatttatttctgacacgagatcatcttctagatgcgcaacctgacgatttcaaaatggttctaaccgatcctaaacaagggac

SEQ ID NO: 9315 - DNA, 1198 bp, Setaria italica
  Peptide Sequence Number=SeqID_75289
ctggtgctatccatgtccagtctaaatgggtacagattacaaatgcaatgcggggagatgacttccaaacaattgtacatcacgttcacctacaaaaatcatcaaaactaagcaataataattgcaccaggttcctcctaatactatatagggtgtagtgaaacgttaatacttatctagagctaaatacatattctatggacacttcatgcaaatacacgaataacttacgcaacattcagcaccaagctataatacagattcaacactgatataagacaatcttaagtccatcacaatgtaaagttgtcaaagacatgcttgcatcccctagaattccaaccatgatgagcagggcctccaggtggatgttgccaacagcttcaaaatgcaaggaggcttgcaatcactaaaactccaactgtgaggagcagggccttcaggtagatgtctgcctgctgctgttgccccaatggtgcttgcctgtggacgccatgggtgtgtcccatatgcccaccatggaagccatgcccatggccgtacccatagtggaacccaggaggctgcgcataagcagcagcatctggaaatccatggacttggaagctaagcatagggaacaggcccccaaaagcagccgagaatgcatagttcccccaccgtgcattcgccaatgggactcctgtgcccatgaaccatgggttcccattggcattggggaagttgttgttgttgttgttagtatcagcctgtggggctgtggcaggcctctggccagtcgggcggtgaggaatgtcagattcaggcatgttctttgatcttgggtcaacacggtccttgcctcgtccataaaggggaacaagcttgtcttcctcgacaagggccttgcacaccgggcactctggtgagtgtgcatggatgtgcaaccaccggtaaaggcatggccagcagaagagatggccgcaaagcgtcactattggctcttgtggcagctcaaagcatatgttgcactcaaaactccccccagctgcgtcgccgctgctgccagcactcgttgattcaccaacatttgctgacatcttgcttatagtcggaacgaattaagctgcgagcgaaggggagggagggggcgacggactcggagaaattccttccactcgacggcgcggcgaccgaccggggagacgaggcgaataaa

SEQ ID NO: 9316 - DNA, 243 bp, Setaria italica
  Peptide Sequence Number=SeqID_75290
actactgacatgtatccaaaatagaacatgaccaagttatgcagatttgcaagaaagctagtatatttttagtagtgatgatagctacgtagtagtggtctattagtgattgaaaggatattgttaattgaagtgatagctatgaatatttagaatgacctggctctgcttttgacacaacgcatacgacagctaggttaggtgtaggtgggcatgtggagcaaatagagagccttttggaag

SEQ ID NO: 9317 - DNA, 345 bp, Setaria italica
  Peptide Sequence Number=SeqID_75291
agcagatgcagatgagggccacgagcacgatgacgttgaggacggagatcttgtgccagtcctggcggatctgctccatcacgccagccttgcacgagttgcactggtagcagaggatgtttggggcattgttccaccgatagcagtcctcgtcctgcgctccgacgggcatgcccccactgtattggcacgctgttggtggtttgcagcaaccggactgtattggtgtgagatcatgctggaggtaatccattggagtccagctctcaatcttgtcacaggccttggagccaaccacacaggcaagggctggcctccagtacttcatgtcctgcatgtgggtgc

SEQ ID NO: 9318 - DNA, 606 bp, Setaria italica
  Peptide Sequence Number=SeqID_75292
gcctcaaggagttcagtgggccctacaacaccatggttgaggtgccggcgatctcccgcgaccggcgaaggcttagagaagctgaagatctgctccagacatacaagttgattctgtaccggttggagactgttgatctgcggcggatgacgaacgaggagaagctcgctttctggatcaacatacacaatgcattgctgatgcatgcctacctgaagtacggcgtcccacagaaccacctgaagaagacatcactgcttgtcaaggccgaatgcaagatcgccgggcgcaccatcaacgcggcggtcatccagggccttgttcttgggtgcagcacgacgcactgccccggacattggctgcggactttgctgaacccaaggatcaagagccggggaagcatcagcaaagccggcggcggcgagtggcaggcctttgccgttcatcagtcggagcctctcttgcgctttgcgctttgctcggggagccactccgatcccgcggtgcgggtgtacttcccgaagcggctgtcgcagcagctggaggcggcgagggaggattacatccgggcgacggtggggtgtggaaggagcaccgggtgctgct

SEQ ID NO: 9319 - DNA, 837 bp, Setaria italica
  Peptide Sequence Number=SeqID_75293
gcttatcccttcaacacccttcgtgtcctcacgatcacgaatgagcacactgctgcccgcgttagctttgctgtcctgaatcgaatctccactggtgctccccagcgcagagcttgcacacggaactgcaagccaggatgttgctaacccgtctatccagctcgtcctgttcgtcgacggcgctgcagaggcatgcgtgcaccaccggcaagccccccttccgcggcgccgccgggtgctggaagaagcgcgagaagctccccggcttcagagccagagtggccgtcaagccgccctgcgccgcgccagggaagggcggcattgtcccggccggcaacgatgacgacggggtcagcctcggcacagtgaagctgcctggcaacatcgacgtcgctcgctttgagagcctactctttcagtggggaaacagcctctgccaaggcgccaacctgccgcttccggtgcctctcaaggtggacaaggttgagggcggcatcagactagggttcatcgcagtggacgacggcgcgacgcagacgctggtttacatcgactgcctggtttctcaggccccggacggctccgggccggtgttccgagcgatcaggaacggtcctatgaaggacaaggagccacctggagagcccaggatcatgagaagcctccttcaggctctccaaaagtctattcaaattgcacaagtttgacagtgtaaagggctgcaattccctgtgactgtaactgacgagagcccattgaatcctgttattctcgttctcctctctcgacacttcaaagaaatgaagctataagttactttgaggaaaaaaaaaaaaa

SEQ ID NO: 9320 - DNA, 281 bp, Setaria italica
  Peptide Sequence Number=SeqID_75294
ggagggaggtgagcttgacgaggaggttggcgtcgaggcggaggagctcgcggacgaggtcgtagtggccgccggccgccgcccagtcgatgggcgtcgcgtaccaccactggtcccccgtgctctcccaccgcagcggcaggaacggctccgccgacccctctgccgccggccgcgtctccatatccatgagcacccgcccagctatcgtctacaaactactgttcctagttgcgtgaaaccttctaccctctggcgttttgcccttggcctcagtttct

SEQ ID NO: 9321 - DNA, 1635 bp, Setaria italica
  Peptide Sequence Number=SeqID_75295
tttttaaatagaacaaagacaatagtccctaataaggttcccgtgagtcagcataattacactccttcaagcccaagttttctctcgagtctcagctcatatctaatgacaaatcgcggtgttacattgacagcgcctagttaattcactgttggtatatttacagagagcaaccataaatcactatcggtagaccgtccaggtttacatttgcaagtctcttctgcaacagggtttcatgccgcagcacctcataccatccactgaaaaatgtaccacatccttattcacatgctttcgagccattccatcgcctcttggaacagaagcccaagcagaatacagtgactgtattgcctcatcagacaaaccgttctgactgagatcaagtaccttcagtcgcttcgctgagataagggcctccgccagttcttggataatctgacaattagagtaagagtttttctgcgacgaacttgcacagctcctatgtggaccagatactgaacgatgattctcattttctgcttcatcttcactgtccggaacctgcatgttttcaaagtctaggctcccttgggctatagcattgcttgtttcagggttgttacattgtttttctcattgcttgttgacacttcctgcatgtcttcatactgcattctctctagtgatgagtttgtgttctcagccaagcgcagctcctccaattggtcatttcctgatagtgcctgaataatacaaacaattccagcaagtccaaggttgcatctgtccagcatgagagatctaatactgcattggggattcacaagcattgcctgaatagcatcgcatccctccaggttaattgaatttcctccgagatttaagtctagaatattgatacaggagagatttgtacagatttgtgcaaaatcaggtgctgtaagcccacaattagacaactccaacctcaacaaatcttgagatgtgcaagacaatgcgtcagtaagcctaattgtccccaccggtccaatggaagttccacctagcagaagtcctgataagcatgaggattgtgcaagtaggcacagcttatcaaccattaacttattcagttttctcccggtcaagctcagttctgaaaaccttgtcagagaggcaagtttggatagaaggttaagcattgcattgccagaaatcggattgttctttcctaatgagagatgtgaaaggaccgacccttcatgcaatgcatctgccatcttctgaacagttcgtgatgttatagagcactgctcaacattcaagctataaagagctttgcatttttgcaggattgtgaaaaggtaagaactgcatgcatcagttaggcgatttccagatagattaagtacttccaatcgatcagtcataacagcacactcgcatatctgaaataaagcagttggaccaaatcgattacaatgtaaatccagggtcaagccaccatatgtctgacttgaagaagcaaatatatgctgaagcctttcaattgtttggtttcctagtaagttatgagaaagatccaatactgctattgttttatgcgatcttagggcatcaagaaagggtgtaattgacagatcctgcagtccgcatcagaacaatgac

SEQ ID NO: 9322 - DNA, 1313 bp, Setaria italica
  Peptide Sequence Number=SeqID_75296
tgggaaaagtataatcacgcaacagggtacagtaattacagggcgcacacaagcgacggctgcaggcggcaccactaacagctctctacaatgctaatctgctgttctctagctctagttgctaccaagcacctgcagcgaaaaccactttgcgctgacacccaccaaggtagcaagttgctcatcggcaatctcacggctgaaagctccagccttgtcatcgcctcacgagtaactccatgttgtgggcatccttgtggattggatcggaggcgcattccgcacgttaacatcgagcggcagcatccggtactctatctcgaggtccttcaagactctgatcatctcctggagcacgagctcccgcctcacgaacctcatgcccatgtcctgaaagttgagcgtgtgccggaaccatattgataccttcagcttgttggtctcatcgacatcccggaggacgatcatggctcccgggtaccaatgttccttcttgttgtcgatgtaacgtaatatgcgttccttcatgagggccagtttctccacgggcgttgcaacatgaatggaaaagtcaattgcgtctcccatgtccggacttctgtaaaaattcataattggtttggtggcaagtacactgtttggataatagatcttcaggttatcatatcggagaaacactgttgtcatgatattcatttcctcaacaaccagctgaacatcttcaatctcacaacgatcaccaacatcaaacggatgcatcacgaacaagaagacaattgcctcaaaaattgtcttcagtgtattcccaaatacgaaaactgccaagagaagctgtgaactgaggaagacaaagaaatgggttgtcgctatacccagaataagaagccagagtgcaaatacaatgatcccgacaacaacgttagccatctggttcagcttgttcactgcagtttttgtatcattaagtgtaagggcaagagccttgcgctctctaaatgcattcaccacccaattcttgagagacctcttgctgaccctgttgtgctcctgtgctccttcaaaaagatccattgctttgatggcctcttccctcctcatgaatctcattaaatctgacaagtatatgtacttggagccaggcgttgctacattgtgaaagatcctcttggcagctatctttgcctcatattcactgcgtatctgtgttgctgattcatccccctcacctgttgcctgctgtatctgctcatccatagttgctagtgtcccaaaaccgaaacgaatacctacaatacaaacctacttacaataga

SEQ ID NO: 9323 - DNA, 1298 bp, Setaria italica
  Peptide Sequence Number=SeqID_75297
tttttagctaaactcaccgatagccgatcatgcagccagataccaatagcagcaaaaagttattgttgtcgaataatatttacacgagctaaagccagcccacaagtcctgcattccggcaaaacttagcgacaacttgtagaactattcttttacagaaggatgaaagggaggttcctccgtgtatctaagcaccgggaagaatatgaactacaatctattgttcacagttgagaggttatactgatacacaaagaggtagaagcacacatccaagaatcctttacaagtaacacttagttgcctaagtcttcctagctttgcttcgtttgctgtgggttggctcttgaatccagccttctcaatctgatattgcgaacaatagcagcttgcttctggcgatgactgtagcttttccttttgctgataaaaatgaggcccgcggtgaggaccattcctccaattgcccatgaaattctttcaccgacaggcatatctcttgcccatctctggaaatcttgaacattccaagaagccacaccgcttaatgttggacggtcttttgaagaagtccatgaatcagagatggaatccaaactcgctttaccaccatagcagaaagtgtcatcaactaaaccagagttggtctcagaaacttgcacagagaaaccagcaagatgacataactctgtgccattagaaacccatttatgtgctttgccacaaaggatgtcacctaaaccacaaggagataaggcctgtgttttcatatccacggagaagtacgattctgaacaagctttgaagaccatatcacagaatgacgcacatacaacaggaggtccaggcctgacacccacgcgtggatcacatattgagcattcaagcaattcccacaaatggatacattcttgaccgccttcaccagttaatgcaaggttcctcacagagaccagagcaggaaatgtctgagtcacatcgcaacatgtattctgacggaatatcctacacagtgctagatctctgcgccccttcggtgcccttccaggaggcttgccttcagatgaaaaggcaggaaatcgtccaccaggtgaaacacatacaccttttggttgtccagctgacgcgaccggcgagaagaagagcagcgccaggaggaaggcgaagctggccgcgggtggcgggcgcgtcgaataccccatcggaagccgcctgcccgccccgccggcggggtgctcgcggcaggccgggggaggtcggcgcggcggatggggataggcggtcgacgaatcgatgcg

SEQ ID NO: 9324 - DNA, 329 bp, Setaria italica
  misc_feature (325)..(325): n is a, c, g, or t
  Peptide Sequence Number=SeqID_75298
agcaccccgcaggaccacggcagcaagaagcacaacccgcctcaccagcagcaggcggcccccgcgccggcgacgctggttaccgtcgacggcgacggcgacctcgagatggagacgctgctcaaggcgtcggcctacatcctcggcgccacgggctcgagcatcgtgtacaaggccgtgctcgccgacggcaccgcgctggccgtccggcgcatcggcgagagcggcggcgccgacaagctcaaggacttcgagtcccaggtccgcgccgtggcccggttccgccaccccaacatcctccggctgcgcggcttctactggggcnccga

SEQ ID NO: 9325 - DNA, 357 bp, Setaria italica
  Peptide Sequence Number=SeqID_75299
aagctccatatcacagtatctgacaggagaagagttggagaaattagccaaagaagccggattctctgtagccaagcactatgagcttggtggagggctcatggggaacctagtagccactcgatgagtacaatatagcaaggaaactcgatttgcacgagtcatctgcattatcttagctggtgcagtggtacctatatctatccagatatcattttttgcctatctcaaatgaagtcgtggacaaacattgattccagaaaaaaatgaatggctgaatatcattgtctgctgtttcgaacccgcacctctgtagtgcagcaacggtttgaccacaatcagatggatgagacgcgt

SEQ ID NO: 9326 - DNA, 565 bp, Setaria italica
  Peptide Sequence Number=SeqID_75300
gtgtgcagcagatgctcgccagggaacccgggaaacggcagcttgcggtttcgacagtcactactcctggtacattgtaggctaaactgtcagaaggcggccatgcgtagtttgcgatatgcacggaacagttcactccacgagcacgagagacttgtatacgaaggatggatcctatacgacagtggacatcgggatgaagcactagccaaggccgagcagtcaattagccttcagagatcattcgaggccttcttcctgaaggcctacgctctaggagattccagcatggacacggaatcctcactctccgtcgtgcagctcctggagcacgccaacagctgtgcttccgacaacctccggaagggccaagcgtacaacaacatggggagcatctacgtggactgcgacatgctggacgaggccgccgagtgctacggcatcgcgctgaacatcaagcacacgcgggcgcatcagggcctggcgcgcgtccattacctgaagaacaggaagcaggccgcgttcgacgagatgaccaagctcgtgcggatagccaccagcagcg

SEQ ID NO: 9327 - DNA, 1361 bp, Setaria italica
  Peptide Sequence Number=SeqID_75301
agatggcgttcacggtttcaaattatcgggttggatgaaaagcttatcgatggtgtaactgagagtatagggatgctagttgttcaatttcaaaacttcttcacctgggttttaaagtgtgttaagatattattaaatgaaccaactgatcaagttccagcagcaaacagtgaacttgtggtgatttttttgaagttcctccttgataaggatccaatcaaacagctacttgaagctgacgagagaattgactgtgatatggatgctgcaagacatgttgagcaactagtagtttttggaggatttacagacacccaatttttggaaaggagtttggtaaaacaattcaatgaattggaaaatagcttgaaggaggctttcttgatgccgtttaccactctctcttcgcaaatacactgtcaaggattgcttcctctataccctgttacatcatcagataccttgtcttcaacctgtacaccggcatcgatatcatcctataaggatgaagattcacagcatgaggaatcctcgtataacttgactgactatgtatgtttcaagataccggatggatcattaaataaaagaaattgcatcggtgtgataaaggactctggtaactgttgtactgccctcagcatggcgtcacactcaggttcaccattgcatatgcctgatgaatatgagtgtgttgacctgtctctttataaggacaaccaagtaattttctactgagtgaaaggtctcattctgatagccctggaagatcttggatggtgatgctgcagacacagaacttttcctttacgccactctcaagaacatcccctacaaatatttacagtctgcaaaaattggtggcactggatctccaattggacacagattatgggaaagttcgtagcatacctcacatcgtgtctactccacttgcagtcagtgcatcaagaggagtcgcttgtgtcttttcatctcggaggcatgccttggtttatatccttgatgaagatgaggacgaggacggggatgaagtttctgatatggagtgattgttatccaattcccggcagccatttcagtgaatgtcatcataccatattagtatgctggaaaaacaatgcaatagcattgtctcctgatcttcatgtgctggaggcaggagccgggagatagcagcatgtacggaaactaacttgcctctcggaaacactcggtttcacgacaaagcagtgaatgctctggttctaaagttgcatcagcgtggtaggaggccatgatgtgctgccacttttgggctgaactatcagctgcaggctgtatggtgttgggctatctgcagagcgagctttgatggtatc

SEQ ID NO: 9328 - DNA, 720 bp, Setaria italica
  Peptide Sequence Number=SeqID_75302
tttgttcatgcctgtgatttttctccacgagctgttgacttggtcaagaagcacaaggacttcagacctgaccggataaatgcatttgtttgcgatattacatcagaacaactaaccgagagtatggaaccctcttccgctgatattgtaacaatgtcgcaccagataaaatgcctttagttctgcataatgttagaagtgtcctaaaacatggcggacgtgttctctttcgggactatgcctttggggaccttgcacaggaaagacttatgtcaaaaggccagcaaataagtgagaacttctatgtcagaggtgatggtacgcgtgcatattacttttcaaatgaatatctggttgacttattctcaaaatgtgggtttactcttgaggaaatatgtgtgcacaacaagcaagttgaaaaccgttcactagacttggtgatgaacaggaattggatccaagctacctttaccctcaattcagctggtcctcaaggtctgaatggtcaacatgacctcaccgatgtgtgtgaaggaaaagaggacaagctagttgctgactcttctgagaagaaaaacagtagtgaagaaattgatctttccgaggatttttgcaacatgtttggggcatcacacaaccttgacgaggtacaaatcattggggtcaaagcaagaggtcatgacttcaaaataaaaatgctcacgaaggaataccagcaca

SEQ ID NO: 9329 - DNA, 947 bp, Setaria italica
  Peptide Sequence Number=SeqID_75303
actagacaaagttaacgactacaagtttagttagtaagactaacaagaataggaattgatctttccgaggatttttgcaacatgtttggggcatcacacaaccttgacgaggtacaaatcattggggtcaaagcaagaggtcatgacttcaaaataaaaatgctcacgaaggaataccagcacacctgcaaattaactggcttaatgctttgggaatcagctcaactcatgtgcggtctgttagcagagaatccttccattgttgcaggcaaaagggtcctggagctgggctgtggctcggctggcatctgctcgatggttgctgcaagttacgctcagtttgttgtagctacagatggggatgcagaatcactggacctccttagacagaatatctcctctaatttggagtctaacttgcttgacagaattatgattaggaagttattttggggcaacaaagatgatgtgagggcagtcagagagctttctggcaatgacacaggtttcaattgcataataggcacagacgtgacctacaatcccgatgctatacttcctctcttcaagactgccagggagctcatttctgacaaatctgacgaggattcaagggctgcttttattctcagctacattcagcgccgtgttgatgagaattctatcctttctaatgcaatggcccagggtttcaggcttgtggacaaatggataaatggagttcatgacagtaatggtattattagctcctggttctccggtaatgatgtttgcagcgcttaccggaacataacacattcgatattgtattttgaattgtgagagagaaggacgtctaccaggattcatggttcctgtgtaatctgaagtatattttgtaccaactgcactaagcatatggggaaacgttttgagaactgttctaacaactgtattgttactgttaa

SEQ ID NO: 9330 - DNA, 1914 bp, Setaria italica
  Peptide Sequence Number=SeqID_75304
cacgctccacctccgccccccaccggctcgacctttcgcgccgccgactcgcctcgcctcgccccgctagggtttgccgttcccgacgcaggcgaaggcggcggcgtctcggggcggcgccgtcttcgtgccctcccgctcccaagatatggcaatgcaagctgatagctcggctgctccttatagtccacatgtggttgcgggtgcatttgtcaaaaaatactaccatactctccgttacatgcgagaggatgcctataagttctataatgactcgagcattcttggtcgatcagattctaatggaaacatcatatcggtaaccacactggatgatatcaaagtgcaacttcagtctacagacttcactgactgtttgataaagttggagactgtagattcacagccatcccatctggatggggtgctcattttggttgctggatcttttactattgatgctgtgaaacaaaaatttacacagtcgttctttcttgctccacaaggaagtggctattttgttttgaatgatatgctcagaattgtaaggccatcaactgaggtgaaggaagttgtagctaaccatgatgatgtaagcatacagagtaccaccttgccagctgagccagaaacagtttcaattaaggagagtacagaaccaaatattccacctacagaaaacataatgcctgtcaatgatgaagtcattagtccctctacaaatgctgtttctcaagttaaaaatgatgctgttgttgagacatgtgtgaaagtggttaacaaggatattgagaaggtatctgaggccactcaagctcctcctccggctgagaaggaagtacctaagaagacttatgcatcaattgttaagacaaccagggagagcataccacctgcacctgctgctaaacccaaacccagcccaaggccaaagccggatcaaaatgcgaagaaatctgtgtcctcaccttcaaaacctgctcaagctactaacactgcacccccaagcgagaagaatgtgtctaaaaccaaatcccctgatgagccagggtattcagtttttgtcaagaatttgccttttgaagcaactgttgaaatggttgggcaagagtttagcaggtttggtgctattaaacctggtggtatacaagtcagaaaataccagcttgatcagttctgttttggcttcattgaatttgagtctcaacattccatgcaagcagcaattgaggaatctagagtttatttcggctcctgggaatcatatgttgaggaaaaaagaactaaaacccgagttgttgatggtgttgtcactcgttgtgacgacaatggggctggcagtcggttcccgtcaggcagaggtggttacaatggtgacaactacaggggacagggcttccggaacaatggctactacaacggtggtggtaacatgaggaacgacttcaggaaccagaacgagtattcagaccgtggccgagggcctcaagggaatggctacccgcagaacggtaacggctaccaccggaacaggaacggctaccatcagaacgatggctaccaccagaacgatggtaatcaacagcgacgcccctacaacaatgggaatgggaatggaaacgggagggctgagcgcggcaatggtctcaagcaacagacaccaacaccggttgcttcgtagactggtcattttgtagcccatgggagtagtgaaggagttttttgagggtagaagtgagggtgttttttttatcgtgagaaatgaggagtgttctcgcagcggctttgtttacgtgtcctaggaactaggagcatcaggtttacacaaacttcggcatgggctgcatttatgaattccatcccatgggctatgttgggcgcttatctggagatagcaattgtgcgatttgactt

SEQ ID NO: 9331 - DNA, 229 bp, Setaria italica
  Peptide Sequence Number=SeqID_75305
tttaggaaaactgtagaacataacatgcatagcacttcttccaggtgcctatgatgtccacatacacaccaagggatgttacaatgaatccaacagccaactgcctttcatggatatctagtaagcagtaatgactcaacatcttatcttgaactattatcacataaaacactgtaactggatattcagtcagttatttggcattatcaaagataaatatatggataaa

SEQ ID NO: 9332 - DNA, 628 bp, Setaria italica
  Peptide Sequence Number=SeqID_75306
aactattaccatacattaaaagcagcacataatttcaagtttccagaggggaaaaggcagcacatcatacaacactgttccttatattatgccagctcacagtatagctttgaaaggcaaaaccaaggacgacactgttccatatgttagggtcgatgaaaatcggtaagcttatttgcaacacagtgcaaaattactctggttaactaacaaaacattattgccttcagggagacagtctggctatctgacaatgctaaacaccgtacactgcaacagaaaaggcgcaaaagattcacgctatagagatcgattcctccccagcatctgatcctggctgcctgggcctgggcggcgcgggctcctcctcgccgtagatgtggcggaggcgggaggcggagatgggtgaggagggcgtggcggcgagggagaagagctcctcccgccatccccacatgacggtggacatggcggcgttggcggcgcggagggaattcttctcggcctccaggccctcgatctcgcgctgctgctccgccgaccgccaccccagcgccacgaacgagccgaacagcagagcgctcaccaccttctcccggtgctccgtaagcttccccctgatcccacg

SEQ ID NO: 9333 - DNA, 454 bp, Setaria italica
  Peptide Sequence Number=SeqID_75307
acgagaggtacaagaaggaggagaaggagcacaagcacaagcagcacctcggcgaggccggcgcactcgccgccggcgcattcgccctctacgagaagcacgaggcgaagaaggacccggagcacgcgcacaggcacaagatcacggaggagatcgccgccacggcggccgtcggcgccggcggatacgccttccacgagcaccacgagaagaagaaggaccacaaggaagccgaggaggccagcggcgagaagaagcaccagcacgaggcgatgagcaccacctgcccattacttgcttgtgtgcacgcgtacgtgttaatttgacgagtcactgcagtatgtacaaataagtcctttccggaccttcgcttgcttgtgtgagactgagaggtggggccgtgtgcggcgaggtgctcagtctcacacaagcaagcgaaggtccggaaaggact

SEQ ID NO: 9334 - DNA, 393 bp, Setaria italica
  Peptide Sequence Number=SeqID_75308
ttaagttatttcttacggtaggtagtattcgtccgtcctacggtcggtccgttcggtcgccggcggatacgccttccacgagcaccacgagaagaagaaggaccacaaggaagccgaggaggccagcggcgagaagaagcaccaccacctcttcggctgatggccggccgccggcgatgagcaccacctgcccattacttgcttgtgtgcacgcgtacgtgttaatttgacgagtcactgcagtatgtacaaataagtcctttccggaccttcgcttgcttgtgtgagactgagaggtcgggccgtgtgcggcgaggtgctcatcatgtgtacttgcttgatttttctctgcatgtataattacgttgaataaccaggagcgacgtgtgtggc

SEQ ID NO: 9335 - DNA, 804 bp, Setaria italica
  misc_feature (747)..(804): n is a, c, g, or t
  Peptide Sequence Number=SeqID_75309
ttttactttaacggtttaaggtttaagttttaatttttacgtttaccgtttaccttaacggttcggttccgttcggtcgtccactcggagaccgtggccgtcgaggcggtgaccgccggcgagaacgagtacgagaggtacaagaaggaggagaaggagcacaagcacaagcagcacctcggcgaggccggcgcactcgccgccggcgcattcgccctctacgagaagcacgaggcgaagaaggacccggagcacgcgcacaggcacaagatcacggaggagatcgccgccacggcggccgtcggcgccggcggatacgccttccacgagcaccacgagaagaagaaggaccacaaggaagccgaggaggccagcggcgagaagaagcaccaccacctcttcggctgatggccggccgccggcgatgagcaccacctgcccattacttgcttgtgtgcacgcgtacgtgttaatttgacgagtcactgcagtatgtacaaataagtcctttccggaccttcgcttgcttgtgtgagactgagaggtggggccgtgtgcggcgaggtgctcatcatgtgtacttgcttgatttttctctgcatgtataattacgttgaataaccaggagcgacgtgtgtggctcccaagtcaagctcttgtctatctgtggttgaatgtttgtgccctgagaatcaacacgtggaaggtttttttaaactacaaaaaaaagaaaaaattctaaaaaannnnnnnnnnnnnnnnnnnnnnnnnnnnnnnnnnnnnnnnnnnnnnnnnnnnnnnnnn

SEQ ID NO: 9336 - DNA, 513 bp, Setaria italica
  Peptide Sequence Number=SeqID_75310
ggcggtgatcgactcggtggcgaggctgatggggttcggtccggaggtggtggagccggcgcgggcgacgctgcaccggttcgggaacacgtcgagcagcctggtgttctacgagctggcctacttcgaggccaagcggcgggtgcgcgccggcgaccggctgtggatgctggcgttcgggacggggttcaaggcgtgcagcaacgtgtggcgcgcgctcagggactgcggacccgacgccgacaacccgtggaatgggtgcgtccaccgataccccatgccgctcccgccgccgtccaggacgcacaagcatgccgcttagcttagcggcggccgcagagagagataaggaagatacctatatgtgctaggtcgatgcattgtttggggcggacgacatatctgtgtatcacttgctatatcatgagaaaaatgcatgtggctctgtttggaaatggaacgtgaaatatacagaggaggaacgaaattccgtcttaaagaactttaaaaaaa

SEQ ID NO: 9337 - DNA, 289 bp, Setaria italica
  Peptide Sequence Number=SeqID_75311
cggcgggcaactcgtcttcgtccccgagagacggaggaggaaccaaaccctatcccgcagcggcggagaggggggaaggccgggagagtggaggcggattggggtcgaatggggggcgagggaggtaggccgcaggcgtcacgacttcccaaacccccgcctccgccgggctcctcctgtgcactactactctgcagcgcacgacgccgccggcctgttcctccctccctccgctgaagcgccgcctcccttcttgatcggtctggtggactggagtggagtggagacg

SEQ ID NO: 9338 - DNA, 246 bp, Setaria italica
  Peptide Sequence Number=SeqID_75312
cctccgtgtccggcgccgagcccgccgccgcgtctctgtctcagacgctcgttcgcgctcgtcgccgccctgtctgcgttctcgacctgaaatggaaggcttgcagtgttaggactctgcagttgttgcagggacgtgttgcaggacgtagagtgaagagcgaacgtacgacgtcgaagaggctggacctccgcttcttgtgcgtgaggctgctctgccggaggaagtacttctgggcgtggctgg

SEQ ID NO: 9339 - DNA, 744 bp, Setaria italica
  Peptide Sequence Number=SeqID_75313
acctgcgtcgcgtccgcgtcgtgacgaagtgccgggagatgcctcgccagtcgcccttcccgagcttctccaggcctgccaggaatctccggtgctcatcctcggtccatggaacccctgatggtagttgatgacatccaaatgaagggaaaaagatgaggtttttattttattttaggacgcaattcaaaagcagagctgaaaaatttgtactccagtatatatacaacttattataagctgtggagtcttattgatggtctgaggatagatgattgagactgctacgaaattgcaaattctgaaacaaatatctgaatctacgggccagtagtttggaaaagaaggaattccggtctctgctgaacggggaggctcacccttcttcctctcctgcgccctgcccatgagcccgtccgaaaggtacccgttggtgaccttctcggcggtctcctccaccgagacaagcgacgacgacgacgacacggacggcgaggagctgctggcggcgagagcggccgcgtagtacgccgccggcgccgcggacgacaggcactccatgctgaagcacttcttcatgggagaagacgaccccacatgcagctgcaccccgaacagcctcactccgccgccgccgttctccatcatgaccctgccgttcccgccgcaggtcctggagttgtggccatttattgccacagctagagcacttcctagccatggccgcggcacgccggcgaagag

SEQ ID NO: 9340 - DNA, 1417 bp, Setaria italica
  Peptide Sequence Number=SeqID_75314
ggtctagttctttctagtttttttttttttttttttttgagaaggcaggcatcagcagccgttctttatttgcacgtctaaaattaggccagtaaagtttcatcttctgaagatgcatcatcaacaggacggacgacggcggcggctttggccaccaacacacacatacaccactacaccaaaagctcctcctttgatcctttccctctccaccctttcttcatcttctccatccagatgagcaaaagctcttcgagcaacggatcatcgtcgatcgcctttccggttacgtgaccctgatggtcccgaagaacggcgtcctcggcgacgaaccggcctggtagtcggcggtcgtcgagatcttcagctccaggtccggcgccgcctgctggaggctcgcatgatgaggcttggacagcgtcagggacgaagggtgcttctgcctcggtgcggcccgctcggcgacgtgctcccgctgctgctgctcatcgccgatgagcaccgtggcagcagggacgaaaggctcggaggcaggatgcgctcgggcttcgccggccggctgatgatgccgagagacagagccgggagctccgtgtccggcgccgagcccgccgccgcgtctctgtctcagacgctcgttcgcgctcgtcgccgccctgtctgcgttctcgacgacgtcgaagaggctggacctccgcttcttgtgcgtgaggctgctctgccggaggaagtacttctgggcgtggctggccacctgcgtcggcgtccgcgtcgtgacgaagtgccgggagatgcctcgccagtcgcccttcccgagcttctccaggcctgccaggaatctccggtgctcatcctcggtccatggaacccccttcttcctctcctgcgccctgcccatgagcccgtccgaaaggtacccgttggtgaccttctcggcggtctcctccaccgagacaagcgacgacgacgacgacacggacggcgaggagctgctggcggcgagagcggccgcgtagtacgccgccggcgccgcggacgacaggcactccatgctgaagcacttcttcatgggagaagacgaccccacatgcagctgcaccccgaacagcctcactccgccgccgccgttctccatcatgaccctgccgttcccgccgcaggtcctggagttgtggccattattgccacagctagagcacttcctagccatggccgcggcacgccggcgaagaagaagaagaagaacaagaacggtggaggaggagagaagcaattccaattctctggtctggccccgggagataagatgtttgtggggatgttcgcatctcgccgggggctctgctcggctcggctgggcttaatatgggagcaagaaagatgtggccggggactagcgaattgttggggagtgcac

SEQ ID NO: 9341 - DNA, 523 bp, Setaria italica
  Peptide Sequence Number=SeqID_75315
cccaaagaaaaaaaaaacccaagtcccctccgccccccgcggcggccgagcaaacaagccgccgccgcacgacgggatggcgtcgacgccggagccggaggacgggagggagctctacgcgctgctccacctctcgccggacgcatccgacgaggaaatccgcagggcgtaccgccagtacgcgcaaatctatcaccccgacaagtaccaggacccccagatgaaggaagtagcaactgaaaactttcaacgaatacgtgatgcatatgagatactatcggatgagaacaaaagacagatttacgacatctatggtatggaaggtttaaattctggcctagaacttggtcccaagctaactaaaccagaggaaatcaaagaacagttggaacaactgcgtcggcgcaaagaggaagaaaaacttttcgcacatgctcgacccaatggctcaatcattgctaatttctcggttccacaatatttggatggcaatggcatcatgaaaggaatgggaatgtcgagt

SEQ ID NO: 9342 - DNA, 373 bp, Setaria italica
  Peptide Sequence Number=SeqID_75316
actacctcttactatcctcggcacgcggagaacgatcctcttttgttttctttccaaagaaattgtacttccacctgttactcctactgcctgaactttcatgcttgctgttagaaatatgtgcttctggtactgaaggcagcagtagcttacaaagagcaccaaggtcttcacgcatcgcggcaaattgagctatggcttccttccagttcctgctcatggtgtttgtgatgttaatttgctcatagagcctcctctctagctcctcctgcaggccattgacacactccccgatcgtggcgctgaagacttccagttgcagctcatgctcccactggagatcagacgccgacgcgttgaccgatccaagcat

SEQ ID NO: 9343 - DNA, 599 bp, Setaria italica
  Peptide Sequence Number=SeqID_75317
ccggacgagttcatgccggagaggttcatggatggtgggagtgctgcggccgtcgacttcaaggggaacgactttgagttcctgccatttggggctggacggaggatttgccctggactcaattttgcgttggccactgttgagatcatgctagcaaatctcttgcattgcttcgaatgggagctgcccaacggcatggaggccgaggatgtcgatacgacggaggtgtttggattgacaatccatccaaaggagaagctcatgctttttccgaaaccacgtggaactagtactggtggtggtcactccatgcaagctgaggcagctgatcccgagtgatcgatcgtgcctaggggtggtaatggatccaacctttattgagcccgatccttaaatttactaggctaaattagaggccatttaccacccctcgcgcccaatcgatcatatcgcacacatatattttgtatagcagctgtatatacaataattagtgcagcttttaatacctagctggttttgtagatatgagcgcaatgcatatatacatctcagttcaccgtatatatgcgatcacgggaactacatatacttatagg

SEQ ID NO: 9344 - DNA, 1589 bp, Setaria italica
  Peptide Sequence Number=SeqID_75318
aaccgaatttattagaactcaacccttgcagcttatactcacttcctgttgcttgtgacaaaacatacatagactgaaatccctcgcattaactagaaccatagaggaacgggaacttatatatgtacagaagagaaccatagaggtgctagccctactggtcatccagcctccagacctcatggaggagcctgtacctcgatgtgctcgagttgctgatccgcttcagctttgcaagcgggttcgacaacgtgttggagatgaaagtcagtggagagctcagttcatccagctcgtcgtcgctcgtgttggacttgcgaaggatggcggaaccgctcttcctgggatcgccgatgacgcttagaattgctccagatgccggaggactatacaagattggtgatgcaccacatgggatcgagtgtatgcccttgttgcactccaggtggtcctccaattctagtgcttcaagtaaagagttttgaattggatctgggcaaaattcatctggtacaaagcccacaaggatattcttgatgattgatgaactgaaggtaggacaaagctcttttctagtactggtatccatgagcacatccttggggagcatcaagagatcactcaatgcattcaggagatagaatggctttcgggattcagcaaagccattttcaccatctgcattctcaacttccggatagtcatccatatccataccaaacaagtcagtaagacttctggaccagctgccaatagcatttttcagttggaccccagcaccgaagctaaatttcccagatggtattggaagaaccttaggatcagttatcgggtcagacatggggtctgttggaatttcatcatctgattcacgtaatatagcattgaacattgctacatccaatctagctatgcattgctccataaccaatttggccaacataggtaggcatccacactcatgtccagctgcccttactgggcaaagcctttctgacgcctctttgaaagcctttttccatatgtccatggatatggttgcttgttgctggtctcccacaacagtaatccttccatagcttctctttgcattcgaactagttttcaagtcactggttatataagcagattgcatatgtggtgtgaatgtctgccaccaaagggtttcaacaattcgtgaaaatatccatgattcaatcttctttattgcagctataaatgtgtcaacatcttcccagttatcaaactcaggggaaactagttttcctttcttcctattaagtgactcccacattgatgcagaatttttcctatatgccggtttggaactataactagcagaattgatgccatttatagtacccgattgcttagaagtttcagtaacaattccccgcaatactacacagtttgataaccagaaactcaaccttgcgatatcatatccgcaagattttgcaaccaaaaccagcccagaggtagcactccttgctgcacttcccatcttgtctcttgaaaagttttttagtgcatgcacgaaatgcctggagagccttcgtgctggtgtatggaccttgttcactgagcta

SEQ ID NO: 9345 - DNA, 421 bp, Setaria italica
  Peptide Sequence Number=SeqID_75319
gatagggcctcctcactctttcatagaaagatagaaagcggggcagtagggtttaggtcaaaataaacatgggtaaggtaggtatccaataaatatttatctatcctaattttatggtatattcttacgccctttgtttataaaaacggtaacaaacggaagaaaaaatctctctattcccgcgtcttctattcaggacatccccctactcttttttagggaaagggctatgtatcatatttatacttaatgctctccaattctaccagaaatcatataagaatttgttaggagtaaattcctttaacggattcatccatagtcttagggcagaatggccttttgactctgtacccttgattccactatgattattgatcaatagtagaagaattccttcatagaaataggagacataatt

SEQ ID NO: 9346 - DNA, 654 bp, Setaria italica
  Peptide Sequence Number=SeqID_75320
cataaaatgaaccagctactaacaaaacgaaatgcacaaacaagacggaatgcggatgatggatgattttggaggatactatgatgaacgcatgtattggagacagaatgatgaaatcccggatgctgataaggagacatctgcaccatgttccttacctcctgtaacacatctcggagcccatcaacaagagagttggcagcattcttcatttggaaatcaacatcacgataaccaaaacttacttgaaatggaagtcagggtaaggggtgaaatgtcccagattcatcatgaattatatgaactgcggaaactggtggaaagttgtattgcatcccaagtaaagatgcagcactccgttaaagaagaggtgtgcagtgcacttcgtgaggcagggttgatgccaagccaccccgacacaacagcagcaaaaaggggcagttgctgcatgtgccatcgtatgcaagttgactctctactttacaggtgtgggcatatgtgtacctgtttcaattgcgccgatcagctgaaatcgagcggcaggagttgcccaatctgccaatctcctattgatgatgttgttcgggcgcagctgaattttttgagattttaggatttactaggtaaagaagaaacaaaaaggagaccggcact

SEQ ID NO: 9347 - DNA, 656 bp, Setaria italica
  Peptide Sequence Number=SeqID_75321
tccagtccatgctccgttgaggctattgcgccagcgaaggtacagttgaagatgaactgtggactctacttaaaccagttaggccacaccaaccacaatatgtgtctgagaataataccttgaggtatggaagcagcaggacagacttacgagaagcaaacaattacaaacaacaaaataatggcaattgcagggttgatgaacaattttgtaatgatagagttccacttgaggaaaattcaaatgatgtatctgttgaaggtcttgttaattctgatggttcagaaaatctacactgcaatgagcagatgaaaaccaagggaaacttttgtgttcatactcagaaatattctgaagcatcaagctctgcaaggtacagtgagcatagtaccgttgatgacaatcaatttgtggaagacatctccccgagcaccacaagcacattgcacgatctacagactccatcatctcgaggagataatctacgtgaagaagacaaccaaagcataaatggttcctgggaagagagaggattatggataagcagtcttggttggcctgcacctatagataccatgagcccggatagttggcgtcaggatgcaatgggggatattgagaatcataatcagattcaattcaatgatcgcccctgg

SEQ ID NO: 9348 - DNA, 748 bp, Setaria italica
  Peptide Sequence Number=SeqID_75322
tattctaagtcttcttgtctaaggttactagttgagtctattagttaccgttgatgacaatcaatttgtggaagacatctccccgagcaccacaagcacattgcacgatctacagactccatcatctcgaggagataatctacgtgaagaagacaaccaaagcataaatggttcctgggaagagagaggattatggataagcagtcttggttggcctgcacctatagataccatgagcccggatagttggcgtcaggatgcaatgggggatattgagaatcataatcagattcaattcaatgatcgcccctggatagactccccaaactcgtggagatcattatgtgttgtcacacaatcagactatcgctctttgtcccgcaatgctgacatttgcaatcttcttgaaagcaaaaaggtctcaaagtctcttgaaagtgacttcagcaataaaatgaaccagctcttgctaaaagtcctgcacaaacaaaggcaacagcggatgatggatgattttggaggatactatgatgaacgcatgtattggagacagaatgatgaaatcccggatgctgataaggagacatctgcaccatgttccttacctcctgtaacacatctcggagcccatcaacaagagagttggcagcattcttcatttggaaatcaacatcacgataaccaaaacttacttgtaagtgagctgctattcaatgtcagctgtggaaaagtcatattcttactatac

SEQ ID NO: 9349 - DNA, 943 bp, Setaria italica
  misc_feature (906)..(906): n is a, c, g, or t
  misc_feature (921)..(921): n is a, c, g, or t
  Peptide Sequence Number=SeqID_75323
aacgaaagaaaagttaaggaaactaaagaaacgaaagaaataacaaagtacaagtaagtcagtagctgccgctcatcaactccatcgcagttcttgcctgtcctgtcctcccctccccttttcccgtcgggggagagatccgtgctgcgatggactgccctggccgaagctgccggctgttcggcgcccagagatcgctgcacgacctcctcggcggcggcaccgtggcggatgtggtgttgtggaggaggacggaggtggccggcgggttgctggccgcggtggtggcgtcatgggcgctcttctactgcgtgcccggctacacgctgctctccttcgtgtcccaggtgctcatgatcctgctcaccgtcctcttcgtctgggccaaggctgcacagctgctcaacagggcacttcctcctgttccgttgatggaaatttctgataagtcaacaagtgaagcagcagaaatagtgggtaacttcgtgaataaggtgctccaggattttggaaacattgcacttgggaaggactcgagcctcttctacaaggtggcttttgttttgctgctgacttccatagttggccgattgactgatcttatcactttggtgtatacaagtgctgttattactctcacgatccctgcattgctggagaaatccgaagaacatattgccagatatctcgagatagcttcagcatatgttcaggcatgtgggggagcatgcgaagagtataaatgtaagatgacaaacaggttattgcaaaagaaattgagttgatagcgatgtagattctccaagacaaaaaatttgccttgtaaactagcctgtctttcgaggctaaacagttgcgacatctaccgagatcgtggtctgtctatatactggtgccttggaaaanaaaaaactaaaaagngactgaccaaggcacacgaggg

SEQ ID NO: 9350 - DNA, 420 bp, Setaria italica
  Peptide Sequence Number=SeqID_75324
acttttggcttactgtcacggcggtgggaagctatgttgcgggtggagcaatgaagcgaagtcgacctgcggcggtagcttggctatttgatggagaccttcagaagcggggcaacattgctcaccattccgatagtgataaaagaaacggatctatgacgtggagtgttatggcggacgtggcgagacccccgcacacggtgtttctttgaggcgacgagagaggtggagtccaacagcggatgtagcgaggcccccgcgtgtttgtgttatcatggtggcgactgcgaggtagttggtgagaggtttggatctggtggtatcactctatctggtggagtgaggtgtttgcagcggcaatacgatgaatggtcctgcatgacggtggccttcttggtgcgatgcggtctgtttccctcg

SEQ ID NO: 9351 - DNA, 399 bp, Setaria italica
  Peptide Sequence Number=SeqID_75325
ctgctgcgtgtggtgtcatgtgactccgttttctgctacatccaatagacagcacactgaatgtagcagaaaacggagtcacatgacaccacacgcagcagctaaaaacataatgttcgctgcttaaacactcccataacacaatttagacacccagcacaattagtttagactggacacaaaagactgacgccaccacactaataagacaaccacacgggaaaaacagaaaacaggtagataaatagcagtatcgaagtgctgcgtgggatcataatagcgccacatctcactcatcatcctcttcctcggactcggcgctctggagccactccacgaacggcttggcattcttcacgacctgggagttcttgccggcagcgacagcagcgttgtacc

SEQ ID NO: 9352 - DNA, 2240 bp, Setaria italica
  Peptide Sequence Number=SeqID_75326
tttttttttttattttgtcaatccacaggacaaatagataaaccgtaataacatccaatagacagcacactgaatgtagcagaaaacggagtcacatgacaccacacgcagcagctaaaaacataatgttcgctgcttaaacactcccataacacaatttagacacccagcacaattagtttagactggacacaaaagactgacgccaccacactaataagacaaccacacgggaaaaacagaaaacaggtagataaatagcagtatcgaagtgctgcgtgggatcataatagcgccacatctcactcatcatcctcttcctcggactcggcgctctggagccactccacgaacggcttggcattcttcacgacctgggagttcttgccggcagcgacagcagcgttgtaccactccacgatggtttcctcctccagcacatcaccatcatacagagctttcaggacgactgggacctccttcagggcctcagggctgcacttgccaccgaaagactcgatggcctggaccagcagggtctgggcaccctcatcagggcacagcagcagcaaggtacttcttgttcttcaccacctcttttgcaaatcccttgcccacaccatcaaagagagcatcaagaagagcattcatcacgtcctggggcgggagtgttgaggatgccagcacagccttgagctgtgtaggtgtaggagcacttcccaagctagccttgatgtctccaaccagttcatcatagggggctgggcttaatgacagctggctcagagatctcttgggctttcgcagaaccattagcagtggtttctttgtgggtcgcctgtttcttcttcttctcagtcccctcagtggacagcatcaccatctcagcagttgccgcactcagttgctcctgcatgcgttgttttgcagcctccagagaagtgtcagtctgccactggacatcatcatcgtcatcctcctcatccgcagctgcattgtcaccatcacgactgcgagttggtgatgttgaatgatcctcatcagaaccaccagcagcagccttcttctttgaactcttggcagtggattccttggaagacgcacctttcttctttgcatccttcttcagtttcttcagctcctcatcagcagcctcaccttccttcagacgttccttctcagctctcctcatggccttcttatcttttcctcccttcttctgttctggtgggttcttcaggataaaggttgtgagcttgtccctcatgtcaacatctgagatgaagccacaggcagcacacttcagtgatatcatctgggtcttagagatgagaatctcagtctcagggttgccacatccgtaacactggacatacttcttgatgaatacctcaaggagaccagccagctttgcagtgtcatgacgccccattaaccaaggaaattcctgtcttctcatcaaatttagactgtgcaccaagctcacacccaaagtacttggttgtgtaggaaggtggcctggcaagtgcttttgcaatatcaaccatgttcacaacatttgtcttgatgccattaccacggccttctattttggtaatcatcctaggcatcttgtacctgtagaaggcatcatccctgtttgaagcaccaatgttttgcagcgccatcttggataaagatttctgaagcagatgactatcagatgtggcaaaatcctaaatcgagagttgctgctgatccttccagaaaaccaagctgactctgagcaccagcaaaagacacctcagaacaagaaaaccagatgggctcttgatgcatgcagaggagcggaagcttgtgcctttttctcgttgcacgagaatactctcccagcaatcccaaataaagcaaagattgttcagacataaaagaagcagcaacacctaagccctccactttgtcagactgcagcagaacagaagctgctacctgttatgcagcaatagagaaacaaatgtcagtggtcaagtaagatttaaaaaatttgttaagagactacaggcggagtttatagtaaagaaataatatgcaccaaggaatatactttataaactatcaaactggcgcccatatctaaattaacaccaagatcaatcattctacaccaacaaggcacagcaacataaattacattgtatatcataatgtcctccttaagtacagacaggagttctacaacctatacaagaacatcccagact

SEQ ID NO: 9353 - DNA, 287 bp, Setaria italica
  Peptide Sequence Number=SeqID_75327
atatagtctcgagattatatgcatcagctccttcgcatcccgtttttgctgcctcgttggttcatcagggaactgcgctgcaatggtatggagcagcatccacgtggcccggccgacctcctccttcgtcagcggcgctggcttagcatccttctccttggggacctccggcggcggaggcggggtcggcggcggggagagggaaagggataggagcgggcggaggcggtggtcgtcggggccggtgtccggggcgatgaggaggtgccgggagaaggcggcgacgg

SEQ ID NO: 9354 - DNA, 347 bp, Setaria italica
  Peptide Sequence Number=SeqID_75328
gaccagcgccgcccggggctcgccggcagcaagccggagatggccgcccttacgtggggctcgtgcagctccacggtccgggagatgaactccacggggccctcgtggtccgtcgggggctcgacggcagggaggcggtggaagcggacgtcgaggccggcggccgcctcctccgcgcggcgtatgtggccctcgacctcggacgcctgctgctccgtcggcggccgcatgacgagcacggtgaccgagagcgcgcgcccgccgctgctagcgagcagccgcttgccggcttctagcattggcatgaggtggccggcgccccagaccggcagcaagacgacggtcgg

SEQ ID NO: 9355 - DNA, 281 bp, Setaria italica
  Peptide Sequence Number=SeqID_75329
aagttagaacgggtgggtggtggtgcgttcaacgggttaggaacgatggagacgacacgaccgtagcagcagcagcaatagttgaaacgaaattaaatcgttgattggtttgcgcgtatggtggctgtcagcggcctgacgccgacatgtggggctgagcccctctcccgtcggtctcacaccggtgacagagtccggtgtaaaatacataatgttacgcgaaaggaaggatagtgtaatgtaatatatactacgattgattctttagaaaaaaaaaaaaa

SEQ ID NO: 9356 - DNA, 737 bp, Setaria italica
  Peptide Sequence Number=SeqID_75330
ctaaccagtgcttaacctggtagtcgctaataggctcatattagactattttcttgtatattttttcctcaaatcatattcatgactcaactgaagggcgtgatggagcagaatattagcaggttcggtggcaggattggccatactagcactagatgattcaagtaggaggcgcactctatctctatatcttctagcaaggctcgctcagtgtgcatataattctgcaaaatctaagaacaaatttcactttttggggaagccattggagacatggagatgcattgcttttttcattggcatctgcccaggttatgtatgcttttgttatgaggcccgaaagcttacctaagtcgtaccaagaattcatccttaagacaggaccagtagcggaacctgtctacaaggttgttagagaatgttgtagaggtggtcctgtggatctaaatgccctctcagcttatttatcaaacaagaggaattcagatttgatgcatttaacaaccaatccatccattattccgtgttccgtgattcatcctgacagagcatcatgcttggctcaaaatgttcatgttgtttcatcaacattcaagaaaacattccctctatatttctcattgacatttgtaccctttgttgttctacgtcttcaaaaggtaattcactagccactctatttctttattctttttaacattcagctaattttaaccgaaaacctagaataatagtta

SEQ ID NO: 9357 - DNA, 1677 bp, Setaria italica
  Peptide Sequence Number=SeqID_75331
taactaagaactactacctaacggacgtaccgacgtacggacaatcggcatcctcctccgcgccttcaagctcgcgcgccgcaggtcctttggctcgctcctcgacctcaagcaactggtttcggagaaagatcttatagtaagagaggaagcttgcagggttgggtttacttttggaggattcactggatcgtatcacgcacttcgatgtttccttaggagacttaggaaaaaggagacaccgtacaatacaatattagcaggttcggtggcaggattggccatactagcactagatgattcaagtaggaggcgcactctatctctatatcttctagcaaggctcgctcagtgtgcatataattctgcaaaatctaagaacaaatttcacttttggggaagccattggagacatggagatgcattgcttttttcattggcatctgcccaggttatgtatgcttttgttatgaggcccgaaagcttacctaagtcgtaccaagaattcatccttaagacaggaccagtagcggaacctgtctacaaggttgttagagaatgttgtagaggtggtcctgtggatctaaatgccctctcagcttatttatcaaacaagaggaattcagatttgatgcatttaacaaccaatccatccattattccgtgttccgtgattcatcctgacagagcatcatgcttggctcaaaatgttcatgttgtttcatcaacattcaagaaaacattccctctatatttctcattgacatttgtaccctttgttgttctacgtcttcaaaagttcctggaatcgccggctgcaacttgttggcgtgctcttgtgggtgcagttcgctccaccacctttttgtctgcttttgtaactctattccaggctgctatatgtttgcaccgaaaagttgcaaacaaagaccacaaaagtgtgtactggtttgctggtttgatgtcaggtctttcaattcttttggaaaagaaagctagaagggctgagcttgccctctatgtgcttccccgtgctggagattctctatggtatatattgatcaaccgccagctgctcccaaatattaaaaatgctgaggtggctctcttctgcatgtgcatgggaggaatcatgtactttctggagtacgagccggacactatggctccattcctcagaggcctcatccggcgcttcctggcaagcaagatcagcaacccgagccccctccccccaatcgcaacacctcgcactcgtaccttcagacactgaatgctctggagcaatcaagaacccagccaggtgtagataacggactgccgacatcagagaagtacaaccttgaatcaattcctggactttagaaagctcgtctgtggtactgattacagggtcttgtagcttcggagaatcagtaaatctaaccaaattagcacccatcacatgtgccatcctgaggtacagatgggtttaaatttctttgtgcgggagtggtgtgatataaagcaatttctcctggttcttattaattgtacatggagtggcaaagattaccgatggcaaggagttgccgtgttttggtcttgccaaagagagtttgtcaatatgcatatatctgcccctgtgttttgggaagatattgtacatttgtttctgttacttgtgcgaatggccac

SEQ ID NO: 9358 - DNA, 360 bp, Setaria italica
  Peptide Sequence Number=SeqID_75332
taaacatagaagcagtgtctaagaatcatgcattgcgctgcagccacaagttaatgtacaccacttcattggagtctagctccataataaccgagatagctcaagcagtgtggaaaattttatattgcacacataaaatcttaaagaatcataatgtgattccaagaagaactatgtgcatgaaagtaaacgccctagaatgcacctacgggtacaagtagccacatcaagacataactccatttgaagcctcattgaaatattacatgataaaatgccaatttcccatgactgaatatcattatgcaaatttgaaataaaatggtaacaaactctctacaacacaaacatattaggtaa

SEQ ID NO: 9359 - DNA, 698 bp, Setaria italica
  Peptide Sequence Number=SeqID_75333
aaagatggtagtgacgctgctgactacttgtctatgcaaggagagggatctgaaattaaattttgccagtcagaccagaatcttgttagggtggaatcctgctcctataaggttgctgggtcattgatatggaaaccaaacgtctccttatggtctctggatcagttagatctgagtacagcagagaataaactaccttcaagcaaaatgcttggagaaggtggccttcagggagaagaatttaggccagagccctctcattgtcactatgctatcaacaatggagtggaagtgaatgcacagatgtgctcatcagacagcaatagtttagaaaggtatggaaggactgtgtcctcgtcaatggtactttctgaggattcttgtgttccatatgctgtagtttatggtttccacaatggtgacatagaagttatccgatttctgaacatgtcgcctgctgctgcaaaatttggtggtggagggatttacccacatatttctgagaggttctttttggggcacaagggagcaattctgtgcttagctgcacattacatgcatgcccgttctgattctagaaactttcaccgagcactcatttcagggagtttatattgtacgattcgtgtctgggatctagatgctggcacccttctttctgtgatgcatcatcatgttgcctcagttaagcaaataat

SEQ ID NO: 9360 - DNA, 1086 bp, Setaria italica
  misc_feature (1084)..(1084): n is a, c, g, or t
  Peptide Sequence Number=SeqID_75334
ttttttttttttttgtttcggtcggaaactatgtttaattacgcaaggacaagatcaattacagcaagagtagtattttgtcccaatgcagcaacagttcaaataatgaagtgatgctacctcaacatatctttctttttggaggggttacgtcaccatatctgatgtttcaaacaatgtccaaagaatagctgtgcacatacgttcaccagctttaaggcgattgaatcaatggcaattttacaggcaaaactagcctagtctcctggcttcacaaagcatttcccagtgcaggtgtgggcgtgtagctgatctgtgctctcaccactggataggttctgtagatggtacagactacagaaatgggtaacatgacccctccatgccgttttcaggtgcttaaggctcaatgtccaagctcagatgtgccttgaacaagggtacatccctgatggcacccgttgtgagatcataagcacagtccagttacctaggaagcgaaggcatcgtttgcaattgtccctttgtcggctcgattcgcgctgaacctgatgtgaacatcttcctgtcaatggacagatagcgattggagcccagagtccctgtgctttcgatggacctcatgtactcagacgcgttgttctcgatgatcagtgcgtcttccagctccctgagaacgtcctccatgcttggccggaaggttgagaagggctcggtgcataccaaagcgacctcaagcactctccacatggcctctgaacaatattgcccttttatgccagggtccaccatctcttcgatcttgtactcccttatgtaaggttttgcccactcaactaagctccattcatcacgaggccttttgacatcaagtggttctcttcccgtcacaatttctaacaggactactccaaaactgaagacatcacttctggtggataacacctgagtggaatagtattcagggtccaagtacccagcagttcctctcacttccattgatggattactgtcaccttcctgaggtgcatacttagaaaacccaagtcggctaccttgccacacatgctgtgatccataagtntg

SEQ ID NO: 9361 - DNA, 345 bp, Setaria italica
  Peptide Sequence Number=SeqID_75335
gccccatccgcggtctcatcgctgcagaatgtcgaatgcatgcagctgcagctcctatcatatgaaacatctcgttttcatcaaatctgttttccatccttgggtcaggaagatccccaaactcccgatgctcgattgccttcagcagaagggggcgagcctgaaaattttccagcatgcacaaagtttagagttaagatcaataaaaagaaattgagccaaacatagtccccgtggtatctgttacaacctgtctcattgattagacatggcattcatattcttcattgtaggtgacataggtaactttccaacagtaactaaaacttttaacctaaaactaaa

SEQ ID NO: 9362 - DNA, 921 bp, Setaria italica
  Peptide Sequence Number=SeqID_75336
tctactaacacaattcatcatgttatttattagtgcacctcaatgtcatgactatggatatcatcacttgtaagatgccttcaatcaaacatatattggtcaaaaatctgaaaatctacgcacactttgggacctaacattggcgacacaacaagtccatacattataaaaaaaattggactcacccattcgaccagactttcatctcccaatggctgagaagcatcaacaggttttcttcctgtaataagctccaaaagaactactccaaaagaatataaatcagattttgctgtcaacttgcctgacaatgcatactctggagccaaatacccaaatgtccccatgacacgtgtggtgacatgtgtattggaatcacccgctaaccttgcaagtccaaaatcagaaacctgagcttcgaagttgttatccaataaaatattggatgatttaatatctctatgtataatacgcggatgacaatcttcatgcaggtaagcaattcctcgggctgctccagctgcaatcttgacccttgtccgccaatcaagcgctgcttcacttacatggaggtggtaataaagtgtgttgttgggaacaaaatcatacacaagcattcgctggccatccgcaatgcaatagcctactagcgaaaccaaatgtctatgatgcactctgctgatagtatcaacttcggccttgaactcacgctcgccttgcccattcccgattttgagcttcttgacagcaacagggcgaccatccggcaaaatgcccttaaacacacacccaaatccaccttctcccaaaaggttctcctctgcaaagtcgtctgtgattgctgccaaattctctggcgtgaacagcatatgggaatacccaatcccagagtcggccggggagtacggataaccatggctc

SEQ ID NO: 9363 - DNA, 791 bp, Setaria italica
  Peptide Sequence Number=SeqID_75337
aaaagaggattcatttacttatctcctgaaagaatgcaaaatttattccagtgggggaacaagaattgcctcagggaggaggggccaaaaaaagaatcatgtaaaagagataattacatgtaaagaatgaccaaaaagaatgttaatgatcttgtaccgaatctgtttacaaatctcttcggcttctccagctggcttggctcaactcgtcgctacaatcccggatgccgaattccctcagctggaacaatctaatctcctcggattgcggctctaagaacacctcgctgcggccgggttgaaggccattgttcaagttagagtctgctaaactatctagtgctctaaccacctgccccatccgcggtctcatcgctgcagaatgtcgaatgcatgcagctgcagctcctatcatatgaaacatctcgttttcatcaaatctgttttccatccttgggtcaggaagatccccaaactcccgatgctcgattgccttcagcagaagggggcagcccattcgaccagactttcatctcccaatggctgagaagcatcaacaggttttcttcctgtaataagctccaaaagaactactccaaaagaatataaatcagattttgctgtcaacttgcctgacaatgcatactctggagccaaatacccaaatgtccccatgacacgtgtggtgacatgtgtattggaatcacccgctaaccttgcaagtccaaaatcaagaaaaccagtaagtactttacgtaaaacttaactttacttaacttaactttagttaa

SEQ ID NO: 9364 - DNA, 281 bp, Setaria italica
  misc_feature (232)..(232): n is a, c, g, or t
  Peptide Sequence Number=SeqID_75338
taatccatcgcatgttggttctggtcgagtcgacataccacgggattctgtccaccctggcacttaatcaaaagtgttccatctcgcccaaagcatcattttcatcagttttaaaagagaccaatcatgctatcgtatcattgcatattctctatttactacttagttcatgtataatactggtgtttatacttgtgttattctagccggtgttgatatgaaaaaaaaaagnggaataagaaatggagtagtaagcaggatttcgggtgtgttcgatttgg

SEQ ID NO: 9365 - DNA, 1119 bp, Setaria italica
  Peptide Sequence Number=SeqID_75339
acataggatgaggttgattatattttttgctctcccatgacttcaacatttgcagaggatgacatctattgctctatcctattgattggagatttagaggacaccattacctttgacctcaagccgtcagatgctatcaacgttgctttccggtgcaaggtacatggattttatgccatacagatacaacatatgagcaaagttgattaaggtgtattcatgcccacttaagctgcagccgcgcctcctacatccacccgcgcctccctgccctgcgagtggacaaggactctaggagtccagctgcggactgcttttgccatggcggacgacggccgccacaaaggatgtacaggacggctgagaactgcttcttcagggtttgagttagtgaatccttgcaaaggtcagtgcgccctccttccactcactggtctctcatggaattgctatttagagacttttagctgatggtttgatgattacatattcagactaactcacaatgaagcgacagatttctcaggtcctctaagtatgtcttgcatgttctttgtcctgacaaaacttaagaatttgctgattgaagttttatcagacacgaggtagttttattttttttccaggaaaattcgtgatgagcaagaaagtgctgtattgttttctctactgtctttgttttggtggtttatatggcagacccatcaattcagtaggaacaactatgtagaccatagatcatagcttgccctatgctgctattataaattgaaaattcagtacaatttgtcctctttaaatttgaaatttcataatttgctgacagttcaatgccttcatttgacaccatctgaacttaaagcaaagctggttatgacaatctctgaatggtacattatattatttacgcctggaaaattgacaacattggctttacatatagtttaatattataatttaaggtccaagtttctttttggaaaattgactgtgcctgtacctttgcctctatcaatcttgtgtgctgaagatcctaatggtggcatgaattaatttcttttggttaacattgtatgccagagataaatgctgttactgttcaagttagtttaaataatt

SEQ ID NO: 9366 - DNA, 749 bp, Setaria italica
  Peptide Sequence Number=SeqID_75340
agaagaaagtaaaggaacaaattgaaaaggtcaaatactactatattgaagacaatgctgctgctttggagccaaggtgtgattctgttgtgcatttggatgtgccccaggttaaagaagcgacaacagacaacaagggtttgaggattgatgatgttgagaaggagcttggagcaaatggccatggcctagatcagtgtgatgttacataggatgaggttgattatattttttgctctcccatgacttcaacatttgcagaggatgacatctattgctctatcctattgattggagatttagaggacaccattacctttgacctcaagccgtcagatgctatcaacgttgctttccggtgcaaggtacatggattttatgccatacagatacaacatatgagcaaagttgattaaggtgtattcatgcccacttaagctgcaggtattggtttcaccaaagctacatcctgccagccatttgcagtggttcctgcagctgcatcctgttgcctagctacctcgctctgcaaagagccgatgtagcaaaaattgagtgaaatgccataggcagggcttgttctcgttgtgctcctatcctgtggacatatcgttgctgcaggcagctctgcaactagggcagcaaccaagtatagagcggctatatcgtggtgccgatgccaagcagcaatagtctcaaagagcattccagttgtaatatacatgataattttggatacacgattttag

SEQ ID NO: 9367 - DNA, 2196 bp, Setaria italica
  misc_feature (2124)..(2196): n is a, c, g, or t
  Peptide Sequence Number=SeqID_75341
cggcgagctggagctcacggtgggcgttccgtccgccgccggggggcggcggcgcggcggctgacgccccggtgccgatcagcctcggcaggctcatcctcgccggcatggtcgccggcggcgtgcagtacgggtgggcgctgcagctctccctcctcacgccctacgtgcagactctggggctttcacatgcccttacttcattcatgtggctttgtggtcctattgctggattagtggttcaacccctcgttggcctgtacagtgacaggtgcacctccagatggggaagacggaggccattcattatgacaggatgtctgctcatttgtcttgccgttgtgattgttggattttcatcagacattggagctgctctaggcgacacaaaggaagagtgcagtctctaccatggtcctcgctggcatgctgcaatcgtctatgttctggggttctggctacttgacttctccaacaatactgtgcaaggcccagctcgtgctctaatggctgatttgtcaggtcatcatggccctagcgcagctaattcaatcttctgttcttggatggcgttgggaaatatcctagggtactcctctggttccaccaataattggcacaagtggtttccgttcctgaaaacaaaagcctgttgtgaagcctgtgcaaacctgaaaggtgcttttctggtggctgtggtattcctgatgttctgcttcactataaccctgatcttcgccaaggaagtgccatacagaggaaatgaaaacctcccaacaaaagcaaatggtgaggtcgaagctgaacctaccggcccgcttgctgtgttcaagggcttcaagaacttgccccctgggatgccgtccgtgcttcttgtgaccggcctcacttggctctcatggttcccgttcatcctctacgacaccgactggatgggtcgtgagatctaccacggcgacccgaaggggaccaccactcaggtcgccgcattcaacgaaggtgtcagaataggctcgttcgggttgctactcaactcgattgtcctagggttcacctccttcctgatcgagccgatgtgccggaaggtgggcccgaggctggtgtgggtgacgagcaaccttatggtctgcgtcgccatggccgccaccgcgctcatcagcttctggtcgctcaaagactaccacggatacgtgcaggacgccatcaccgcgagctcgagcatcaaggccgtgtgcctggtcctgttcgcgttcctgggtgtccctctcgctattctgtacagcgtcccgttcgccgtgacggcgcagctggcggcaaccaaaggcggcgggcaagggctctgcaccggcgtcctgaacatctccattgtcatccctcaggtgatcatcgcgctgggcgcggggccgtgggacgcgctgttcggcaaggggaacatcccggcgttcggcgtggcgtccggcttcgccctcatcggtgggatcgtgggcctcttcctcctgcccaagatctcgaagcgccagttccgggccgtcagcggcggcggccactgagcccgggcccccgcgcctggccggccgggccaggccgccggcgtgcaagaagcagagtttgcatgttcatcaacagaataagaaagggaaacagtcgtgtgtgttgtactttgtcgtgtgagtgagataggcttggggcaagtggagaggtgaagtgagcatccggcaccagctggttaccaagggtctggtctctgctaagctagctagtgtaaggagcgatcgagtaggtcagttaaaaaagaaggctggtgcgtcgtgagggctcggtcggccggcagcggtcgcgcttgctcctgttgttgtcgatctttgtgtgtagcacagcggactgatccgtcaggggaaaaaagggattcgaattcggtcaatcattgtgcagtgtgaactgtgtgtgttgcttacatgatcagaattcagaattcagaagctagtgctagaggtcagaggagatgattggtctagagctagaggcctactcctgtaactatgtaatgtccgccgtttaagatttttggtcggagcaatgcaggcgccttgttttgctccctttgtctaaaaaaaaaaaaaaaannnnnnnnnnnnnnnnnnnnnnnnnnnnnnnnnnnnnnnnnnnnnnnnnnnnnnnnnnnnnnnnnnnnnnnnn

SEQ ID NO: 9368 - DNA, 320 bp, Setaria italica
  Peptide Sequence Number=SeqID_75342
tgggattttagattggaaagaaggtgtcaaatgtccaaaatactcttatattttttcttcttttcttttttttcttcctcatttttcttttctttttctttcttttttattttctctttccttctcccttctttctttcctcccttctctccttatccgatcggcacctccctcccgaccttatccacccaaccctcctcctccacccctccagcgccaccccgccgaccccggctccctccgccaacacggcgctgcaccggacctcctcctctgcccatccgccgcgatggcgccgcaccggacctcctcctccgccg

SEQ ID NO: 9369 - DNA, 327 bp, Setaria italica
  Peptide Sequence Number=SeqID_75343
ggaagcgagccggcgcctcctcgctgtgctccagcaccatggttgaggacccgttcttcgtcctcgccggcggcaaggaaggagggttcctggagttggaggagattgacgaggcggacttcgggattgttgggggatacgtggaggaagtgggagcagatgaggggaaggctggcaaggatcgggggaagaagaagaagaagaggaagcggaagcgtgggggtgatgaccaggtcttgagtggcgatggcgattcttttttgaaacaatgcgatggcgattcagtagttgagaatgagcaggagggggagaaagagaagaagaatg

SEQ ID NO: 9370 - DNA, 352 bp, Setaria italica
  Peptide Sequence Number=SeqID_75344
tccttttgcttccagttctgagcaagtcttcgcttttctctttgtttgtctaagttgacacagacctcttgcccagaattctgaagtgcttgtaagggttcgacacgatcctgcccaataacacaaatcgagaccctttattctcagtcttgcttctattgttgcttacttttctcttggccaactcttctagttgcttctgaagtaatggtgaaattccagccccagccaaatagcgtcgtgaaaaagtattaggctgcaacgggcgttgcaaaagatcactcaattcctgcaaatcaaagcaaaatgtgttgaaacacgggcaagatagacaggagcattataaaaccat

SEQ ID NO: 9371 - DNA, 2127 bp, Setaria italica
  Peptide Sequence Number=SeqID_75345
tttttagtaatcagggattaagttttggttaaatatgtataaatttgtagcagctttgaatacgaaatgtgatataacatccacatgttacagagatcatctcgcggtgcccgtgctaacttcattatcctgtgccgcaaaacagcatattaacccacctactcaatcttgcttaaggcctagtgctaacttggcacaccgcacaccaaatgtatgtggctaaaacattggtgagtgcattcctaaaaggaattcgtgcaggctctgaaggaattccacgaatggagcagttgggcaaggtaaccttcccgcaaacaggcccatctttcacctgttatttagtccatcgctttagcttttcttttctcctttctcttctgctcccgcgaacgtttcttttcttcatgcttcttttgcttccagttctgagcaagtcttcgcttttctctttgtttgtctaagttgacacagacctcttgcccagaattctgaagtgcttgtaagggttcgacacgatcctgcccaataacaacaaatcgagaccctttattctcagtcttgcttctattgttgcttacttttctcttggccaactcttctagttgcttctgaagtaatggtgaaattccagccccagccaaatagcgtcgtgaaaaagtattaggctgcaacgggcgttgcaaaagatcactcaattcctgttgaagcttttggagatgtgcagaagttgcctttcgttgcttgtggccctttacacgttcttcttcactgtcactggtctccaatatcaatcccatggattcagcattcctctgaagccaggatttgttagcattttcctgtgaatttttgcgtgtaatcttgtcaatctgccgagcaagcgagagcctattcattactgcaggcatgtaagcatgatctataggaaattgctggaggttctcctttgacaatgacttacaaagagagtaaaacttcgacttgtcagcagaagagattaatgcaatgctgcagccagccaatgatttgcgtgctgtccttccacttctgtggatataaacatcagttgaatgtggcaactggtaatggataactgttcgcacatcatcaaaatccataccccttgcaaatccatcagttgcgaccaaaatggaattctcacttccacggaaacgatccacggccttcatgcgagccctttgttgcatttgagcatggtttgtcaaggcattaataccaagaatgcgcaatatggaggaaatgtggcgtaatgcagcgattgatgtacaaaaaattattgctcgaccttgcccatgaacactcagtatataatacagataggcatccttatcctcttcactgcactcaataaaagattcttcaagtttctcaggcaagattgaagcctttgtcagatcaactatttctgcatttggtttcattccagccttcttcgacagggcttcaatagagcttacatcatcagtcgacgcctttgaagtagataagccacgcttcagcttcttccggaaattagatgaaagtgcaagtgtggctgagaaaacaaaggtttgcctcttctttatttgcaagattggcacagtctcacagtttggcattgttcttgcagcttgttcatcagaaccattagtcagcgggagcatctcaatgatagattgtaattcgtggaaatggcctcgttcgatcattctatcagcctcatccaacacgaagaatgacaatgaatgcagctcaactaggtgttgattgttcatcgacatgagctcccacaatcttccgggagttccaacaacaatttcaggcttgtttttcaaaagccgttcttgcttttccatggatataccaccaacaataggaatgacgccaattcctaagaacttggctgcttcttttagatgatcgcatacctgttgggcaagctccctggtgggtgtcaaaataagagcacgaagagggctttccccagcactttcctccattttttcgtcttcctggtgtaatcttgaggccttttctcgctcctcaaggagacgttgcaaaatagggaggccaaaggcaagcgtctttccagaacctgtctcggctgcaccaataacatccttgcct

SEQ ID NO: 9372 - DNA, 793 bp, Setaria italica
  Peptide Sequence Number=SeqID_75346
atcgcggctcatggtgggcggtggcggtggtgggtggaggaggtggagaatgggcaggaggagaataagaatgcgaagggaaagagggacaggaagaagaggaagcggaagcgtgggggtgatgaccaggtcttgagtggcgatggcgattcttttttgaaacaatgcgatggcgattcagtagttgagaatgagcaggagggggagaaagagaagaagaatgcgaagggaaagagggacaggaagaagaggaaggtgaaggatagtgagaagagtggggagagcggcaaggacatagctgatgacgacaatgcagaagacgtgcaagataaaaatgagaacatggaacaagataaggatgatgatcttattttgggtgaggatgatgtttttgcatggcacgaacttaggcttcaccctctgcttgtcaaggcaatgcgcaggcttggattcaaagaaccaactcctatacaaaagtcgtcctttcctgctgcagctcaccaaggcaaggatgttattggtgcagccgagacaggttctggaaagacgcttgcctttggcctccctattttgcaacgtctccttgaggagcgagaaaaggcctcaagattacaccaggaagacgaaaaaatggaggaaagtgctggggaaagccctcttcgtgctcttattttgacacccaccagggagcttgcccaacaggtatgcgatcatctaaaagaagcagccaagttcttaggaattggcgtcattcctattgttggtggtatatccatggaaaagcactagtgcg

SEQ ID NO: 9373 - DNA, 377 bp, Setaria italica
  Peptide Sequence Number=SeqID_75347
ttttttttcttcgcggatttgatcattcatatttcattcccataaggggctgtacacatgctcaacgtgtgggctctcactgtagccgtaatggcacggctctctgaactcgtaccccaccatgacgccgacgccgtcgccgtcgacataccagccgcccatatcatgccccgccgccggcggcacctccgcccagtactcgaacggcgcctcggctacacagggcgccgggatgctatcaaggtccgacagcatgtactcctccaggccctcgctatcgacgtcgcccgcctgcacgtgttccgccgtgcttcggccgtctgccggcgccgagggcggcggcccgccgccgccctcggcgccgtccagggaccgga

SEQ ID NO: 9374 - DNA, 226 bp, Setaria italica
  Peptide Sequence Number=SeqID_75348
ccaaatggaagcaaagcaatcggcactgcagaaaagattcctattccaccacgcaaatctgatgtttctagtgcatggaactttgattttgatgataatgagtcagatggtgcagatgttgctgcatttgagtttgctgattcatctaaagcgagggggagctcatctgtggacaacatatcctatagagattctactaggggctccgaggatgaggaattcagaa

SEQ ID NO: 9375 - DNA, 604 bp, Setaria italica
  Peptide Sequence Number=SeqID_75349
gtacatggtgctctggggttctgctttggctgatgcaatcaaccagttcaagatgatgccgttcctgattctgtcaggacagctttgcccacctggaatcgagggcacgctgtttgctctcttcatgtccataaacaaccttggttcaacactaggttcattcctgggggctattctggcatcagctttgaacatctcgacggcacagtttgacaatcttgctctgggtttgggtgtacagctgattggtactctcttaccgattgggttcctatttctgattccaaaggaagttacaggactaacatcataggttgaggggtgtgggcctaaccgtacctattttattcccgctctacaccagtctaccagagtgagaggaacatacacatcataggaaggaaattagaagtagttggaagctagacaattttgttgaaagatgtatacagctttgtacgaggatgagaggaaacattggctgcgttgtgtagcgcttgttccgaaagtggcttgtgcatatactatactccaaaccacttgtttgctatgatcattgtatctattgcgattctcttatcgctgcttgtactccaaaggaagg

SEQ ID NO: 9376 - DNA, 827 bp, Setaria italica
  Peptide Sequence Number=SeqID_75350
tatcaaggtaagcaatatttagtggggaaaacaatggatttgtccttacatcggaacaggatcttacaagatgagttaagttaatcataacataaatatacaaccagtatacaaactgtaccatattacaatattcatgagaatctacaagagcataaataaagatgtacaatgacctgcaaggtgctttcaagtgccgtgcagcaatgcaaccaatacttgcttaagacatattcccttgaaggtggattgctatatagaagcaggtgctgtcactgcatgtgtgttcgatttgagaggaacgtgaagccagtgtctgtttacgactagtaccatctcagcttcaaggccaatacaaagtgaaggctatctgagcgggcgggtcggtcacaggagcgcgatgaggacgaagagcaggattgcggcgacgaaggagtacttaaccgctgcggcgaagatcgccgcgaagatgagcacgagctgcagcagcagcgaggcgccggcccaggcgagcgcgcccgtgagcaccacggccgcggcgttggcgggctgcggggacagcagctccccccacggatctccgacagcgccgggagggacgggcctttccgctccttgtccccgtccgccgggggcccgccgttgtcgccggaagccgcgtgggcgaccgtgaggcggggggctcgcgggcggagcgaggaggaggaggaggctggggtgaggagtctggggtgggggagcgagctatgcgggaggcggagggggagagggagaagggacggagctaggattccggcgagtgccgccatcggaggggaggggaaggg

SEQ ID NO: 9377 - DNA, 276 bp, Setaria italica
  Peptide Sequence Number=SeqID_75351
aaggaggtggtggtggtcgaggaggagaagaaggcggcggccaaggccgagtcagcagggagcggcgccggcgccggcaagagcaggaggacgctgagggcgggggccgagggcgaggacgtgcgcgcgatgcaggaagctctgcagaagctgggtttttactcgggcgaggaagacatggagtactccagcttctcatctggcaccgaccgagctgtcaagacgtggcaggcaacggtagggagttcagaggacggagtgatgacgtcggagcta

SEQ ID NO: 9378 - DNA, 560 bp, Setaria italica
  Peptide Sequence Number=SeqID_75352
cgaccagtcccaggatggagtggatgggcttcctcatcccctggctcatgacgcgctggaacgcgtccctggcctcattcgccatgagggtgtcccgcctcgcctgcagcagctcgcggttctgctcggccagcctgtcgcgcattgcttgcgactcctcgagcagcgaggcgtgcgagagcgcgacggccacctgatcggcgaccacctcgacgatctccagctcgtgcggtgcccagttcctgtcactgggcggcaccaaaactaacacggcatagctcgtctggatcacctccggcgttccacccttgaagtcagcaaccttgagcatcggcatccgaatcgcagccaccgtgccggtcccctccttgccgccgccgctggccgacccaaggaccgactccggcggcagcaacttgacgccatcgcttcccttgaccttgaggacgtccgcgtcgtcggcgctgacgatggcttcgccgtcgctgccccggcggagctcgtgggtgaggcacattccggacttgtcctcggagggcatccagacggcacagttgttg

SEQ ID NO: 9379 - DNA, 255 bp, Setaria italica
  Peptide Sequence Number=SeqID_75353
gtgccgacggccgcgctccacgccgcagccgtgggggtgtggaggtaccggcgccggccgcgcgcaccggcgccgcacccgtgcgtgcgcacgtcaatggcggaggcgccggacagggaggagctggacgaggagttcgacgcgatcccgagcgcgaggccgccggaggtggtgagggtgcggtacgaccgggccaggatggtgggagcgcggctgcagcagatggtcggcgacgtcgcgacgcaggcggagagg

SEQ ID NO: 9380 - DNA, 305 bp, Setaria italica
  Peptide Sequence Number=SeqID_75354
tagattcttttttttgtaattcgagcttgcaaactgtcacatagcattaccctcctaataaataaacactatcatttgaactaagcttcttgcatctctctatatttagaataagggattaagaaaatttccatgggaaataatctactgtttacttgataaacccagaacggatctctgccatcttacagctactattttcccctttctgcagctttaaacaaacaggttctacttggctctctgcgtcttgacgctgatacttttgcccctgttctatctcatagtgttcttgcaccagaggg

SEQ ID NO: 9381 - DNA, 1319 bp, Setaria italica
  misc_feature (1279)..(1319): n is a, c, g, or t
  Peptide Sequence Number=SeqID_75355
gtccggagagccgcctgacgccggcagcccaaacgagcgtcccggccgcccctaactcatgccccaagcgagcgcggcgcgcgtgtcgcctttgcttcgtcttccactgcttcggtcccgcgccgccgcccgcagcgcgcggccgctgaagtcaagcgacgcgccgagggatctggaaacttcaaggatgctttgctgtgctggcgtcccgccgtcgctcctcctcgtcgctctgctctctgcctgctcccttctactcgtggccggaaggaatcaggatcaggaattccatggagctgctagatccagaattcttcttcaagacccacacaaacatgaggtgcattgctcaagggaaaggagccgtgcagcttgggaagctattgatgagtatctgatgccctttgtggaaaaagagaaatatgaactccctagcaaatgtagacttcgtcccgataatgacatgttccgggagcaagagcaacataagattcattttgatattaatgagtggcgttgtggtttctgcaagaaagctttccgagcagagaagttccttgaccaacatttcgaaaatcggcacaagaatcttctggataatagtgaaggaagatgcttggcagatctgtgtggagcacttcattgtgatatgatgatggagttcaagaagccaaagagtaaatgcaatgcagctgcagctttgaggaaccgtcatctttgtgagagccttgcagacagttgctttccaattaatcaaggtcttgctgccagccgtcttcatgaatttttcttgcgccaattttgtgatgctcacacttgcaatcggggcactaaacatttccctaaaggtggcaggaaacaaacaaacaggttctacttggctctctgcgtcttgacgctgatacttttgcccctgttctatctcatagtgttcttgcaccagagggaaatgaagaaaggtgcccaagatctaagacggttttcaaaaattgggcagaagaaaaagccatcctagtttccagcatgcatgcatatgtaaacttcaagaggcaagcacgtacattttttgtgagctgacggaagatactccttatcatcgcttgaactgaagctctgttggtagttcacccccggaaggccagaaacgtggggtttatatatatgactgtcagactgtacatacaatctcaggaggcaaacggtgatgaatgtgtattcaatgcttcccatatatcaacatgcctgatttggagcctcaaaaaaagacagtgatgtgacnnnnnnnnnnnnnnnnnnnnnnnnnnnnnnnnnnnnnnnnn

SEQ ID NO: 9382 - DNA, 490 bp, Setaria italica
  misc_feature (30)..(30): n is a, c, g, or t
  Peptide Sequence Number=SeqID_75356
ttaaggcccatttgaataaacaaatgtaanaacccaaagaaaaccattgcaatactgatttaggacgcaggttcacctttatgaagttgcactgctcagtcaaacctgccgacgaaatgatctcctgaaatgcaaataaaccattttttaactggtacaccagatgctcaaaagttattttattgtattccaggatgatgtcataataattaaacaaaccttgccccttgaaatctggtaagcgttattgttcagtccagttatctgtgttgagcttaaatgataaatagcattaaaacatctatatatacatttacatacaggtttaactgttgagaaatggaatctcatttttggttcattacctgaatctggcgatttctgttaaaggtcccccaattccacatccaacatccaagaccttcatccccttcttgagccccaattgaagggcaataaaatgctcaaaccgcttgatgctttcaagacg

SEQ ID NO: 9383 - DNA, 1352 bp, Setaria italica
  Peptide Sequence Number=SeqID_75357
ttttgtttattccagatagtaatcttaaccagtaatccggtacaggcatacagcatacaaccaagcatggtaacaaacgaagaacttttataggaacttaatactataacaatacttcagtgcagaacaaggatcacaggcaagtagaagtccaatagtacatacaacattgttgtaggttgctttaaatttcagtctcctcgagaggtttccggcccaggacaaagaaggtcgccgtaaagatctgttcccggctgccagtcaccaggccatgggaggctgtctgcatgatgctgaacagtctattcaagcctttgggggcaatacggaggaactccagtgtgccaacaattgcataagtgaggaactgtccgacacatgagttgctgaagctggtccatgagaaaacaccaggatctatttcctggtaccatgggcactcggaatcctcagcaagatccttcgcgatcacaacctcgaaccctgcatctttcatagcttggatgcactggcgtgtgcttctgatgtctgggaggccacagccgatttcaatttgagacttgatattcctatgtttagcgttgtttgggtcaaatctatccgtcaagcacagttcatctagtgcaaaatactggccaggtttaagcactcggtatatctccttgtaggcacctagtgcatcaggtgcatgaattgtggcctctatcgcataggctgcatcaaaggtgttatcagggaaaggcatgttcatgaagtctccctttatgaagttgcactgctcagtcaaacctgccgacgaaatgatctccttgccccttgaaatctggtaagcgttattgttcagtccagttatctgtgttgagctgaatctggcgatttctgttaaaggtcccccaattccacatccaacatccaagaccttcatccccttcttgagccccaattgaagggcaataaaatgctcaaaccgcttgatgctttcaagacgagtttctccatgccatcttggggcgaaatggattgattgaccccagcgatattcagcgaagtcggtcacaaggtcatagtacttgtttaccaagtcactatagttcgacttcctgaattgttcatcaccaccatgcaggtcatgatacttcgcatatctggagcaaaaatgaacattcatgaagtacaagtggctagaaggatgatttcaaattaaaacaaaaacatagaaaaaaattgactcttctgacatggtgacatccagtacttgtgctgatactaactataatctcaagacacatcttcaccatatagatgtaatgtgtagtcatctatggactgaatgtattaataaaattaaagat

SEQ ID NO: 9384 - DNA, 931 bp, Setaria italica
  Peptide Sequence Number=SeqID_75358
taagtgcctacgtacaccattgagctcctgatttcggcgacacccaccaaccataactctgcctcgggtactccttggtaggttaccaggtttaaacaccgaaagcatatttgagtccttgaatagtatcaaggtcacatcggactattcctcgaatatacaggcattaacaggggcggacccacaggggtatgccgggtgggccacggcataccctgaggcccagcacttacctggtaagtagaggtcaacgggagatgattctgctgctttgacgcttgattgcaacgattcagctacctgcgagactagacgggcgacgattcagctacgagtccaccacggcccaccagcccacgaggccacgactcctcccgtgatcgcggcgtgcagctatacgtgccgattgcctggtaatttggtatacgaataaaccaattttgatttttctaccaaccttcatccccttcttgagccccaattgaagggcaataaaatgctcaaaccgcttgatgctttcaagacgagtttctccatgccatcttggggcgaaatgcagtgattgaccccagcgatattcagcgaagtcggtcacaaggtcatagtacttgtttaccaagtcactatagttcgacttcctgaattgttcatcaccaccatgcaggtcatgatacttcgcatattgttcaacagtcgatccaaattgatccttggcaatgtttttcccttgcaagcccgaagaaagatgtaaggcccaagactgtgacattacttcccagtattgttctgtatccacagtacctctgctgctcagaatgtctccgtctccttactcttggatgtacttgaagtgtgttcgttctgatcagcaggaacctcgcgctcaaaattcttctccaaaatgatcggcagtggtagctggtcacgccgg

SEQ ID NO: 9385 - DNA, 640 bp, Setaria italica
  Peptide Sequence Number=SeqID_75359
taatttaattttacttttactaattaattgtttgtttaatattgattaaggcggaagtcactaaaaaattcatgattttatttttttttcatttgttaccctgatctgatctgatctgaacgttttttctctgaaaatgatgttggtggtgtgtttcaggcctctttggaatctattcggaattcactggcagaggagttggtgaaaaatgacagaacaatgtgaaaagttacggacagaagctgctgctctgcctggcttaagggctgaattggaagctctgaaacaaagacactttcaagctctagaacttatgggtgaacgtgatgaagaggtatcgctctcgctcccatgcaacgcatcataagctgtcactaatcagtaattgattggctggtttctgtttacattttcttgggtacattctgcctataaggctataaccttatgaagctaggagtgaaaatggttcaggtataaccagctggtcaggaggggcctgcagcaccccccggcatgcctgttctgtgaccaagcgcaggaaacagccccacacctgctgttagcttgttttttaaccagacaaatttggacttctcacatctcaatctggtagttgatgtgccggtaaactcctcta

SEQ ID NO: 9386 - DNA, 797 bp, Setaria italica
  Peptide Sequence Number=SeqID_75360
agtgttggggtgtgttcggtacttagtctggggctctccctctctatgtactttcttttctatcttaatgaaatgacatgcagctctcctgcgtaagttcgagaaaaaaaaaagaaaatggttcaggtaagctcagccaacaggcataggcttatgaatgttgtatgggtctagttatcagtcctgacaaaaactagtttgttttataagctgggaaacaggaccctttcaggatctagggggtatgatgaattcaagaaagagttaaagtgtcagcaatgcattttacacgtttgcattatgcaatagtgaaaagttggttggtaattatttgtaagctagagtattgaacatagtggtaacagtgtgcagtatggaatgcaaacactcatttgcggttaagtttgaaaaataagaagtgcataaagaaactatgtaaaagtactttttattctaaaatgtactttaattttgattctgttttgcagctggaagaactaagaaatgatatcgttgacctaaaagagatgtacagggagcaagtggatcttctcgttagccagctccaggcattgggtgctcgtgtatagtgctggtacggctttgtcgtgtcatcaaattcttgttcagtgcattgaccaagtccaagataacaggtcagagacttgagaatgtttattcaaaattttgtaaccatacaacgacactcaaaatattcgtttgtatacatcttatgatcttaagcagcttcggtgttgggtttaggaggtatacgttgttgtatactaggctgaata

SEQ ID NO: 9387 - DNA, 3920 bp, Setaria italica
  Peptide Sequence Number=SeqID_75361
cgggcggctcagatcacaccgcaccggcgggcgatcaccgacgccgacgcggcgccccacgccaacggccgaacgcaccatacaagctcgccgtcgtgctccccgacccaacccaaccccacccactcctccctcccgcagctacatctcccgcctcgccaccgcgcggcgggagctcgccgaagagcttcctccgctcccgccccgcgcctcccgtccgcagccacgtcggcttcccgccgaccgcctcgcgttctcgcggtttcctggttcagctgaatttgttggcggggcgaggctgcggagccagatcccgcccgttcgcgcgcctgggacggggcggtggatcggctgggcggatcagatctatgcccgagatctagggtggctggtgcggaggtggaggtggtgagccggcggtaatcggaggccggggacagggatggcgtggtggtcggggaaggtgtcgctgggcgggctgcaggacatcgccggagccgtcaacaagatcagcgagagcgtgaagaacatcgagaagaacttcgacagcgcgctcggcctagaggagaagcgcgacgatgaagaagcttctggatcacggacgtccaactctgatagaatgggattcttcaatcctgtcatggctttcatgggacaaaatggcgaggaggatggaactgatgtatcagaaaagccacaatctccaaagaattcgtccccagaggaagaaaatcatagcacctccactaagcaacggacatctgaggtagatgcttctgaagtatcaggaacaataaaatctccaaagcagccttcaaaattggaagaagctcacagcagcatctccactgagtcacctgtttctgagcaatccatgacgccacaaacttcaacacatccttcagcagcagaagaaaagcttgatggctctgctgagtcacccatatctaaggaggaagattttgaagcatcagaaacgtcacaatctctgtcgcatccttcaccaccggaagaaactcatagtggctccatcgaggatataagttcagttatgaatgagaaccaggacaatcaagataggaaacattctggccctagtgatgaagcactgccgaatcagcttggagagtctgctggagacgtccctgatggtacagcatcttcttcacctaccaaaatagatcagtcaggtgacaccgaaacaggggaatctattcatactggtcaggaagacgcatctgatgggagcccctcgcaatcacaaccagcagagtccacgttagctagttcagatgatataattgaagctgaggacaagattgctcaaaaatctgatgccccaaaagaaatgagtagtccacaggatggcagcaataaggtagacaaaactactaatcttgaagtcaaagtacgtgatggcagcattaatactgaaaaaaataaggaagaaagcaataagatagtggcagggacagcatctgttgttggacaggaggagaatgtatcggagcagcccgttgacttcaaatcaaagtccataattgcagagcatgattcacattcgcagaatgagtcggtggtcaattcgacagatatgcctgctggactagtggaagattctcctgcgaatgattttaaaaaagaagaaaagattcaggaatctgttggaagcacaaattctccgactccggaatttgctggttctgttgctgagctagagaaattaagacgtgaaatgaagatgatggaagctgcattgcaaggtgctgcaagacaatcgcagtccaaagctgatgaaattgcaagattgatgaatgagaatgagcaactcaaagcaacaattgatgatctcaagagtaagtcgtctgaagcagaaatggatgcgcttaaggatgaatatcaccagagagtagcaactcttgaaaggaaggtgtatgcactaactaaagaacgggatacactaaggagagaacagaataagaaaagtgatgcagctgcccttttgaaagaaaaggatgagattatcactcaggtcatggctgaaggtgaggagttatccaaaaagcaagctgctcaagaagccacaatacgaaaactgagggcacagattcgtgagcttgaagaagaaaaacaacggctgaactcaaagatccaggttgaggagactaaggttgagagcattaagagagacaaggcagcaactgagaagttgcttcaagaaacgatagaaagaaatcagactgaacttgcagctcagaaggaattctacaccaatgctcttaatgcagctaaagaggctgaggcattggctgaagcaagagtcaacagcgaagccaaagttgaactggagagccttttaagagaagctggcgaaaaagaaaatatgctgattaagacaattgaggagttgaggcattctcttaccaggcaagaacaggaggctgctttcagggaagaaaggctaaaaagggactatgacgatcttcaaaagcggtatcaagccagtgaacttcgttataatgaactggtcacacaagttcctgagtctaccagaccactcctgaggcaaattgaagcaatgcaggagactgctgctcgtagggaggaagcatgggctggtgtggagagaaccttaaactctcgccttcaggaagcagaagctaaagctgctgctgcagaagaaaaggagcggtctgtaaatgagcgattgtcacaaagtttatcccggataactgttcttgagacacagattacaattcttagaacagagcagacacagctgagccgatctcttgagaaggagaggcagagagcatctgaaagtagacaggagtaccttgcaattaaagaggaggcagcgatacaagaaggacgggccaaacaactcgaagaagaaataaaggagcttagggctaggcacaagaaggagatgcaagaagcagcagaacacagggaactgcttgagaaggaccttgaaagggaaaaggctgctagggcagaaattgagaagacatcttcccgtgaagcacctaaagttccacttcctgatcaaacaagaaatgcccctctcagaaagctctctagttctggaagtataaatagtctggaagaaagccatttccttcaagcatcattggatttatctgacaatgcttcattagagaggagaatgtcttcagaaagtaatatgtcatattatctgaggaccatgactccaagtgcttttgaatcagcacttcgtcagaaggatggagagctggcttcttacatgtcacgcttggcctctttggaatctattcggaattcactggcagaggagttggtgaaaatgacagaacaatgtgaaaagttacggacagaagctgctgctctgcctggcttaagggctgaattggaagctctgaaacaaagacactttcaagctctagaacttatgggtgaacgtgatgaagagctggaagaactaagaaatgatatcgttgacctaaaagagatgtacagggagcaagtggatcttctcgttagccagctccaggcattgggtgctcgtgtatagtgctggtacggctttgtcgtgtcatcaaattcttgttcagtgcattgaccaagtccaagataacaggtcagagacttgagaatgtttattcaaaattttgtaaccatacaacgacactcaaaatattcgtttgtatacatcttatgatcttaagcagcttcggtgttgggtttaggaggatacgttgttgtatactaggctgaatagtttcacagttttacgtgtattctttgcgatttgttttcatctagtgtatcgaatttgagaatccatttgcaatgtgtacctcagaggaatgcaatcaataatatcaagagacccttttgtcgactaaaaacaaaaacaacaaacaaaaacaaaaaac

SEQ ID NO: 9388 - DNA, 311 bp, Setaria italica
  Peptide Sequence Number=SeqID_75362
taaggtaaccaaccttaacaactaggtacaacactggtcaattttacttccaaggagctgctcaatctgcacaaaccactgggcttcatattgatttaccaaagatacagcatatcctgatctccctgcacgggcagtcctacccacccgatgaacataatccttagaattcattggaatatcataattgatgaccatatcgactccttgaatgtcaagaccacgacttgccacatcagtgcaaataaggatattgcaatcttttgctttgaacctgttcaaagcaaaagattgcaatatccttatttgca

SEQ ID NO: 9389 - DNA, 1753 bp, Setaria italica
  misc_feature (1)..(43): n is a, c, g, or t
  Peptide Sequence Number=SeqID_75363
nnnnnnnnnnnnnnnnnnnnnnnnnnnnnnnnnnnnnnnnnnnggttctcagatttgaacactagtggtttcctttaataacatggtctatgacaacaaaaatgggtgacttaggtcattgcgtcgacataaggaaaactgaccgaacttcccgaacactacctaaatagcaggtgcatcactgcgaatccacagggttggcactgaaccagacgtacacaaaatggactaatatttgaggagctgtacacacggattctaactcagcaggccaaactccagggctttcatcgtctgttagatctcttgaaggatttcgatcttttagaatgagcacggtcttcctcctcgtcatcatcatctcccagctttctccgcttcttgtggccgcctgaatccttcattttcgttagagcaattctctttgcatcggaaatgggctctttaagtatcatgatttcatctgggtccaccttacactggtcaattttcttgccaaggagctgctcaatctgcacaaaccactgggcttcatattgatttaccaaagatacagcatatcctgatctccctgcacgggcagtcctacccacccgatgaacataatccttagaattcattggaatatcataattgatgaccatatcgactccttgaatgtcaagaccacgacttgccacatcagtgcaaataaggatattgcaatcttttgctttgaacctgttcaaagcacccaacctcttgtcctgactcatttggccactgatagacatagcttttaaaccaagattccttagcatgagagcaaggagcctagtagattcacaggtgcgcacaaagatcatgatcatgctctctcgcctctcattcagaacatgaagaagataacaatccttgtaatctgcaggaacaaagtagaactcttgtttaagcgaatccactgtagaatattttgaggccgcttcaaccttaacaggattcctgagacaagcccgctgcagtttatttacctttttggtcattgttgctgaaaaaaggaaagttctcctgtctttagggatctcttgtagaatgtcatcgagggctttctcgaactccacattaagtaatttatcagcttcatccaataccaaatacttgattttcttaaggctaaaaccttttgtatctgtcaaatggtccaaaagacggccaggagttccaaccacaatatgaggacgtttcccaagggataacacttgctgcatccgatccactccaccaacaagcactgagcaacgcaaaccaatagctgatccgagcgcctcaaactgctctgcaatctgaatcgccagctccctcgttggtgacaggacgcaagcaaagaaagaatgctggacgtcgcggttctcaagcagctcctgcaggatgggcaatgcgaaggcgcccgtcttccccgaccctgtctgcgccagcgcgatcaggtccttcccctggatggcgtggggaatggcctcggcctggaccctggtgggctccttccaccccatgaggtcgcacgcctccaccagctccttgcagatgcccagctcggcaaacgtcaaggccaggcgcggcgccggctcctgcttctcgccggcatccacgaccaaatcctccttcgccatggctttgttcgcgagactgagctgctgcctgtgcgagcgtgcgcgtgaggcttgacaagcttgcggcgggccgcgggcggcggcgaatgaaccgagcggcaatagac

SEQ ID NO: 9390 - DNA, 1746 bp, Setaria italica
  Peptide Sequence Number=SeqID_75364
acacaagtaatcttgaacaggtcagaactcataagtacattcagtatcatatggtcaatttcgtttactatgtaaagaaattaaacatctagaatgaaaacagctcatctcaatgattatgggtaaaactaaagcaaaggcaagctgcattgcttaacacacactgagggttgtcgatacccaattacagtaagacaaaatgtaaccaactccaaagggaaaaacaaaaggatatgaactagataccagtctatgccctttttcctgtggtggcccattcaacaccaatatcaccgctggaatgaaggaggatgccaatccctaaacccttatagctcgaattcatcatccagcttgagtgcctgagctgcagcctcctcttcctcatcatcgatcgcaaagtatgggttatgcacctcaggccggaacttgtacccagtgaacacgtagaaggcaagtgtggcaagctcgccagccacgacgctggtccacagataccggtatgaggtgatggtctgtaatgcgtacaccacaacgcgcgtgaagtaaatgtagcaaatgacgaccacatagtactggcggaagagagtcagcttcatgaggttcacagctgccttcccatctgagcgagcagcctcccggaggttcttaatggaccagacaatggggaagagcacggcgcagcagcagaccacatcgaccagcaagaaaatttgcttccaggtgacccagtcccgagcatagggtccagattcgtcgatgaccacctgcgcaatattggccacgacttgcagggggatgaccaccatgagcaccttcttctccttgtcggccaggtagggcttgaggaaggaccagccggtgccgatgagcactatgagcgtgaagagcgagatccccttgaggaagctgaagatgtagaagagcacgtcccatccgtgggcggtgccggtgcgctcgatgcaggacttgtcctcggcctcggcgaggaggttgagcgccttgagcacgaggacggcaagcatgaagtagtggatccggaagaccgcggcgcgcttgcgcagcagtatggcgacccaggcggcggcgaggccggcgtaggcgaggcagaagaggaagtagatggaggggagcgaggaagcccccgcggagaggtactggcggtccccggtggccgggtcgacgttgtacatggcggagcggacgtccatgccgaccttgagccccccgccgaggcagttggcgaagacgagcgtgtactggcccggctcggagacgcggaaggcggtggagaaggaggaggagcgcgcgacctcgactcccgcggggttggagggcgggcggaggcggtcgaaggtgaaggcgagcttgacgagttcggactggagcgcgcaggtgacgtcgaggtcctggagctggcggaggacgtggacccaggcgtcgagcgtggagaggaagaagccgagctgggagaggtcgagctcggcggaggccggcgggtcgaaggtgatgccggagacgttgagctccagcacccccgagtgggagaagccgaactcgtccagcgggatgatgctccgcgggtcggaccggatcagggtctcccggatctcggccgccgcggggggcaccagcatcgcggcgccgaggacgaggaggaggaggaccgccgcggggcgcctcgggagcgccgcggcgcgcggcgacggcgaggcggccatcgtgtgggtggcgcgatctggggga

SEQ ID NO: 9391 - DNA, 334 bp, Setaria italica
  Peptide Sequence Number=SeqID_75365
aaggacgatgccgcccaaaggcaccagggaaagggaactaccaaggataagaaaaggaggaggaggaagaagagcgcttcgtccagctcccaagcaatggatatctgatgctgtagcattgcatttgcagggatatatatgctcgatggttcggaggccatctcccctgtttcgtgagtgagagctgaacttgtcgaaacttggtatcgatgtgcgtcaaaatttagttgcggtagagctagtatttctctctactgagtgaagttcactggatcgttgagcaccccatcaacatttccgaaaacaaaattccttccctttcttaaaaaactta

SEQ ID NO: 9392 - DNA, 670 bp, Setaria italica
  Peptide Sequence Number=SeqID_75366
ctgtcgctgccgcgcgtggccgccgaggactgcgaggtgggcgggtacctcgtccccgccggcaccacgctgctggtgaacgtgtgggcgatcgcccgggacccggacgcgtggccggagcccctggagttcaggccggaccggttcctctcgggcgggccgcacgccggcgtggacgtgaagggcagcgacttcgagctcatcccgttcggcgccgggaggaggatctgcgcggggctcagctggggcctgcggatggtgacgctcatgaccgccgcgctggtgcacgggctggactggcacctcgccggcggcgtggacgcggacaagctggacatggaggaggcgtacgggctcaccctgcagcgcgccgtgccgctgatggtcaggccggagcccaggctgctgccgtctgcctacgcatcagtggagtgatgaacgaagcgcatgaaaaagccgcaacaatagttgttgaataaatgaatcgtgtgcacctctagatgatgctttgttagcttgtcaaccaggatgaggatcgaggtgtttgggatgacgggcgtggcgtgcattgccggggtccggaggttatggccccggttagtttgtaattcgtgtgctttatttacgtatgcaacgagacaaaatgctgctagtaaaaaaaaaaaaaaaa

SEQ ID NO: 9393 - DNA, 245 bp, Setaria italica
  Peptide Sequence Number=SeqID_75367
tgttgtcgtagtcctcgggcccggagacggagatgagcgcgtcgaggtcctccccggggagctggtaccggaggagcaccccgccgccggcgccgccgggggacgccgcctcgtccaccgcctcgaccttccgcaggagctccccgaaggaggcggcacgcgggacggagatgagccgcgtctggccccccacgtaccgcagcgccccatcccctggccgcggcgcgatccggccaccgaagctg

SEQ ID NO: 9394 - DNA, 1758 bp, Setaria italica
  Peptide Sequence Number=SeqID_75368
ttaaaactatgcaagcagtacttgcaccagaatgtcaagctcaagcattttggttatgcacagaaatggttgtgcctattgcgctacaagagatgtttccatgtacatgatcctcactcactgttcatcaggctgtttagcttggttggctaaagcatatcaaagaagtcaagaatgagagctacttctcggtgtaaaagctatgtttgatcaagtcgtccgccgcctcagtctgcaccacagcccattctttgtgtggatggtggcgcccgtcaccatctccacttcgtccggcgatcccctcagctccacatcaaacttcctcagcagcagggccagcgccactgttgactccaggagcgcgaactggtctcccacgcatttgcggggtcctccaccaaagggaaggaaagcaaagtcggctatgatctcattggggtacattgcaccggggctccgttcgggatcaaaaccagaccagccttctatgctctcatccttctttggaactgaaaatctctcaggttcaaattcatttggccggtcccaaaagtatggggatcggtggaggttgtatatcgaaacaaatatatcagtcccagctggtatctcatatccctcttttgctccattgtacccacctggcaacttgtctggacggagagaacgcctgattaacaatggtggctgaggatacaaacgaagagcctcaagaatgatcaattttatgtactctaatttcttcagggattccacggtaattgctccattgctgagaacagaatcaacctctgtctgtgcttttctcatcttggtagggctctgggctagcagaaaaacagaccatgttagaacagcagcagttgtttcatgtccagcaataagcattgtcataagatcatcccgaagctggcgatcatcaacatcagctcctcgcatgtcaacaaggaacctcagcaagctgacatccttcagagatgagtagtccctttgctggagcttttccacatcagcttcctgtcttgtctcctttgcattttttataagattatcaaggcaatcgttgatgaccttgagatcactatggaacttgcgctgccttggaactatccattttgtcaaaggaagattccaatagggaatgtaaaaggtggatcggtgctcagcttcaaaaagtgttccatacactgccttgattacaggggattccttagttactgagtcgaaatcaaaattgaacacacccaagccaattatgtcgagtgccaaattagagaactcagcttcaaggtccactatgacttggctttcgctttcagtaagctcttcaagctttgatattgttctttctgaacatttagtaaatattctcaccatagcttcaatgaataaggcatggaacccaggtgttataacttttctcccttgcctccaggtatcaaggtcagcaggtataagacccttcccataattggttttaaaatttcagcgagaactcccttatcgtaacagaaagcattctcccggaggatgtgtctagcgaccatggggtcagagacgaccacgaaagatttgggtccaaaagcaagcttgtacacagagccatgctcgaggaaccaatcgtagagcgagaagaagaggggcttgccgaagaggtcggtgacggctccctcggcgacgggcatggccccgaggctgccgccgctgaggaagttggtgagcaggttgctggcgttgtcgagcatgttccgctgcttc

SEQ ID NO: 9395 - DNA, 485 bp, Setaria italica
  Peptide Sequence Number=SeqID_75369
acactgcagcaaacactcttgaatggtcaatctaccgcttcgatgcagcaagcagcatccaagttctgctctaatagtcaaatttgcaatcttgcatgtcgatagaaactccaatgcgttgtcagagccacatgaacaggttaatacagtatcatcgggaagttcacccccaccaataatgcaaatagtcttctttatttggatgttacatgcaacatgggtaccaccagccgcaacaagaatggtgtcaccaggccttcaacaaggtacatggaaatcagccataagatcctctatccacaatgaaaactcaaagagagaaaaacaaacctagcagcagaaacggcagcctcaagatttggataaactccaggctccatcacatctctgattggcctctcaacacgcaaccatagccgaggatggcatgcaaggaagcgcaggaaagacgaccaatactaggtaatttagggtacttaaaggta

SEQ ID NO: 9396 - DNA, 562 bp, Setaria italica
  Peptide Sequence Number=SeqID_75370
gatacaagaatacaacatcataatactagtgtacagcattttctaccttttctcctacttcaaaccagaagaaacagagctgagagaatagatggctcgcacatgctgcagtgcaagtgtccgtttgtcctgacagccttcgcaccccttcaatccgggtgcggacaacggttacaccatgtccttgccccttgagggaaggaaatgaattatactctattgctgtgctgattattggaaaggacagatagtccagagggttttgctcacactgcagcaaacactcttgaatggtcaatctaccgcttcgatgcagcaagcagcatccaagttctgctctaatagtcaaatttgcaatcttgcatgtcgatagaaactccaatgcgttgtcagagccacgtgaacaggttaatacagtatcatcgggaagttcacccccaccaataatgcaaatagtcttctttatttggatgttacatgcaacatgggtaccaccagccgcaacaagaatggtgtcaccaggcctagcagcagaaacggcagcctcaagatttggataact

SEQ ID NO: 9397 - DNA, 472 bp, Setaria italica
  Peptide Sequence Number=SeqID_75371
aagcagcaacagtagacaagaaaatagccacagaggaaaagaccttacttgtcagagccacgtgaacaggttaatacagtatcatcgggaagttcacccccaccaataatgcaaatagtcttctttatttggatgttacatgcaacatgggtaccaccagccgcaacaagaatggtgtcaccaggcctagcagcagaaacggcagcctcaagatttggataaactccaggctccatcacatctctgattggcctctcaacacgcaaccatagccgaggatggcatgcaaggaagcgccatctggaattgggctaaggaaactgaagatgtgcatgaggcagccgtcgtccaggctgttcaccggcgagatcagctcctcccctaccggcgccgctgcgcgccggcgcttccccattcctactttctccagtcccctccgccaggctgcggcttgcggcgccggccgtgaccg

SEQ ID NO: 9398 - DNA, 1180 bp, Setaria italica
  misc_feature (1180)..(1180): n is a, c, g, or t
  Peptide Sequence Number=SeqID_75372
aacaaaaacaagacaaaagaatagttacctgggcaatcaaaagcagcggttatcataaaagttacaacaaacaggaatacaagggtgactttaccagacactagggtgacatagatacaagaatacaacatcataatactagtgtacagcattttctaccttttctcctacttcaaaccagaagaaaacagagctgcgggaatagatggctcgcacatgctgcagtgcaagtgttccgtttgtcctgacagccttcgcacccccttcaatccgggtgcggacaacggttacaccatgtccttgccccttgagggaaggaaatgaattatactctattgctgtgctgattattggaaaggacagatagtccagagggttttgctcacactgcagcaaacactcttgaatggtcaatctaccgcttcgatgcagcaagcagcatccaagttctgctctaatagtcaaatttgcaatcttgcatgtcgatagaaactccaatgcgctgtttgataggccaatcaaagaaaggtaaggtaagactgatagattgtacagaacgtaaccagaaccacatcacactttgcaagttcaccatttcctgaagtagacaaaacttacagtaacacctcttgatgggaaaagatgagatcaacaaacagcatgctctcaactatcatgcagacaaaaactgctaaggttccaatatagttgaattaatatccttacagcaagcatacagcaacaaatcatggtaaattttactttccactactgcagcaccacataaatcatgaatgtatagattcggttatattatactgatcgctgtgtcaatataagcaaaccaccatgctgccgatgtaaatttacaggaaaccttataagcattgcctttttaaggtttactaaagatgaaacctcacaggcaatttactggaagttaagaaacatgaccgtattaaatctatggaccaccatagtgccactatgaaatgattaggaagaagcagcaacagtagacaagaaaaatagccacagaggaaaagaccttacttgtcagagccacgtgaacaggttaatacagtatcatcgggaagttccacccccaccaatctgatggaagcaaaatggattcaaaattgcacccacaaaaaaagaagttcgtgcacagtgcaggaan

SEQ ID NO: 9399 - DNA, 396 bp, Setaria italica
  Peptide Sequence Number=SeqID_75373
gggatgaacatgtgcttaatttacccggtgattactacggtaactacagagttacttgctactaccagaacaaagcacttatcctttaccagctacagttccagtatggccacaccccaaacccaaccagaaaaaaagaaacaaaaaaaaagacagcagcaaaacttacaagagagacagagcaagagggaagagcacaggcaactgcgtcctctcaatctcactccgggagggagggatggcaccccatgcaccggcgacgcattccccgcaaaccaacaccgcaacccatcgactcactcacttcaatcttgcgccctaacagcaacagcaacagcaacaggatccccctagctacatctatcctgtggggtgcaccacccaacgcccatgtcg

SEQ ID NO: 9400 - DNA, 340 bp, Setaria italica
  Peptide Sequence Number=SeqID_75374
tcgcggggggcgcgggcgcggactgcgcattgttgccacgggcgccgacgtcgatgatgcgcgcggagagcgggctccccggcgccggcgcgtcgaggaggagcacgtcggcggcggactcctccttggggaagtcgagcaggtcgtcgatgtggtcgaagaggtcgccgcaggtcgcctccaggaggctctgctccctcatcatctcctccacgaatccgccgctcgccatctgtctccgatcaaacggaccctatgtttattgattccaaagatacggctcggcatatatggggctatggatgaatttgtatctttggcagcagagacgttgcacagc

SEQ ID NO: 9401 - DNA, 635 bp, Setaria italica
  Peptide Sequence Number=SeqID_75375
acaagcttcccatcactccatgtacctgcaccaccctcgccgaagcaaaagttgctctctgattgtagaattcgtctaactgctagagccccaatgtcacgccctctttgttcaacaggctgaccacgctccaataaggtaactttcgcaccaagctcacctagtacaagggaagcaaacaagccagatggtccgcttcctataactgccactcttggcttcttatcttgaggacaaattgaaccattatgagtatccctgattcctaattcattattgtaaccttcgttgctaacattgagcatgctgaccagatctgaagctaagatctcctaaggcatgtattctacagctccaagtttgggttccaaccgagcaataaaatcccatgcccttggctccatatcaagaagcttcttaacatccatatcaacagtataactgaactgaggttctttcaaaacctttcgtgcatcaaatgacttgcggataacagtgaaggcctcatcagggagcatagaagcaaccgggaacttgatggctttggcgatggcctggagaagcggcagggaaatgccggtgaagtccttgccggggtcgtcgctggcggggactgcgagcttggagagccgacc

SEQ ID NO: 9402 - DNA, 325 bp, Setaria italica
  Peptide Sequence Number=SeqID_75376
tccatcagtcactcataccaaacgtagagacccatctttcattacaacgggggtgtttgaagtgacaccgtgaacctaaaaaaaagtatcaggtaccaacgggccaggcattgttttcatgcagctccgagctacttatatccaaacacatctggcttccgtcatagcttttttttctataggaacacatcactgcatgaagatttcttttaccctttctagcacttccacagaacagtactagcaccaacagcacaagctcctccacatggaagcgtctgaggatcctctggggctcggcggcggcgacagaggtagaagcaag

SEQ ID NO: 9403 - DNA, 1216 bp, Setaria italica
  misc_feature (1)..(39): n is a, c, g, or t
  Peptide Sequence Number=SeqID_75377
nnnnnnnnnnnnnnnnnnnnnnnnnnnnnnnnnnnnnnntttttttttttttaatttgcaacccataattccttattcatcatatgcagcatcatatataaatggccgtaacatacccgtacaatacaacattcttttgagttataacatacaacaacacatgcagatcactggcatcccgaaggatcttctaaaccagatcaaaatttagcctacaccgacctagccaaaccctcaatcaacatgatcatctactacagcctggttgtttgagaacaatgtgtcccttttcttggggaaaccagggggctccatacctgggcctctgtacttcagctccgaagtacccctaagaccaggttcagccgaagcaggccggtattgaattccggatgtcccagcatatctagtaggggacacgtaccttcttggagcgctcctcaacgccccgccccgcagatccacggccctagtagcatcagcataacctcggtccgtggttcttgtattggaatccacatagcttctatcgctggctcttgctgttccatctacatagccacgatcactagttcttgctgtgctatctgcaaaagctctgtcactagcaggatgattcagaaggctccctgttggagctgttacagaggtgttaaatgtctcctccggtgtccaccccaaggaatccttctttttcacatatacttgccagatgccaatcaagaacaggaggaaaagcagtgccggaccactccacactacagcattgctctctggcttgtacaccgggaagttggaccgatagatggcaatgtggccatccccaagacccaagatcaccagcttctcccggtccgctgcgataacaggcttcccagctggtgcggagggcagcacgccaccagaacctgcaaacacagatttgatgtccttgatggttgtggcaaacaacggccgtggtgcaccgaccctcccataatactgagatgaggtgttgtacacaaggatcttatcatggctcgccaccaagagataacccttgaccgtatgtattgcaacggggctgtcaatctcagccttcttgacagcacgaacccggcatttgaggctggaaacatcaccaagcagcaagacatgcacgaggtcgccagcttcagtgaagccataggccttgaatcgctcagaggggtcaaaagagtaggcctttgacgtctta

SEQ ID NO: 9404 - DNA, 1373 bp, Setaria italica
  Peptide Sequence Number=SeqID_75378
tttgtttaattgtaatatttattcattgaaccaacgctgaaataacgtgttgattatatacagcagctaccgtatcaaataattttctgtgcttcctacacatttctaatttgcatttactatcaacacaacaaacgcctagcaaacaaaaacgtcaggttttcctgaacattatcacttgtaagcgtggacgtagtcttggaagtagaagttcttctggatgaagttcgctagccagcgcgacgcggcgaagcacagcacggccgcggacacgaccgcggccctctgaacagtcgacgtgaccagcgttcccttcgcgacggcgaggaatccgacgaccgcgaccgacgtgatctgcagagcaacctcgagtgccttcatggccttaagcccggcgctgcagctcgtgcactgcgccacgtgcgaccagtacctctccatgagctgatccttggtaggggttggtggcagctgatcgacttgtggggttgcccacccaacccgattcttgcagaactttctgaaccagttcctgaaggcgatcaccatgttgtccgatgatgtgggcacatagcaagctttctgccaattatcgaggcctacggcagcaaatttgcgctcctcaacgtggaggagaaaaatgtctgaatccaatataagattctggccaacatggtacagccaccgtggtgtgatcttgtgcagccagaccccaacgttcctcgggaacgcccagatcaccctgctcttcccaggagccaccggaatgcagaagaacaccagcaggatccgaggtgtcttcttcttgccctcttgtggttgaaacggtgtaccgaagaacgtgcacggtgcagcgaactgaaagtagccccgctcctgcggtgacagaaacccttgtatgtctgcgtgctcgatcttcatcttgatcggaccaccgccctctttatcatagtcaactcttcctggatcttccttcttgcggatgccgcgcattatccccttgtgcgcatacgggacgtgagcaggatccatgaggttttccaccagaacatcgtacccgtaggggagatccctgatgccgtagacggtgacgaactccgggtcgtcaatctctgggatcaatggcggccgcttcctctgcagcacgtccttgtactccggctcggccctcgggtagaaccacaggatgttgttctgcaccacgcaggggtacgacgccacgcacgccttgctgttcgtgtgcaccggcgggccgagggcgggggcctgggggatgaacttgcaggcgccggcgccgtcgaagcaccagccgtggtacacgcactggaggcggcccttgtcgtcgatgcggccctcggagagcggtgcgaggc

SEQ ID NO: 9405 - DNA, 481 bp, Setaria italica
  Peptide Sequence Number=SeqID_75379
cacctccccgtccccctcctcgccgacgaggccacgccgcccatgagccgagcgacagcaaccgccgggggtggctcagctcagctcagcagtagagggtgagcgacttggagagcagcagcagggagcccggcgacttggagaaaggcggcggcgggttacgcctcagcgccagagaacccatcgcggcgacgccgcctcggtggccgtgccgtcgtagaagggaatacctctcgtcgtcgtcgtcgttgcggatcttgcagttgatggaatcgaagcaaactggtaaaaggctgcacttttgggttctcctcgattgttcttgatcaagcaaaggggttccttcctcttgtgcctcctggtccctgacgcgccggagaagagaagaggatgtgcgctcgtgcgtgtacctttgcgtgcgttggttacttgggtgcgtgctcgctgggtttaggctggtattgggggagggccagcaggg

SEQ ID NO: 9406 - DNA, 485 bp, Setaria italica
  Peptide Sequence Number=SeqID_75380
ctccggcgacaccccgccgtcctccttgccggaggcgccgaagttcgcgacgggggaggccgtgtatgaccccggcatccccaacggaaccatgtacgggctgatgcagtgcatgagggatctgacggcggcggagtgccaaaagtgcttgcaggactcggtgccacggctgcctagctgctgctacggtaacctgggtggggtggtgcgtggctacaactgctacattcgcatggagatatacacctactatgatctcaagcttgatccaccgcccctccagcgcaagctccgtccaacttcatcggacaaagtgcgggaaaaagggtcttggttcgactctcgccgcggccctccctagtggtggaacggtccttattgcactcgtcatccttggtgttttcttatacacaagaaatgccaattggaagagaacgcaagacaacagtagcaaagaagaggacagcggatatgttgagccggag

SEQ ID NO: 9407 - DNA, 384 bp, Setaria italica
  misc_feature (356)..(384): n is a, c, g, or t
  Peptide Sequence Number=SeqID_75381
acaagtctcagcgagagcttggggaagactccggcgcaagttgctctacggtgggggatccaacagggtcagagcgtgcttcctaaaagtgccaatgagtcaaggttgaaggagaacatcgacctgtttggttggtctattcctgaggaactgtgtgccaagttttctgaaattgaacaggttaagcaaatcagaaacgattccttcgtgcaccctcagggtatgtacaaaacaattgaggagctctgggacggtgagatatgaatgaaaatcatcgccggtatgaaatcgaatccgtgaccagtgtaatactgaagctcgacatttccaaagctttcgactctgtgcgttagggnnnnnnnnnnnnnnnnnnnnnnnnnnnnn

SEQ ID NO: 9408 - DNA, 306 bp, Setaria italica
  Peptide Sequence Number=SeqID_75382
attcggatccggttgcggttctggctttggatcaggctgtggtgttggtttgggttccggcttcgggtcaggttgtggcgtggggtttggatcgggctgcggttggggcttgagctgaaccccaaatcttcacttgaagaaaaatcaaagccaagggcatccacgccagttccccgcccagatcctaaacccacaccgaagcccaaacccaagcctgagccaagcccgaaacctacacctgagcctgagccgaaaccccaacctcaaccatccaagccagatccccagccaggccccaaaccgaca

SEQ ID NO: 9409 - DNA, 386 bp, Setaria italica
  Peptide Sequence Number=SeqID_75383
ggtttcggctcaggctcaggtgtaggtttcgggcttggctcaggcttgggtttgggcttcggtgtgggtttaggatctgggcggggaactggcgtggatgcccttggctttgatttttcttcaagtgaagatttggggttcagctcaagctctagctttgacggtcccggttggggttcgggctttaggtcaggttgtggagcggggttattcggatccggttgcggcttcaggtcaggctgcgccacaacctgacaagaaccggaccaaaccaacaccacagcctgacccaaagccccaaccgcagcccggacccaaagccccaaccgcagcctgatccaaaccctgcgccacaacctgacaagaaccggacccaaaccaacacc

SEQ ID NO: 9410 - DNA, 381 bp, Setaria italica
  Peptide Sequence Number=SeqID_75384
tgcaagcctacctggtcacaaaggatatcagctgccatcggtgtcgccaagggtatccagttcttgcacggagggatcatacctggcctagttggaaatgatctgaggatcaccaatattcttctagatcagaatcacgttgccaaaatcggcaactacaatatcccaatcctagcagaggccatgaaatctgaggtagatgggcgaaaactaaattaatgctttgacattgagctacttctagtaactttttgggtgtttgatgctgactaacacgtaccgttgttttgttgtttgtcaatccaagaaaggaggagctggaaacaagttccaaactgatagtccgatgtacagcgataagaccgacattttcgaatttta

SEQ ID NO: 9411 - DNA, 326 bp, Setaria italica
  Peptide Sequence Number=SeqID_75385
aggatctgggcggggaactggcgtggatgcccttggctttgatttttcttcaagtgaagatttggggttcagctcaagctctagctttgacggtcccggttggggttcgggctttaggtcaggttgtggagcggggttattcggatccggttgcggttctggctttggatcaggctgtggtgttggtttgggttccggcttcgggcttgggtttgggttccgcctgatccaaaccctgcgccacaacctgacaagaaaccggaacccaaaccaacaccacagcctgatccaaagccccaaccgcagcccgatccaaacccccacgc

SEQ ID NO: 9412 - DNA, 792 bp, Setaria italica
  Peptide Sequence Number=SeqID_75386
gcgcggtcggcgtgagcaattttacgtacgaagaagttggccgatttgcttgctttagcccgtgttcctcccgccgttaatcaggtggagtgccaccccggctggcaacaagcgaaactcagatcgttctgccactccactggagttcatttctctgcgtatgcgccgctgggcaggatgaaagtcgttgcaaataacccggtggtgacatcaatagccgagagcttggggaagactccggcgcaagttgctctacggtgggggatccaacagggtcagagcgtgcttcctaaaagtgccaatgagtcaaggttgaaggagaacatcgacctgtttggttggtctattcctgaggaactgtgtgccaagttttctgaaattgaacaggttaagcaaatcagaaacgattccttcgtgcaccctcagggtatgtacaaaacaattgaggagctctgggacggtgagatctgaatgaaaatcatcgccggtatgaaatcgaatccgtgatcagtgttgaaactgatgccactctctaatgctgaagctagacatttccaaggttttcgactctgtgcgttgggactacttgctagacctactgcaacgccgaggattcccgccgagatggagaagctgggtcacaactttactaaccactgccacatccaaggtcctcatgaatggcatgccgggagaggacatccagcatggcagaggtctccaacaaggggatccgctatcaccacttcttttcatcctagcaatcgaccctctgacaaaaattaccgcacc

SEQ ID NO: 9413 - DNA, 586 bp, Setaria italica
  Peptide Sequence Number=SeqID_75387
acaacaacacacataagacttgtttcttttattcattgatgatacaaaaacatagtacagcataagcacgtgaatgcatgctgatgatggaaacacgcaccggaaaacgttgatacacatatacgtccacacaaaacagtagtgctacatgtacatagctcactcttacacaaatactattgcttggtcatagccaagagctagatagatgcatgggttgcatgcgcgttggtcggtcacattctctcagttccctcccatggtgcctgtgccaatgggtgacgagagggacggtggctccggctttgatggtgtcggtttggggcctggctggggatctggcttggatggttgaggttggggtttcggctcaggctcaggtgtaggtttcgggcttggctcaggcttgggtttgggcttcggtgtgggtttaggatctgggcggggaactggcgtggatgcccttggctttgatttttcttcaagtgaagatttggggttcagctcaagctctagctttgacggtccccaaatcttcacttgaagaaaaatcaaagccaagggcatccacgccagttccccgccc

SEQ ID NO: 9414 - DNA, 1128 bp, Setaria italica
  Peptide Sequence Number=SeqID_75388
taacaaaaatagaaaactttggtgctgatatatcaattgcttattcataccttgctttttctattctttgagttagcctccctgttccccatgtttagaacgcaagaattgttcacattctgatgcatactgcacatgttacatcttcgtttaagttgggttgtaccgttgtagcaatggtactttgtttaattacccagctaatatttgatttgtggtgatgttatatagtccggaaacaaggctcttttcttatatcaagaagaaaaagtgccttctgttttatccccgttcatgctggctctttttccatgtgtcaataatctgaatgttcttttcctaacttttgaattttcctttcagattgaaggttgtactaggtagtgtaagtctctgtgcagattttctactgatagtaccagataagtcaatgcttgcagcgtgtaacttccaggcgtatgcgccgctgggcaggatgaaagtcgttgcaaataacccggtggtgacatcaatagccgagagcttggggaagactccagcgcaagttgctctacggtggaagttgctctacggtgggggatccaacagggtcagagcgtgcttcctaaaagtgccaatgagtcaaggttgaaggagaacatcgacctgtttggttggtctattcctgaggaactgtgtgccaagttttctgaaattgaacaggttaagcaaatcagaaacgattccttcgtgcaccctcagggtatgtacaaaacaattgaggagctctgggacggtgagatctgaatgaaaatcatcgccggttttcgactctgtgcgttgggactacttgctagacctactgcaacgccgaggattcccgccgagatggagaagctgggtcacaactttactaaccactgccacatccaaggtcctcatgaatggcatgccgggagaggacatccagcatggcagaggtctccaacaaggggatccgctatcaccacttcttttcatcctagcaatcgaccctctgcaaaaattaccgcaccttgcgactgaaaacaggactctatcaaaactagaggcaaaagtgctcggctacgcctatctttatacgcaacaattttcaataaaaaaaaaaaa

SEQ ID NO: 9415 - DNA, 1184 bp, Setaria italica
  Peptide Sequence Number=SeqID_75389
ttttgaacataaataattttggcaacacaatgcaacaattgttcgatagattctacatctgcagaactttattggtagtgcaaaataaaatctttaccaagtctccatcgtaccacaataccataactaagtcggtcgatgcatctgaaattactaaagtaaccgctaactaattaaaggggaaatggacgatccattcaccgggcggcgttgagccccagcagcatctgaccgttgtcgccggcggggatgtaggagacgttgggcgagcgcgccagcacgccggcaatctccttggccgcctcaatcctcctgagctcgatcagtccgttgccggcggtggttgtggcctcggagatgaggcgcgcggcctcgctctccccctcggcccggacgatggcagcgcgcctctcctggtccgcgcgcgcgacgaggaacctagagcgctcggcctcctgctgcgcgacctgcttcttctcgacggcctgcgcgaactccggcccgtaggcgaggtgggtgatggcgacgtcgtcgaggacgatgttgaactcgcgggcgcgctgggtgagggactcgcggacaagcgccgagacgtggggccgctcggtgaggagctggtcggcgttgaactgcgcgacgacggccttgagcacctcgttgccgatggaggggaggaccttctcgtcgtactcgaggccgagggagttgaagatctccgggaggcggtcgacgtcggggcgcgagaggacgcggagcgtgaggctgaccatctggaggtccttggtgccggaggtggaggagaagctgtgggggcgggtgcggatgtcgaagatgaagggcttctggaggatggggaccaggaggtgggtgccctccgcctccgtcctcgggagcacgccgcgcaggcggtcgaagatgacggcgcgctccccgccgtccaccgtgtagagggacgtggaggcggcggacgccgccacgccaatccccgcagccaccttcgcaatccgcgtcaggaacgacaccgccgcctgcccgccgccggccatcgcttcctcctcgctgttacttgcggtggtggattgatcgctggtggtggaattccctttggctcaggggtttttgggagatccggcgccgtggtgattgtgaggttttaaagatgggcacggggcgccgcatctcct

SEQ ID NO: 9416 - DNA, 697 bp, Setaria italica
  Peptide Sequence Number=SeqID_75390
gtcggtcacattctctcagttccctcccatggtgcctgtgccaatgggtgacgagagggacggtggctccggctttgatggtgtcggtttggggcctggctggggatctggcttggatggttgaggttggggtttcggctcaggctcaggtgtaggtttcgggcttggctcaggcttgggtttgggcttcggtgtgggtttaggatctgggcggggaactggcgtggatgcccttggctttgatttttcttcaagtgaagatttggggttcagctcaagctctagctttgacggtcccggttggggttcgggctttaggtcaggttgtggagcggggttattcgggatccggttgcggttctggctttggatcaggctgtggtgttggtttgggttccggcttcggggtcaggttgtggcgtggggtttggatcgggctgcggttggggctttgggtcaggctgtggtgttggtttgggttccggtttcttgtcaggttgtggcgcagggtttggatcaggctgcggttgcggcttcaggtcaggctgcggttggggctttgggtcaggtcgtggtgtgaggtttggatcaggctgcggttgtcggcttttccgggttgggttgtggtgttggttgggatctggcgtttgggtcgtggttgtggtgttggtttgggatctggctttggatcaggttg

SEQ ID NO: 9417 - DNA, 2404 bp, Setaria italica
  Peptide Sequence Number=SeqID_75391
ctctccagcgtcggcctctggggccccctgccagggaagctcggccggctcgccgcgctggagatcgtcaacgtcagcgggaactacctctacggcgacatcccaaggggcatgtcgcggctcgccggcctccagacgctggtcctcgacgacaacatactcggcggcgagctgccggcgtggatcggcacgctgccgtcgctgaccgtgctgagcctgcggaacaacacgttccgcggcgccgtgccggagtccatcgggagcatgccgtcgctgaggtcgctcgtgctcgcctccaacaaccctgttccggggaacctgccggacatgagccggctgaccaacctccaggcgatcgacgtcagcggcaactcgctcgggccagcgttccccaagctcgggaggaaggtggtcaccgtcgtgctgagccggaacaggttcggcggcggccttccggaggcgctgggctcgttctacctgctggagcggctggacgtgtcctggaacaggttcgtcggtccgttcacgccggcgctgctgtccctgccgtccatccggtacctgagcatcgccgggaacaggttcaccggaacgctgtccgacaaggcgctgtggcggcggacaacctccggttcgtcgacctgtcgttgaatctcctcatggggagcgtgccagcctgcttgagatcaccggacaggaagccggacacggtggtgctcgtctcgaccaactgcttggacagcagcgatggttcacaacgcccgtcaccgttctgtcagaaccaagccttggccgtggggataatgcccggcaaggagaggaggaacgctgcaagcaaggcaggcttcgtcgccggcattgtgatggcgacccttgtagccgtttcagttgtcggttttatcgtcttcttcaccgtgaggaaggcagcaacgaaaggttcaaaggcaaggactctggcgacttcagaggaagaaagttcttcgactggatacccttccaagttgctcgctgatgcacgttacatatcacagacagtgaagctgggagctctggggatcccatcatacagatcattttctttggtcgagcttgaagctgcaactaacaacttcgaaaactcttacctactgggacaagactctcttggcgagatgtaccgaggaaggttaggcaatggcaccccagtgacgatcaggactctgaagatcaagaggagccaaaactacccaaagcttaaaccgtcacattgataccatctctaggctcaggcatcaaaacttggtcagcgctctaggacactgctttgagtatgatcttgacgattccactgtgacccagttgtacatcgtgttcgagtacgtgcaaaatgggaaccttagaagcaggatctcgcaaggaactgaaggatgcaagcttacctggtcacaaaggatatcagctgccatcggtgtcgccaagggtatccagttcttgcacggagggatcatacctggcctagttggaaatgatctgaggatcaccaatattcttctagatcagaatcacgttgccaaaatcggcaactacaatatcccaatcctagcagaggccatgaaatctgagaaaggaggagctggaaacaagttccaaactgatagtccgatgtacagcgataagaccgacattttcgattttggggtgatcctacttgaggttgtgtctgggaagaccatcacatccatgtatgaggtggatatactgaaagaactgcttgcctgggcaatcgccgacgaggaccgagtcaggaggaggagctttgcagacccggcggtgagcaaggggtgctcagacgagtcactgagaacggtcatggagatctgccagagatgcctagccaaggaggcagcacagaggccttcagtggaggacgtgctctggaacctgcagttcgccgcccaggtgcaggacgactgggaggtggaagcgtggagcagcggtggcggaagcccggtgtcgtcgtcatccagggtcaccaggccgtctcggctgaacttgagcagatgatcaggtgattctccagtagagctctcatgcccatcctggctctagttgtgaagcgacatgagactgctgcaggttggatctgaggatggaaacgttgagccagtgtacagcaactgcagctgatgaaatgctgaaacctgaaacgcaccaccacttaaaactacccatggtgcataaacaaccaagtgtgcattgtttttgttttgtcagtgtaaagttctttttggatccttttctccattgttttgctatctagaagaaaaataatggtgtgcctttagtaacaattttctctatgggagtacaatcaataatgatgtaacaggctattggtcctttgttgtcgtttcttgtaaaaaaa

SEQ ID NO: 9418 - DNA, 1194 bp, Setaria italica
  Peptide Sequence Number=SeqID_75392
tttttttttgtctagtattcaacaattcatctatttgtcgcattaaccagacaaatcacaaatgcgttcagactttagacccagatcttatttgtagcacaagacgaacacatttcgttccgagacaactgaaatttaagcgagagttgatatcactgtctttgaagccacagttttagtcatgcatagcatagcacaagcaggcagatgctcaagcaccaaaaggcttacttaaaaacagactagtgaatcaccggccaaatccagaagcattgagaccaagcagcattttgccattgtcaccagcaggaatgtatgccacgttcggcgagcgagacagctccgcggcctatctccttggccgcctcgatcctcctgagctcaatcagcccagtcccagccattgccgtggcctcagagatgaggcgcgcggactcactctctccctcagcacgcacgatggccgcgcgcctctcctgctcggccttggcgacgaggaacttggagcgctcggcctcctgctgcgcgacctgcttcttctcgacggcctgggagaactcgataccgtaggagaggtgggtgatcgcgacgtcgtcgaggatgatgttgaactcgcgggcgcggcggatgagggcgtcgcggacgagggcggagacgtgggggcggtcggtgaggagctggtcggcgttgaactgggcgacgacggccttgagcacctcgttgccgatggaggggagcaccttgtcgtcgtactcgaggccgagggaggtgaagatggtggggaggtgttcgacgtcggggcgggagaggaggcggagcgtgaggttgaccatctgcaggtccttggtgcccgagttggaggagaagttgtgcgggcgcgtgcggatgtcgaagatgtagggcttctggagccagggcacgatgaagtgggtgccctcgctgacggtctggggcagcacgccgcggaaccggtcgaagatgacggcgcgctcgccgccgtcgacggtgaagagcgacgcggagaggagggaggccgcggcgccgagacccgccgccaccttcgcgatgttggtcaggaacgacaccgcagcgggaccgccggccatggcgcctctctcgggggttggggggatttcggggggtgcggcggcgcggggggtaaaaccctagcgaggggaaggagggggattcggt

SEQ ID NO: 9419 - DNA, 1788 bp, Setaria italica
  Peptide Sequence Number=SeqID_75393
ttttttttattgcaaaacttattttcctttcatagcttaacaagtaacagctcaatgacttgtccactataatgtcttgacaagcattaccaaatgacactggaaacatgacagtaccactactataacttaccataatgtaacctaccaaaattacctctccaaacgctaatgttcttcgcttgggaagcagagatttccttgggcacgagcagatggtgttgcccggggaaaaaacccaagaaatcccctcccaagcgcactcacaggcccattttatcacaccaacatcgataacactaaggctacttttgtttcttaattcacacgcagaaatccacggtttgcaggaagtcgtccatgccgcggccgaggtcgcagccggggatctccgggaagacgtcgttgatgtcgtcgaggtcgaggtcgatctcatccagctccttcgtccgcgaagtccccgaacagcaggtcctggtcgtcgtccaagcagaagggcgcatcggaaacatccagggcgtccaggccggcgcggaagtccatcgggtcgatgtcgggtagctgcagcccgcgcagaaggtcctggtagaactccgggtcgtccggcagctgcgcagcttcagtggacggcaggataggtgttgcaaccggctccggcgactcagccttcagtgcaggcttggtggcttcgagcacggaggacggcgacgggtgggcgaacggagcagcagaggtggacgacgaagaggaggccgtcggggtggcggcttgccgaagaagctggtgaagaagcgggcacgggctgcccgcggcgccggcgtttttcgtcggcgaagctcctggaagcggacaggtaggcggcagaggccgcgccggcggtgtcgaaggtgccaagccactgcctcttgccggtgaaggggttgcggatctccgccgcccacttgcccccacttgcggagcctgacgccgcggtagctctccggcgacccgccgctggtggacgcggccacagtagccgccgggagaaccggcttcggtggggccttgccgacgaacatctcaaaagagaagcgcttggacttgacagggcccgtcggggcgccgggcctcctcgtcgtcagagtccgagtccgtcgcgtcagggtcctcaaacaggaccgcggacgcggcgcctcggctggacaggcgccggcggctgcatctgcggcctggccttgaggagagcagcggagggtttaaggccaaatcctgagatcctcttggtcttgggcttcttcgccagggccttcttgatgagcatctgctggtggttcaacggagccatctctcttctatctcttgcgccggagaggactccaaaacttgtggccaaaatttccaaaactgaaggggaaaaactctaaaaaaagaaggaactttctccgatgggtgcaaaaattggacggagccgggcgcaaatcgaccgaatccgtcagtctcctcgacagaagcaacacggccttatgtggaggaatccggaatacttcaccccgaacccgtccctgagcatcgacgaggatttgttccagccgttgacgcccctggcgcatagatcggctggagcaggcgaaggcgcgaaggaggacggcgacgacggcgacgatgagcgctacgaccaccagatcggagaaggggcaagaagacatatacacgggagctggctgcttcttcttctccgacgccggcgccgtcgtcgtcgcctccggcctcccacacactcgcttaaaccccaacccaaagcggcgagag

SEQ ID NO: 9420 - DNA, 320 bp, Setaria italica
  Peptide Sequence Number=SeqID_75394
atgatgaatgcggtgctaaatgtgacatgcaaatgaacttcgtgaggagcttcagaggaatagcacaagcccttgagaaaaggggctacacccagttcactcctcactatattacatggtattgtccagaagcttttgtcctgagcaaacagtgcaaatcgcaatgtatcaatcatgggagatactgcgcaccagatccagagcaggatttcagcattggatatgacggcaaagatgttgtgcttcagaacctgattcaaatttgtgtgttcaaagttgccaatgaaagtcgcaagccctggatgtggtgggattatgtg

SEQ ID NO: 9421 - DNA, 453 bp, Setaria italica
  Peptide Sequence Number=SeqID_75395
tggggaaaaaaatcgcagcacgaaacgaagctccccaccaccgcatccgggtctagggtttccgcctcccgaaccctccgctcgccgccggccgccatggactccggcgacgacgagcgctccacctcgaagcaccaccaccgcgacaaggacaaggaccgcgagcgctcctcgtcccgccaccaccgcgacaaggaccgggaccgcgagcgctcgtcctcgcggcaccaccgcgaggacggcgaccgggaccgggaccgccaccaccgggacaaggagaaggaccgggatcgcgaggagcggaaggagcgggagcgggaggagcgcaaggcgcgggagcgggaggagcgggagcgggagaaggagcgggcgcgggaggagaaggagaaggagcgggcccggcggcgcgaggagagggaccgcgaggagcgggaccggtcgtccaggcggcgc

SEQ ID NO: 9422 - DNA, 700 bp, Setaria italica
  Peptide Sequence Number=SeqID_75396
caattttcatcctaacatcccagttcagtgtcctcttagccttatcagcaccatggagatgggattcaacactgccattgcgtatgagctcatacacaagacaccttttgttccgctcgatgcaaataccaatcagtttgacaagattacggtggtgtagtcgactgagcatttccacctctgcaatgaactcacggtcaccactcctgtcctcccttgtaagcaatttaacagcaatttcgtttccatcctccatcatcccatggtagacacgtccaaagcccccttgacccaaaactctttttgaatcaaaaccatctgtggccttctgtagctgggctagtgaaaatgtctttacagacgatgtgcaagtagccactgttgaaagcattgatgctgacgcagagctcaccatgctggttgacaaagctgatctagcgccatatcttctgttagctgctggggtagttgcagagctcatagcgtcatgaagccgtccaactttcttccactttattattaaaatcaggataacagcacatatcaacagaagtccaagagaagatcctgacactatcacaatgatccaaatatctgacttcttgtgctttttcttctgattgggcactgccgcagttataggatcttcagttcctgaaggatccagtcccccaggcagagatggtgagagggattgcaa

SEQ ID NO: 9423 - DNA, 275 bp, Setaria italica
  Peptide Sequence Number=SeqID_75397
ttcgctccgccggctgcgggcccgcccccacggaatcaagaaccattgccaagccggccggatcctgcatagtgctcgagcgagcccgcccagcccggctggaagaagaagaggaggagaggaggtcgaccagaatgctggaggggaaggcgcgggtggaggacacggacatgccggcgcggatgcaggccgcggcgacctccgccgcctcccgcgcgctcgacctcttcgacgtcgccgactgccgcgccatcgccggccacatcaagacggag

SEQ ID NO: 9424 - DNA, 716 bp, Setaria italica
  Peptide Sequence Number=SeqID_75398
taacttccttcgtaaattcatctgctgggtgtggcacaaccctaacaagaatgccagaagtgaagacgaggcagaaggaagatgatgctcaacagattgaagcgaaggagagaaaacaaccggaaaagaagagactaacaaaggaggagaaagccaaacagatagaagaaagaaaacaaaaacaacaggaagataaactacggaagcaggctttgaaagctcaagtagctgcaaagaagaagaaggacaaagaaattcagaagtgggaatcagggaaatgtgctttagagtgcattactgctgagattgactcaagtattatttaataatggctcaattggaggtcctcttctttcaagtttgtcagagaatggtcttcgttacaaacctacagataataaaattagtggatcaatcttgtggaagatggatgttcctgatgatattgctcaagagctttccagtcgtgatgcttgcgatatgaaccaagcttcagtctcaagagtggaatatatttcgattgtgcttgaagccgaggaattctgtgatcttataagcagtggatcgttctttaatcatgttcaaagagttcggaatgaatacccgtccttcactgtttgctacatcactaataaattgatgagttacattaacaaacgtgagcaaagtcagtacaagaacaattcaaatacttggaaacgtccaccagtggaaca

SEQ ID NO: 9425 - DNA, 2320 bp, Setaria italica
  Peptide Sequence Number=SeqID_75399
tcggctcttgtttcagctcatgacagttcaatggagctagtggagcaaagtcgtcaagtgcaggattctgaacgttctcagccagttgcagtagctagaatcccttctctacgctccagatccattggaaaaggtgagaagatggtcgttgcaccagaaatacaagccgccacttctaagattatacaagaagaggaaagggagagcggtcaagtaagttggcaagtgtacaaactatacatgacagaggcttggggctggtggggagttgtgggaatggttgcattcgcagttgtttggcagggttctgatatggctagtgactattggctatcgtacgaaacatcaggcagcattccatttaacccatccttgttcattggagtgtatgtggccatagcagttttttcgattgtccttcaagtaatcaagactcttcttgagacgattttgggacttcaaacagctcagatattttttaagaagatgttcgacagcattctgcatgcccctatgtcattttttgatacaactccttcaggaaggattctcagtcgggcatcgtctgaccaaacagccattgatgttgtgctggcatttttcattggtctgacaatttcaatgtacatttcagtattgagcaccataattgttacttgtcaggtcgcctggccatcagttatagcagtaattcctcttctactattgaacatttggtacaggaatcgctatcttgcaacctctcgggagttaactcgacttgaaggagtaacaaaggcaccagttattgatcacttctcggagactgttcttggtgccacaaccataagatgttttaaaaaggacaaagaatttttccaggagaatttagacaaaattaattcaagtttgcgcatgtacttccacaactatgcggcaaatgaatggcttgggttccgactggagctgattggaactcttgtattatcaataactgcatttctaatgattagcctgcccagtaattttatcaaaaaagaatttgttggaatgtctctttcgtatggtctatccctcaattctctggtgtactttgcaatatctattagctgcacgttggaaaatgatatggttgctgtggagagggtaaatcagttcagcaatcttccttctgaggcagcatggaaagtagaagatcgtcttccttctccgaattggcccactcatggagatattgatattaagaatctaaaggttaggtaccgacccaatacccctttgattctgaaaggaattaatataaggatcagtggtggagaaaagataggagttgtaggaaggactggtagtggcaagtcaactttggtccaagcattgttcaggctcgtcgagccagcagaggggaaaattatcattgatgggatagacatatgcacattgggtctccatgatctgcgatctcgtttcggcatcattccccaggagccggttctgttcgaaggaacaattcgaagcaacattgatccaattgggcagtattcagatgcagagatatggcaggctctggagcgctgccagctgaaagatgttgtagtttcaaaaccggaaaacttgatgctccagtggctgatagtggagagaactggagtgtaggccaaagacagctcctttgtcttggtcgtgtcatattgaagcagactcgaatcttatttatggatgaggcaactgcttcagtcgattcacaaactgatgctacaattcagaagatcacacgacaagagttctcatcatgtacaataattagcattgcgcacagaataccaacagtcatggactgtgatagggttttggtgctggatgcaggtctggtaaaagaattcgatgcaccatctaggttgcttgaacacgcctccctcttcagtgcaatggttgaggagtatgcgaatcgctcggcaaacctataactctacccatgtcatctgctgcggagtttaagaaataaagagtcattttgatagatatatgtcatctgtcgcaaaggaaaaggcaggacgacctaaggaggaggatggcacggcacgctgatcggcatagttagtttggttcaggttcagttgttgttgagatttgctttgttaggctcggttttattagcgatgagttgttagcttgagcatgggacaattgtaatcagccttgtatagtgtatatgtgaaggctgtgtacttggaacaccaagtcccaagatcttgctcacggaaagacactggaataagttgaggcttaccatttcagagacacacggagagcacattttgtttaaatggcagtgttactttga

SEQ ID NO: 9426 - DNA, 327 bp, Setaria italica
  Peptide Sequence Number=SeqID_75400
gtgtagcagacgcaggcgaggtcggagggggcggatgccggcctcggctagcgcggcgcggaggagcgggaggaggtgcacgaggtggtgctgcgcggtctcccggggaaggaagccgtggcccggcggggtcacgtaggtgtggcgagggttggagaggatttcgcccgagagggagaccacgccgatgccgatcttgttggccgaggactccaaccccagcgccagcggacccgtcgggcggcggctcgccggagacggcgacgaggacatggcggcggcggcggtagggttttggggtttgtggtagacgagtagacaacgaac

SEQ ID NO: 9427 - DNA, 1317 bp, Setaria italica
  Peptide Sequence Number=SeqID_75401
attcggcctcgctcgcgtcgcctcttccctcccctcacctgcgtggttccagaaggagctggtggtggtggtggtggctgcctaatccgcggcgcgctgcgccaatccgccgccagcaatgctgcaggagttcgtcgacaacgtcatcgccgttaccaaggaatctgtgaagacattcacatatgagtcactgaacaacattgcaaggttcatcaatggaatatcagcactcttattgactctgttacctgggaaaggcaacattttagaagggatcagtggctgggaactgaagccagctctccgtgggccacgcctccctcgttggatggaaagtggggtctcttcatttaatgagttcatccatgaactttctgccgattcggatactgaatcagttgctgactctatcactggggatgatgaaaatgaagagtttgtctgtccgccctctccattgtcccaaagttcacgactatcacgtgcaagcagctttggtagacgtgatcgtcgattgagaaggcatatcagatatgcagtttcctggattctttggccattgagattcttcatatctttgttacttgttctgttcagtgccatcaagtttcggataataaggtcatcttctaaaagtgcagaaacacctcattattcaagaagtagtcctgccaagagatcatttcatataagggatcagtttctccaacgcacgaccgataggaggcgtggagtttttgaggatctccatctggcaattgagattttcattgaatcagtctttgacattgttcacaaaggagcacattatgttctttctccttcagaagtgtggcagaagttatttagctggattcatggaagtggccatgataccagtcctgttgttgatgtaccaacagctaatgttggcagtgataatccagttccaactgagaggaaagctgtgaatcgtcattctttgaacacagattcccgaacatgtgaggatgttattactgagcttggatatccatttgaggctataaaggttgttacttcagatgggtatgttctgttgctggagagaattccaaggcgtgattcgcagaaggttgtcttgttgcagcatggaatactggactcatctatgggttgggtatcaaatggtgttgttggctcgccagcatttgcagcttatgatcaaggttatgatgtttttcttggaaatctacgaggtttagtctcaagagagcatatagataaaaacatttcttcctacaaatactggaagtattctgttaatgagcatggaacaaaagatatgcctgcaataat

SEQ ID NO: 9428 - DNA, 805 bp, Setaria italica
  misc_feature (1)..(7): n is a, c, g, or t
  Peptide Sequence Number=SeqID_75402
nnnnnnnaatttataagacttaaaatagtgcatgtcaccagctggtacggagaagagcctaaatttttagaactagtaagatattcactagatcagctgatgaaaaaatggattacattacaacacatgcacccactcagaaatccctaccgttacatagctttgatatttcctgacacgattccaagaatccagcaaattcctagttgtacaatagcacagatgaaaacatctctaagcctacgagttctctttctacacaaacaaagacatctctggtggttggacaaacgagaagatggcttcaccaaagacctcgtacagtgaccccaagagatgaccggcgtcctgatcctctttccaagcttgcctcagcaccgtggacactttctgcgcaagatcgctgccctgatccctccggatcacagctgatgggatgctctctaccaactgtccagaggatgaagcctgcatcatgctggggttgcccaactgagtggaaaagccatccatggctccttgcatgtttcctgccatggagttgactgatgcgtccgttgccatcttcttcagaggtggctgggatgcagagagatctgtgctggatttccgcttatttgggttattggttaagacccttttatcgctcctcaaaagagggcgtgtcgatggagaaagcaaaacaggaaataatttgagccgatcatacaagcatttgcctgcagcacacagcaaggcaccacagggctaaggcaaggcttccttccttttcatctcatttttctgcttctcaagctgcagttcc

SEQ ID NO: 9429 - DNA, 1456 bp, Setaria italica
  Peptide Sequence Number=SeqID_75403
cccaaattttaaccgtttaaattgtaaatagttaggaacatttggcaactatctgccagtcaaggtgtttctagtcgagagtgttacatgtattcaacgcttatttgggttattgttaagacccttttatcgctcctcaaaagagggcgtgtcgatggagaaagcaaaacaggaaataatttgagccgatcatacaagcatttgcctgcagcacacagcaaggcaccgtaaacacgccaagcttccttccttttcatctcatttttctgcttctcaagctgcagttccggctccagaagttgcatatatgtcacaaggttgggcaaaagcagcaacctaatcgcactgggccccaatgcagatatcccttgtacagcaccataatgttgggtcaatgattttgcaggatcaagaaacgcatggatcaatgtttttgttaaccgggtttgaaggttgtgatagacatgaccaaacctccggcataccaaagcaaccaaattggcagagaagtctctaagttcccagtggttatctgagagcctatgccctagcctctttgcgacaatgcaagtgatcatcgatggcatcaactggtgcaaataaggttcaatatgaatgtgtggattatgaagaagacttcggactactcgcatgagagcaaataaaacaggaagatcacccaaactccgggtaacctcatctgcgacaaagtaggaaaagtaaggaaccaatggatgaaggcctgaatcttttgccaagctcactaaagcttctttaaaaagggatgtgtcagatctactcaaagtaagctcagctattttatcaaagtacatctgtagttctctagataatacatgcttaacaggaagcttgacatcaactggaagcccatcatccttcccatgctcagaccttttattttcagctggtggtacaattgcatcaataggaggattctctggaattgcaggctgcaccccctcaatcgctaaccaatgggctacaactgctgtgtcgagaggggccttaggcagaggagcttcaataatctctttgaagtctacctcccggtcatcaagatagaagagatccttatgtccaacagctctcttaaaccgcaatggatcaccagatgcaaatccatatacaggctcaacattcctgaggctgagagcactatcaacatcatctgcagtcagaactgccgtttcgcatgccgcatacatttaatggactcctgcatgatctcgcggaggcggtactcgacgtcgggggcgagcgcggcggcgacatcggggccgaggctggggatgccgacgctctgggcgatgacctcgatcgtctccttgggcacgatgctcatcgcgctcctcccgggcacgaatcccctgaaccctagtttctctctctagagcttcttcccccaaattcttccgagcgggggatcggtgggggc

SEQ ID NO: 9430 - DNA, 1295 bp, Setaria italica
  Peptide Sequence Number=SeqID_75404
gagcggaataacagtggtgactgcaacggcgaggtaaaccactttgagaataaaacagatggcatatctaattttgcatctgaaaatgggaacagaacaacatatcagaaatcccgatttaactctggaagagatggtagagatgtcaggcaatttggtgcacctagaggtaggggaagaggaaggcactacaatcaacgtcgtggaagagtgagagttgggatcatagttttgtactgaagctatgctcagtgttcatcatcaagctggaaacaacaactggggagacacaaaatccaacttcatgagccatgaaagtctagcatcagggcgtcacagtgatgttccagctccggcatcaggcggacaccgaaagcgcccttctataatttatgatgcaaatgaagttaaacaatgggtagaagcacggaagaaaaactaccctacaagcgtcaatataaacaagaagttgtctgagagtcacttagataatcaaaacaaggacaaagatgcccagctgcgacgccaggaactgaaggaagtcctagcaaagcagcaagaactgggtcttgaattacctgagttaccacctggctatctatctgaaactgaggatcaaggcaatgaaaagaaaagtaattggaaaactcaacgcagggattctcgttttgagaatcgtggcaatactagcaaaagaccgaggtatgagcgtggagagtttcagtctaaaagatccaaggtatggaaccgcactcctagcaatgatggtgcattggctaagagcagagaaccaaccctcctacagaagcttcttagctctgatatcaaaagggacaggcataggcttcttcacacattcaaattcatggccttgaataatttctttaaggactggcctgataagcagctgcagtttcccattgttaaggtgaaccagattgaaattgaagataatattaccacaggcaacttagatgacttggagaatgctgagatggccaaggtcagcagccttgatacaactggaaatggtgttaggaaagagttgagctcgattgatgaagaaactggtattgctgaccacaatgatgacgacgaagaggatggtgctagtgcggacagcagagacgaggatggggacgaggacgcagatgaagagcagtttaacgaagccgaagatgatgcggctgcctgaaattttgactgaaccgggtatctgaaattaccttttttttttctgtgtgtgtaaagttgagcgcgcacaatgcattctatcgctcttcgtaaattcctgg

SEQ ID NO: 9431 - DNA, 1574 bp, Setaria italica
  Peptide Sequence Number=SeqID_75405
cgggcccaatggcgtcgccggacttgttcccgaacgtcaccttctccgacgtctccgccgccgccgcgccggcgaacgagggggccactgccgcgttcggcgtcggcgccgccaccggagccccgcgcctcagcctcgtgaaggctgggaagcccgaggtggagcccacggtcgagatcgacctcttcgacgcgcagatatttaagctggggccgagtgagtggctgtgcgtgtacgacgagtcggaggctaaggctggcgtcgaggagaagtcattttcaagagcaattaaggttgttcttaggacagaagctgagagcaaagccttctctttagctttccaacgatggaaacaacaagttattagtggaaaagctggtgagccattggagaatggatcaataattgcttcgaaaagcaaatttgatacaaaaattgaggcatcgtcagcaaagatgtatttccactactatggccagctattacatcagcaaaatatgttacaagattttgtgaggacaggaacatactatgctgctgtaatggaaaaccgatctgactttgagggccgagttgtggtcgatgttggagctggtagtggtattctttcgttatttgctgcccaggctggtgccaaacatgtttacgcagttgaggcatctgaaatggctgaacatgctcaacggctaatctctgggaacccatctcttggtcaacggataacggtcatcaaaggcaaggttgaggaagtcgaacttccagagaaggttgatatactaatttctgaacctatgggaacccttttggttaatgagaggatgctggagtcctatgttattgctagagacagattccttgctccagatggtaaaatgtttccaacaacaggaaggattcacatggctccattttctgacgaatacctttatgttgaaatggcaaacaaggctctcttttggcagcagcacaacttttttggtgttgatcttacacctttacatggttcagcattccagggatatttttcacagcctgttgtagatgcatttgacccaagattattgatttctccaccaacctatcatacacttgattttactagcatgaaggaagaggagctttacgagattgacattcctttgagttttgtagcatctgttggcactagagtacatggccttgcttgttggtttgatgtattgttcaatgggagcactgtgcaaaggtggcttaccactgctccaggctcccccaccactcattggtaccaactgcgatgtgtgctttcacagccattgtatgtcatggctggccaagaaataaccgggcgccttcatctggtagcccacagttctcaaagctacacaatatatttgacaatgtcagctaaaatgtggggtgtggagcaagatggtatcctacagacatctacaggaaaacttgaactcaaggagccatactacaggttgtctcagccgcaatcctacatgttgcaacaagatcagcagcagcagcagcagcaactaccatctctgaagccacagggttcagagcagcacatgcaggaagggctt

SEQ ID NO: 9432 - DNA, 467 bp, Setaria italica
  Peptide Sequence Number=SeqID_75406
gccggcgccggagttggcgaagatggtgatgagcacgtgctccttcacgttgaagggccctgggttgagggagaactcccagcgggtgccccggaggaaggcccgctccgggagtgccgccgccatgaggcggcccagcggcaccacggcgatctgcgccgagatggccgtgatggtgagcggctccttgcggtaccagaagaactggttgaggaacgagagcagcgcgcacgacgcggttccgaggacccacatccggaacgtcagcaccggcgtcgacgggtcgtcgcccaccggcaccgtcagcgccacctgctcgatcggcgagttctctacaacctcttcctcgtcctcctccggcgagccgccgcgcgacgtcgacggctcaggcggcaagagcggggaggtgatctggtcgtcgtcgtcgccgccgtcgccatggcggcgctcctgttcctctttccctc

SEQ ID NO: 9433 - DNA, 325 bp, Setaria italica
  Peptide Sequence Number=SeqID_75407
tctaaattttcttccttttgtcaatagtagaacaagtcacatcaccaactgcaatagcagtgaacgtaatggtttcaccaatgagagtccattcaccgaagtgtcctccctcacctatctcaaccacataattaccattttcttgactgctttgtgccttgtctactattgtttgaccatctgcaaaagatacttcaacaagtgactcagcaagttgacttagttgaagcactgtaaatcttgtaaacagctctactgatcggagcaacttcaatgatgcaatgtttgaaaattctagacatcagaattccccggaaatcctccc

SEQ ID NO: 9434 - DNA, 370 bp, Setaria italica
  Peptide Sequence Number=SeqID_75408
acccataattggccattttctagagaactttcaagagccctcaatcttgcgcgtgataaatcatgtctggaacgctgattgtttgtgttggaacttactattagtggtgattcggagcatgccagtcctactacttgtggtgaaggctgtaaagacacttttgtaacagtctgggtagattccacatcagttaacccattaatatgcacaactatgattgtaatatcatctgtgcgagtttcatactgtagccaaagacgataggactcagcaacaatttctgcacatgcatctcgaggatccttgtatttagaaatctgcaaattcaacaccatagtgttgaaagtttagtccatatattattattatt

SEQ ID NO: 9435 - DNA, 1643 bp, Setaria italica
  Peptide Sequence Number=SeqID_75409
cattgtatgtcaagagaggcatcataacacatattcaggattaaatctcaaaccaaatacataatgtataatatgtcaattgctcaggaaagctgcgaagcacctctataaataatggacttctgatgaagttcttctagagcaacaacaactgaggctgcaaagaattttgcagatgattcatttagtggtgtgtgaagtattgaagccagtgagcaacaaaggcagcaattcagcaatatcccaaggtatgactgatcagcacaagtacataggacttctggcacacaagttgattggctcaagcttttcataagttccttttcctcaaagacttgtacttccttatggagatcctgtactctcttgatgtaaaacctctttaaacttctgatcttgtcagagcccctgattcggacgagaccaatctcactgcactcagcagcatatatgcacattttccattccaaatcagatagctgcactctcctaaaggggaagtcatcatctgcaacattctccttagtgaccagagattctttaatcctggaatcagcttgtgaaagtttaggcaaaggcccaacaattgtatcaaatttctcctttgcaatagtagaacaagtcacatcaccaactgcaatagcagtgaacgtaatggtttcaccaatgagagtccattcaccgaagtgtcctccctcacctatctcaaccacataattaccattttcttgactgctttgtgcctgctttgtatgagcactaatgagatcccaagcatctgagttcatctgatcagcagccaatacaagtctcacacgacccctttgaatgacatataatgcagagacatcatcattcttgtctactattgtttgaccatctgcaaaagatacttcaacaagtgactcagcaagttgacttagttgaagcactgtaaatcttgtaaacagctctactgatcggagcaacttcaatgatgcaatgtttgaaaattctgacatcagaattccccggaaatcctccctctttagagcccataatgttccactggtcacagcacgaacagaagcttgaagtggcttattgtgcatcagtgctagctccccaaaggaagatagcttgtctgctgtataccgatgcagaaccttggttgtttcctttccttcttcttcctgaatggccagaacttcatactcaccactaccaactacatagaagcagtcaccatcgccaccctgctgcactactatatccccaggtttcacctcaacccgttgcatacaatcaagtagaacatgacattgcgagtcagtaatctttctgaagaggaaatgatcatgtagtacccgctcaatatgcgcttgttcttcccatgtctttcgatgagatggagatgatgggacccataattggccattttctagagaactttcaagagccctcaatcttgcgcgtgataaatcatgtctggaacgctgattgtttgtgttggaacttactattagtggtgattcggagcatgccagtcctactacttgtggtgaaggctgtaaagacacttttgtaacagtctgggtagattccacctagttagtaaactaagttaagtaaaaaatttaaaaaaaattaagggtaaaagtaaa

SEQ ID NO: 9436 - DNA, 736 bp, Setaria italica
  Peptide Sequence Number=SeqID_75410
ctgagattaccaatcttggatccattctggagcagtaagatcatctgggtcttcaattggcacagaaggagacgctgttaagtcctcgttaagagtttctatacagctgtccatccgctcagtgatttcatcaggtactgtgtaagtcccagatgctatttgttcccagtcaatgccatcaaaccagggatgtttcttcacagctccggcaccactggttccgaggcgcacattttcatctaccacaagtagcttggttataaggtcaataacttccgcactgaatatcaatggcataacaaggtggcctttggcaatttttgaaacaggttccagttcgctctccctccaggaaccgaatggcatgtcagactgcagcatgaaatagatcaagactccaagggcccaccagtcagcaggaaatccatggcccctaccaagaactatctctggtgctagagagtcagcaatcccacatgttgtgtatgtcctttcaccttctattttctttgcaaacctaaaatcaaccagttgcagatgacctgatctgtcaagcataagaatgtctgccgaaacacctctataaataatggacttctgatgaagttcttctagagcaacaacaactgaggctgcaaagaattttgcagatgattcatttagtggtgtgtgaagttgaagaatagaaggtgaaaggacatacacaacatgtgggattgctgactatctctggtgc

SEQ ID NO: 9437 - DNA, 512 bp, Setaria italica
  Peptide Sequence Number=SeqID_75411
tcggctcgtactcaccatccggaccgcacggcggcatgctctcccgcttcgcctggatgcgcaggtagttcgacgagcggcattgcccgaaggcgcgcgccacagcgtggtcgacgaggtcggcggcgccgtcagcggcaatgcgggcgatggggcgcgcccactccttggaaccccaccggcgcatacgccggaggtccgcgtcggcggtggcaccggggcctccgccggagcagccgccgatggagagcacgaggaggtcctcgacgccgcggacgaacgggaactcgtgcttgttgtggaggacgtgcgtgatggcggcggccgccgggctgcccatggtgggtcccccgtccactgccgcgcaggacgtggcgccgtccaccgacgacacctcggcgggctcgaagcggccggcctcggaccacgcggcgcgaccgacctcgccgaggcggaagtcgtagctctcgttctccagggctcggctcgggagaacaccagcggcgcggagg

SEQ ID NO: 9438 - DNA, 633 bp, Setaria italica
  Peptide Sequence Number=SeqID_75412
ctactgaaaaccaaatatatatcgcaaatgttcctttgatatttttacccctctccaacagagttcacagcggcgaatgccatgccacgctgccgcgtaaaaaatatgcagcaggattccggccgcgagcccaagcaaggagaaagagaggcctacatgtcctccacgccacgggtccacgggtcaccagctcagcccagcgccgacggcttctgcggcgcctgcttgaacgcaacggtgggcgcgatccgggagctcctgctgcggtgctccgcgacgagctcggcggcgaaccagtccagcttctccgcgttcgtctgctccccgacccgcctcccctcgaacagcaccgactcgacgttccgctgcttcagcatctcgtccgccgccgccagcagcgcgcgcacgttccccggggtcggctcgtactcaccatccggaccgcacggcggcatgctctcccgcttcgcctggatgcgcaggtagttcgacgagcggcattgcccgaaggcgcgcgccacacggaatcctgctgcatattttttacgcggcagcgtggcatggcattcgccgctgtgaactctgttggagaggggtaaaaatatcaaaggaacatttgcgatatattatttt

SEQ ID NO: 9439 - DNA, 470 bp, Setaria italica
  Peptide Sequence Number=SeqID_75413
tcgctgatgatagacctgacgtcttagagaaagttgtacaaatatctggtacccctgagcagactgaaaaagctaagagtttgctgcagggatttattcttagcagtgagtatcatttcctttagttttttgtttccttttcagcaatatataactatttcccctttcttttttaaaatttcagtccaagatgacagctgaagacttaagtggactctgctgcatgtcgtaggtgttatatcgtcaaattttccagttaatggcctttaggtagaatacctctgtgtccatgtgattatttgtaatttgtctaatggagggtcatgtttccgtgtgcgaagtgttaggataagttcacatttatctttttccctaggtgtaatgctaagtagccaaaatgtgttttgtttctagtttatcgttgtaagatagtagacgttttatcgattgattcaatttccatattcaaa

SEQ ID NO: 9440 - DNA, 1800 bp, Setaria italica
  Peptide Sequence Number=SeqID_75414
acggcgagtacgggcccagggggaaggatccgcgggacagggggaagaccacaacgcgcctcatcgtgcccaaactgcacgttggatgcctgctcggcaagggtggcaagatcatcgagcagatgaggatggagaccaagacacacatcaggattctgccgcgcgacctaaacactccacgctgtgtgtccttgtccgaggaggttgtacaggttgttggagatggaaattgtgttaggaaggctgtagcaataatcactgatcgcctaaaggaaagcttacaccgtgatcgtggtcctttccgagggcgaatgaattcaccagagcctcgaatttctcaggaagatgaatacttgggtggtgttcagcagatgcctgtatatgaagaaacttacgggcgacctgatcagattaggaacaacattagcctggagccaccaggatatgagtttgattcaaatggtggcaaggtcattgaacatccagatattctatacgatgatatcgtatttcgaattctttgcccaaatgacaaggctagcagtttagtttcaacacgtgatggaataatagagatgctacaggcagacgttggtgttgatgttaggcttactgatattattgctggttctgacgaaagggtagtaatcatcacatccagagagggcccagaccatgagctttttccagctcaggaagcactgctgcacatccaaactcatgttgtagaccttggccctgataaggataacattatcacaacaagactacttgtaccttcaagtgaaattgcttgctttgatggaagggaggggtcattatctgatatacagagacagactagtgcaaatgtgcagatattaccaagagaagatcttccattgtgcgccctagagtctgatgaactcatacagattgttggagagattagagctgctcggaatgctcttatgcaagtaaccacaaaattaaggagttatctataccgtgagatgtctggtcctattcaagtcggcaacattaatgtacatggagccatttctccagcaacaggctcacctcgaggaccataccagggaaatgatattccaatgggtgcttaccaccaagcaccacaactggcagcttcgtggcactcaaaggatagtggaggcagtgcaagtggatcatatgagcaaggtagcaacattaatgatgatatcaggcaaaatgctacaaaaagatttgccgttcctctagtgactagaagcacattagaagttgtcataccgaacagtgctgttgcaagcctcaccatgagggctggtagcaagcttgcccaaataagcgagatgtctggtgctactgtaaagctcgctgatgatagacctgacgtcttagagaaagttgtacaaatatctggtacccctgagcagactgaaaaagctaagagtttgctgcagggatttattcttagcatccaagatgacagctgaagacttaagtggactctgctgcatgtcgtaggtgttatatcgtcaaattttccagttaatggcctttaggtagaatacctctgtgtccatgtgattatttgtaatttgtctaatggagggtcatgtttccgtgtgcgaagtgttaggataagttcacatttatcttttccctaggtgtaatgctaagtagccaaaatgtgttttgtttctagtttatcgttgtaagatagtagacgttttatcgattgattcaatttccatattcatagatggctgctggcctaattggtcaggtagtttaggttaaaaaaaaaaaaactaaaag

SEQ ID NO: 9441 - DNA, 385 bp, Setaria italica
  Peptide Sequence Number=SeqID_75415
gggcggcggtgcccgtgatgcacagcgcgcgcaggatgtttgccgcatccgagtggctgcgggaagagctgcaggagcgcgacgagctcggacgcggcccgcccgtggcgccgcggcgggtggtggccggcagggcgctcgcggcagccaatctggtcttctggggcttcaacctgttcgccttcctgctgccgttctacctgcccaaggcgctccggaggtactacctcggcaccgaccgtgaggatgatggtgaggatcgctcacgcgtgaacgagaagcagcagaagcagctgcaggagggtgaaggggaagaaggactcgtagatcaggatttgctggacatgtttgcgacttgagcttgtgcatgtcacgtctgtatgtc

SEQ ID NO: 9442 - DNA, 261 bp, Setaria italica
  Peptide Sequence Number=SeqID_75416
ctcgttgaaatggtttcttattgcaacagaataactgcactcagctgagctcctccttgaaccagtctcattatatgtgtagatttcttgattccatttttctagactaaaatattactcaattcgatcttaacaaaattcagtttaacttgttgaatttttttccctgctattgtccttaccctattattttgtctagtttgtgtgcccatttaaatctttagagatcacatatgcctaaatagcctgttatgctagtgt

SEQ ID NO: 9443 - DNA, 468 bp, Setaria italica
  Peptide Sequence Number=SeqID_75417
aaataagtctataatttaagtatctaaacatttgatgtgatagggactaaagtttagcccggggatcaaacacccccaaagcatattgtggagtaaaggtagatagatggaatgttgctcttgatggtctgcttctttttgcttgtttattacattcatcgtacagaagcggatatatacatctttcatggatgcaaaaaagtgctagggttctttatcatcttttctatgggatagtgaagtccgtgtgtgtgggctagactcgagagatgcgccggtgcggacggcgattcggcgatgatggtgaaggtgacgttccgttgtggaggatgacgcggtgtgcgtgccggccggaggaggaagacggtttgaagtccgagtggatggatggatgagcaattgggcttgggcagtggtagaatcgtggccgacagatttatatcgtctggttatcatgcatcattatag

SEQ ID NO: 9444 - DNA, 545 bp, Setaria italica
  Peptide Sequence Number=SeqID_75418
tctatttgtccaaagctctcgcatcgatcgccacccaccaccacatccagaagaagaaagaagaagaagcagaagcagaagcagtataatgaggctgagctgcaacgggtgccgggtgctccggaaggggtgcacggaggcgtgcaccatccggccgtgcctgcagtggatcaaggcgcccgacgcgcaggcgaacgccaccgtcttcctcgccaagttctacggccgcgcggggctgctcaacctcatcgacgccgcgccgggggacgagcagcggcccgccgtcttccgctctctgctctacgaggcctgcggccggatcgtcaaccccgtctacggctccgtggggctgctctggtcgggcaactggcacctctgccaggccgccgtcgaggccgtcctcaagggcgcgcccatcgtccagatctccgccgaggacgccgccgccgccagccccgcgcacctacacaaggccgccgcctgctacgacatccgacacgtcgccgccaaggccaagcccgctcccgctgcttcttctcctgcgg

SEQ ID NO: 9445 - DNA, 1653 bp, Setaria italica
  misc_feature (1527)..(1653): n is a, c, g, or t
  Peptide Sequence Number=SeqID_75419
aaaaccccagcccgtgccgagcccgtctcggccaccacctcctccccaccctcctcctcggcagcgcggcgagctgcgggcgatccgggcggtgaggggggcgcgcgcggggcgggggcagagatggcatcggaggacgtggtggggaagagcaggggcgacacggccgtcaccaccatcgtcaacctggcggaggaggccaagctcgcgcgcgagggggtcaaggggcccggccaccaggtcctcaccatctgcaagtcgctcgtcgccggcggcgtcgcggggggagtgtcacgtactgctgttgctccgctcgaacgattgaaaatcttgctccaggttcaaaatccacacagtatcaagtacaacggtacaattcaaggtctcaagtatatatggagaaccgagggcctccgtggacttttcaagggcaatggtaccaattgtgcaaggatcgttccaaactctgctgtgaagttttttagctacgagcaggcatcaaagggaattttgtgggcttatcgtcagcggaccggggatgaggatgctcagcttagtccactcttgcgccttggagctggagcctgtgctggtatcatagccatgtctgctacttacccgatggatatggttaggggtaggatcaccgttcagacagacaagtctccctaccagtaccgtggtatgttccatgcactgggcacagtctaccgtgaggaaggcttccgtgctttatatagagggtggcttccatctgtaatcggagttgttccttacgttggcctcaactttgctgtttatgagtctctcaaggactggctgctccagacaaatccttttgggcttgcaaatggtaacgagctgcatgtagttacaaggcttgggtgtggagctgtggctggaactattggccagactgttgcgtaccctcttgatgtcatcaggagaagaatgcagatggtcggttggagccatgctgattctattgttactggacaaggcaaagaagcactccagtacaatggtatgatcgatgcattcaggaaaactgttcgtcatgaaggcgtcggtgctctgtacaagggtcttgtgccaaattcagtgaaggtggtgccctcgattgccattgcatttgtcacttacgaggttgtgaaggatgtgctaggagtagagatgaggatatcagactgagggattggagtagtgctggtgggcgttatcgactgcttatttttgtaggtgttgggagttctgtttttgtaggcagggcaggtagaaggatatgactgcggctctattcagcatcagggcctcttagcccatgttgatatatcctgctactggcttccggtcctaaaattgttgctggatcgtggaaaattaataagttggctgtaaagcgttaaagcatttgcctaactcataaaaagtctattccttgttgatgtatggagattgaacttaaaagcggtattgcttgctgctaatagttgattctaatgatttttctttgaccaaaaaaaaaannnnnnnnnnnnnnnnnnnnnnnnnnnnnnnnnnnnnnnnnnnnnnnnnnnnnnnnnnnnnnnnnnnnnnnnnnnnnnnnnnnnnnnnnnnnnnnnnnnnnnnnnnnnnnnnnnnnnnnnnnnnnnn

SEQ ID NO: 9446 - DNA, 264 bp, Setaria italica
  Peptide Sequence Number=SeqID_75420
ggtccatccgtaacgtccgtgctacgggtacatccgtaacgtactattacaaagagttcagtacaaagtgtcatgggcctgattgtaaactcaagaattcagcacagtgcctcaagtataagaaaaaactatatcctgcgtaccaaggttcatgtcttactggcaaaactgttttgataacagatgttttcagctacaactatatctaactacaccgaaatcaacttgtggcgcagtccactacatgcgactttgcacgcccag

SEQ ID NO: 9447 - DNA, 292 bp, Setaria italica
  Peptide Sequence Number=SeqID_75421
acgccccggcgcccgccgctgcatattgccgtcgagagcgaaagcgaacgccgccagcccgccaccgaggagtgagaagcgcaagagcagcggagcagggaccctcgcgtgcgggcgcagcgatgcagagggacgtcgtggtctccgaccccgcggccgccgggtcctcgtcctccgccgcctccttcgccgagaccagggtcatctgccgcgtgtgccagaagcagttcgcgcagtacacctgcccccgctgcaactcccggtactgctcgctcccgtgctacaaggggca

SEQ ID NO: 9448 - DNA, 471 bp, Setaria italica
  Peptide Sequence Number=SeqID_75422
gccgcgcctgccgcgcaccacgtacgccacggccgccgcgatgccgaccacggccacggccgcgatgccgcaggccacgccggcggccacggacacggacctgcgcggcgaggcggacgccgtgctggtcggggtggtggtggcggtggccgtggtggtggtggtggtggtcgggatcgccgaggcctccggcttggcggccatggtggcgggcatggaggcgtcgagggcctccgggagcgccgcggcctccggcttgaagaaggtctgcatcgccggcgtcgccgtgctgcttccgccgttgaagtcctccaggccgtgggactcggacctcacggcgaacagcgccaccacgcagagcgcgacgagaagcctcttggacgccattgcttcaagcctttgcagctgagggaaagcctaacgcttgtgatggagaaagggctagtgaggactgaggagacagctgcacgg

SEQ ID NO: 9449 - DNA, 305 bp, Setaria italica
  Peptide Sequence Number=SeqID_75423
cttggaaattgatcgtcataatcaatgctaagatcttctggttttctcttagcacggcgttctttgagcgtctcaaatttcatgccatcaagtggccaagcttcctctggtcgtttgccccttcttaaagcaacatagcaaaatttttcatcctcaaaaccacgtaaaggcacaccttttgacctcttgtaggcacgctgagatgaagtcctctctaatctctggacaaagtggcagtatttgtctgaattctccaatggacattgaccgtcatggggacaaggggcaaccacaaaagacccatt

SEQ ID NO: 9450 - DNA, 1363 bp, Setaria italica
  misc_feature (1357)..(1363): n is a, c, g, or t
  Peptide Sequence Number=SeqID_75424
tccacagaccacgcgcagatccaaacgcgacccgagcccgaccaaaccctaagccccgcctcccgcctccccactccgcgccaccatggccaagtacggcgagggcgacaagcggtggatcgtggaggagcgcgccgacggcaccaacgtccacaactggcactgggcggagcgcgactgcctcgagtggtcccgcgcgcgcctctccgccctgctcgcgggcctcaccgtcctcgacggcgagggcggcctcacgctccgcaccgtggccctcgacaagctcgacggcgaggcctacgtcaacatccgcaagggcaaggtcatcccggggtacgagctctccctcaccctctcctgggaggccgaggccgcctccgagtccggcgccgccaaggtcgccggcgccgccgaggtcccctacctcgccgacgagaacgccgacgaggaccccgacctccgcgtcaccgtccgcggcgacgagaccccgctcgcgcgccgcgcgaaggacgccttcctcgcccgcggcaagcccctcgtcctcgagaagatccgcgagttcgtcgccgccatggccaagggcggcccggccaaggacgagctcgagtccaagaagactcccgccaaggccggcgccgccccggctgcgaagaaggaggagccccccgctcctgcgccggctgcgaaggagaagaaggccaaggggaaggacaaggaggggttcaagacgattgagatgacggagaagttctactgccgcgccaaggacatatatgagatcttgatggatgagaacagatggaaggggttcacacagagcaatgcgaggatcagcagagaggtcggaggggaatttagcctatttgatgggtccatcaccggcatcaatgaggagctgcaggaagggaagctgattgcacagaagtggcggtttgggagctggccagacgacctttactcctcggtgaggttggtgttcgatgagcctgaatctggggttacaatcataaagctcaaacaaactgatgtgcctgaggaagacaagtatggcaattcaactgtggtagagaacacggagaggggctggagagaactcattttccagcggatacgcggagtgttcggtttcgggatctaaagaagtgatacagcctgaagctggatttctaatttttacggagtcaggctttgaatgccatagctatccatgttttactcacccagttgttccatgttgttaaaaggcaaaactcagcataccatgggggttaaaaacatctgttattcatcacgctagaatgtgtctgccttcgtactcttgtttgtttggtgaacatgatcgtgttgtgattgtctgaannnnnnn

SEQ ID NO: 9451 - DNA, 1109 bp, Setaria italica
  Peptide Sequence Number=SeqID_75425
tttttgaaggtaaaacacttgtattgtatcatgcggtttatttacaatgcaggtggtggcacacagccaacaacaaatatttcccagtagccatctctgttgatcaaggctgcttctgtgcattattacaaattcaccggatctctcaacactgtctatatgattacaatgtacacaggccgtcctagcctatactgcctcagtagtaaaatgaagctcatgtatgactgtatgttagaaaaattagcaaaaagataaccctagctgactggcacgttactgtgctccaccatgtaggtcgctagcgatgttcttgcttgatgcaagctgaagttgcttgatatgttggcccaatcttagctgcagactcacttggcttatgctggcatcagctctcattatctcctcttcagcttgctttgcgatttccattgcatcccaaatcaaaatttctggagacatcgaaacttggacctggagcaacactctcccttgcacgtaatgcagcattagatgttcgagcgacattttctctgcttagtgtgaggatataatatcaggtacgattgctttagcactctgttgccgtggaatagcttctgaatttcttagattgaagttgtttagagtcctgttcaggttcatgttggggcccatcgagtatgagggatctatgtgtatgaaaacttcagcaacttgattgtgctccttttgaatcagatggcggacagtttccccgatatcatgtgctgcactgacactcaagaaaggatatacctcaatatgcacatcgagatataatgaggtcccagcttttcttcccctcaaccgatggcatcccttcacgccatcaaccttcaaaatagtttccctgattggttgtaggagtgaaggatcaacagcagcgtcaactaattccagtacactctcatatccagtctgaataccagctttaagaatcatgcctgagacaataagtccagctagtggatcaagaagaggcaatccaagaatagagccacctaccccaactagggcaacaacagatgaaatagcatctgcacgatggtgccatgcattagctttcatcagcccactcccttccttgt

SEQ ID NO: 9452 - DNA, 538 bp, Setaria italica
  Peptide Sequence Number=SeqID_75426
cgccgccgtgcaagacgaaacagagctcgccgccgcatgtcgtcgatgttgtccgcgctttcgaattggttggtgaacccgcgccgcaacccgctcgcacgcccccacatgcacgccgtctcctcgcgcctcaggaaatacggtaatcccggatccgatctgaccttcttgttcccctgatctgaatggtggtgcgttttggttctgcttcgtgtgtgtggtgatccgggtgattcgatccataagggctgaggtacgacgacctgtacgacccgtacttcgacctggacatcaaggaggcgctcgggaggctgcctagggaggtcgtcgacgcccgcatccagcgcctcaagcgctccatggacctctccatgaagcaccagtacctccccgaggacctccaggctgtgcagaccccattcagagcctatttgagtgacatgttggctctggtgaaaaaagggaacgctgagcgtgaagcactgggagcccttccgctttaccagagaaccattccttaaaatgctgcctagacgcg

SEQ ID NO: 9453 - DNA, 548 bp, Setaria italica
  Peptide Sequence Number=SeqID_75427
cgagtcccacccacacccgagacggagtcccccgggcccgagatcgagtcccatccatacaccgcctcctctcccataacgcgaggaggcgaaggagtagcggcggaggagtagcgccgccgtgcaagacgaaacagagctcgccgccgcatgtcgtcgatgttgtccgcgctttcgaattggttggtgaacccgcgccgcaacccgctcgcgcgcctccacatgcacgccgtctcctcgcgcctcaggaaatacgggctgaggtacgacgacctgtacgacccgtacttcgacctggacatcaaggaggcgctcgggaggctgcctagggaggtcgtcgacgcccgcatccagcgcctcaagcgctccatggacctctccatgaagcaccagtacctccccgaggacctccaggctgtgcagaccccattcagaggctatttgagtgacatgttggctctggtgaaaaaggagaacgctgagcgtgaagcactgggagcccttccgctttaccagagaaccattccttaaaatgctgcctagacgcg

SEQ ID NO: 9454 - DNA, 777 bp, Setaria italica
  Peptide Sequence Number=SeqID_75428
ctaccctacacgcgctccgtcaccgcctcctctcccacaaaagcgaggaggcgaagaagaagcgcatcccgccgccgcgcagccgccaccatgtcgtcgatgatatccgcgctttcgaattggctggtgaacccgcgccgcaacccgctcgcgcgcctccacatgcacgccgtctcctcgcgcctcaggaaatacgggctgaggtacgacgacctgtacgacccgtacttcgacctggacatcaaggaggcgctcgggaggctgcctagggaggtcgtcgacgcccgcatccagcgcctcaagcgctccatggacctctccatgaagcaccagtacctccccgaggacctccaggctgtgcagactccattcagaggctatttgagtgacatgttggctctggtgaaaaaggagaatgctgagcgtgaagcactgggagcccttccgctttaccagagaaccattccttaaaatggtgcctagacgtgcccacaaggccacattttctctttacgaaacaccaaaatgcatgaaataatatgcagcggatgaaactttttttccttactatcaagttacattttacttgttgatgcaattatgcattgactgtcgcctgtagttctgtttcccctctctaattaatgggaacaaattatgcgttccaccgttattaacttgttatgaaatcttcagctgctgagtaactgttatagctttatgtcgttaaaaactactactcacactcttactttgttagtttcggtttaagtttaa

SEQ ID NO: 9455 - DNA, 847 bp, Setaria italica
  Peptide Sequence Number=SeqID_75429
agtcactactatcaagctgctggcagctgggtggtattttttgttccggaaaatgatgcggacatggcagcttataatgatttcatgagtttaccttggtagaataaagacaagacgtagacaagacaagtttgtaaagcttggagagaggagcaccttgtttcttgttccaccttcagatttctctgagcaagtactgagagtgcctggaaaagtcagcatatctggagtcattctgaggtttcagcagtcaaatccagattatagctcgccaaatcgcaaatcgttggagagaatccacccatcttcttcaagtaatcttaacgctgatgtaagcagtcgtgaagatctgaatgccttgagaagactcaaccaaccagatagcaggacattcccacagggtccagattatgtccgctcatcaggtggaagctataccctagcaagtgcagatattatttcgccttacaagccagagagtcctccatatgttgtctctcaattaccgcatgattggccaccagctgacccccacatgggtatagcacaagacaaacatcagcaacttccaaacatgttgccctcaggatggtcaaatagcatgaacgatccaaatccaggttctggtaacttcagttctttgtcccagagtgcaatctcacatgctctaaataacaggatacaggagccatactcatttgctactcaaggagtaccaaaagaggcagcatcagggtatgcaccaggtgaagtatccaacagcatgtcctggccttccatgcaaccgaactcacagcaggtagctagacctgatcaacctatattccagtatcactgccaccagatc

SEQ ID NO: 9456 - DNA, 1265 bp, Setaria italica
  Peptide Sequence Number=SeqID_75430
tggctgcagcattagctgcagcttctattgtattcagggacaataaggcttactcacagaagcttgtacatggtgctaccactctcttccaatttgcacgggatcggcgtggcaggtatagtgcaggtggttcagatgctgcaaagttctacaattcaaccagctactgggatgagtttgtgtggggtagttcatggacgtaccttgcgactggcaattcctcatacttgactctggccacacaccccaagcttgcaaagcatgctggtgctttctggggtggtccggattatggtgtgttcagctgggataataagctcactggtgcacaggttcttctaagccggttaaggcttttcttgagccctggatatccgtatgaagagatgttgaggacattccacaaccaaactagcattatcatgtgttcctaccttcccatctttaagtctttcaacagaacaaaaggtggtttgattcagttaaatcacgggaagccacagcctcttcaatatgtggccaacgctgcattccttgcttctgtgttcagtgactatcttgaggctgcagatacccctgggtggtattgcggcccccatttctactctattgaggttcttcgcggttttgcaaggactcagattgagtacatcttaggaaagaatcctttgaagatgagctatgtggtagggttcggaaaacattaccccaagcatgttcaccaccggggtgcttcgatccccaaaaacggtgttcactatggctgcaaaggagggtggaagtggagggacaccaagaagccaaaccccaacatcatagttggagctatggtcgctggccccgatcgccatgatggattcaaagatgcccgcaagaactacaactacactgaagcaacgctggcgggcaatgctggtctagtcgcagcattggtagctttgtccggtgaaagccatggggtggacaagaacacgatgttctctgcagtgccgcccatgttcccatcacctccaccgccatcagcaccatggaaaccataatggctgcgagtatctgattcttttgtatactacgtattttagactagagttttctttgttgtaacactactgtggagatctaacaagtgaagatgtagccattgccttgttttggtttctttttcagtgttgtataatcgccgtgctgtgtgctatggactaagttgtgtatgaatctctatgttctactaattcagtgacagattccaaggcaaaaaaaaaaaa

SEQ ID NO: 9457 - DNA, 460 bp, Setaria italica
  Peptide Sequence Number=SeqID_75431
acctgtttgcttgactggattgcttcctctccattagagtggttttgccgcttctgagctttgagggaatatagcctgtgtcttgcctttaattttgtggaatggctgttgggtgcttggggaaaacggggaagaagagacaccaaagggtggatggaatacctttgcttcagcccaaaacactactaaacaggcaaacactacctttggtaagaggaagcttccacctggaccatgcctattgctcagcttgttttccagtatcaggttcctgttgcaactaggagctgattctgctttgttgtacattccattgtgcgtttatccaaacacaaaagatgcattccatcaagtacgaaaaacagtggctgccgggattttaatgacacccttttttgaaggtataggtctgtaggaagactaagaaaattaaactaaaagaaaactttaaaagttaaaa

SEQ ID NO: 9458 - DNA, 507 bp, Setaria italica
  Peptide Sequence Number=SeqID_75432
agtggtgccatatgctcacaacttgccaaggatgccaatgtcgtgaggtcacttgtgggtgatcgaatggctctagtgatccagacagtttctgcagttctcatagcctgcaccatgggtctggtgatagcgtggcgtttggcccttgtcatgatagcagtgcaaccccttatcattgtttgcttttatgcccgtcgtgtcttactgaagagcatgtccaagaaatcaatacaggcacaatctgaaagtagcaagctagcagctgaagctgtatccaatctccgcaccatcactgctttctcatcccaggaacgcatcctacgcctctttgatcaagcacaggatgggccacgcaaggaaagcatcaggcagtcatggtttgcaggactgggcctaggcacctccatgagccttatgacatgcacatgggccctcgatttctggtatggtggcaagctcatggctgagcatcacataactgccaaggcacactacggggaacttagg

SEQ ID NO: 9459 - DNA, 830 bp, Setaria italica
  Peptide Sequence Number=SeqID_75433
taactaattgttacaatgtccacgatcaggatgtcaagccaattcttgcagcaatttctccaacgcatcagaaacaagaggaatccggaggcaatcttggccatcagagtgctttctgatcttaaccaaatcatgatctttaaactctgtcaggtgggagttcaatgtcacttgactgcttacaagaaagcgctcacggcattttgtatacaagctactgacaggcataccttcctccttttcattggccaactgatattcagcaagaactctgaaaacactttgtgcattaggtgtcagactctgcagaacaactagagccgtttttgtggtttgggcgtgaccaccactagcaaggatcaatgggtagaaaacacattcgactttgtaaggtgcaaatgttgggacgtggtaccagctccacttgtactgagtgtgcaccatcttcttgtcccataataaaggggcattaacatggtctgttgatgcaacaacacggacttgtgggcagcaagaaacttgtgctagacactgctgtgattcagcatcacgcaatgcaggtccatcaatattgtgtataagaaggcacacctgatcatccacatcatctgatgtctgtctcttcagaaatgagatgatgtcatcgaatgattgtgaaggaaaaggttgtgataactgggacctcgttcccggttgacggttgcgcttagattttgtttgatcccagaacatttcagctattgttgctatgacctgcttcaagttgatggatggaagatagccattgattacaattacagtaaaatcagtcaacgtagtggaggcgaaat

SEQ ID NO: 9460 - DNA, 268 bp, Setaria italica
  Peptide Sequence Number=SeqID_75434
caaagtggatgcccttttggttaaagtaagtgctatacaagtttgctgacgaaaaggagaaggagatgcacagaggcagagaaacgaaagctatggtcaacatgttatcacagtacaaaaatctgtgtggtacaagaaaggttagcgcacattaccttacacatgatgacactgttgccggtgttgtgaacctggtaaagcagctcaaaattaagagaatcgtcattggttcaaggaacatgtcaaggaaagtgacacttcgccaatg

SEQ ID NO: 9461 - DNA, 569 bp, Setaria italica
  Peptide Sequence Number=SeqID_75435
ggcgattcctaggaataataaggcacaaaaggacgagggcgacgctgataccaataccaataccaataccaacaccatgcggttgatgtaaagtggagcaacacgaaaaaaagggagcaagctaagaaagatggatgaggaagaggttcatatagcggtcgggaagaactcaagaaaggagaaagctaacatactatgggctgctgcgaatttcccgagggccaccatagttcttgtccacgttcactggccctcaaagtggatgcccttcatgggtggtaaagtgctatacaagtttgctgacgaaaaggagaaggagatgcacagaggcagagaaacgaaagctatggtcaacatgttatcacagtacaaaaatctgtgtggtacaagaaaggtttgggtggtgctcaatggcaaacacatctccaccagcaatgatcacctggagcacagtggaaatattggatatggagggagctcagatattttagcatctatacatgagctaggtgaggatctgatggctacatgacaccaccaagtgacctcgcagaagaatctggatgagg

SEQ ID NO: 9462 - DNA, 243 bp, Setaria italica
  misc_feature (199)..(243): n is a, c, g, or t
  Peptide Sequence Number=SeqID_75436
ttggtacagccgctgctttgttggactgttgtatgctgcctcctgaatagaaacgacattcttttcgtttgtttcccagatagataatgtatgcttctttctaggtctcttttttttttgggccagttggtcggaagctatgagaaataaggaaaaccattggcacttgcgtgctatttggtctaaaaaaaaaaaaaannnnnnnnnnnnnnnnnnnnnnnnnnnnnnnnnnnnnnnnnnnnn

SEQ ID NO: 9463 - DNA, 548 bp, Setaria italica
  Peptide Sequence Number=SeqID_75437
caaaggacaagctcaacgccgagaggatcctcccggtcgtgaagaaccagcacctgctcctctgcacgctcctcatcggcaactcgctcgccatggaggcgctgcccatattcctcgacacgctcgtcccgtcctacgtcgccatcctcatctccgtcacgctcatccttgcgttcggcgagatcatgccgcaagccatctgcacgcgctacgggctcagcgtgggggccaaggccgcgccggtggtccggattcttctcatcctcttcttccccgtcgcatacccgatcagcaagttgttggactggctacttggaaagggccatttcgcactaatgagaagagctgagctgaagacgttagttgatatgcacggcaatgaggctggaaaaggtggagagctgactcatgatgaaaccactatcattacaggagctctggagctcactcaaaagattgcaaaagacgccatgacttctatatctgaaacattttcacttgacataaatgctaagctggacctgcatacaatgggtatgataatgact

SEQ ID NO: 9464 - DNA, 1325 bp, Setaria italica
  Peptide Sequence Number=SeqID_75438
taacttaaaggttaaagttaactttaacttaaggttaagtacttactggagctcactcaaaagattgcaaaagacgccatgacttctatatctgaaacattttcacttgacataaatgctaagctggacctgcatacaatgggtatgataatgactagagggcatagtcgtgttcctatatactcggggagtccaagcaatatcattgggcttatattggttaaaaacttgattacttgccgaactgaagatgaagtgcccatacgaaatgttactatcagaaaaattccaagggtgaatgatgatcttcctctctatgacattctaaatgagttccagaaaggtcacagccacatggctgtggtagttaaaagaacaaaggaagcaggagcatccaatggaaagcaaaagagcactactgcagattataaaataaaccccaaagatgctcattctgatggttcatccccttcgtatgttagcactgctggaagtcgtagatataacatagagaagtatggagatgggcgttcatacaataagaaatcagaaaggaagcgggaaaacattcttgattttaacaccgatccacttccaagctattctatggatgaggaagcagttggaataatcacaatggaagatgtcatggaagaattgctacaggaagaaatctacgatgaaacagatgagtatgttgatgtacataacaagatcaggataaacatgttacctccaggcaaatcattgtcaccagctatatctcctggtggtggacccctatctcatgggcttcggaagacccctatggcatctccgctatcaccgtacaaccatggtagttctttcttacgttccccagtttcaaaccatggtcagtcacctgggattttacccacaatactttctcctggaagatcacctgcttcacaaacacctgggcaaagctcaccaaattcgagtcaggattcaagaaattccaacggtaaacataaaaaggatattgagagctaagagcccagaaacgaagaccgttacttctgattaaggtctcatctcaagatggaacgatcggactatgactttgctagtgtaggattaagctgcgaatgttgtagcacagctttcttatatggttattggtccttatttatttattgcttgcctgtatatatatgtgcttcagcatatggacctgagtatggtctaattctgaacatgtattgcagaagtcttcctatggatttcttcttcttttttggttgtcttgtagttacctgggaaaaaaaaacctagtcgttggacttcatatatttaagcaaaaa

SEQ ID NO: 9465 - DNA, 313 bp, Setaria italica
  Peptide Sequence Number=SeqID_75439
agcatgtcacggttcacatgactcatgagactgtactttttttgtaggaaggcatggctacatttctttctttcagtgttcagacacccaattggagaccgacaacccttttgactcgacttattcccaatctgtttgaatacacttcacttgccctaaaccaactctctcttctctcttttctctctcctctctctgaataatatgcacacaaaagaatctgaaaaacatttggtgaacaagaagaagaagaataaggaaaaaaaaagtaaaaaaaactctcacatgcatcctcacatgatgaactgaacta

SEQ ID NO: 9466 - DNA, 285 bp, Setaria italica
  Peptide Sequence Number=SeqID_75440
ttgctcggctctggcgctctgctctgctctcgcgtcgcgtccaccgacccccaccccacccacatggaatgggaaaggaaggtgaggtgaggtgagcggcagccgcgggacctgcgggagacgctgaaaggccaacgagccagccaacccgtcaggagctcgcgcctcccctccgcgtccggctccatggattcgatctcgatccgggcggcgaggagctgaggccggggagggggaggaggagctgcttcttggaccgggaggggcggcagtcgtagcagagca

SEQ ID NO: 9467 - DNA, 331 bp, Setaria italica
  Peptide Sequence Number=SeqID_75441
ggtggatgtggtggggaggtggaggcgggtggtggtcatggtggtgaggcggcggcggaagcgcgggctgggaggatgggggcgagggcgggatcttggcgaggtgcttgttgttgtgcatccacaccttgaggacgcgccgggagacgccgacctgggcgcagaaggcgtcgacagcctcggagtcgggcttgtggatgcgccacccgaggcggtgcgcgaactcgcgcatgcgctccttctggtccgccgtgaacttggtccggaaccgcttcttgctcggcgccgggggagcggaggccgagccccccgacggccagctgcgcgtggg

SEQ ID NO: 9468 - DNA, 267 bp, Setaria italica
  Peptide Sequence Number=SeqID_75442
ttttttttttcggtttttagatctccttttttccatcgttcctaccttctaatagtacatattagtagtccagtacagatcatcatcttactgaaagacggcgagcttttcaccagtaagaacagggaggcgacgctctggcccgcttgcaggcggcgaactccgcgtgcatctgcggcacccaccgctcccggctggcccgctcgtcggtggtgacgacgacgtcggcgagcatctgctcacgccccgtccacggcgtgtaagctt

SEQ ID NO: 9469 - DNA, 749 bp, Setaria italica
  Peptide Sequence Number=SeqID_75443
ataaacctgctgacgatggatacaactggcggaagtatggccagaaggcggttaagggtggggagtatccaaggagttactacaaatgtacccatgcgagttgtccagttaagaaaaaagtggagcgctcaggagaaggacacatcactcaaataatttatagaggtcagcacaaccaccagcgtccaccgaaaaggaggtccaaagatggtggtggtctactaaatgaagcagatgatttccatgagaatgaagatgcttcaactagatcagaaccaggctctcaagatcactctggaaaacatggggggtcaaatgatggcttagcagggccttcagtgtcaaggaggagagaaggagatgaacaattgtcgggctcaagtgatagtgaggaagaggcagatgatgaacagagggtaggtaatggagatgctggtcgtgcaaatgcaaacagaagacatgtgccgactccagctcgaaggataattgtgcaaacaactagtgaggttgatcttttagatgatggttatcgatggcgcaagtatggacagaaagtagtaaaagggaatccacacccgaggagttactacaaatgcacgtaccaagggtgtgacgtgaagaagcatatcgaaaggtcatcacaagacccaaaggctgttataacgacatacgaagggaagcacagccatgatgtgccagcagccaggaacagcagccatgctgctgctgctgctgctaacgctaacgcg

SEQ ID NO: 9470 - DNA, 1058 bp, Setaria italica
  misc_feature (983)..(1058): n is a, c, g, or t
  Peptide Sequence Number=SeqID_75444
agagaagtacattaaaagataaaatttcatgttcaaattcatcaccagggatatgctaaattttggacaaataacaaataaaacaagtatgaggttttgtgactattagaccaaagtagtggtgatgtggtagacatacggccataaagcctgatttgtttatacttgtttactcatgtactagttaacaataacaacgaaacaatcgaaaggtatggcttgaccaatgacagcgaacaactgaaaatgattattaaggccagcttttttatctatttagttatcgattttgtttgataatgcattttttccaacttacctggagtatcaatttgaattctatttacacttgagatatctattctgcttgatgcaggagttactacaaatgcacgtaccaagggtgtgacgtgaagaagcatatcgaaaggtcatcacaagacccaaaggctgttataacgacatacgaagggaagcacagccatgatgtgccagcagccaggaacagcagccatgctgctgctgctgctgctaacgctaacgcgtcatcctccagcagcttaccacacaagggccagaattcagcatccagtagtcgcaaaagagcagacatgtcatcggcttcttctatgctactaaaagaggaaaatgaaataacatagagttttgtagtgtctagcagcctgaattattctgttctctccgttcacttcccaggtgtgctgcctcacgcactgtgctggagcaaattggcattgtaagtcctccatggttttagcgaagagcgagatccttttgtttatgcacttccaagagcttgcacttcctgtttggcagcactgtgttatgttgttatcccattggttgtaaatgccattagtcttacccatggagaactatagtagatgacagctttcacgagccaattgtatattctcgatttggaacttttaaagtcttaactgagatgatttgtagaaatnnnnnnnnnnnnnnnnnnnnnnnnnnnnnnnnnnnnnnnnnnnnnnnnnnnnnnnnnnnnnnnnnnnnnnnnnnnn

SEQ ID NO: 9471 - DNA, 755 bp, Setaria italica
  Peptide Sequence Number=SeqID_75445
cctggtcaaactcagtaatgctcaacataaatgagcttgcattccgatgtcccccaccaccatattcctgagagattaaagtggtgtcttcttgttctaaacttcttaggcttattttcagcatccggtcattattcaactcaggaactttgtatacaacagccccaatacctctcagattcaaattacagcttttgctagctaactgatgtccaagttcgcttctcaagtttgaaatagcatcagcatcaacagccagacaattaccaaaccggccacatcccagtgaaatttcataggacttccccaggcaattgtctattaatctttgcttctctaacaatgtcacgtgtccgcgggaaatgacatgctcgggatccaactccagcaactgatcaaacaatttactgtttgcattgacgttgaattcaatatccaaatctttgagtccactgctgaaggccttgctatttggaattttccatctccacaaatccccatcttcaataaacttgaaaagtttgtgcactgtttcaaccttgttgtcaggtacatatttgatctcagctacatctttaccacttccactgccccctgagatgctagcttctgtcaagagcttgtttttaaagaagtcaaatgcaattgtcgctccactacgctgcatgtctatcaccttggtcacattttgcccaagtgtgggattcccacacaaactctcaaaagcagtcttatgatggtctagaattgttact

SEQ ID NO: 9472 - DNA, 333 bp, Setaria italica
  Peptide Sequence Number=SeqID_75446
cacacacacacacagcgagagcgagcccccaagagaaggaaaaaaaacgacattccacaacacgcggctgcgcggcgagggaggcggaggcgacggcgccgccaccctccgtgactggaggggtcccggcggtgaggaggcgtacgcggagggtctcgggttccggagcgggggagctacgctgcgagtagagcggcgggctcgcgctgccctgtcactcgatggcggccagcggcgagggcggcggggatccggcggcggcgcgccggcggtgggatctcaccaacaaggggcccgaaagcgctccaatcgtgaaagaggctgtggaaattt

SEQ ID NO: 9473 - DNA, 819 bp, Setaria italica
  misc_feature (798)..(819): n is a, c, g, or t
  Peptide Sequence Number=SeqID_75447
accaagacttacttccacgtcgagtttcggcagagtggagctaggacaccacagtgcactatgcttggtgccttaactaagcctagtgatgagtctgtattgaagaagctttccactaggtggcaaaagaaatttggggaagatattgatcaagatcttctgtatttaatatctgttgatcgggtcttgcacacggaggatttcaatgaggatggcatgtgggtagttccatccgagtacaccagtgcagaacctgatcctctacgcaactttgctgaaaaccttgtggaggaatttaacagcacaagtgccgaagacgtccataggatatacagcatatatgtcgaatcagatttgcaggtggaagatgtcaagatgatatgggttgataggctaggtttcgacttgcatgttcattctggggaaggtgtctttgctgttcggatccctttttcaagggaggtctctgacgagaagggggtgaaatcatcgttcaacatgatgtctcatcatgcatgggaggtagagaagagctatgccagtccagagtttgagaagatacagttcttgaagaaggtcagataggcagtgagttttatttccatggttgattattttgtcattcagatgagtatagtgcgaggtttggttcctcttaacatgtgtcttgtgtgtatcttgttcattttttgtatcacatgtatatttgatgcaattggcatcatgaattatgtgctagcaatgtatttgataagagcaatgaattttgaccataaggttagcaagaataatctggannnnnnnnnnnnnnnnnnnnnn

SEQ ID NO: 9474 - DNA, 390 bp, Setaria italica
  Peptide Sequence Number=SeqID_75448
ttagttcgggttaccgttcctttgttaacccctttggttcttagttcgtcgtccttacttacgtccgtcgtcttccggggtcagtcggctggcccggggaggcggagctgtacgagacccccggcgagggccacgtctacttcctcaccaagctcgggtcgccgcaggcgctcgcggagatggccaagctcgtcgacttcattaatcgcgactagcactagcagccggggagatggagtcgctgctgcggcaactcattaaccgcagtaacggacgacgagacaagaaaagacaataacgaaataacaaagtaaataaactaaacaaactaaagtaaagaacaaagtaaaactaaagaacgaaaggaaagtaaagggaaaggtaaagaaa

SEQ ID NO: 9475 - DNA, 272 bp, Setaria italica
  Peptide Sequence Number=SeqID_75449
cggcggcgggggagggggccagcccggggatggggatggggatggggatgggcggcgccggcggggtgctcccgtcccagtcgcccttctcgtccctcgtctcgccgcgcacgcagtacgggagcggcttgctggcgggtgcgtccaatgtcgcgtcgctgctcagccgccagcagtcctatgggaatggggggattggggcaatgcctggtgccggagccggccttcccatgggtggcctgcaccagcagcagcagcagcagcagcgaggg

SEQ ID NO: 9476 - DNA, 686 bp, Setaria italica
  Peptide Sequence Number=SeqID_75450
aagaaataagaaagaaaataagggaaactaagtaaaacaaaaaagggtagttagaaggtaccaatagaccaatgaggctgcgagctgaggctgaaactgacagtttggagaggaaacactctgaggttattgttgaggcttgcaaaagcggggtgctgacagcacatgcttgcaatggtgaggaaggcaatggattggttaaggtgaatgtgagcaatgtctcggaagagtcagctcgtcctgaaaataatatggaaatgtctggtctttccgcgacagaatttgcccaaggtcatggcttaggcactcaaggtaacattgcagaatctgacgataagagaatcaagtcatatgagaacatttctgctgtaactcacgaggtgcagaatgagtctagagctggaacaatcagtttgagtgttgatgagtcccaagctaatgaggtgatccatgggccttgccagggtgaggtcatagacttagttgctgcaaatgatgatagcaagagcacatgtttaagaagcaccagcccaaacagtggattagaatctgttgagcatgaggatacagtggtttgtaccgatggagtggtacctcacagtggagatcagaaagttgagaagcattctcacaatgacaatttatgtacagaaactgagatttctttgactgagaatggaagatgc

SEQ ID NO: 9477 - DNA, 185 bp, Setaria italica
  Peptide Sequence Number=SeqID_75451
ataaaggagttacaaaaagaaagagaacaaaagctcactcagagccttaaggaccgacttcaaccgtatgtagatgggagaaaggatgaatttgtgagctgggcgagtgcagaagcacggcgtttatcccaagcagcattaacctgcgatttaatgtggtggcctttgtccctaacccactcagc

SEQ ID NO: 9478 - DNA, 398 bp, Setaria italica
  Peptide Sequence Number=SeqID_75452
ttctagaaggcccgaccgaccctggtacggaacctctcctctccttcccggcggaatcgccgagcccttcttccaggttgatttgcgccaattccccccgttacccgctagcgctaattgttcgctggtgccgcaaaatttcaagatttggagatttgaaatctctctgtagcttcggagctgccgccggcgagatcccgccatggtgaaggaaagcgcctactacgacgtcctcggggtcagcgtcgacgcgtcccccgccgagatcaagaaggcgtactacctcaaggcgaagctggtgcatccggataagaatcctgggaaccccgatgccgcacagaaatttcaggaacttggggaggcttatcaagtcctaagtgatcctgggaaaaaggaga

SEQ ID NO: 9479 - DNA, 1407 bp, Setaria italica
  Peptide Sequence Number=SeqID_75453
ccctcccctccccttccctcccagggcgacgatctcgaccgcatcccacttggcttcctgttctccacttcacccggaaccttctagaaggcccgaccgaccctgatttggagatttgaaatctctctgtagcttcggagctgccgccggcgagatcccgccatggtgaaggaaagcgcctactacgacgtcctcggggtcagcgtcgacgcgtcccccgccgagatcaagaaggcgtactacctcaaggcgaagctggtgcatccggataagaatcctgggaaccccgatgccgcacagaaatttcaggaacttggggaggcttatcaagtcctaagtgatcctgggaaaaaggaggcttatgataagtacgggaaggagggtattccccaggataacatgatagatcctgctgctgtctttgggatgctttttgggagcgactactttgaagattatgttggccagcttgccctagcatctatagcttcagtggagattgaggaaaacgcaaacagtcaagaggcaagagcaaaggttcaagaaaagataaaggagttacaaaaagaaagagaacaaaagctcactcagagccttaaggaccgacttcaaccgtatgtagatgggagaaaggatgaatttgtgagctgggcgagtgcagaagcacggcgtttatcccaagcagcatttggtgaggctatgcttcacactattgggtacatttatgtgcggcaagcagcaagagaacttggaaagagtcgaatttacatgggtgtaccgttcatagctgagtgggttagggacaaaggccaccacattaaatcgcaggttaatgctgcttcaggtgctatctctctgatacaactccaagaaggaatgaaaaagatggagggaagtgaggacaatgaagagcagcttatgaaaagttttgaggagaaaaaagaggccatgcttggttcactatggaagattaatgtggttgatattgagtcgacactttcacatgtctgccaagcggttctgaaagataacacagtctccaaagatgttctgaagttgagagccaaagccttgaaaaagcttgggacgatattccagggtgcaaagtctctgtaccgtcgtgaaaacagcctgcgggtcgaaacgagcacagatcagcaagcaacgccatcgcagtgaagcccatagaccaccgtttaacaagagatttggtgatttgttgtggttttcacctctctctttctctctcctgtcacagttttcattaattttctgtagaaaaatgtgagtggtgaacatcatgctgcggactgcggttttgatgcagcgttataacttgtagcaacgttttcttttggaatgatactagcattgtactagctgtttgctaagaaaaaaaaaaaaaaa

SEQ ID NO: 9480 - DNA, 383 bp, Setaria italica
  Peptide Sequence Number=SeqID_75454
gtataggcatggcagccatcccatcaaagaggtggaaatggctcaccagccaccaactggtccctagcatgccatgaagtagaagataatgatccactacagggtgcgcttggtagagctctgctaagcagtttttcagagagaaatgattatttgctgattctatgaggtgattctctgaaatgaactaagaggctgggagttgaaaaaaactgcttctcttgattctgtgaagtaattctccatcttgattttaagagtttatgttagagaataaaagagaatcactttcagctacagatgcacttctcttatataatcagctcccatagagaatcagaatcagatggagctctaccaaacagacctccgcccctactact

SEQ ID NO: 9481 - DNA, 365 bp, Setaria italica
  Peptide Sequence Number=SeqID_75455
gagggaacgccccgttttgtcacgcacctaactgagaggttcatggtgcagtgggggaggggggaggagcagtagggcctcggttcctcctccgcggcggggaaatggcaaaggtgcctgatctcggctccgacttcgcccagaagctgctcaaggacctccgccgccgccgggagcgcctcgggttcgagtcggcgccgccgccggcgcagcggggaactgcgaacaccgctgcgcctcgggatgcctattcaaattctcggaaaccaattcaatttcagaagccacaacaagcagctccggctcctcgtgtaggaagatcagaagctgcaacaaacagattataccggcaaggcaacacaggg

SEQ ID NO: 9482 - DNA, 197 bp, Setaria italica
  Peptide Sequence Number=SeqID_75456
cgaaggaggcggtgccaagaacggcatcggcacgctcgggatggacggcatcggcggcagcgtaaccttggggacgacgggcatcggcggcaaggtaaccttaggtacggtgggcatcggcggcagcgtcaccttcggcgcggggacggtaggcaccgcgggcatgggtggcaaggtcgccgccgggaccgccggca

SEQ ID NO: 9483 - DNA, 741 bp, Setaria italica
  misc_feature (730)..(730): n is a, c, g, or t
  Peptide Sequence Number=SeqID_75457
tttattttttgcttttgcaggggcaaaattcagtgtaagattgcaaagaagatatgagtacttccattatacaatgatgaaacacaatgtcaccaaattgaatccatatacaacacgagaatcctgatcactctgtacacgtacaaagtaatcaatgacaaaacctgagacctctccaactaatacatatacaatagaaattaaacacacaaatcaaatggaagccaagaaagaaactccaacaaatctgttcatgaaaatacagcaaatactcgatcgaacgaacgactcaacaatcagacatgggaaattgacagaggacactcagcgtcgccacacatgcactgcgcgcatgcttgattacgccgaaggaggcggcgccaagaacggcatcggcacggcgctggggatggagggcatcggcggcagcgtcaccttcggcacggcaggtatcggcggcaaggtaaccttggggacggcaggcatcggcggcatgggtggcaatgccgcgttcggcacggtgggcaccgcgggcatcggcggcagggtcgccgcggggacagctggcacagtgggcatcggtggcacggtgaccgcggggaccgtcggtaccgcgggaatgggtggcatgcctgccgccgcgggcatcgtcggcacggcgggcatcggtggcagggcggccgcgggcacggtgggcaccggcggcttcggaatcgcagggatgcccggnacgggggcggg

SEQ ID NO: 9484 - DNA, 551 bp, Setaria italica
  Peptide Sequence Number=SeqID_75458
ctgatgagccgccgcccctcttcgccgccgccggcggcggcgctcctgccggataacgacgacatcctccgggagatcctgctccgccttccgccgctgccgtcctccctcccccgcgcctccctcgtctgcaagcactggcgccgcctcctctccgacccccgattcctccgccgcttccgcgcgttccaccgccggaatcccccgctcctcggcatcttcaacacagctttctacggcctcctccagttcaccccgacgctggacccgcccgaccgcatcccctccgcacgcctctccctgcaggtggggcacggcgacgagatctgggacttcttgggctgccgccacggcctcgccctcatcctcaaccagacgcgcctcgagctcaccgtctgggatccccttgccggagaccagcgccgcgtgcccgtcccgccggggtggttccgcaacgaaggcgctgtttacaacgccgcgctgatctgcaacaaccacctcgcgggcggggtgccaactcgaaagccttcaaaggtggtgttgttaacgtg

SEQ ID NO: 9485 - DNA, 562 bp, Setaria italica
  Peptide Sequence Number=SeqID_75459
ccaccggcctctaggcactaacatcttccgcgacgggcagatgtttggtcggcatgttgagaaagagaggatcatcaactttctgttgcacaagggtgatcagtcaacaggggaattgggtttgctacctattgttggccgcaatggagttgggaagacaaccctggtgcaacacgcctgcgatgatgccagagtgcgcaaccacttcccggtggtcttgttgtacaatttctcctgtacttatgacgttaaaaagagtgaaggaacgccgaatgacccactggtgtatgtcaagaggaatagtttttgtgacaagaggtgcctgatagtatttgaggaagtagatgtgcacaggaagcaaatactggatgggttcctgcaaagcctgagatgtggcaaggagagcaaggtaatcatcacgacaaacagtcagcgtgttgcaaacattggaacagtggagccaatcctactaacagcattgcccagccatgcgtactggttcttcttcaaggcgcatgcattcgcaggcagagacatcgaggataacccaaggctgatggct

SEQ ID NO: 9486 - DNA, 1208 bp, Setaria italica
  Peptide Sequence Number=SeqID_75460
tcggtcatcctgaaagctttggagacccccaccaatggcggcaagtgcaaagcccagttccccatgatcctccgcttccccgacgtgctcaagaaccgcctcgactcgctccacgccgcgttcaagggcgccatcgacagcttggggtacacgtccaggtaccagggcgtgttcccgatcaaggtgaaccagaacaaggccgtggtgcaggacctggtcgccttcggctacgacgagagctacgggctcgaggccggctccaagcccgaactgctcatcgcaatcagctgcctcaccaaagccaagcccggagcttacttggtctgcaacggctacaaggacgcggactacatcgcgctcgcgctctcggcgcgcgccatgggcctgaacaccatcatcgtgctggagatggaggaggagctcgacatcgtcatcgaccagtacgagaagctcaagctcaagctcggcgacaaagttgatttcgagccggtcatcggcgtccgcgccaagctcctcaccaagataccaggccactacgggtcgacggccggcaagcacggcaagttcgggctgctcgccgagaggatctacgccgtggccaagaagctcaaggagggcggcaggctgcactggctcaagctgctgcacttccacgtcggctccatgatcccgacgacggacatcgtgtacaacgcggcgagcgaggccgccggcatctactgcgagctggtgaacacgtggggcgccgagatgaccacgctggactgcggcggcgggctcggagtcgactacgacgggacccgctccggcagctccgacatgtcggtggcgtacgggatcgagcagtacgcgtccagcatcgtgcaggcggtgcggctcaagtgcgcgtaccagggcgtcgcgcacccggtcctgtgcaccgagagcggccgcgccatggcgtcgcaccactccatgatcatccttgaggcgctgtcggcgatccaagagccgcaggacgaggacacctccgagcagctgctgagcaagatccaggacctctcctcgaagcaccccggcagggccacggcggctaacggcggcggggcgttcgaaggcatatactcccacgccgcggagctcaagaagcacggcatcgagatgtacaagctgggcaagaagctgagcaagagaatcgtcggcgacgccaaccccatctacaactacca

SEQ ID NO: 9487 - DNA, 592 bp, Setaria italica
  Peptide Sequence Number=SeqID_75461
ttggcgtacgttattgtgaatcctgcagcttgaccatcaaggtgccacgccctccggtcttcagcaatggagaagttgaaggatcttatccatgcatgtgtgcccgagaagggtacggtgaggtcatggtctccgctgcaaggctcaaataatggtgacatacacataagaaattaagaatgatcctactgaatcactagcttatgttttcacctgtacacaagagcgcggtatcccctggtggtcagtttgaaatggtatcctacgctgcttggcagatcaaacgtgtaaggaagttctcctttaggtttgcaccttatccactccttcactgttccctaccttgatcccgagagctgctctggtggcattgtcgttagcccaaatgtacgacgggttgtagcggtacttaatacaaccaaaaggaggttcttcaggtgggccatcactaagttcatagtgttcctctgctagagactttcttcttagggcatctctccttggtttgggtgaagcagaggggcatactgggtccaatatgccttcattatcaacttctgacatgagatcagtaatagtttgcacaacacca

SEQ ID NO: 9488 - DNA, 692 bp, Setaria italica
  Peptide Sequence Number=SeqID_75462
ttgtgggcttgtatggcattccttgcttcatccgaattcaaatcgagatgcaacccagtaggcacatcagagaggctcattggtcagccaccttttcgcagcaacaaagcattctttaggcctgttgtctgaaacaatatggcgaccaccctttattgttgcaaaggttagattgttggcgtacgttattgtgaatcctgcagcttgaccatcaaggtgccacgccctccggtcttcagcaatggagaagttgaaggatcttatccatgcatgtgtgcccgagaagggtacggtgaggtcatggtctccgctgtacacaagagcgcggtatcccctggtggtcagtttgaaatggtatcctacgctgcttggcagatcaaacgtgtaaggaagttctcctttaggtttgcaccttatccactccttcactgttccctaacattaccccttgatcccgagagctgctctggtggcattgtcgttagcccaaatgtacgacgggttgtagcggtacttaatacaaccaaaaggaggttcttcaggtgggccatcactaagttcatagtgttcctctgctagagactttcttcttagggcatctctccttggtttgggtgaagcagaggggcatactgggtccaatatgccttcattatcaacttctgacatgagatcagtaatagtttgcacaa

SEQ ID NO: 9489 - DNA, 874 bp, Setaria italica
  Peptide Sequence Number=SeqID_75463
aagtgaaaaaatatcttctaaaagaaatgttttaatccggaaataactatcaacattactggctctccatgtattcggtactgaaatgaaaacaaagataagcatttaaagctttaggccttcaaatacggttacaagaaatacggttactcccaagttcagagatttcttccatacagcaccatgacaagcaactatagccttctattgggttcatgatttggcatagagttaactcacaaataatagtggcaggtttataaatgaaacagtgtacagattcaatatcctactgactaggaaattgcaaggctcaagaaacagagcataatgctgaaataataacatagatcaacaaatgatatcccccctccctgctctgcaatgatatgtgttataagctaaacaagataaataactgtgttctgactacaaagctacattctcaaaagaataaaacaatccacaaatagcaactgctgggaagaaatggcatcatgtaagttttcaatgcatcaggataacttcctaagataaacagcatgatattctgacattattaagccccccatataccagttacaaataaacatcttgaggcaaactgttatcttttttaccatataatcagcgtaacttcctaatttagttgctactacagtcatgacattagcagagaaccactatgaatagcataataagaaatcataagttcaccataaattattagaagttttgctatttatctgtggacagattttagaagaaaatctgtcgaattttttgatgttgtaaatgtcgtcatttgatgttgcaaacattattctttgatatttcaaaatatttcatgattttaggggaggaaatgtggcag

SEQ ID NO: 9490 - DNA, 471 bp, Setaria italica
  Peptide Sequence Number=SeqID_75464
ataccaaatcaagtcaaaattgttcatgactgcaagcaccagcagcaaagaaacattgggaaacacacatctgaaagaaaaatatcctagctccacaaattggccaatagttataggtatatatcaggaatcgactatcatattttgataattaacaacaatcatggcagatttttctctttcttggatactattattgaatccactagcaattcctacaaccaatccctcccacacatagtctcatgtacctggattcaccatggcaattccaattgtgagttaccaaaacaatctctaccctccagttacccctaaattaagctttagcttctacctctttcaacccatggctctctcttaccagcagtgcaagcccatcctttaactcccctttcttctccttcactgtggcggcagccttctccacctcttgcttgcggtacatccaggcctccgagggaggcgttg

SEQ ID NO: 9491 - DNA, 491 bp, Setaria italica
  Peptide Sequence Number=SeqID_75465
tttgctgcgatgagaaaacaacccaagaagggtacaggtcaggtgggagtaacttccgcgaatcgtcgatcgtcatttttgaaaaactagcaatagtggcagccagctgtcggcggcgtgcggcgcgggagttctcggagtgggcgaagccgacgatgatggcgacgcccgccgcgacccccagcagcatcccgacccagaaccccattccgctccctctccccctcctccggcctccgctagccgacgaacgcgcgcatccgggggcaggcagcaggctctccgcggagacacgcggagctaccgaaccgcaggcggggcgcgccctggggcaggtgggcaagcaatgccggcgcgcgacgggaggaggaggaggagcacggccgcggccggattacaagtggaggttcgctggtccagtacgagtttgaaaaagaacaggggagcggagatgcggagacaggcaagcgagcggaaatcgtgaggggaga

SEQ ID NO: 9492 - DNA, 452 bp, Setaria italica
  Peptide Sequence Number=SeqID_75466
gtcagaaagagttttatttttccttatagctatcacaggctctccttacaaactttctggaaacaagttcatggctacaaagtttttcagatctcccccatcgatgaacttctcaagagctcagtctcccccaagattgaaaacatgaactacataccttcttttttgcacatcatacccatatatagagccatatctacctagttagcccccttcatgagttcattcatgttcatggtgcaaactccatagtttacatgacaagctccagttatcttttggttcagttctttgcagatctgcccaagacacggccatgcaaaagcacagccatgttcttgtttgcagatccttgttctttttttatgtgtgaccccagggagccaagaacatgactctccttatgggatcctcggcggccgagccgcggcagtcggcgccacggctctaga

SEQ ID NO: 9493 - DNA, 204 bp, Setaria italica
  Peptide Sequence Number=SeqID_75467
ggaccgcgtagttcaacctctacctctgtttgcttcatactaaggttttcaacaacaatcgctaatctccttggtgtcccataagagtgcacttctccatggctcaatctacgtctcttcaaggtatgtggagccaagtataagaccagatgatagccgctacggagacaatcccaataggcttcaacgccatactcagtttca

SEQ ID NO: 9494 - DNA, 401 bp, Setaria italica
  Peptide Sequence Number=SeqID_75468
aatgagtgcgtattatttagagcatgcggatgtcgatcgcattcaaaacaacttcgacgattttgaagaagaggctcgctccttgatatcactggggctgccaattccggcgtacgatcaggttctgaaggcctctcacgctttcaatattttagactctagaggttttgttggtgtaactgagcgtgcaagatattttggtcgcatgcgaagtcttgctcgtcaatgtgctcagcttttactgtgcttcctcatctgttatctacttaacctggaaacttgctgcctctctgttcctagttgagaaactgctcttccgtgcctatcatttccagttattaggggatatctgtatagctgtattcaactaatttagttatatatctccgttagaataacaa

SEQ ID NO: 9495 - DNA, 1011 bp, Setaria italica
  Peptide Sequence Number=SeqID_75469
gggcatgctcattcccattccaccatggctcctccgccttccctccactccccgtcgtcgcttgccgccaccaggcgctgctaacgccctccgcctttcctcctccaagccccgcccgcttctctactcgccaccgccgacgccctcgcctccctctatcttctgctcctgccgccgcagacggcgacgcctcctccgctgtgtccgccgccaaccaatggggatcccccacctcctccgtcctcactttccagcaggccatccagcgcctccaggagtattgggcctccgtaggatgcgctgtcatgcagtgtagcaacaccgaggttggagcgggcaccatgaatcctttgacgtttcttagggtcttaggtcctgagccgtggaacgtcgcgtattaccagccaagtataagaccagatgatagccgctacggagacaatcccaataggcttcaacgccatactcagtttcaggtaattttgaagcctgatcctggaaattcgcaagatctcttcctgcacagcctttcagcaataggtattaatgtccgtgaacatgacatccgttttgttgaagacaactgggagagtccggttcttggtgcttggggactgggctgggaggtttggatggatggcatggaaatcacacagttcacatattttcagcagtcaggaagccttccgttgcagccagtttctgttgaaataacatatggacttgaacgtatcctcatgtcacttcagatgttgtgacagggagttgatcatttcaagaatatacaatacactgaaggcattacatatggagaactattccttgagaatgagaaggagatgagtgcgtattatttagagcatgcggatgtcgatcgcattcaaaacaacttcgacgattttgaagaagaggctcgctccttgatatcactggggctgccaattccggctcttgctcgtcaatgtgctcagctttaggtggaaactcgaagaaaaccttgggcatccgttg

SEQ ID NO: 9496 - DNA, 481 bp, Setaria italica
  Peptide Sequence Number=SeqID_75470
cgacaaaatccctcagcggccttagtggggtttccatcttggtcaaatgccttcgcaactggtggaccgcgtagttcaacctctacctctgtttgcttcatactaaggttttcaacaacaatcgctaatctccttggtgtcccataagagtgcacttctccatggctcaatctacgtttctccaatgtattaactacagatttctcaagctgtttggttgcttctacgacatcacggggtggcaactcttctgttcctatttcaagaacaaatgcccgtggctgccctgtcactccctctctattaggcttttcagagacatgaggatagataaggttagcctcttcataagtacccaacggatgcccaaggttttctcgagtttccacccaaagctgagcacattgacgagcaagacttcgcatgcgaccaaaatatcttgcacgctcagttacaccaaacaaaacctactaagaagtac

SEQ ID NO: 9497 - DNA, 318 bp, Setaria italica
  Peptide Sequence Number=SeqID_75471
acctaagttgaggaatgtgtttcagggcttagttttgtcaccgatgggtttatagactattcctgtttcgagaaagcaacattgctcaacttaggtgcgaggagcagcagcaggggcaccaggtggtggtgcaccaccgcctgggcggggtgcgccttggcctggcctcgggccgtcatccctgcgcctgaaccgctgcggaggctcacggttcctcctgttctcacgagagcgaacacggacaatgtgtgcatggattgcgcatgagacacattgttgagcaggctgctgtgagagatgtgcaggaggggcaccacc

SEQ ID NO: 9498 - DNA, 777 bp, Setaria italica
  misc_feature (1)..(64): n is a, c, g, or t
  Peptide Sequence Number=SeqID_75472
nnnnnnnnnnnnnnnnnnnnnnnnnnnnnnnnnnnnnnnnnnnnnnnnnnnnnnnnnnnnnnnnttttttttttaatttaatgcgagaaaactgatcggaaggcatgatatcgcaatatatcagtgtaatacagagaaacacaatggacatggaccgtacgaggagacaaaaatattgtgctcaacaaattaacattaaccagatacagcaatgttgctttctcgaaacaggaatagtctataaacccatcggtgacaaaactaagccctgaaacacattcctcaacttaggtgcgaggagcagcagcaggggcagcagccggaggggcaccaccacctggggcggggtgcgccttggcctggcctcgggccgtcatccctgcgcctgaaccgctgcggaggctcacggttcctcctgttctcacgagagcgaacacggacaatgtgtgcatggattgcgcatgagacacagtgatgaacctttgcgtacagcttggggagaacatatccatcatgcacacaagcctcctgcacatctctcacagcagcctgctcaacaatgttcctcaccaagaaccgcttgatagccttatccttggggcagcacttggcgcagttagagcagcggatgtacttgacgtggccacgcccgtgcttgttgcgcccgccattcctccgcttgaacgtcatggctggaggagctcgaagccgccgccggggagggctagggttcgctgagtgatgcgtcggcggcggcgcgtgcgggtgtggtagtag

SEQ ID NO: 9499 - DNA, 309 bp, Setaria italica
  Peptide Sequence Number=SeqID_75473
atcggtcaggaaagtgaaccagcggcccacgagactccggcgcccacccgacctcgccacctcggaaccctagccgccccgcccatggagatcgccgtcgaccggcgccgatagcgggacgcaagggaggacgttccgtgaccctgtgaatcgctccgcccgaggcgtgtggcgcggaaagggaaggagaggggaaggagaggagggggagagtccggcggggcgcgatgtcggtgcggatcaaggcggtggtggaccggttcgtgaaggagctgcaggaggcgctggacgcggacatccaggaccgca

SEQ ID NO: 9500 - DNA, 531 bp, Setaria italica
  Peptide Sequence Number=SeqID_75474
ctaggcagtcacctgtgaagacacgagggggcacaactgcagcagcttgtaggatagatggcgatggagaagggctggaaggcgagggacgtcgctggtgccttcagcatggaggcggtggacgaggaggacgacgcggtggcggtgataccgccgccgcagacgccgctggagcccatggagtacctgtcccgatcgtggagcgtatccgcgtcagagatctcgaagattctcgtcggtgggggcaagaagagcagcggcgttgcggcggcggggagccggctgccggagatgaccataccggaggactccgtgctcgccacgtccatcgttcctctcccgtgtcatcaacagcatagggatgcaagaaggaattccatgagcagcggccaccaccagtcgatcggcagatggttccaagtccaccacagggagacgtgccgggtgaagcagaggggcaaggagaagcagcgcgccgagaaggcccacgtgcacgccatggtgtccgttgcccgggtcgccgctgcggtg

SEQ ID NO: 9501 - DNA, 709 bp, Setaria italica
  Peptide Sequence Number=SeqID_75475
cccgctacctcaatcgcaccctcgtccttgatctcaccctctgcctcgctgcctcctacgccgcagcgggcacgggaggaatgcccgaggagggcaagcgccttgccttctatgtcgacgtcgaccacctccactcccaggtccccatcattgagcagagccagttctgggcggactgggacaggtggggagtgcagggccagctccgggcgcgcctcgttgaggacacgaggctcgtacctgtcaagttgtccaaggttagggacaccctcatcatcaggaaattcggggacgtggagccagggaactactggtacaatgtctgcgacggtgaggccaagggcgtgctccacccaatgcggtgggcgacacgctgggcaccgagcttgatgcacattgttgatgatattgtttcaaggatgcaaccagactttgattcagtccatattgatgccaatggtgaggaccttagacggagggttgaggaaggtcttgatgcggggcggcaggtgtatgtcgcaggggagggggtcaccagtgtgctggtggagacgctcaaggcaaagcacgctgtgcatcacctggatgagtttgaggacctgtgggggacagacagcaagtggttcttggagatgaggaggctcaatggtggggttcctgtaggaagtttagaattaagggttaaactaaaattaaagttaaacgtaaa

SEQ ID NO: 9502 - DNA, 1055 bp, Setaria italica
  Peptide Sequence Number=SeqID_75476
gtcttcccaaaccacacagaagccgcacgcccgccggccacacacagtagagctctcgcgttggttccgctcgtctccccatggcgagaccgtcgtcgccgcgcctcctctcctccttcctcggcgaccgcctcacgctctccgccaggccgctcctccttcgctccgctgccccaggcagcaggcgggtggcgtatcaggcgacgagaacgctatgcaacttagtggatatcttcttcaacaggagaagtcgtgatgatacaccggaaaacaaccctagacgcctacgtcctgggaaagtatctccacgcctaagtgttcccgatcatatacaacagcctccatatgtcaattctcgtcaaagacctggtgtaaataatggacctgaaatacatgatgagaaagggattgagtgcatgagagcttctggaaagcttgctgcacaggttttgaagtttgctgggactcttgtaaagccaggcataacaactgatgagattgataaagcggtgcaccaaatgataatcgataatggagcatatccttcaccacttggttattgcggatacccaaagagtgtctgcacttcagtgaatgaatgcatctgtcatgggataccagattctcgtccacttgaggatggcgatatcatcaatattgatgttactgtctacctcaatggctaccatggtgatacatccgctacatttctctgtggcgatgttgatgatgaagctaagaaattagttcaggtgacaaaagaatgtcttgacaaggctatatcaatctgtgctcctggggtggagatcaaacgaattggtagaactatacaggatcatgcagataaattcaagtttggtatagtccggcattttgttggccacggggtaggaaaagtgtttcatgctgagcctgttgtgcttcatttcagaaacaatgaatggggtcgtatgatgttgaatcaaacatttactatagagcccatgctaaccttggggagcataaatcctgtcatgtggtccgatgactggacagcagtgacggaagatggcagc

SEQ ID NO: 9503 - DNA, 1223 bp, Setaria italica
  misc_feature (1172)..(1223): n is a, c, g, or t
  Peptide Sequence Number=SeqID_75477
tctttctccgctcacgacttcaacacctccctccttcccctctctctctgccttgcgtcttgcgaccacagggcgagcgccgccgccttagccaggtcgtcgggcgcttcgccggcgaccagtatccgccagttcctagacctagaaagggagaacttcctggatacagctgttgccctgcacgagtaacagatggcgaggataaagcccaagcaattgctcattcaaagcaagacgaagaaggctccatctcgaatcagttactctactatcgtcacatggaacctgattgtcgtcttggttgtgctatctctctatgccacttacaggcattggcatgaaagatcagcccaagacattgaaatggatcttcatcaagctgagcttgctgtgcgaccagatgattcaaaaatgacaagtagaccgggatatgcagttatgaacactggcaaaggtccaattactatagaaatatacaaagatgcttctgctgatgttgtgaatagatttatcaacttgtgcaagagtaatcacttcaaaggaatgccattccgccatatcataaaaaattttgtaattcaaggtggtgattttgattttgatggagctgcccaagaatggataacaaaagcgaaagccagtgggaaaaatgatctcagtccaaagcacgaagcatttatgattgggactgctaagaatcctaatagcaaaggatttgatttgtttatcacgactgccccaattcctgatttgaatgacaagcttgttgtatttgggcgagtcatcaagggagaggatattgttcaggagattgaagaagtcgacaccgatgagcattatcagccaaagacccccataggcatcatgaacatcatactaaaacaggagccatgagcagatccttcctgtcaggcgcatgtacatgaaaagcttaactacctgcctcactgctctctgtagtatactagtatgaaaaggtccatacgtctcattgagttgctgttgtatcgatgacgtgaatgcggatgggatccttcctttggacgcccatgcgtcattcctttggacgcccatgcgttgcagattgtgacggactgtgcaatgaattcgtgcggtatttgtgtataaatattcgcccttgcgggttttggggctctcaaaaaaaaaaaaannnnnnnnnnnnnnnnnnnnnnnnnnnnnnnnnnnnnnnnnnnnnnnnnnnn

SEQ ID NO: 9504 - DNA, 1120 bp, Setaria italica
  misc_feature (1060)..(1120): n is a, c, g, or t
  Peptide Sequence Number=SeqID_75478
gctggggaatggagagaggtcttgggctgtgcccagatgctagctactcaggggttgatgcaggggatgctctatctccgataagagttcagtctcctgaaacaaatgggtttaattttcttggtccagtgcagatcgcctgtggagctgcccacactgttcttgttgctggtgatgggtataggatgtgggcatggggcagaggccgcagtggtgtgcttgggagaggccagactgctgacagctacataccatgtgttgtgatgtggcctcctcttggcgagaacttccaggagattcatgaggaccgaacagaggcatcaacgtcaagagtgactgatcgcactagcactgagttggagcagaagctatctgctgccacagaggagttacagttcctaaggtcaaaactgacactcatggagagatatgccaacatactccacatctcaatcttccgtaagccgcttgatgaacgtacgctaccgcgttcacttcaggaatctcccgtctttgatatcagaaaggaatttgagaatatattggatgcagcagacactgatgaactcaatcgtttggagatcttctaccgcagcatgctttctggcgtgaaagacaagcttctgaagcgaagagtccaagagatggtccaacaatgcattatctcactctcagcagggaggcaaaaccccctcaagatcagtgaattgtatggctatacttacaaaactgcaagttactacagtatcaccacatttggtgtcatcagaattgcaataatagctgtttaacttaacccactgtttcgtctgtttcttcgtgtatatatagcgaggcactaaatctatcctggcatcaagatcatcacctggtcgaccattagactaaaacagctgactgacatgtaaacgcgttacacatatgttgtttatgatgtcctttatatgataaatgcatcctgcataaattgaatcatttgtaaagggtctcgctatggattgatgtagacgagcaagatcatatggttaaagtgttgagatttgcaaaaaaaaaaaaaaannnnnnnnnnnnnnnnnnnnnnnnnnnnnnnnnnnnnnnnnnnnnnnnnnnnnnnnnnnnn

SEQ ID NO: 9505 - DNA, 841 bp, Setaria italica
  Peptide Sequence Number=SeqID_75479
ggagcacgccgcagcccgtcgtctgcgggcagttgccgagctcgcacagtcccaggatcggcagcaccgacgcggtgagcgcgatgatcgccgggtcggccgtgaacatgctcgcccacacgttccgcaccaggaacgcgaacgcggtggcgaagccgccgaaggcgaacccgagcatgagccccactgttgcggcgcggctggcctcctcgggctggcccgcgccgagctcgttgctgacgcgtgtggacacgccgaagctcagcgacgacgggaagatgtagatgagcgacgtggtctggatcaggatgcccatggacgccaccgtcgcctgcgggttcagcagcaggccgcacagcaggatcatgatctcgtaccaccaccactcgaggcagacgctcacgcagctcggcagcgcgaggctaacgagctcgccccagccccggaagttctcgcgggagaacgcgaagccgccggtgcgcttgtggacgcccttgaagaagatgtaggcgaggaggaagaggaggaggttcaagttcgccagcacggaggcgaatgccacccccttgatgccgagcccgaggacggtgacgaggacgtagttgatggggaggtggatggcaatggcgagcgcggcgcagaccgtgagcggcaggttgatggactgcgtcctgaggtatatccgtacggggtggatgaatgcctgcaggacgaggtccgggagcgaggccagaatgtaggtctcggcggccgccgcgatgctggcctcttggccgcagaggaggaggagaggccgcatgtgcatccacaggccgccgatgggaacggcggcggcgatgag

SEQ ID NO: 9506 - DNA, 651 bp, Setaria italica
  Peptide Sequence Number=SeqID_75480
cttaagcaaaggctgtccaaacaggaccttgtgcaaatcttgttcctgttttgtttggagagaaggcacccatgcgctccaaggatgctatgaaattcagtccattcaacaagaatttggatgattcacagaaagatgctatctcaaaggcacttggatcaagggatgttttcttgcttcatggaccccctggaactgggaaaacaacaactattattgagataatattgcaggaggtcaagcgtggatcaaagattcttgcctgcgctgcttctaatattgctgtggataatattgttgagcgacttgcacgatacaggacaaaattggtgaggttggggcatcctgctcgtttactaccccaagtgctcgacagcgctcttgatgcacaggtattgcgagctgataatagtagcttggcaggagacattcgcaaggaaatgaaggtgctcaatagcaaattgctgaaagctaaagataggaacactaaaagggacatcaggaaagagctcaaaacccttgccaaagaggagagaaaacgacagcagcttgcaatcactgatgtactaaaaaatgcagatgttgtgctgacaactttgactggcgcatcttcgaaaaagctaaatggcattgcatttgatttggttgtta

SEQ ID NO: 9507 - DNA, 292 bp, Setaria italica
  Peptide Sequence Number=SeqID_75481
cgttcgcatctcacgcgcgccgcctcctcctctccggcgctggagctccggcgagatcgttccacgcacagccctaccaagccaaggttggcgtggtggagttcctgaacggtgtggggaagggggtggagacgcacgcagcgaagctggaggaggccgtgggcggcgacctccagaggctcctcgaggcccgcacgctaaggctcaagaagctcggcatcccctgcaagcataggaagttgatcttgagttttgtcgtgttagtccgtggttttttagcatttcgtcatgg

SEQ ID NO: 9508 - DNA, 612 bp, Setaria italica
  Peptide Sequence Number=SeqID_75482
ggcggcggcgggcgcttggctccggcgagtgccggcggcggcgccggctatgccgcgcataccgtgcgctcttcccgccctcccgacacctcctccgccggccccagtcctggaggcgcctgcactcgcgctccccgcccgcggtgccttcatggacctcatggccgtccccaagaagaaggtctcgaagtataagaagggactgaggaatggacccaaagctctaaagcctgttccagtgatagtgcgttgcaggtgttgcggccgggtgaagctgccgcacttttactgctgcaggggggagcgagggaaccctgattcttcaagctcatgatgtgcccagctttggaatctttgaaaccggatagaaagagacatgatgggacgccggatgcgcgaagccgatagactagaaggaacttaacagtgcgctggttccagttccttctagtcgatccatctccactctccctttttttccttttgaaatgaatccatctccacccttgtaatcttgtagtcagtctactctttcgccggcgcggcttggcatcctgaaataatcatcttgggatcttcataaataatctgtgtatcgtcttcaggtgaccc

SEQ ID NO: 9509 - DNA, 376 bp, Setaria italica
  misc_feature (371)..(371): n is a, c, g, or t
  Peptide Sequence Number=SeqID_75483
tacacatcgagagacttgcactgcacactttttttaatcaagaattagaatgctgttactgtgtccaatggtgtattgaatggagatccctgctgtgcaaaatctcagtattttgggtggtgagaagaaggatgtggcagaggtgaggatccagaggcgaaccgccccttgctgctggcttcgccggtgctgtcagtagcattctcggcctatgtgaaggttatgaccatttggggggaggagatggagctgatgccctcctccagctccgtgctctcctcctgcaaccgtgagccttcctcctcatccttgctggcgagattgctttgcatatcttgttcgttcctcgtttcaggcaccgctccggttcngaaat

SEQ ID NO: 9510 - DNA, 1320 bp, Setaria italica
  misc_feature (1291)..(1320): n is a, c, g, or t
  Peptide Sequence Number=SeqID_75484
tacacatcgagagacttgcactgcacactttttttaatcaagaattagaatgctgttactgtgtccaatggtgtattgaatggagatccctgctgtgcaaaatctcaaagaagccagaggcgaagcgcaccatttgggggaggagatggagctgatgccctcctccagctccgtgctctcctcctgcaaccggatggttgctcttgctccgtgcgggagggtattcgcgagtgcgaagcggaaggagaagggagtattatgtattttgggtggtgagaagaaggatgtggcagaggtgaggatccagaggagaacagccttttccttgctgctggcttcgccggtgctgtcagtagcattctcggcctatgggaagagtaaaatatgaacccttacgatgaaaggcggctgcttcagcagaataagaagattcaggaagctaaccgtgcccctgaagatttcccaaacttcatcagagaaggttttcaggtcaaagtagtgacatcagacaactacataacacgggactctggactaatgtatgaggacattaaagttggtacaggcaactctccaaaggatggtcagcagattatatttcactatgtgggctacaatgaagcaggacgaaggatagatagcacctatattcagggttcacctgcaaaaattcggttagggaatggaacactagttccaggttttgaagaaggcatacgggacatgaaaccaggtggtaagaggagaatgataatacctccagagcttggtcctcctgttgggccatcgacattcttcagtgcgaagcagttcgaggtgttcgacgtcgagctcctggcggtgcaggactgccagcggaggacgatagccttttattctgacgttgtgtgcagctgatcatctgctcatcgagcctccaccaggcagcacatttgcatcatgttcctgcctctttggctgctgacaggattttgctgccggtctgggttgccgtataattgtatagccagctgttgttactgcgatagtaaaggttactgctgattattgacgatggtagtgtaatagctcgtcagttttgtcttcaatatcatgatgatggcatatgcgcgcatttggtgcgtccctttagaagttggcatatgtgccttgatgttgaagttgatcctgccttggcccacaccacttcatctcctcattcatcagtaaatctagtgagtttgctggcgatttgtgtaagtgcatcttgaagttactaccacctaccaataatggaaattatttttggttnnnnnnnnnnnnnnnnnnnnnnnnnnnnnn

SEQ ID NO: 9511 - DNA, 365 bp, Setaria italica
  Peptide Sequence Number=SeqID_75485
ggattagtatcagaccagtggaggagatgggatggcaagggaaagatccatctacagatttcagaggtggtggttatatatctttggagaatttactgtacttctctaggacctatccaaaatccttccaggagctcctttgtaagaagaatggtgatagagctttgtgggaatatccctttgctgtggctggtgtaaatattacattcatgctaattcagatgcttgatcttcaagcagctaagccaacatcattgattggagcagtgttcctaaatctacttttagaaaatgatcgagcctttgacattctttactgtataacctttaagctgatggatcagaaatggctcgacatgcacgcc

SEQ ID NO: 9512 - DNA, 314 bp, Setaria italica
  Peptide Sequence Number=SeqID_75486
taggccctcgatcactcttcggattattaaatctgcattttctgggtccttgcaaacatcaggatggaattcctttacccgggcgcgaaaggcggctttgagctgggcggcggagtagcatgtggtagcgtcgaggccgaggatctggaggggcgtggcgcgcgggtccagtatccttcccgcctctccgtcgccgcccccaccgagagccgacacgcggggctggcgccggcggagggccgctctgcgcctcagggacggcggcgacagtgccctcgagccgaaaggggccgcgcggccgcgcgacggcaagg

SEQ ID NO: 9513 - DNA, 504 bp, Setaria italica
  Peptide Sequence Number=SeqID_75487
aactaagaaccagtccatcgcctcctctgccctcgccctctcgctccagctcgagctctcgcaaccagcagccagctgctccggcgagccgtcgtcggccgtgtgatcgagcactgctagcttagctacctctagtacaacgcgagagagtaggaggagggagatggccggcgcgacggtgaccgtggaggaggtgaggaaggcgcagcgcgcgtcggggccggccaccgtgctggcgatcgggacggccacaccggcgcactgcgtgtaccaggccgactacccggactactacttccgggtcaccaagagcgaccacctgaccgacctcaaggagaagttcaagaggatgtgcgacaagtcgatgatccggaagcgctacatgcacctgacggaggagttcctgaacgagaaccccaacatgtgcgcgtacatggcgccgtcgctggacgcgcggcagactactcacacggttggttggtaggtgcccaagctcgggaaggc

SEQ ID NO: 9514 - DNA, 1622 bp, Setaria italica
  Peptide Sequence Number=SeqID_75488
ggcgcgacggtgaccgtggaggaggtgaggaaggcgcagcgcgcgtcgggccggccaccgtgctggcgatcgggacggccacaccggcgcactgcgtgtaccaggccgactacccggactactacttccgggtcaccaagagcgaccacctgaccgacctcaaggagaagttcaagaggatgtgcgacaagtcgatgatccggaagcgctacatgcacctgacggaggagttcctgaacgagaaccccaacatgtgcgcgtacatggcgccgtcgctggacgcgcggcaggacatcgtggtggtggaggtgcccaagctcgggaaggcggcggcgcagaaggcgatcaaggagtggggccagcctcgctccaagatcacgcacctcgtcttctgcaccacctccggcgtcgacatgccgggggccgactaccagctcaccaagctcctgggcctgcgcccctccgtgaaccgcctcatgatgtaccagcaggggtgcttcgccggcggcacggtgctgcgcgtcgccaaggacctcgccgagaacaaccgcggcgcgcgggtgctggtggtgtgctccgagatcaccgccgtcacgttccgggggccgtccgaatcccacctcgactcgctcgtgggccaggcgctgttcggcgatggcgcggcggcggtgatcgtcggcgccgaccccgacgagagcgtcgagcggccgctgttccagctcgtgtcggcgtcgcagacgatcctcccggactccgagggcgccatcgacgggcacctccgggaggtggggctcaccttccacctgctcaaggacgtgccggggctcatctctaagaacatcgagcgggcgctggaggaggcgttcaagccgctggggatctccgactggaactcggtgttctgggtggcccaccccggcgggcccgccatcctggaccaggtggaggccaaggtgggcctcgacaaggcccggatgcgcgccacccggcacgtcctctccgagtacggcaacatgtccagcgcctgcgtgctcttcatcctggacgagatgcgcaagcgctccgccgaggacggccacgccaccaccggcgagggcttcgactggggcgtcctcttcggcttcggccccggcctcaccgtcgagaccgtcgtcctccacagcgttcccatcaccgccggcactgccgcatgatcagttgatcaccgcccccgatcgatgatcaccgtagtacacattcattcgcctgcaactccagcaacacttgccgcatccgatccatcacgcaaataacgtacccatactttctgtacctgtcacctattacttctatttttcctgtacttgtcgtcgcgcacatatgtatgtatgtatgtatgtatgtatgtatgtatgtatatatgtgcatatacgcaaagtgagctagctcgagggtaaaaccataagagtgccattttagtgttatgggtggtgaggtattgtaatacctgtgtaagataagctttggctggttttccattttatttgttggtgaaagcgattctactgtggtgataagaaatggctgccattatagttttttcaattcgatttataatatctgagaggcagttcattgttaaa

SEQ ID NO: 9515 - DNA, 533 bp, Setaria italica
  Peptide Sequence Number=SeqID_75489
aagaaaaataataataatactgggttgttcagtaattagtcatttcgaacatttaactgacccctaagttgttcctgcagctacaattaaaactgagaagaataacagagaaaaaagatatcatccttggttggcagcaacgatctttcccaagatggagctttgcattgtatatttgcctaatatactagacaaaaccccatgctgctcaaaacgaatgccaagtttacgaaggaacttcaaaacattaagaactttctcatcaaacacttcacatttgactttcactatctgaaggcattctgatatagcagctgatacctcagctggatcagggcttcctttcatttcctcttcatttgtaggtacctcaagaaatagttgaagagtgagcttctccagaactggtgaatgttcaaaaatacatgcaagtgcacgtaaatcatcaggctcagaccagtatttgttgagtaacaaactcttcaacttgctaaacatagggcagcatctcaagtccctttttgaaaattatt

SEQ ID NO: 9516 - DNA, 786 bp, Setaria italica
  Peptide Sequence Number=SeqID_75490
ttagttttgtaagcaatttgatgatttactcgtcaaaatattgatagcagctgctgcgatatccttccttttggctcaaatgaatggtgaaactggattatctgcatttttggaaccatctgtcatctttatgatactggcagcaaatgcagctgtgggtgtgattactgaaacaaatgctgaaaaagctctcgaggagctccgtgcttatcaagctgatattgcaacggttttgcgcaatggttgcttttctatactcccagcaacagaactcgtccctggagatatagttgaagtaggagttggttgcaaagttccggctgacatgagaatggttgaaatgttaagccaccagttgcgtgttgaccaagcaattcttacaggagaaagctgttcagtcgctaaagagcttgaatcaacttcagcaatgaatgctgtctaccaggacaaaacaaacattcttttttcgggcactgttgttgtagctggcagagcaagagcagttgtcattggggttggttctaatactgcaatgggaagtatacgtgatgctatgctgagaacagaagatgaagcaacaccgttgaagaaaaagcttgatgagtttggtacttttttggcaaaggtgatagcagggatatgtatacttgtttgggttgtaaatattggacatttccgagatccttctcatggtggctttgttaggggtgccatccacttattttaaggtagccgtcgctcttgctgttgcagccattccagaaggtcttccagctgtggtaacaa

SEQ ID NO: 9517 - DNA, 318 bp, Setaria italica
  Peptide Sequence Number=SeqID_75491
agcagctgccggaggtgcactacgccaggagccggtcggagccggcgcccgcgcgggaggagaggaggccgccggcgtcgaggatgaagaagtcggtcttggaggtgaggaaggcgcaggtggcgcgggcgccggccagggtggtcgaggcggtcgccgaggacgactccgcccatacgagggcggaggggttcaccgggagtttcaggcgcgaaccgtcgccgctgcagcaggagtacaactaccaggaagagtacgtgccgcctccggcgcggccgcaggcgccggcgccagcgccggcacctgccccgctggcga

SEQ ID NO: 9518 - DNA, 285 bp, Setaria italica
  Peptide Sequence Number=SeqID_75492
tggcggacggcactggagaagaagatgacagtgcaccgaggctgtggtggatgggctggacaacgactagcgggacaggttcaggagctcatggcagtggttctggtggagtggatttggagctgtggtgcgaaggaatcagccggcggtggatctcagctcacgaatttcatgggcggcttgagttctgctctgttcttgcacaggcaaaaggaagcaaggcagagttgcgactaggctcaaaacttgtgctagggcatagacaacggtgcctttaaccaacag

SEQ ID NO: 9519 - DNA, 482 bp, Setaria italica
  Peptide Sequence Number=SeqID_75493
gcatgagaagaaagcgacagagccgagttccaatgcagctgcctaattagcaatccacttgttgctcactaactcctgggatttgctctctttggacatccaaaatgaaaggtggattcagaagattacagggatagctggttgtactattgatgtgagttgtagtgggccttgcataaacatgtaaatcttgatcatgcccgaatcggtttacattcattgagcatgtctgactctaaattgccatggtacattttcaccaattgtacctttggttctatgaggcaccatctaggctagaagtatgtgttctggttcactccttcagtcatgccaatatcaaatggtgtatccagagtagtcaaatggacgtctggcttcacttattgcatcttcattgtagtggacttatttctgaattctcttccaattcctgtacgaaagtcattccgtcattctgtctagttaatttgcaatgatca

SEQ ID NO: 9520 - DNA, 1385 bp, Setaria italica
  Peptide Sequence Number=SeqID_75494
tttttttttctctttttcccgtttttactttttaccgttttttactttttagggttttccggtttcctttctagttagcgaagccgccgcccattcctccctgccgtcccctccgccgccggcgacgaaaccgcagacgcggggagaaccgcgaatggagggcgcggtgacggagaatgcagcgacccccgtgggcgcggcggctttcgaagcggctgtccacgcggatcagcgcgtggagggtggtgcggtggtggaggactcggcagcgcccacggtggcgatagaggcaacctctgatgcggatcagattatagaggatgcagccccggaggacggaaggcacggggatacagtgacacatgtagatgtcagtcctgaggaaatgagaagcatcattgaaattatagccgacacaggaaaattctggcatgactggaatttcctcaagagtttactgtctctccaattgaagcaggtcttggatgaatattctgaggctcaaatggcaagccaagatggtgtacaacaacagaggtctttctcaggggagacctactctgagcttgttggccgacttagtgatgccctctggaggtttgaagagggccctccattcacactgcaaaggctttgtgagattctgttgaatccaaaaggaacttatacaaaattgtcaaagcttgctttggccttggagaagaatctcctagtcacatctacaatagccaagtgcaccgacccatatccagctgctcatgggccaccaagttcggattgcacacaaattacagaaaattctggccctgttgatgaagagcctgagagcacacctgagcatactacagcagtaccaaatggaacagagcatgtagcaggagatcgtgatgaagagatggctgatgcagaagctgaggaattatctggtagccatgatgtagagatgcaggaggacaagcctgatcaaattgaaattgttaactctgatgctaaccctggtgctgcagctgacactgaagcagttaatgtcagtgaacaattatcggagccacaaagctgagtttgagctgcatgagaagaaagcgacagagccgagttccaatgcagctgcctaattagcaatccacttgttgctcactaactcctgggatttgctctctttggacatccaaaatgaaaggtggattcagaagattacagggatagctggttgtactattgatgtgagttgtagtgggccttgcataaacatgtaaatcttgatcatgcccgaatcggtttacattcattgagcatgtctgactctaaattgccatggtaacaattttacaaccaaattagtaacctttaggttactaatagaaggacaaccaatactaaggaca

SEQ ID NO: 9521 - DNA, 312 bp, Setaria italica
  Peptide Sequence Number=SeqID_75495
ataatatattataagaacttgatgattatattttatttttacacttaatttacaactatattcacacctgatccagacctggacccccatttatttacttcatacatgatgcaaaacacatactcactaatgtactgcgagccacaacagatccagacatggacccccatttatttacttcacacatgatgcaaaacacatactcacaaatgtactgcgagccacaactgatccagacatggacccccaaatgtactgcgagccacaacactactgctgatcaagtgcatttcttgcgacacactcctcgta

SEQ ID NO: 9522 - DNA, 560 bp, Setaria italica
  Peptide Sequence Number=SeqID_75496
cctacttcccttccgttcgtttggttccgtttccgttgtattgtctaaaactactatacctctacttaattgttactttgttcgtttagttttccttttactttttctgtttcgggccacaactgatttggacatggacccccatttatttacttcacacatgatgcaaaacacatactcacaaatgtactgcgagccacaactgatccagacatggacccccaaatgtactgcgagccacaacactactgctgatcaagtgcatttcttgcgacacactcctcgtcaacgcgtcatgtcttgcattggtacaggagccatggacgtcttctgtgagtgagcttcccatccatctgccgggtcggcgcctctgttcttgagctcccggtacatctgggcgagcgcgcatggctcgcagaaccagtggacgcagccgtcggcgcatggctccgcaggcaggccgtacgccgcccggagcttccgtcggtaggagcaggagtagaggcagtggagcaggcacactcccgcgtgcaacagtgcgcagtagatcgcaccggcca

SEQ ID NO: 9523 - DNA, 372 bp, Setaria italica
  Peptide Sequence Number=SeqID_75497
tacaagcgcacgccgccagcctcgccgagcagcagcctccccattgcgacctccatcgcatacacgggccgcgccggctcgagctcaacaaccgcgcacttgtgaagctccaccgtccgtccgtccgcggccagcttcggggcgagcacccagatctgcccagcggccagggagagcagcgcaacggcgttgaccccgccgaccaggcgcacgccgaggccgaacgggaggccctggagcggcaggcccgaggccgaggcgcggcgcttgaaggagagcggggcgggcgcgaagcgcggtaaagcgggcgcggaggcgagggagtaggcgcggaggtggaccacgggggaggcgggggacgggtgcgcggag

SEQ ID NO: 9524 - DNA, 930 bp, Setaria italica
  Peptide Sequence Number=SeqID_75498
tttttgtgcaaataatagttttctcagttcttcacagttcacatgctctgatgctcagattcttacaagtcagaaatcaaagaaagcgaaactttccttattctattcaatattctatcaataattacacgtatattgttgatcacagcccggggtagctacccaagctgtcagtctaacactacagcttccagaatacaaacagcaaattcgttgctctttgaagctccagtaattctccagtcatattggaatctgctctgcctaggtaactagttctgtttatggatgcaaccggttcactgccaaatattcaccggtgagctgccaattgatgacgactcttttcgcacccggtgagctgcacggcaagaattgaagtggcagcctcgataagctctggcctaaggctcaccaccggcggctgaccagcgggaaccacaggttccggaagcacgactggtaggagacgagcagcaggacgagggcgagcgcgagcgccaccccccacggagacgacgacgctcccgcgccgtcacgctgctgctggccccatccgccgccgccgtaccatgagggctggtccccgaggagcagcgacgagaccccgccgccccgcgtccgcgccccggacgtggccgcccagtactgcaccgcgagcaggagcagcagcggggacagcacgacggcgatccggacctggtcgaccaggctctccaccgcggactcgtagcgcgagtagaaggaggtggcgccgagcagcgccgcggtggccaggaacaaaaagaggtggaacgacgtcgccctcggcgccggcgccggcaggtaggtcgccgtggtctggtcgtagtagtagccgccgccgctcgccatgtttgctcgatgcctcgatcgatcagctagctgttcatgcgagcgtgtggcgtgcca

SEQ ID NO: 9525 - DNA, 386 bp, Setaria italica
  Peptide Sequence Number=SeqID_75499
caaggcatccatgctggatgaaataattgattatgtgaaatttcttcagcttcaggtcaaggtatggttgtgattgtgaacagatgtttgaaacaagcactggtagctttgccatttccagatgatgaacattcttctttcctattgcttgatttcaggtcttgagcatgagtaggcttggagctcctggagcagttcttccccttctcgcagaatcccaaactgagctgcaaccaatgcacaaggactgctggacacacaagactcggaagatgccttagccttcgaggaagaggtggtcaagctgatggaaacaagcatcacgagcgcaatgcagtaccttcagaacaagggcctctgcctgatgccagttgctctcgctcccg

SEQ ID NO: 9526 - DNA, 885 bp, Setaria italica
  Peptide Sequence Number=SeqID_75500
tccgacgccgcgggcggtggcaccaggaagaccgagggtgccagccatggtgctcagcctgaggggaaccgtggttcgtcgccggccggtggcaagccggggaaggtgaagctgaagattcggaacgtgttgctgaaaccgaaccctgatgcggcggattccaggtctttgcaggcgaagcctccgcgtccggtagattcacggcaccagctaaaggttggtaatctgattccgacaggtcaacctcttcaagagacaagaaaaccagaaaggagaggtcaattgaagaagcaatggctcaggaacaatcagccaaagttcagagagaaccgtcttcagatcccgtccggaagagtaggaggctagctaagaaatctgtgttggacaatgaaatagatgaggactatgatacgagtaatgttggaactcctgacgattagtatgagatggcaagaaaagatctagggaatcagctgatgatgataatactgaagaggagctgacgtcgtacagtgaacctgaagctgaagatgaagcaaaaaacagtcactgaatcacctgtcaacgttagaagtgaacctctcacgacacgtcgccgtgcccttcaatcatggatggatgggagcagcagcagcactgttgagttccctgatggtctacctctggctccttcgagaagtacgtactatcttttggtgtcttatcaatgctaattcaattaggaacatccacctttatacatccgataaatgcatttgaaacacctttctgtttaaccaggcaagaaagacaagctttctgaagaagagatgcttgcaaagaaggccgaggctgctcagcggcgcaggatgcaagtggaaaaggccactaaagaaagcgaggctg

SEQ ID NO: 9527 - DNA, 630 bp, Setaria italica
  Peptide Sequence Number=SeqID_75501
ccgggcaacaggagctgaggccggagggcggccctgccgcggaccagcgggacaacgccccctcccctccttcgccgtcggcgtcgtacaagagcggcccaaggaggctgctgctgtctttggacgagaacgccgccggccctgacgggggcaaccggaggcgggagttcctcatgaacgttccgtcgtcggagcgggccaccaaggggagcatccggctgggccggcggcaaccggaggcgggagttcctcctgaacgctccgtcgtcggagcaggccaccaaggggagcatccggctgcgttccgacgccgcgggcggtggcactaggaagaccgggggtgccagccatggtgctcagcttgaggggaaccgtggttcgtcaccggccggtggcaagccggggaaggtgaagctgaagattcggaacgtgttgctgatgtatttgacaatgccgccttggcatcaccacaggaaagcaaggagttcatcagttgcaggcttccctcgtttgctaatgtccacgaaacaagcgtagttgccagtggtttcaagattcataagcaggagcaaaatccaatgtgtaatgtgcctagtccctactttcactgcgcgcaaccagatgacagtc

SEQ ID NO: 9528 - DNA, 607 bp, Setaria italica
  Peptide Sequence Number=SeqID_75502
acaggatgaaaaactgcaagaccttgtccctaattccaataagtcagacaaggcatccgtgctggatgaaataattgattatgtgaaatttcttcagcttcaggtcaaggtcttgagcatgagtaggcttggagctcctggagcagttcttccccttctcgcagaatcccaaactgaggtgctgaacctttttattttctacaacttccatgaatccttgcattcttgttctataattgctactaccggcttcacatcttttcatttgcatatcaaattacactgcctcaaataacttaagctatgaacagttctatagtcccacttgcattgtagttgcatttgatatagatttgccttctgatttttcattgggataccagtaattcactcaaatccactcatccatgcactgtcatgactcatgtagggttgccatggtcaacctctgtcagctgcaaccaatgcacaaggactgctggacacacaagactcggaagatgccttagccttcgaggaagaggtggtcaagctgatggaaacaagcatcacgagcgcaatgcagtaccttcagaacaagggcctctgcctgatgccagttgctctc

SEQ ID NO: 9529 - DNA, 1178 bp, Setaria italica
  Peptide Sequence Number=SeqID_75503
cctttttcttcctccgcccaaaccgcccgcctcctctcctcctcttcctcctccccagtcccctcccctctcctcacccgagtcacctccgcgctctcctcctccagaagtccccgcaccggcggcttcactgctgcgctcatcgcaattccgatcctcttctccctggcatgaccagcttgtcaactgtggatactttaagtctctagaagccattttataaagaacattttgttgcgactagcattagtgttgattaacatggactattctgctggttcctacttctcaacatggcctgtcaattctgcctctgagggctacagtttggctgatggttcagtggaatcatttggaggagaaggaagcatgacaccttcaagctatttcatgacagctagatcagatcacaatttaaaattcagtgggcatgaacaggattccgctatgcttacaaatgaacgattgacctatacgggtgctggacatgctgatctgttacctggtgagcttctatctagggataagcttcctgaaaatcttctggagctgcaacgactggagaacaatggcaatctgcagagtaatttagtgaacccaggggtactaaagcgcacttcaacaccgggagggtttcatcagcaactgaatacaagcctttcagaaatgcctcatgccttatccagttcaattgatagtaacagcagtgaagtttctgcttttctcgctgatatcaatgctgtttcttcagcgagcatcaaccttgtgtcccacattccaaaatcatccttcattcatggaaccaatgaatctagaagctttcagttttcaaggggcacaaagtgatgctattttgaacaaaacaagccatcccaatgggaatatctcagtatttgacaacggtgccttggcatcaccacaggatagcaaagagttcatcagttgcaggcttccctcgtttgctaatgtccaggaaacaagcttagttgccagtggtttcaagattcataagcaggtttcattttcaaacagtgccactaaagaacagtatctcaactgcatcttacaattcatttgaactgtaccagtaactcaacttccacaccgcaggagcaaaatccaatgtgtaatgtgcctatccctactttcactgcgcgcaaccagatgacagtcaccac

SEQ ID NO: 9530 - DNA, 552 bp, Setaria italica
  Peptide Sequence Number=SeqID_75504
ctaggaggtgcgacatcttgaagccttgccgaacatgggtgacatttgtttttgggggatcacactcatttgcaacacacccaattcttggcgcgttggggaatgtgttccctgcgtcatatgtttgcagcttcactctattcaatgggaatgggtcaggtgggacatacatcggcaaaggaaaggtgctgtctagacgacctcgcagaattgattcgaagaagaggctgtggactaatgttcttcttgctattaatgtcctggcttatatcgctcaggtagcatcacaaggaaagcttcttatgtggggagccaagatcaacagtctgattgatagaggacaattttggcgtttggcaacatcatctctccttcacgcaaatgtcactcaccttgctttcaattgtttctctttaaactcaattgggcccatggtggaaatgctaagtggtcctagaagatttattgctgtttatatcagttcagcgctggcaggttcactgatgagttatcgctgttgtgagtcacctgctgttggtgcgtcgaggtgcc

SEQ ID NO: 9531 - DNA, 1047 bp, Setaria italica
  misc_feature (1012)..(1047): n is a, c, g, or t
  Peptide Sequence Number=SeqID_75505
tggtactattaattagtctaagtaagtaactatttagttccacagcctcttcttgctattaatgtcctggcttatatcgctcaggtagcatcacaaggaaagcttcttatgtggggagccaagatcaacagtctgattgatagaggacaattttggcgtttggcaacatcatctctccttcacgcaaatgtcactcaccttgctttcaattgtttctctttaaactcaattgggcccatggtggaaatgctaagtggtcctagaagatttattgctgtttatatcagttcagcgctggcaggttcactgatgagttatcgctgttgtgagtcacctgctgttggtgcgtcaggtgccatttttggattggttggcgcccatgcagtttatatgtggaggcatagaagttattttggcaatgcaagggaaagtttagagcatatcgggcgtgtggttgtcttgaatatgggtatgggcctcctttcaaggggaattgataactggggtcatctgggaggcttgctagggggagttgctgtggcatggttcctaggtccggcatggcaatatcagtatgtgggaaaggatggcagagtggttttcaaagacagggctccagtcctccggctaataaaggggtaggcttaggcttctgttattttgtatttggggagaaacatagggaagagaaaagtaaaagagggtgaagattcattcaacgcaccaagaagagctaattccttaggaaacatacaaggagcctgttgcccgtgttcggatcattagattgtcaatattcaatgctgtggcaggttatggttaatcaatcgcataacattttattaggtgttagtgttaccagcggctgacaaacacacattgttctttctgttcctgcctatgattctcgatgtaagttctgcctatgattctcttgaggtcactaggttctttctgttcctgtactacaagaaatggtcaaacctgtaaaattgttctcagtgatccactnnnnnnnnnnnnnnnnnnnnnnnnnnnnnnnnnnnn

SEQ ID NO: 9532 - DNA, 1335 bp, Setaria italica
  Peptide Sequence Number=SeqID_75506
cgacgacgacggaggcgagggtagacgacggaggcgaggaggacgacgaggcggaggacgaagagcccatgccggccgccgggcccgccgctccacgcgcgtcttcatgcccaaggcgcccaagccgctgcagccccaggaccaggccgaccccgccaccagggtcctccgctccggcaagcgcctcgccgccgatcggatccgctgggacgccaaggacgccgctgccttccacgtcgacgtcaaccaggaccagcagcgccaaaaagaggatccccctgaagccggtactgccgcctctgacgaaatccttcggaatcgtctacaccaggaaacgccgccgccggaggcaccccgccgccgaggttctcgccgaggacgcggaccgcagcaggaggtttgggatagtatacaccaggaggaggggcaagcgactgaaggtcgcccctcggctcacacaggagccggacgtctcctctgaccttgccgcggcgattccatgctcctcctcccaggagtttgcatcaagaactggcttcttggatgcccatttcttggccctggatggtgctgcagctcgctctggggctctgacgctcgtcgtccttgttgatacatcttgctccgggagctctcaccggttcctgggccttcttctacctgtgctgcggtggatgcgctgcagtcagcagcggggcaaggtctggaacctagccactttcgtcttgtctgctggtgttgctgctgcttttgcatcgcagggggtgcactttgtcaagctccagcgccggagggcttctgcattgttacataggcctctggtgcagtgtgggtggtgtgcacttcatggtgccaagaaatctgaacctctggtgtcggtcattttctcggcacttccttcatacttttggagcttgcattctgctgtagctcttgattccatgtatctgccagctgtgattcggcagagcagcccactggttgggggagctgaagaaatctatcctcacactcctttgtatgtggattatggggctcagagcactggaattgccaaacccactgctgacgttggcagcgatgaaccttgcagagcggtccaggactacgtgccccttgtacaagttgctggactagtggtgcatgatctgaggctaaagaagcatcaaaggaagaggagatcaatgaggcatccccgaaatcgacggcggattacatcaaaaattacctgacaatggaattgggatgaagcagagcacagctgccatccaaaacagaagtaaagctgccatcaagtaggcaagaacctcctgtggagccctgtccaacctaagc

SEQ ID NO: 9533 - DNA, 581 bp, Setaria italica
  Peptide Sequence Number=SeqID_75507
cgtccccccaaggaacgcgctgctgctaatgcgctgccgttcagacccagtcctcatggctgctctcgccacccgcttctgggggtctccagctgcggccaccgtggagcatttggacaatgaagtggctggtggcgtcgacggtgatggggacgaagaggaggatgaggctgagccagaggagtgcaaagatgaagctcgtcattcagctgtttctgtcaaagatgtgaactttggagagtgtggtggtgttgaagatgatggtggcggagcaggggagacaaatcaagcacaggcagaagctgaagagagctttagatttttttagataatgtagagagctttaaatgtggggatcttgttgaagaagataaggatggttcacgcactagtagttgtagaggaagcacagattgttaggaaagatgctgcttcggaggtttctttgggagaagacacagtggcagaaaaccaagggccaggcatggtggagctggtgatcagtaaggaggaagacgctccagcacaagaaaaagttgaggaagaggtgaaagggaggaggtcaatcagcaactattccc

SEQ ID NO: 9534 - DNA, 685 bp, Setaria italica
  Peptide Sequence Number=SeqID_75508
ggcaggacaggtttctactttctcaacttcctggttcgtttcccatctcgttgttgctccaaacagtgcagaggaaggacaagaatcctgtgatgatgtaaaggaagaagaaactacaagaatggagaggaaggagaaacacgagatggggaaacgaaccaggaagttgagaaagtagaaaccagagctgaagatggtgaggcaggactggtgatagagaggaggaagaagagcggtgaattgccggattgcctcctcctgatgatgtatgaaccaaagctctccatggaggtctccaaggagacatgggtctgcagcactgactttgtccattggaagtcttaccagggcaagaataaccgtaatcgctacccacaaatggcttctgctagtggcaatgatgcagctactgctacaggggagcctgaagataaggagaatgctgaaggcagcactattgcgaacaacacagatccgtcaacggtgaacttggctgtggcacctatgccacctccaattgctcaaaatgcgcaaccaccaaaaccagctgcaacggaacagaagatgaagctagagctgccggtggtcaccaatgcggcagcctacaccccatttgttctgaaacgctgcaagtcagagccaatgcggtcatcggcgcgcctggctcccgacgctttgtctctgg

SEQ ID NO: 9535 - DNA, 813 bp, Setaria italica
  Peptide Sequence Number=SeqID_75509
atcaccatggcttgcgctcgcgccattaccctcttcgcgctcacgctcctcccagcggtgccattgaccacggccgccgtcgcccccggcactgagtaccgccggccggccccctcgcccggccacaagtgcggggcgcagggcacgtacgctcccggcagcgcctacgaagccaacctgcggcttcttgcggccgcaatccctgccgaagcaaatgcgtccggctgcaggtgctctcccggtaaccacgccggcgaacgccccgacaacgtcgccgcttcggcctactgctactggcgtccggacgccggctggccatcggactgcgccgcctgcatcgcgcgggccttcgaggaggcgcagcggctgtgcccataccacaggcaggccatggtcgtggttgacggcggcgagtgcagcgccagcttccacgacgtccagcagagggagcagagcatgggccttggcagcgccggggaatctgtagccgcagatggggatcatgcatcatatcttgacttgctccaatacatgaataaggaactgacacgctatatgtcggaggacgaactgatggagttgaagaactttacagagcgtgctactcaagcttcgaagtcaccagaatgcctcactatgcaaaggatctatctatgacaattatggtttcagttgctgctctcaatttgcaatcatgtaaacggtttggtccatgtaataagatgcgacgactatgcaaactcacaaaatcctcgatgtaatatgtatttttggtatgtaaaagttcacaatttgactctttgactttagtaa

SEQ ID NO: 9536 - DNA, 418 bp, Setaria italica
  Peptide Sequence Number=SeqID_75510
aatttttgcacgtttggtcttggtccctcttgctggggttggcatcttcatggtagttgataaacttggtttcattcccaaagacgacaaaatgttcaagtttgtcgtgctactgcagcattctatgcccacatcagtgctgtcaggtgctgttgcgaacctgagagggtgtggtaaagaatcagctgcaatcttgttctgggttcacatttttgctgtgttctccatggcaggatggatcattgtatatttgagcttgctcttctaaacaccttactgcacacgaagatctttgaaagaacatatcatccaaagtatcacggcgaaaatagtgacatgaatatgtacagtagctagtaaatcatggtgaggtatgagttgtatcagcattgatatactactcacacaatgctatggt

SEQ ID NO: 9537 - DNA, 2117 bp, Setaria italica
  Peptide Sequence Number=SeqID_75511
ctcgcggagtcgtctcgtcctttccgttctccccccttcccccccgccgggagtcggagcccaacccatcccaccccagatcccacccgctccccgaatcgccgccactttttccattagcagccttcccgcaatcccgcggccagttcgagcccttcgcgggagggacgggctcactgattactcgggctcagcccccctccctcccagcagcgcggggtcacctcggccgtctcgcgactcctgattgcgttggacacgggtcctaagctgtgaaggcggaaaggaaaggaaaggaaaaggaaggcttcagtcccaggtcaagccatgatggagaggtcgctgctgcaggcgctggccacggcggcgcagggaggcacctcggggacttcggtactgagcatgctcaagtatgctgtgctgcccatcgccaaggtgttcacggtctgcttcatggggttcctcatggcctgcaagtacgtcaacatcctccagcccaacggccgcaagcttctcaacgggcttgtgttttcgcttctgcttccttgccttatattttcccaactgggtagagcaatcactattgagaagatgttacagtggtggtatattccagtaaatattgttgtaggtgcagtatctggctctttgattggctttgttgtggcatctatcatccgacccccatatccgtacttcaagttcaccattatccatataggaataggaaatattggaaatatacctctggtcctcattgcagcgttatgtcgggatccatctaatccgtttggtgactctgataaatgcaaccaagatggaaatgcatatatctcatttggtcaatgggttggtgctattattgtttacacatatgtgttcaggatgcttgctccaccaccaggacgcacctttgatggctctgatgacgatgaacttccagtcaaggcatctggagagaatgcggtgcccgaactcagcaaatatccaattccaacaagcactcacactagcactgtaccagaggatgaaccattgttagctgctgagaaagttcaaaaagaatgtgccacttctgtaggatcaaagataatgggccatgttaaatgtgtgattaaattcctgaaagacaagcagcttctccagccaccgattattgcatctgcttttgcaattgtcattggtattgtcccattcctgaagaattttgtactcacagatgaagcgcctctcttctttttcacagacagctgcctgattcttggggaagctatgatcccatgcattttacttgctgttgggggcaatctcgttgacggtcctggtgaaggaagtaagaggcttggtgtgcgtacaaccgttgctataatttttgcacgtttggtcttggtccctcttgctggggttggcatcttcatggtagttgataaacttggtttcattcccaaagacgacaaaatgttcaagtttgtcgtgctactgcagcattctatgcccacatcagtgctgtcaggtgctgttgcgaacctgagagggtgtggtaaagaatcagctgcaatcttgttctgggttcacatttttgctgtgttctccatggcaggatggatcattgtatatttgagcttgctcttctaagtatgtcgctcccttattttagctgctttttgctccatttgtcatcgcatttgcacctgtctgctgtaacagaaaaccttgatatttacgttgatctgatatttggtcaactgatctgcagacaccttactgcacacgaagatctttgaaagaacatatcatccaaagtatcacggcgaaaatagtgacatgaatatgtacagtagctagtaaatcatggtgaggtatgagttgtatcagcattgatatacggtccttcccaatgctatggtaattgtggttctcttcccactgctgcaagcagtgagcgaagatggcacagcggtgttgccctgctcggtcacacccgaaccacttagatggggatgccacgttgtcccaatccatccattcgctttgttcattccatctcctcaccaaaatattagcttaatttactccctccacctattgataccggctcaatacacccctaaaccgga

SEQ ID NO: 9538 - DNA, 341 bp, Setaria italica
  Peptide Sequence Number=SeqID_75512
gtttgtcatggatgatgcatccattttgttgcttctgatggaggaggatgcccatgtttcctctcaagtttaagtttttctcgagggatggacagggtgatcattgttcagttaaggtagtacttgctatttagtataccagtatcatttatagtttatagggcaaaagatactgacagcagatcgaaccgacaccttctcgttcagtgaacttcacctgatttcatggatcagcattgctacttcagctttgcctcgatctccagggaagtgtcatacaccattgccccagggccgcttcttagtttctcgcctcattccttgcaatctcacattggtct

SEQ ID NO: 9539 - DNA, 402 bp, Setaria italica
  misc_feature (360)..(402): n is a, c, g, or t
  Peptide Sequence Number=SeqID_75513
cgccggcgccgccgacgggtggcggcccagcctcgagagcatcgtcgagtgccccgccgagacggcgacggaggctgccgccgctgccaactccgccgatgattagctagctagccggccgctgtcatgactcatgagtatctcgtttcttcttcctcgtggattgtctccttccaggttcttggtttgagttgaggtggtgggagaaaaaaaaatctgcgataaccatgttcatcgctgaagagtgattaattatattagccagccgccgacccgccgtgcaataggggtaatctaggtaattagcatgcatccggctgcctagttcatgagtcgtgctaagtaaaaaaaaaaaaaaannnnnnnnnnnnnnnnnnnnnnnnnnnnnnnnnnnnnnnnnnn

SEQ ID NO: 9540 - DNA, 374 bp, Setaria italica
  misc_feature (7)..(7): n is a, c, g, or t
  misc_feature (11)..(11): n is a, c, g, or t
  misc_feature (15)..(15): n is a, c, g, or t
  Peptide Sequence Number=SeqID_75514
ccactgngccncacngtgcctcggcttcggggcgatcccatcactttggagggggggggggagaggagcagcaggaccgatcgcgacgccggtagcggcggcaatgccgcgggcgccgccgccggaggcggcaacgacgggctcaccagggatttcctggggctacgggccttctcccacggcgacatactcagcatggccgggttcgatccctgcatgtcgccggcctcgccggcggcgtacgagcaacaagggcaccagatgagcagcaagcagtggcatgtctagtcgtcgtcagctcagttccatagctcgccatggatgatgaatcgtgtcctagtagatgatgaggtgcagcatcagcatgcatgcat

SEQ ID NO: 9541 - DNA, 348 bp, Setaria italica
  Peptide Sequence Number=SeqID_75515
ggtgtgtgctcgccggagaggggggaagggaagctgccgtcggtctgcagcggcgagatggtggttcatctggtgctggcttgaatttcttggctgcgaggttcgattgggttttggtaggcgagagagttgctggtaggaagctgtggaggaaacgatgagcttcagcgccgtggatatggaggaggagagcggcgctgcggccgcggcggcagcggcggaagagatccggcggctgccggcggaggtgaactgggagatgctcgacaagtcgcggttcttcgtcctcggcgcggcgctcttctcgggcgtgtccgcggcgctgtacccggccgtggtggtcaagac

SEQ ID NO: 9542 - DNA, 405 bp, Setaria italica
  misc_feature (38)..(38): n is a, c, g, or t
  misc_feature (77)..(77): n is a, c, g, or t
  Peptide Sequence Number=SeqID_75516
cgacggtgcgaggcggtggacatcgccagggccgccgngtacctcgcctccgacgacgccaagtacgtatccgggcncaacctggtggtcgacggcgggttcacgagctacaagaacatgaacctgcccttccctacgaagccacaggagtgactgtacaaaactgcacctaaccatcaggaagaagaagaaagataatgtgatcagttgttgtgatcgttgtttagaagggttgtgagtgacttttgaatccatgggaagttactggattctgtagagaaggatgtggatttgcatttcctgctttcttagtgtggaggagttgtgagttgtatgtgaaaccgcaaaggtactagatgttttgatttcagtcaaaaagaccatggaacttttagttcaaaaaaa

SEQ ID NO: 9543 - DNA, 525 bp, Setaria italica
  Peptide Sequence Number=SeqID_75517
ttgttaatttactttgttctttgtttaagttatttcttcttgtactagttctattgttgggatgggagtatggtggttgctgcaaataaccgtgggacatgttatgtttggcggctgcttaagggtactcagacaattacctgctttgaacctctacacaaattgcaagcccatgatggctacattctgaagtgcctgctttcaccagaattttgtgaccctaacaggtatctcgccacagcatcatctgaccacactgtaaagatttggaatgtcgatggcttcaagctggaaaaaactttagtcggccaccaacgctgggtctgggactgtgtgttctcggttgacggcgcttatctgataactgcttcttctgacaccaccgcgaggctatggacgatgtcgactggggaggccatccgggtgtaccagggccaatacaacaaaggacgaaccgtagtagactagacgactaactaaccaaaccggaaacggaaagaaccgaaaataactaaagaaccccaa

SEQ ID NO: 9544 - DNA, 644 bp, Setaria italica
  Peptide Sequence Number=SeqID_75518
gtctccgactcagtcgcactagtcggcgtttcctctgccgccgggcgcttgccggccgccgccgccgccgtcgccgggccgcctcgtcctggttcctggtgtatcccctgtccagcaggctatatgctgcaaaatggcgcaaccttctgtcatcctagcaaccgcaagttatgatcacacaatcagattttgggaagccaagagtggtcgctgttaccgcacaattcaataccctgactctcaagttaatcgccttgagataaccccagacaagagatttttagctgctgctggcaatcctcatatccgcctttttgacgtcaactcaaatagccctcaaccggtaatcagctatgattcgcatactagtaatgtgatggctgtgggattccattgtgatggtaactggatgtactcaggttctgaggatggtactgtgagaatctgggatttacgaactgccacttgtcagcgagaatacgagagtcgtgcagctgtcaacactgtagtcctgcacccaaatcagaaagaactaatatctggtgaccagaatggaaacatacgtgtctgggatttggctgctaactcatgcagctgtgagttggtaccagaggtggatactgctgtaagatctctgacagtca

SEQ ID NO: 9545 - DNA, 636 bp, Setaria italica
  misc_feature (526)..(636): n is a, c, g, or t
  Peptide Sequence Number=SeqID_75519
tgacctagactttcaccagaattttgtgatcctaacaggtatcttgcaacagcatcatctgacaacactgtaaagatttggaatgttgatggctttaagttggaaaaaactttagttggtcatcagcgctgggtgtgggattgtgttttctcagtagacggtgcttatttgatcactgcttcgtctgatgccaccgcgagattgtggacaatgtcgactggagaggccatcagggtgtaccagggacatcacaaagcgaccgtctgttgtgctttacatgatggggctgaatcggctcccccataagcaccgtgtaaccttggattctgtacataactctgattgcctactttccagcattgttgtgactgaacatgtggcaactgtagtgaaacgggacacaaccatatttggggttcgtgcaaagttatttgcatgctagtattggtcaacttgttttaggaaattgctggatatttaattataaaaaatgagacaagaaactaggaagaaccaaaagtaacannnnnnnnnnnnnnnnnnnnnnnnnnnnnnnnnnnnnnnnnnnnnnnnnnnnnnnnnnnnnnnnnnnnnnnnnnnnnnnnnnnnnnnnnnnnnnnnnnnnnnnnnnnnnnn

SEQ ID NO: 9546 - DNA, 1163 bp, Setaria italica
  Peptide Sequence Number=SeqID_75520
attctagcgactgcaagctatgatcacacaatcagattttgggaagccaagagtggtcgttgttaccgcactattcagtatccagactctgtaattagctatgattcgcatactagtaatgtgatggctgtgggattccattgtgatggtaactggatgtactcaggttctgaggatggtactgtgagaatctgggatttacgaactgccacttgtcagcgagaatacgagagtcgtgcagctgtcaacactgtagtcctacacccaaatcagaaagaactgatatctggtgatcagaatggtaacattcgtgtctgggatttagctgctaactcatgcagctgtgagttggtaccagaggttgatactgctgtaagatctctgacagtcatgtgggatgggagtatggtggttgctgcaaataaccgtgggacatgttatgtttggcggctgcttaagggtactcagacaattacctgctttgaacctctacacaaattgcaagcccatgatggctacattctgaagtgcctgctttcaccagaattttgtgaccctaacaggtatctcgccacagcatcatctgaccacactgtaaagatttggaatgtcgatggcttcaagctggaaaaaactttagtcggccaccaacgctgggtctgggactgtgtgttctcggttgacggcgcttatctgataactgcttcttctgacaccaccgcgaggctatggacgatgtcgactggggaggccatccgggtgtaccagggccatcacaaggcgaccgtgtgctgcgctctccacgacggagccgaatcagccccttcataataagcatgctgtttgactctgcagtctgtatatactttcgattgtagaactgttcagcagtagcactcttgtaccctgagaactttgagaactagtggtggttttttttatgataaaggaactagcggtggttgaaggtttttttttagtttcttcaaaaactagcggtggttgaagctcagttgctgaaacgctgggttgtagttgctgcgctatgtagcaagcctttggggctctgtacaaataattcgcatgctgttagtggatgtttctgcaaaatcgaaatcaagtgtcatagttgtaaacttttttgtttaacaaaaaaaaaaaaa

SEQ ID NO: 9547 - DNA, 925 bp, Setaria italica
  Peptide Sequence Number=SeqID_75521
tccagccagtcaaggggtcgagtcactctggcactccgtgcggtgggagcggattatcttggatgaggctcacttcataaaagatagacggtgcaatactgcaagggctatttttgcgttagagtcagaatacaagtgggctctgagtgggacacctttgcagaaccgtgttggagaactttactcgcttattcgcttcttgcaaatctttccctattcaaactatttctgcaaggactgtaactgtgagatactagataccagcatgaagaaactgtgcgactgtggtcactcatctgttaggcacttttgctggtggaataagtacatagcgaggccaatacagtttggttcagtaagtgatgaaggcaaaagagcaatgattcttctgaaggagaaagttctgaaaggcatagtgttaaggcgcaccaaaaaaggccgagctgcagatcttgctctcccgccaaaaaattgtgacattgaggagggactcttttgataaaaacgaaatggaattctatgaagctttgtatactcaaagtgtcacacagtttgattcatatgtagctgctggaacactgatgaacaactatgctcatatctttgatcttctcacaaggttgagacaggctgttgatcatccctaccttgtagcatattccaagacagcagagcctcgtgaaggattgaaaaacgaaggaaatgaatccatggaaagccaatgtggtatatgtcataatatggctgaagatgttgtggttacctcttgtgatcatgcattctgcaagacttgtttgatagactactctgcaactttggggaatgtttcatgtccatcctgttcagtacctcttactgttgacttaacaacaaaaagttcagttgaaaaagtaactcccagggtcaaggcttgctagtctgctca

SEQ ID NO: 9548 - DNA, 484 bp, Setaria italica
  Peptide Sequence Number=SeqID_75522
cttcaccgggtaccccacctctgccatcttcttcgcccgagcttgccccccgaagcagccgaacctagcaagaacaaagcagccacatcgatgagaacagcaagggacaaggttgtcaatggcaaagctgaaggaagatacgctgaagagagtacgaaatcgaagttcttgctgcgtttttttccttctacagttttattgaactcgatactgacaaagctgaatttacgccgaactcgtagagctccaccgatttctaccagataaaatccacctccaaaaataatccttttttgcccaaaatgaagcaccgagttgaagaaagcaagaaccgaaccggagattccccgaaccctcctcgatttcagctgaattacctagcaaaagcgaatctactccgccgcttggccatgggcggcgagccggcgacagagccccaagaaaccgaaccgaacaaagccaaagcaaataaccgagagcccca

SEQ ID NO: 9549 - DNA, 266 bp, Setaria italica
  Peptide Sequence Number=SeqID_75523
aggggaagggggagaggcgactctggaaacgaagcagcaatgggggactccagcggatcggcctccgtgtcggtggacgtcgagcgcatctctttcggcggcaaggagcatcttgtgaggacgagatgcggttctgtaacagttgcagtgtatggagacgaggacaagcctgcgcttattacctacccggatgtaggtttgaattacatgtcctgtttccaaggattgttcttctgcccggaagctgcgactttgctgctccacaa

SEQ ID NO: 9550 - DNA, 401 bp, Setaria italica
  Peptide Sequence Number=SeqID_75524
cgtgggcgggctggacgggctcatggggctccacctcagcggcctcctcgtcccgcgcctccgcgaggttggcgcgctctgcggctaggccggtgaggcggcgacccccgccggcgcgcggcctgctagtgctgggtcgctcgctctgcttgctttgggctctgtagatacacgggtacgttacgttacgtaatttagggggaagtcgaggggggtatggagcaaaatggccggtgacgtttgtaggacgtcgtgtgcgttcgcttcgctgtgcttcagtgcttgtggccttgtgctttgctgtgggggctggaggtgagagggttggctcaagtggagggcctctgtgagaaatgtctgggtctaaatgtaattaatacgtttttcctcttcaagcgtcg

SEQ ID NO: 9551 - DNA, 335 bp, Setaria italica
  Peptide Sequence Number=SeqID_75525
tgtaatataatattttaaaacataacagtgtgtgacaaaaaaaggtttatgatgcacatggccatttgaatttgaatgtgaaaattcaaaaactactggcagctcacgcacaactaagaacttagcttgcgcataatagtgtcatagccatgtaccggtgaccacctgcaaccaccaactccattaagaaaattgagccagagtgcctctctagtaccccatcaaaatacaaccaggacaggatctttaagaaacttgacgctccttagcaattcagcatatagatcactgtgcatattcatagattcaaagttcgtatttatatgtactgaatg

SEQ ID NO: 9552 - DNA, 1363 bp, Setaria italica
  Peptide Sequence Number=SeqID_75526
tttgtttttttttttttttttttttttttttttaagggttccgctggtatatttactcaactttcaacccatggagacaaatctgcgcattacacactggacctgggatccctaagattcactgagcacatcatttcccaccttcacacaaagacagcacgcgtaagagagtagattcttcctactagtagaactccacccaactaccacactcacaatgagttgagtagttgacacggattacttattattccccagattgcatccttcgcccagctctttccagtttccacgacagcccagccgacctcagcgcatggcccttgtcacgtgaacatcgaacgacagcccattctcctggaggcgtcgctggaggtcagtagggccgaagacagcacccggtgtgtgcacccctcccttgggcaggttgccgcgctggctcagcaggacaagggcgcactgcaccaggatgatgggcgtcgtgatgtacccgacctcaggccctgacaccttggtgatcacctccttgtctggcttgttcccgcgctccaacgcccgggctgcgtcgctgtagccatgcccaacgaaccacatcttgaaagaggcgctcttcacctcttcctccgacgggccagccctgctgaacagccccgcggagaagaactcggggtacttcagcagaagggacctgccgaaggagaagttggcgagcaggccaatgaacagtccagtgatcaggaagcgcacgaggatcatcagggatctggaggcgatcttcacaccgaaatgggcaggtttgacagaggaccagaagttcttcctgagctcggtgtactctggggtttcttccgccccaggaaggccctcagtatgctcagtgatggttgatagagttctcttcacaaccactgtgtcagcggaaggcaacttcatagcccacattcccagaggattgtgaccctcaatcagtgaacctttgggaggtggaggacctggaatattgggcctcggccgcctgggccttgaccggcgcagcgcctgcagctggctggcgttggccaccccgagcacggccgactcgtaggtgccgatgttcccgacgatcctcttggtggactgcaggctgacgtacgcctccacggtcgcaggcgcggacgggggctcccattgcctggagtggaagaggaacccaagctccgcggggacggagtcgaacccgcaggcggagacgatgagcgatccgttcctggcggcgggctcgtggagctctgcctcaacgcgctccatgaactcgggctccccggagatgtcgaggcagtcggcgcccgcggccacgcaggccgccgcgacggcgtagccgtgg

SEQ ID NO: 9553 - DNA, 1081 bp, Setaria italica
  Peptide Sequence Number=SeqID_75527
ttttaaaagttcaaacttctgacaatgctaatccaccgacacagcaccaccaaggatagccttgatgagtgttggattagctttaaagtcaacttctgacaatgctgtccttggtggtgctgtgtcggtggatgaagtgcaagaatgtgtttatcaacttgttttgtataaaggttactttggaaggggaggttgctgtgggaaagatagacttagaggcttctcttgccagattgaggatgaagctttggaagcactcacatatactattaaaaatgcagcgaatgaactgcctaagccagttgatagagatcccatcattttagttcttgatatcaatgtacagatgcttccttgggagaacttgcctgtattaaggaatcaagagatatatcgtatgccatcaatgactagcatctttttagcactatctcgaagtaataacctccgcaaagatggcagtgtcatggcgcctccttttcctgtcattgaccctttcaatactttttatctattgaatccaagtggtgacctgagcagcacacaagaagaatttgatcagttgttcagaaactatgactggaagggaaaggctcttgatcctcctccagaggctggagagctagctgtggccttgacaaatcatgatctgttcctctatttggacatggaagcggaactcagtatgtttctgggaaggaaattgagaagttaaataattgtgcagctgctcttcttatgggatgtagcagtggaacacttcactgcaaagggagctatgctcctcgaggggcccctttgtcatatttatccgctggttcccctgctatcattgcaaatctctgggatgtttcagacaaggatattgatcggtttagtaaagctttgcttgattcatggttgcaagaaaattttgcagacggcaacatttgctcaaattgctgccagctaacacaagaatttgaagccatgaaaattgcttccaaggaaaatggcagaactaactaagtacgtcacacgagggaactgcccgcgaaacaaataaataaatagtaactaaaagctgcagctgcaggcagga

SEQ ID NO: 9554 - DNA, 507 bp, Setaria italica
  Peptide Sequence Number=SeqID_75528
tctagccttctcgccaccaatgttgccaaccaagacctgatgtgtccttgaatcaggtaccacccttttctagcatttgatctagaaacttgcatgcctcattcttgaagccttctttaataaggccgtaaataataatgttatatattctggggctcacggttccacttgtatttaccactttcagtaaactttgtgcaaccatattaagaaaggaaaaaaaggccatatcattgactaacaattcaaatgtctcttggtcaggaacaagggcctgattcaccattctgttgaacaagatagcagcctcaaaaattgtttccttggtgaggaaagagcgcaacagactagtgtatgcgtacccatccaacagataaccttccatcaccatttgtgcaaagagaaccaatacatccttctccttcttcaaatggagtagtgcttgaataattacgtcataagtgaaaaaactacaaaaagtgccggtgcaaacagctaatgaacgca

SEQ ID NO: 9555 - DNA, 301 bp, Setaria italica
  Peptide Sequence Number=SeqID_75529
acgacatgttatatgaatcatcatttgcaatggtttcatttacaaggctagtaatgtgttctagaatttcttgggcatcatcttttctcaagtcttctgaatcctcttcagctaccattgaaaaggagtgagaaggtaattctttcttcaggaccagacttaccaatacttgtgatccataatctgcaactgtcacaggagtcctgtctgccttcgattgaatgtcagactgcaagattccctgctgcactctccggcagaggcgggaggcgagggcgacggccttcttggcggcggcgag

SEQ ID NO: 9556 - DNA, 1778 bp, Setaria italica
  misc_feature (1)..(57): n is a, c, g, or t
  Peptide Sequence Number=SeqID_75530
nnnnnnnnnnnnnnnnnnnnnnnnnnnnnnnnnnnnnnnnnnnnnnnnnnnnnnnnnctcatataaccgctagattattgtaccgatggtttaaacctgcaaagcatttttacactctggtgatcttgcaaccaccttatgaagaaaaaagatgctcatattattacttgagaggagagcaactctcggcatatcactctatgtaaatattatgtacacagctaatcattcttaagaaactataaggctgatcctgctcaagcaagcaaatcgaaaccactggaaacttcaggttgcattaaacctccgtcttctgcgatgttgtcgagccatgcaactagctgctgagatgttggtcttgacttgggagcagcagtcacacaaaggcatgctatctcgaggactctcattctaactggctttcattctccttgtgatgtatgcttggatggaaaacttcagtttccctgccctcctctttcatctgaagcacccatgacacgacatccctggtcccttttggcctgcacatgtccactggccttcgaccagtgagtagctcaagcagaacaataccaaagctgtatatatcacccttgtaagttgctacaggtgattgtccatattcaggaggaatgtagcccaaggttcccactacatctgtggtgacatgtgtctcatatgcacagataagtcttgctaaaccaaaatcggccagatgggcctcaaagttctcatccagaaggatattgcttgatttgatatctcggtgcaatatgtggggatcacaagacatatgcaagtatgccagaccccttgctgcaccctgtgctatccttagtctcttccgccaatccaacagcatcccactatcagccctctcatgaagccagtagtccaagctgccgttctccatatatgagtagatcaatagcctgtcattaccgaccttgcaataaccttgcagcaagacaaggttctcatgttgggcccgtgacagtgtctccacctcagcttggaattcccgctcgatctgagagtagtcgcctgaaagccttttgattgcaactctcctcccatctggtagtgtcgacttgtagacaagcccaaaaccgccacatccaactatataggcttgatcaaagttgttggtggatttcaagatgtcctcaatgctgaattctttgttgttttggaaaagcagcacaaggcatgagttagaagactctgagtcttcagcatttgctacagcctttggattacactcctgcattcttgaatgaacaatccttgccacaatcacataagcacagaacaagaaagcggcaaccccaactgcagttcccagtccaaggccgacaagcgcgcctttgctcttcttaccgcgtgcagcttctacgagtgaagccttctctgagcacgaagaattccgaagaaggcagagtgcagagttaccttcaaaatcctcatttgtgaatgtggagaattgcccaccagtagggacatctccagtcagattgttgtatgacacatcaaacttggagagaaaattcagcttcgttagagatgagggtattgtcccattgagattgttgtgggccaaattcagcacttccaaactcgacatatttgacaactcatcaggaattggccctgagaacttattccagctcaagtccatgtgctgaagcttcacaagatgaccaaagcttgacctagtattcggtcccaataaagacaaagtttagtttagaagaagtaataaaggaacggtagga

SEQ ID NO: 9557 - DNA, 874 bp, Setaria italica
  misc_feature (10)..(10): n is a, c, g, or t
  Peptide Sequence Number=SeqID_75531
caatccgatntactctcatgcggacggtacatatgcttcatcaagatagccccaaaatctctcacctttctgcacaatgagtttgtgcttcctgtctcacaaaataactaaaacttccataaggggaataaggaaatatctgtttcacattgttttctaaattttcttttcagtgcacaattctggccttgatattgttgttatcgagatattatgttcactggcttaaaaaaaaaatcatactcgggttgaactatgcagattgtggaaaaaatgaccctgagcttgccaaagaaatggagaagcaatttgtagatctcctaaatgaggaactcaagctgcagcaggttgtagctgaggagcacagccatcacatgaatgccactcttgtggaagcgaaaagacaggctactcaataccagcgagaggcagagaagtgtaatgcagccacagagacctgcgaggaagctcgggagcagtccgaggctgcaatttctaaggagaagaaactcacagcactgtgggaacaacgagctcggcaattgggttggcaggagtctcgagccacaagcatgtgatagcttgactagttccgcatctctttctcttcttcagttaaaattatttctggtagctgcaagggttacatcttgcagccaaaccgagcgctgttaattgtacggatccacttgtaatgtctgtctgtgtaatgtcagttgccacagtttttgagtctcaacattgtagctccagcttacaaatgtaactagtatacactgtctagataagaagtttctgatagtgctgttgaaggcactgaattcagtgttgtggctgtggaggctgaactgctgtagacattcaattcaaatac

SEQ ID NO: 9558 - DNA, 267 bp, Setaria italica
  Peptide Sequence Number=SeqID_75532
cgtgtgtccaacccttgctgcgatttcacctactctgctgtctgatatcaacacctctaccacatgattttaatttcccctttgatcgtaaccattgtccttggtagaaagtacggagtctagttacacctgccaattaagtgctcgatcagcgtggtattttctagggcattaattcccagtgattggcagctcaggattgacgcatttgactgcatcttctgaacggcaacgtgaaatggacactctttgaagtcttgcttccac

SEQ ID NO: 9559 - DNA, 908 bp, Setaria italica
  Peptide Sequence Number=SeqID_75533
atatcaagctccatctcataccatgcaatcttattttcatttcactaagaactctttcatgacaatcttttctacctcttctctaatggtggctgcagtgctggcatcttcaatgtcagattcaagccttataatatgctttttatgatttgtctctacatgcggagcctgagttggaatagaccaaggttcttcgttattagttgcaccaccttgtagctgcatgacatcggaatctactacattgttcttgtcatgttgaccagggaaggcatctatcttgctgcgaacaaaggttcttttattctctaagagaagcacatccaactttgagaggacttcccctattttcttcctcatgtgctcaagttctttgttgtttcgtaaatgccaaggattaggtccttcttttttcaggaggtcgcgctttagtttgaatatctcttctgtctgcccatgcacaactgtatcatgctgccttttcatctcattcatcgatttattaaaataggctatcaaagcatcattatccatgtgcttcagcagttttggatcagcaaaaacctcttcttcagaacatattttctttgctacaccatttctaaatttttccttgttcctctgcttgctcgcatcttctgaaccttcagagttaagctgtgatcccaagaaaccccattcagaactcaatagtgactttgaaatggtatcaagctgctcgcgaagataataaaattcatcatatcttttatcccggccctcatgtaaaattaagctgctattttcgagctgctgaaccttttggttcagtgatgctatatctgcatccttggaagcaatctgccgagctgcttcttgctgcacatcagctaaaatccccatcatgactgtgtcagtcataaactttg

SEQ ID NO: 9560 - DNA, 389 bp, Setaria italica
  Peptide Sequence Number=SeqID_75534
ctaacagtttctaatgagcgcaaaaattattcttgcattgcctagaagattgaggtgcaccacaagcccatagaaacattcctaatgcttccttgctacaaaattgtctacttgatctcaatccataatcttgtactaaggtgtcatgaagacttattaaaactgacctcctcattctgaacatgttaaagcactccattgaatcttgtagttgcaactcaacccactgtattccagtcatccttggtatcgtagtagtaatcttcttcttgttcatactagatgatgccatgtagtccagaccaagcattgccacttgctcttgctcttgcacaatccttctcaacagcagcaccttcttctcaacagcaacacctggggggagccag

SEQ ID NO: 9561 - DNA, 251 bp, Setaria italica
  Peptide Sequence Number=SeqID_75535
aataccgctggcttagtgtatataaagcgacagcaacacttgaccccctcaaagcctcacaacctactacctgcaccttcttcccaatggagaattcaggcgaggagctctcttccacggccaaccgctccttctccggcgacggcagcgccgccgcttctgaggaggagagcggctggacgtcgtacatcgactacttcatgaagacgcagcggcgacagaagggggaggcgagtctttccgctgatgct

SEQ ID NO: 9562 - DNA, 417 bp, Setaria italica
  Peptide Sequence Number=SeqID_75536
ttttttttgttacgaagtatctccctgttcattgatttttactttttttaggttggtgacagtgacacatattccctcactcaggaaccagctcccagcaccgagaagataagcatcatgcaattccgagcagttacgccatgcaaactacatttctccggattcgcctatgaaataggaccacccagatcagagaaagctttgcgccaacccaaatttccgagcggtttgcttttggattggtcgattcctccggtctttgtcttcttctagctctagtagcctctctgctgccggtcagtgctgcacggctgcagctgcctacggcaggaacggcggcacgccgttgtaggaggtcggcttccagccggcgtccccggcgtggggccgcgcaccgcagcggcggcaccgctcgcc

SEQ ID NO: 9563 - DNA, 304 bp, Setaria italica
  Peptide Sequence Number=SeqID_75537
ctcacacgtccgtctggctctcctcccccggttcggatccaagcaaccaatccagaccgagaccaggtgcggcagcacgcggctcgccgccgatggcgagggccgacgccgacgccgacgaagcgccgctgctggccgaggagcccctccgtccaggcgcctgcagccgcgagctcgagctgcgggagttccgcgaccgctacgtgatccgttcgctcgacagcggcggcgccgccttcgccgtcacccgctcggggggctccatccgccctctctccccagaggaagccgcggtggggagcga

SEQ ID NO: 9564 - DNA, 265 bp, Setaria italica
  Peptide Sequence Number=SeqID_75538
tgggcgctccccttctcgtcgtcgccgtcgaggggctcccacttgaacctccactcgggccgccacccgatggccttgacggcgaggctgaccacgctgttgtacacggcctccaccaccagcatcacggacatcaccatgcaagcccacaccgccacctgcagcaccggcgcgatcaccccggcccgcaccgccacccacgccccgtacacgtccgccgccgcggaggacgtgccgtcgaggacgccgatgagccaggacaccg

SEQ ID NO: 9565 - DNA, 1427 bp, Setaria italica
  Peptide Sequence Number=SeqID_75539
tttttttttaaaaattaaccaccgaaaaaatttattgactgttattacataaacgttaccaagtcaaggaggtgctgcaatctcaagtgtaccatatttgcagttactaccaataccctactatgtacaattgcatgattacacagaacagtcagtcatgactccaggacagaagcaagctggatcttgcgtctatttttggcagatccacagcaagcattataggatggattccatcaagacattctgcaagctacctacatattgaagagggtatatataactgatgctcactatcgctgggcagttcacatgattcacagaaaggaagcaatatccatctgctgcacttaaccaaccttcttcggcatcagacaagtggatcctcgatattattttttgatttctcattgaaacgattagcaactagacctttagttgacttgtgatcaatgcgatagtcaagcgacggtacgtaatattttgttaggaaaataaccaaataactagaaataaagaatccacacgcaggcacatcatatagcattaaccattgtcatctgcttgtggttactgaagctgatacatcaataaggtcttggtggataggtaccagggtaaggcgcaggtggatacggagactgtgccgctggcgggggtgggtatggttgcccatatggttgtggcaggtatggttccccgtatggttgcggtggatatgatggaggagggtatcctgccggtgagggtgggtatgcttgctgcggaggtggtggatattctgtagtggtatatggtgattggctaggagttgggtaagcagggtatgcagatggggcaggatatgctgaagcaggtggatatgaaggtggaaccccagtgtatggaactgctgatgctagtgctggggctggcattgaaggtggaggaacagaatgtgtacttgatgcagcgatatttctacccatcttgttcttcatcgccgagacatcaacatgcataatgagcttcacttccccagcagatctcatgtggcgtgtctgaagcgaccatgaggagtcatcatagccatttgtgagcaccttgtgcagatatactctgccactgccgatgaagtcatcatgggttaatgtgttgctgttccaaacaacaacattcaattcgcggagcccttcaatgaggggtatatgaaacttctcatcgaaagttgggtttcttccaccatcggtgcaggtgcgggtgcggtgcttggtggtggcgtactcgagcacgacgtaggggtcctggcgggtgaagaactccgtgtcccgcagcttccggcacccggtgactctgacttccaggaccagcccatggattgacatgcggagcggggcgaggtggagccgcgggagaaggggaggagaccaggctgtgccgaactgccg

SEQ ID NO: 9566 - DNA, 412 bp, Setaria italica
  Peptide Sequence Number=SeqID_75540
agagtccatcttgtatacatgaggctatatatgtagtggcatccccatcggttaatacaaatctattattccccaaaacatatcttctatgaacaagtgcaagcaccaagcagtagtttctatcttccaaaattttactctccagttttcagattattgattcttgacagtcataattttcacagaatagactaaagtacacctctatcgtctaaaggacaaaaaggcaaaagggtaaagttaggggaaccctgtaggaagatacgcattgagaatagaaaatcaagtatttatgaacaaaactttggtcaagggtgtccagtgcaggtgcggtacaggattttgtacttttttccatcatacccaaaggttagatgccggtaattacagaaagttgctcattacctctctc

SEQ ID NO: 9567 - DNA, 1630 bp, Setaria italica
  misc_feature (1599)..(1630): n is a, c, g, or t
  Peptide Sequence Number=SeqID_75541
atagtgatactaaattattcatgatcaaattgccccaagaagaggtaggagattttgatccaagaaccggcaccatggccggtcgtttccatgtagctccagtacttgtggctgtgcttctggcatgggcatgccagctccggccaacggcggcggccacggccatcggccatgaagcaggccgcatcggccggctgcccgggcagccggtcgtggatttcccgatgtactctgggtatgtcaccgtcgacgggcgcgcagggcgagcactgttctattggctccaggaagtgcctgccgcgtcccagccggcgccgctcgtgctgtggctgaacggcgggccagggtgctcgtcggtggcgtacggagcgtcggaggagctcggcgcgttccgcatccggccgggcggcgcgacgctcttcctcaacaaataccggtggaacagtgcggcgaacatcctgttcttggactcgccggccggcgtgggattctcgtacaccaacaccacctcagacctctacaactccggagacaggagaacagcacatgattcttacacctttctggtgagatggttcgagaggttcccacaatacaagtaccgcgatttctacattgccggggaggagctacgcggggcattacgttcccgagctgtcccagctggtctaccggaaaaacaaaggagtcagcaaacctcagataaacatcaaaggcttcatggtcgggaacgccgtgacggacgactaccacgaccaggtgggcacgttcgagtcgtggtggaaccacgggctcatctccgacgccacgtaccggcggctgaaggccacctgcgtctccacagtgcaccacgacatcgagcacacgtctccaccgtgcgacgccgcgtacgatgcggcgacggtggagcagggcgacatcgacccttacagcatctacacgcccacatgcaaccagacgtcatcgtcgacgacggcgaggaagaactggaggctcaaggggcattacccctggatgaggggatcttatgacccatgcaccgaaatgcactccacggtgtactacaaccggccggaggtgcaacgggctctccacgccaacgtcaccggcataaactacacttggacgacctgcagtggcatcatcaacaccaactggggagattcaccaagatccatgcttccgatctacaaggagcttattgcagctggcctgaggatatgggtctacagtggagatacagactcagtagtccctttgacagcaacaagatactccatcgatgctctgggccttcccactgtcgttagttggtacccgtggtatgataaaaaagaggttggtggatggagccaagtgtacaaggggctgaccttggtgaccattcgaggggcggggcatgaagttcctctccaccgtccaaaacaggcgctcatactgtttcggcacttcttgcatggcaaacccatgcctaaaaatggaactgttgtgtagtttccctttattttcgtaccatgaataagatgaaatatcaacttgaattgcatgtaagaggatatgacaaagcatggaaggaataaagttgcattagtaaagaannnnnnnnnnnnnnnnnnnnnnnnnnnnnnnn

SEQ ID NO: 9568 - DNA, 834 bp, Setaria italica
  Peptide Sequence Number=SeqID_75542
accttaaagaccagatgtcaaccagactgagtgctggcagagtgtcagccttgctgtcaaaatccatcttcctcataagcgctggggcgaatgatgccttcgacttcttcttacagaacagatcaccagactccaccgccattcagcagttctctgaagctatgatttccacgtatgatagccatgtcaaagtaagaactctagtcatcatacgttatcatactcggaagatggaagtcaggagctctaagcacaagagctgaagtgctgaagtgctgacaaaagaagtggatgcttttatcaactataactgtatctgtatatttacttttctgcagacactgtacaatttgggagcgaggaaattcgtggtgatcaatgtgccactaattgggtgctgtccatacttgagaagccagaacccaaccggagaatgtgttgagcccttgaatcagttggccaagagcctgaatgatggaatcagggacctgttcagcaatctcagctcagaaatgcacggcatgaagtactccattgccagtgcttatgagcttgtctctagtttgattaaaaaaccccatgcggctggtaagttgcaaaaactgagcaggagtattctggatatgaaacccacacatcgaacattgtaatagcactgatttgccgcatctttctccagtatttctgcagcgttgatcactttttccctgcagggttggaggaggtgaagagtgcatgctgcggtgatggcagattcaatgctgagagagggtgcacccccacgctccagctgctgcagtgaccgcagcaagtacctcttctgggaccttctgc

SEQ ID NO: 9569 - DNA, 504 bp, Setaria italica
  Peptide Sequence Number=SeqID_75543
ttttcaggtgaagtagcaacttccgagcttgctgctggtactaggccgccccagctcccttcgggttggacggctgagtgggatccttcctcggacgacggggaatgggatcattgacgtcctggctggcctcacaaaggacatccgacctcgacgagtagcttccactttgtttttaccttctgttgtttccttcaaaaacttgtaaaattctggttttcaaccagtgtgtcatgcaatgttaatcaattggtggatctgttgtattctctggaaccactcaccttcgcgtgagctatgttaactcggtcctcttaagtggttaaattggattaaatgcgacggcacatcgagttaactcgattaaggcatgaggatcgcgtgttaagcgtcttaaccgtgctttagttgagttaatccgaggtgttccgtcacaatatgtttctacaggcaccaactgctaaagcattgtctacacctccttgacggaatggtgtgtgtcta

SEQ ID NO: 9570 - DNA, 1905 bp, Setaria italica
  Peptide Sequence Number=SeqID_75544
attcaaaaaggaaggctgctccgcttcacacgcaggctttgctccgcccggaatctctcgctcccatcaatggcggcgtcgaccgcctgagcagctccccagcggcaccgggctcgcgattcttcgccaccgggaggcggaagaggaggagggaggcggcggagatggttgggggaggcggcggcggcggggcgctgaggcgggtggggaagtacgaggtcggccggaccatcggggagggcaccttcgccaaggtcaagttcgcgcagaacaccgagacaggggagagcgtcgccatgaaggtgctcgaccgctcctccatcctcaagcacaagatggctgaacagattaagagggagatatccataatgaagcttgtcaggcatcccaatgtcgttaggctacatgaggttttggcaagccggaagaagatatttataatcctggagttcatcactggtggtgagctatttgataaaattattcgtcatgggagactcaatgaagcagatgcacgcagatacttccagcagcttattgatggtgttgatttttgtcacagcaaaggagtctaccatcgagatctgaagcccgaaaatctcctccttgattcccagggcaatcttaaaatttcagacttcggattgagtgcttggcctgcccagggatcttcccttctacgtacaacctgtggaacaccgaattatgttgccccagaggttctgagtcataagggatataatggagcacttgccgatacatggtcatgtggagtcattttatatgtgctgttagcaggttatcttccattcgatgaagtggacttgactaccctttatggaaagattgagagtgcacaatattcattcccaccctggttttcaggtggtgcaaagtcactgattcgcagaattcttgatccaaatccagatacacgaatcaggatagaagagatcagaaatgatgaatggtttcagaagaattacgaacctatcaaagacatagaaaatgaagaagtcaaccttgatgatgttaatgcagcctttgatgatcccgaggaggatactgaggatgcttttgatgaagcagcaggtcctctgacacttaatgcatttgacctaatcattctttcgcaagggttgaatcttgcagccctctttgatcgaagacaggactatgacaagcttcgaaatagattcttgtcttgcaaaccagctaaggttatcttgtcaagtatggaggtcgttgcgcaatcaatggggtttaagacacatattcgcaattacaagatgagggtggaaggtctaaatgcgaacaagactagtcatctctcaattatggttgaagttttcgaagtggctccatcaatcttcatggtagatctacaaagagcagccggagatacttcagagtataacacgtttgtaagtaactactgcagtaaattagatgatatcatctggaaatttccaatggagaagggcaagtcaaggatatcgcggtcatcgaagtgctaatttgccctcaacatccatcattcgtgtcatgcataatctagtgctgtgttgatatcaagtatcatgggcttgatgagtggaagtgcctgtgaagtgtatcacaattgatctctaatattatagttctaggagttggtcattgagtagtatgccgtgattgtatattgagagtccccatgtacaaaaaggcccatcctgtagaggttccgttacctcagcttgtcggaaaaaagattccagcgatgtgtttgactgcctgtagatttagttgaaaacatcgcttggttgtaattgtaaacacttacataatgtgtcatgtgtggctgtgtcgaatgtcaattcacaaattacaatattgatagaacacaatgttgattcctaatgtacc

SEQ ID NO: 9571 - DNA, 2181 bp, Setaria italica
  Peptide Sequence Number=SeqID_75545
aacgaaactacaagtacgcaactaagtgaagcttcttttgcctattgtacttggtctggttgacacaattaccctctcacaaacatatgtgcgcatgttcgtggagctactagttagacgtctcagtgacacttcagtcgttgacagtccaaaaaggccatcagtttcttctgttatagcagagttattgcgatacatggtactagcagtgccagatacatttgtttctttggattgctttcctcttccatcatttgtggttcctgatgtatatggtagaggtgctttgttgaagataactggtggtggtggaattgctagttctaagaggtgcgatgcttatcggtacttgtcctgtgggtatgctgtttgttcaattcagaaacgcgcgtctgatcttgcaactgttgccaaccctaatcttcaagtgcgtggtgcagccaaagtggtacaggctttggacaaagctcttgtgacaggaaatttgtcagtggcatactcttcactctttaatgatttatctgatgcgttaatggaagagagatggattaaagaagtcagcccctgtttgcagtcttctctgatgtggattgggactgttgagctatccctaatctgttctatatttttcctttgtgaatgggcaacatgtgattaccgtgattgccgtgcatctccctgtcagaatgtaaaatttacaggaagaagggatttgtctcaggtacatgtggcagtgtctatcttgaagaataaaatggatgagatgaataacttgtctcgttctaagagtagcaatcgcattaccatgaataatattgttaaaggttcttcgttgaatgatgcttgtttaccagtagctgctggggatgattcttctggactgagaaataatacaaataatttggatgagaagaaggatacgagcggaatctttgagagccctggtccactgcatgatattatcgtgtgttggttggatcagcatgaggttagcagtgctgcaggttttacacgggtggatgtcctcattgtagaacttatccgcaatggtatattttatcctcaggcttatgtcaggcagctaattattagtggaattactgacaagaatgacataatgttggatgttgaaagaaaaaggaggcatcacagaactttaaagcagcttccgggatcttctttatttgatattcttgaggaaactagaactgctgaagagcagcaattatatgagataatgtcaacatactctagtgagcgtcgccttgttctttcagaactttcatgcggtccctcattttatgcaagtagcagaggtgagtatgcttcaagttcctgcattcggaagcagaatgatcttccagttgcatcaggaggtgataagcatggaagggtgccagaacaagttgaagatgtaaaagccctagtgtcaagcctgttgagttttacatatcctcacccagtggagacagaaccatgccaaatcaaaacaagctttcaagaatcagcaacttcgaccctctcgcaagttgaaactggagaagcaaaaagtggatgcgaggattgcatgaggtccaaggggcagaaattggatgatggtgccactccattccaaggctttccattgattcaatcagatgaggaagatatttggtgggttaggaaggggacaaagttacatgaatctttcaatgttgaacctgcacagaagtcggttaagcaaacttctaggggtagggcaaaagtggttcgtaaaacacaaagtcttgcacagcttgcagctgctagaatcgaaggtagccagggggcatctactagtcatgtttgtgaaagcaagctgagctgtccccaccataaacctaatatggatggtgacaatgtcaaagattttgatcacatgaggatgacaaatctgactgaagttgggaagtcactaaaaagacttagattgcttgaaagaagatctgtttctttgtggttgttgaaatcaataagacaacttgttgaaggaagcgaaatgacagctagtaaagctacaaattctataagcaccctttccttacagcctgatgataaatctgcatccaaatggaggctaggtgatgaggaattgctgtcagttctctatgtactggacacatgctgtgatttagtctctggtgcaagttccttgtatggttg

SEQ ID NO: 9572 - DNA, 615 bp, Setaria italica
  Peptide Sequence Number=SeqID_75546
ccgggcaccttcgacaacaccaccgtcgccggcatcctcgagtacgagtaccccgacgccccttcctccgcgccgagcttcaacaaggctctgccgctctacaagccgacgctgccggggttcaacgacaccgacttcgtcggcaacttcacggcaaagctccggagcctcgcgaccgcgcagtacccggcggccgtgccgaagacggtggacaagaagttcttcttcaccgtcgggctcggcacgcacccgtgccccgccaacacgacgtgccagggccccacgaacacgacgcagttcgcggcgtccgtgaacaacgtctccttcgcgctcccgaccagggcgctgctgcactcgcacttcaccggcctgtccagcggcgtctactcgtcggacttccccgtcgcgcccctgacgccgttcaactacacggggacgccgcccaacaacaccaacgtggccaacgggaccaagctgatggtgatcccgtacggcaccaacgtggagctggtgatgcagggcaccagcatcctcggcatcgagagccacccgctgcacctccacggcttcaacttcttcgtcgtcggtcaagggtacggcaactaacgaccccca

SEQ ID NO: 9573 - DNA, 657 bp, Setaria italica
  misc_feature (112)..(112): n is a, c, g, or t
  misc_feature (121)..(121): n is a, c, g, or t
  Peptide Sequence Number=SeqID_75547
tccctgagcagcggaggcggccgcggcggcactcacgacccggtcggagacgaaccaccgcagccccttggtaggctcaaatttgagatcccccttttgcctcctcttttcngttttttgngtttatcatcggaatacgccattcatactatgtcctacattttctcctgcgaagttccagccatgcacgtgcatggcgccgctgcgtggtcgtcgtcgggcaggatcggagctagaagatgaagctgcaacctttagatccaaaaccgatggcttagatcagatataaaccataccccttcgtgtggatgtggtgcaccgtagactactctagcaccctggtccatagactccatgaaccgagactaccagtccaagcttgtcacacccggttttaaaacaaaaccaagtgctacctatatgtatgccaggatctagtttcatacatatagtgacatcataagtgaataacagcaacagtatcacgtaaaaagatacaattaaagacttacaagactatcagagatacacagcttaaatactggagacggaggctccaaacttcacaggcaatcgactgggggttgcgtacgcctagaactcagcatcatcttcggaacaacttcatagcagcttcttcttctttctctgagacag

SEQ ID NO: 9574 - DNA, 627 bp, Setaria italica
  Peptide Sequence Number=SeqID_75548
ggtatgcgacaccacccgagtcgcccctgggcgacacgggggccgagcgttgtcgcacccggttttaaaacaaaaccaagtgctacctatatgtatgctaggatctagtttcatacatttagtgacatcataagtgaataatcagtacaatatcatgtaaagaaataaagagagactatcaaagatatacgcttaatcctagaaacgaaggctccaaacatcataggcaatcgacaaggggttgcgtacgcctaaaacttagcaccatcttcacaacaacttcatagcagcttcttattctgagcaacactggttatagcaagggtgagcacatgtcgtagtcagcaagtctgggaaaaatatgaatgcaaggcttaaacaaggaaagggtgactggttgactgcattaagcacttttagttggtcaaattttattagcacctgattacaaaggtacaagtatatactaacccaaaattaatataaacatatgcttagccataagcatatggcagaaacataaccttaagttaaacaacgatttaagtctatctttaagttcaattatcatgtgagagtccaggccgctcttgaccatgagcacagctgatatatctagttttaccc

SEQ ID NO: 9575 - DNA, 423 bp, Setaria italica
  Peptide Sequence Number=SeqID_75549
aattctgttctgagactccttcagatgccaattccaggagtaacagatccaatgctttatattgggatgcttttcagcatgtttgcatggcatgtggaagaccattatttgtacagcatcaattaccatcactgtggggcatttaaaacgtggtacgggataccaggcgatgcggcccctgggtttgaaagggttgctagccagtatgtatataacaaggacattttgattggtgatggggaggatgcagcatttgatgttctactggggaagacaacaatgttccctcctaatgtcttactagatcacaatgttcctgtatatagggctgtacaaagacctggggatttgttattactttccctcgttcttaccacgcgggctttagccatggttttaattgtggagaggctgttaattttg

SEQ ID NO: 9576 - DNA, 549 bp, Setaria italica
  Peptide Sequence Number=SeqID_75550
tccctccatttgaataaccatggtgataccatggttgcatcctactaccacttggtaaagcatcattcaggcactgctgtcggggctgagctgtcacacagcttctcaagaaatgagagcacgctgatctttggttctcagcattcgttggatcctcacaccaccgtgaaggcacgcttcaacaactatggcatggccagtgcccttgtccagcatgaatggcgccccaagtcgttcatcaccatctctggtgaggttgacaccaaggcaattgaggaagagcacgaaagttggtttgtccgtggtgctcaagcactgaaacaccagatgttttgggcttcaggattttcctttacagtttcagtggattggaataacatggaaaaacatggcccgaagtcatcttgtggcatcattttgatctcgaattatgttatttccctccatgatctgttccataggcaaatattaggattgaccttatgttttgattctcagcaccttctgttaataatttctggtgatcgtgacggaataaaaaaaaaaaac

SEQ ID NO: 9577 - DNA, 1297 bp, Setaria italica
  misc_feature (1282)..(1282): n is a, c, g, or t
  misc_feature (1293)..(1297): n is a, c, g, or t
  Peptide Sequence Number=SeqID_75551
cgcctccgccgctgccatctctccccctcgcccctccgtaccacccgtctccccttctcgccgtcgccgccgcctccgccgctgccatggcaccaggtctctacaccgacatcggcaagaagaccagagatctgctgtacaaggactacaacacgcaccagaagttctccgtcaccacctgctccccccacggcgtcgcaatcacagccgcaggaacaaggaaaaatgagtccctctttggcgagcttcacacccagattaagaacaagaagttgacagttgatgtcaaagcaaactcagagtcagatcttttgacaacaatcactgtggatgagttcggaactccagggctcaaatcgattctcagcttggttgttccagaccagagatcagggaagcttgaactccaatacttacatgaatatgctggtgtgaatgcaagcgttgggctcaattccaaccctatggttaacctttctggtgtctttggaagcaaagaactctcagttggtgttgatgtttcatttgatacggcgactagcaatttcaccaagtacaatgcggccctgagccttaccaatccagatctcattgcttccctccatttgaataaccatggtgataccatggttgcatcctactaccacttggtaaagcatcattcaggcactgctgtcggggctgagctgtcacacagcttcttctgtaaaattagtaagtaagtactaacgtacttagtaattacttttaggtacaaagaaatgagagcacgctgattctttggttctcagcattcgttggatcctcacaccaccgtgaaggcacgcttcaacaactatggcatggccagtgcccttgtccagcatgaatggcgccccaagtcgttcatcaccatctctggtgaggttgacaccaaggcaattgagaagagcacgaaagttggtttgtccgtggtgctcaagcactgaaacaccagatgttttgggcttcaggattttcctttacagtttcagtggattggaataacatggaaaaacatggcccgaagtcatctttgtggcatcattttgatctcgaattatgttattttccctccatgatctgttccataggcaaatattaggattgaccttatgttttgattctcagcaccttctgttaataatttctggtgatcgtgacggattgttaagcttgtcagatgtgatggtgattacttagcattcatttatatgttcaatttgttgatctcctgatagaaaccaaaaaaaaaaaaaaaaanaaaaaaaaaannnnn

SEQ ID NO: 9578 - DNA, 377 bp, Setaria italica
  Peptide Sequence Number=SeqID_75552
ccggcgataggcccgcagatccatgtcagcgagacgtagctgtgggagatcccaagagtctgcgagtacggtgagaggagggagagctgtagcgcccagccgtactggatgccgccggagaccatgcacgccaggaagagccggaagatgctcatcggcggcttccggctcgcattgccgtcgcccttctcgccggcgacgccgccgccgctctcgaggttcatggtcgcccagtcgaggcgcttgttggcggcctccttgccgtcaccctccatggctgccgcggcgcgacgggccgaggaggaggaggtggaacgagtacgcggattggtcgcagggaagaagggagagcgatagggacaggcaaatgatcacgg

SEQ ID NO: 9579 - DNA, 888 bp, Setaria italica
  misc_feature (804)..(888): n is a, c, g, or t
  Peptide Sequence Number=SeqID_75553
ctctcacttcgcagtcagacggcattacggcaagaccgatgctgccgatgaggtccgccgccgccgtgccgtgctcgctggcagcgctgctgctccgcggcctctcctcctactcgtcctcttctgtctattccgtccgccgccacgcctcctctgccctatcctctcagccctccgcctcctaccccagcacctgccccccttgccccctctccgtcccccgcaggaccagggaattcacggcctgggcctcggcgccgggtccggcggggcccgccgaatcccccgccacgaaggcgctagaggccaagatcaaggagcagctggaggccgacgcagttacggtcgtcgacgcctccggggacggtcgccatgtctgcatagatgtggtttccaaagcattcgagggaaaatctgcagtaaataggcagagaatggtttacaaggctatatgggaggagcttcagagcaccgtgcatgccgtggaccaaatgactaccaagacgccagatgaagctgctgcaaacaagtaattcaatatcataaatgtggagacagttaagctctcttttgaaggtcaggccgttgccttgaccatggttctgttttttctgatactattaatgtacacgtcaaatgaattgtcaataattcgcatgattagcattccttcaaaaagaaatttatgtaatttgatgtgcattcacctttttccggcgcgggtggcctgtaaggaaaacatttcaaattactctctccaactatcaatggaaccctaaactataaaattgtttatttaaaaannnnnnnnnnnnnnnnnnnnnnnnnnnnnnnnnnnnnnnnnnnnnnnnnnnnnnnnnnnnnnnnnnnnnnnnnnnnnnnnnnnnn

SEQ ID NO: 9580 - DNA, 256 bp, Setaria italica
  Peptide Sequence Number=SeqID_75554
cctgcacgcgccgccgcgccctcccgctccctccacgcgtgcccggcggcgccctacgagcgtgggccgccaccctgtacccggccaccgcccacacctcgaaatgagccggtgttcccagatctcggcgacatcgaggagcaccgctgactccgcacccacgccgacgccattcgacacatcgggagggacccgtctgcgccaagcatgctgcgcgtgctggccgtgaagctgggcaaccgcctgaagaaggtgg

SEQ ID NO: 9581 - DNA, 562 bp, Setaria italica
  misc_feature (519)..(562): n is a, c, g, or t
  Peptide Sequence Number=SeqID_75555
ccgccgcgccgtccaaaacggaccggcagcaaggcgacggcggaaatggccggcagcagcaggcaggccgccaagccttcggcgcccgcgcagaagcagagcaagaagaagggcggcaaggccgctggcgccgccgtgacagagatggacatggcgaccgcgcacaagctcttctacgccaagcagggcggcggcgcgctcgccggcgacaggcggcagcagcagcagtcgtacctcccctaccgccccgggatcgtcggcttcttcaccgccgcgcacgcgctcggccgctcgcaccacccctactagctagcttgctcggccaccgccgacgatcactccgctcgtttcgatcgggatcaataatctcccgaagaaagattatttcgttcattttttttcgattaatattaaccgaatagctcattcttctctcgccatttcctgtgaatacaagaaaaataaaaaataaaagaaattacaacgccattcttgtgctagaaaaaaaaaaaaaaaaannnnnnnnnnnnnnnnnnnnnnnnnnnnnnnnnnnnnnnnnnnn

SEQ ID NO: 9582 - DNA, 270 bp, Setaria italica
  Peptide Sequence Number=SeqID_75556
cctcgccctcgcgtgagtcgcgtccgtgcgccgtgccgtggactccgacggccgccggcacctcgcctcggagatccggcactagcagcgcctcccgatcgtggagccggcttcttcctcgtgctccatgtcgcagatcccccgaccttagcatctcggtgatttctttcgacgtctgaccgccagttcttgcgttttcctggaggttgtggggagggatcaaggtcatagtcattgacgtgtcctgctgagatgaagcgaaggggagga

SEQ ID NO: 9583 - DNA, 650 bp, Setaria italica
  Peptide Sequence Number=SeqID_75557
ctgagatagcttctcagcgaggtcagatgcacgggagctctggtccttcgcaaggtaattgccgttgctccttactgctgctgatctggaccaagactgattcatcgcgttcgcctttgtcactttatggttagcctcctgcggctgatgatccaactccaatttcctttgcacaccagctgcaacattcacaagtcagaaaaagttatgaactccagaagcaaagccagaaatccttcacaaggaaaactgagtatgccatgccagcccgaatgtattattacctgctcttactggagcgttattgctcaggtatgagtaattaactgttggcctcccattgggtacagtacccatggagtatctcctaccattcttctgatccacagctcctttagccccaatgatggtggtgttgatgcatatccagttgatttgaagcgaagtgaaggagggacatagaagcatggctggaagaagggactcgagggcagcagtgaatcttcaagtagcaagcagcatcagctttcatatcgaagacgatgagcagggtgggtagccgcgtcatatctaactttaactgttgaaccgaaaataacagacatgatctcttgttagtaaaacagccacaccttgttgtaacttgtatg

SEQ ID NO: 9584 - DNA, 353 bp, Setaria italica
  Peptide Sequence Number=SeqID_75558
tagaatagtgatgatagctttacgttaatggacggttttcttgaaattggcaggatatcattttcgacatatggagaaggtgtttgaacatactcattgaaatggataagaagaaagcaattgatgaaactgaaccaggagtagctccttctcgtgccgtggacagatttggttttataaagtcagaacaaagtaactctcctgatggtattccaaaaggcaaatccatacatgaacgtgaaagggaggaaaaaaggataagaaaatggaggaagatgataggtgttggtggtagtgactggaagcattatgttagaaggaaccctcatgtggttaaaagacgaataaggaaa

SEQ ID NO: 9585 - DNA, 447 bp, Setaria italica
  Peptide Sequence Number=SeqID_75559
cgcttttgcttgaaggcacattttaaatatatattgagaaatattcaattgctatcggctcttcggagatagtagcatgacgagaagctcctacaggccttgagaaattccccgaggagtcgactgatccagatgttttattgccaatttcctttacatttaaggtcatcaggtgtcctccagtcgtcttgaaaagcttcagaaggaatatcagaagggactcgagggcagcagtgaatcttcaagtagcaagcagcatcagctttcatatcgaagacgatgagcagggtgggtagccgcgtcatatctaactttaactgttgaccgaaaataacagacatgatctcttgttgtaaaacaagccacaccttgttgtaacttgtatgtctattgtacagaaagaatggccttcattcattcatccttttgctgctctagtttaaaatt

SEQ ID NO: 9586 - DNA, 602 bp, Setaria italica
  Peptide Sequence Number=SeqID_75560
ttttacctttagttaattttagtttacttttaagttaacgtaattttttcctgattgtcttagacgatttgtttggctttgatttcaggcagccgagaccgctcgctaatgaaccctggggtttatgaggcactggtgatatatgagacattggcctctgaattggaaattattcgggacatatcacggacatttccatctcatattttcttccaacaaaggcatggtccgggtcaaagatccttgtataacattttgaaagcatattctgtctatggtagggatgttggatatgtgcagggaatgggatttttagctgggctgctgcttctttatatcaatgaggatgcattcacgtgccaatggaaggcttgtatcgggctggtttgccacttttgcgcagtatctgtctcagtttgagaaattagttatggagcacatgccaaaattgggacaacactttgttgaagaaatgataaccccaagcatgtatgcaaggcaatggtttatcacagttttcgcatattccttcctgtttcacctaactcttagagtttgggatgtctttctttatgagggtattaaggtagttttccaatttg

SEQ ID NO: 9587 - DNA, 657 bp, Setaria italica
  Peptide Sequence Number=SeqID_75561
ccctaagaattataaatttttcttcattttcttgatcgcaaccacttcaccactttttattgattgcgcgccaaacactcccaaatgttccatcaccaacttccttgataatcgtatacctctccatttttttagctggtggtgcacaaaactgcccttattttagaacagttgtatagtcacaaacaagactcatatatgtatgacagcagtgtctttggatgttagaacatcaaagtcactggagactcttctcaaatctctgtaggcaatacccatgctttgcgacaacaaaatcttgaacaactctgctctaatgttatgccatcccaagcaagcctgatgaaacgtaaccaatacacaccaaactttggactgatcaaactgaaaacttacggtgatagggtagaagaaagctagcagaaacaaagaaaaccagaacctagagcttatatgtgacgagaaagctctaagtgttagatccaagtgtccaaagatgtcttgacggtaacttttgctggctgatcagtgccaagacaaatattaccgaaatgttgcctgagaaacagatccaccatgctcaaataagtgtgctacagctgcactgtaatcacttggcgaccctaatgtctgacagcatggaccgaggcaaagcag

SEQ ID NO: 9588 - DNA, 2756 bp, Setaria italica
  Peptide Sequence Number=SeqID_75562
tccctgtgtgtccttggtctagttctctttagttttttaggagttttttttaaagtaaacaggccatgcaatgcatgcagcccacaactgaacaaagcaaacacatgtccgtcacaatccatacaagaccccactgaacaagcaaaccaacgtcacaatgtagaataactgaaccagcgtcacactcacaggcacaatgttacagcgaagaacacaaagcataaacacaatgtcccatggagacgcttcctgccgtgctcgcatgtcccagccccggagagcctccagggttgacgggatgatgcacgagccggaacgcctcttattcaaatcgcgaaaaagcatggtaatagacactagtattgggcaacatccgtcgctgcaaaggagcttggcggtttattgtcaggggaatggtggtgaagtgtagttgtgacacttgggtggcgtcgaagatctgcttcttggagcttcagctcacgagcttcctcggaaggagagttctatcacctggcatctcgtatgggcgccggaaggggtctgccgggccgtgccacgccctggatcccacgggcaaggggcgcttgatggcgctgccgtgggttctaggcttcaggtctgtgaacctctcgggacccagaccagacaccctgttggggcccattgacagctgagatagcttctcagcgaggtcagatgcacgggagctctggtccttcgcaaggtaattgccgttgctccttactgctgctgatctggaccaagactgattcatcgcgttcgcctttgtcactttatggttagcctcctgcggctgatgatccaactccaatttcctttgcacaccagctgctcttactggagcgttattgctcaggtatgagtaattaactgttggcctcccattgggtacagtacccatggagtatctcctaccattcttctgatccacagctcctttagccccaactgatggtggtgttgatgcatatccagttgatttgaagcgaagtgaaggagggacatagaagcatggctggaagaagggatgctgcaaaacctccactgctgttggccttctacgaggatcccatgagcaaagccacgagataaggttgattgcatcttcacttgctgagggaatcacttctgaaagatgaacgctttcacactgaggaaactgaaaaccgatagatgctgcaagctgcagaccttcaggccaagtacgctgatttggagtgccaagaatgccacagattttgtaaagttcatctgcttcacttgagccaggaaaaagaggtcgtaacgaaaaaagctccgcaattatggcacccattgcccacatgtcaactgctgcattataaacagtagcttgaagaagaacctcaggggcacgataccaacgagtcgacacgtattctgtatacggaggttcagaagaaatctcacgagcaagcccaaaatctgctatcttgatgaggtcctttgtaaccagcaaattttcaggcttaaggtcacggtgaaaatatccacgttggtgcatgtgactcagagcttgaaatatttgaaagcaccaatttcggacttcagtctccgagaaggccttccctctgttcttcatcagctgatagagattgcattccatgtactcaaaaacaaagaacagcatatcgttctctcttatgacttccttgagcttcacgatgtttggatggttcatcctccgcagggacttcacttcacggaggtttatgcactcttcccaagaataatattttttcttcattttcttgatcgcaaccacttcaccactttctttattgattgcgcgccaaacactcccaaatgttccatcaccaacttccttgataatcgtatacctctccatttttttagctggtggtgcacaaaactgcccttattttagaacagttgtatagtcacaaacaagactcatatatgtatgacagcagtgtctttggatgttagaacatcaaagtcactggagactcttctcaaatctctgtaggcaatacccatgctttgcgacaacaaaatcttgaacaactctgctctaatgttatgccatcccaagcaagcctgatgattggactgatggtgatagggtagaagaaagctagcagaaacaaagaaaaccagaacctagagcttatatgtgacgagaaagctctaagtgttagatccaagtgtccaaagatgtcttgacggtaacttttgctggctgatcagtgccaagacaaatattaccgaaatgttgcctgagaaacagatccaccatgctcaaataagtgtgctacagctgcactgtaatcacttggcgaccctaatgtctgacagcatgggaccaggcaaagcagtcgctaaaagcagtgtgatcctcaggtgcagttgacaaaagagatgacaaggaagtctccgtaaagacaaaacctccagccaagaacttcctcgagcagcgagatgtgggatacagaggaacttgctgtgtaaggggtgtactccatatccttgctgaaaatgctatgactccagcagagcgcggtaatgaaacctgggagcctctcggcataaccgcgcgccgccgccgaagggtccaggggacttgcccgccgccgcctccagcgctgatggggtgggggagggacgggtgggtgggtcaacaccgccgcgcgcggtgtggaggaggaggagccggggaggtgggggggtggacggacgggtgggcgagggacggg

SEQ ID NO: 9589 - DNA, 1723 bp, Setaria italica
  Peptide Sequence Number=SeqID_75563
ttgttttggtctagtttgtattttctaggtctagtccgtagtaccttctttgtcttaattgaaaaaatacgtcgagcgaggcgtggaaacggcgcacgcgtcgttctcctcgccctcgcgtgagtcgcgtccgtgcgccgtgccgtggactccgacggccgccggcacctcgcctcggagatccggcactagcagcgcctcccggatatcattttcgacatatggagaaggtgtttgaacatactcattgaaatggataagaagaaagcaattgatgaaactgaaccaggagtagctccttctcgtgccgtggacagatttggttttataaagtcagaacaaagtaactctcctgatggtattccaaaaggcaaatccatacatgaacgtgaaagggaggaaaaaaggataagaaaatggaggaagatgataggtgttggtggtagtgactggaagcattatgttagaaggaaccctcatgtggttaaaagacgaataaggaaaggaattcctgattgtctcagaggacttgtttggcagttgatttcaggcagccgagacctcttgctaatgaaccctggggtttatgagacactggtgatatatgagacatcggcctctgaattggaaattattcgggacatatcacgtacatttccatctcatattttctttcaacaaagacatggtccaggtcaaagatccttgtataacattttgaaagcgtattccgtatatgatagagatgttggatacgtgcagggaatgggatttttagctgggctgcttcttctttacatgagtgaggaggatgcattctggttattagttgccttactaaagggggctgtccatgcgccaatggaaggtttgtatcaggctggtttgccacttgtgcagcaatacctgtctcagtttgagaaattagttatggagcacatgccaaaattgggacaacactttgttgaagaaatgataaacccaagcatgtatgcaagccaatggtttatcacagttttctcatattccttcccgtttcatctaactcttagagtttgggatgtctttctttatgagggtattaaggttgttttccaagttggattggctctgctgagattctgtcatgatgatttggtcaaattacctttcgagaagctcctacatgccttgagaaatttccctgaggaggcaactgatccagatgtgttattgccaattgccttcacatttaaggtgtccagccgtcttgaagatcttaaaaaagaatatcagaagcaactggagggcaccagtgaaacttcaagtagcaagcggcatcagcctctcatatcgaagacgatgagcagggtcggtagccgcgtcatatctaacttaaccgctgacaaaaaatgacagacatgatctcttgttgtaacttgtatgtacattgtacagaaacagtggtcttcattcattcatccttttgttgttgtgtttatttgttactattacaatgctttcatgaacggaagaggtataactgcttctcaaactatggagggcagcgaggctcctgatccagctgtcattgctggacaggtgcgtatacatgtggatggatacagtggagtgttgtttccaagcaaactttttgtattaatattgggtatttgttctaattgtcttatttgtttcttttgttttccttttagtttttttgttttttttagttttttttaaa

SEQ ID NO: 9590 - DNA, 469 bp, Setaria italica
  Peptide Sequence Number=SeqID_75564
cacttcgctagcgcaccgtgcgtcgaatggatcaccatggcgatggcgtttccctcctcaccaagctcggcgtgggcgccctcacctgcaactccgtcttcgccgcctacaggtcgcgcggcgacccgggcaccctcgcgttcgtgctcgccgcatacgcggcgctgctgctgctcctgcattccctgcgcaggttcgagcgcgcgccgcccgcggacaggggcagggccaaggcggaggtctgggcgctctcgacgctgctcaccgtgatgttcgcgtcgcgcgtggcgccgctcatgccgcccaccgtcggggtagccgtctgggccatggcggccgcgacggccggcggcgggttctgggcgttctttcttagccaccgatgatggatcgagcaaaagtaaggagaggccgctctgcctgctggacttggcttcggtgtcgtcgtgtcagggagctgctggttaag

SEQ ID NO: 9591 - DNA, 260 bp, Setaria italica
  Peptide Sequence Number=SeqID_75565
taaagatgagattaccatcaggtcatcgacatctattgtcaagaacatgagttgaggataagtcttcgacatctcagcatagacaggagcaatgacacggcatggtccacaccaggaagcgctgaagtttgccacaacctgaaaaaaaggaattgatgagtctatctaataaatataattgtagaagttgcattaaaaatccttatgtgttactccctccatttcaaattgtaggtcgttttagcttttctaagttgata

SEQ ID NO: 9592 - DNA, 766 bp, Setaria italica
  Peptide Sequence Number=SeqID_75566
tacatcaaactagttagtaaagtatatctgtgaaacataatataactaatacttaaactaactttgttctcctgactcttgtttctgcagttcagtaattattcttctgttgaaggtgtcttgtactgcaagcctcactatgaccagatattgaagtcaacaggaagtttggacaaaagttttgaaggtgcgtccagatcagctaagccagaaaaatcaaatggacataagggccagcaaagaagtagattctctagcatgtttgtcggcacacaggataagtgcatagtctgtaacaagactgtgtaccctcttgaaaaggttgcgctggatggaagctcttatcacaaatcatgcttccgttgcacccatggtggttgtacgctcagcccgtccaaccatatcacgcatgaaggcaaactttactgcaagacccaccattctcaattgtttatggttaagggaaatttcagtcaatttgaggacagctctgggaatgcaaaagtggctactgagaaaccaccagaaacagaagaagcgaccaagaacccaggtcaaagtgaattgacagagaagccatcagaagccgagcttacagctgaaaaatcgccagaaaaagatgcaaaacaactgcaaagtagcactgatgcaataaaaccttctgaaaccatcacaacaacgcagacaccagcaggaagtgaaagagctattgagagtgagtcaaagagtactattgtcgacaacaagccatcaagaaaatagacgt

SEQ ID NO: 9593 - DNA, 455 bp, Setaria italica
  Peptide Sequence Number=SeqID_75567
gttctttgctgaatgtagcaatgatgctgatgaggaagaggaatcaatgtgtttctctttatcttctgcttcaattgattccggtaagttttgacattttgtatctctcatcaacacattgccaggtggtcttgaaaatatggttttttttcctgtggggaagatgccaaatcagtcttgtacgattccactgaatctgaatgtgttgattcaactgggcctggacattcataacaaatctttggttgaaatgattaatcttgaatgcccttaataagtcatattcctttgctgatgtgtcagatagatatttgataaggaacattcggaaatgagaatggacttttttcagttaagctatgatagattataactgttccagtccaacgacaacttctgctcttatctaacaactcacaggtagaatgtatattctcattttttcccaaacttgc

SEQ ID NO: 9594 - DNA, 237 bp, Setaria italica
  Peptide Sequence Number=SeqID_75568
acaatgttcttcatgtcatccaatctattcgaataatgctcatctttatactttctactatcatgaatgtgcttatcctagttttatccatggttagactatacatcatacttttatgtaatcgtggagattagatctagcatgccgatctttcatgacacctacatacatgcacggatgtctcccttagtgagctcctactcgtaccgttggaacctctcacgcaaaaaatagtta

SEQ ID NO: 9595 - DNA, 449 bp, Setaria italica
  misc_feature (428)..(449): n is a, c, g, or t
  Peptide Sequence Number=SeqID_75569
acagaccgactatgaaagaagtagatatgaggttgcaatttctaagaacaaagagacttagaaaaggtttagctgaaaaagatgcagatattgagcctttgttatgcccacaagataagaacttatatgggcatatcgatcttgtcaatgctgggagctctgggtgctacagtttggagcaagaatttgcatctttgccacgctaattacatttgcaagataaccgatggcttgcttggatgttgaatataatgcatctgaggtatcatgtattttattgaagattcacattatattactttcctttcgatgatactatatcacatagatgcatttcacgtgtacaatatattgtagaccgcgactgttgtatactttttatatttgtacataagttacagtactaaagataagcttgtaataaaagnnnnnnnnnnnnnnnnnnnnnn

SEQ ID NO: 9596 - DNA, 898 bp, Setaria italica
  Peptide Sequence Number=SeqID_75570
ttaaggctgcaccttttgtgatccatgctacaaacaaaatggtgaacgtttgcatattcatgaattaacacagattgacactagcaagaagaatgcacaggactatgttgaatgccttgtgcatgcatcgagatgcttcgatcctcgcaactgcactcttcaagtttgtttaacgttgaagaagctgttcttccatggcgtacggtgtgatatccgtgcccgtaattggggaggttgccagaagtgtgtcttcatgtggaaaattctgctccaccactcaaaaggttgcaatgatacagactgtacggttccgagatgcagggatataaaggtatacatggctgaaaagatgaagcttcctggtcctgtgtagcaggccagcagatcagaagcaggcttcttgtataaactagtgttggatttttctcctccttaaccagtaaaaaaattgttgatgaaaatgcaataaactgcggttggccgttgctgacggatggaactgcaaggtaaataaagtggtgacctggtcctgctggtgaggtggcttcatcggagttatttgttccgctggttttcctagcattggcagaagaaagttaggctagtgcactgagcttcgataatctgtgtatgcctattttactatgtcattgagggaattaaattactgacgggagcttacataggcaatctgacatttgttttagtgcccgtacatacgatgtacatatagtcataggtggctcaacaggatagatggttctgtttcttcgttgcctttcagttttgttctagattgtattgaacaagaccacatttttgttgagtgttctgtgctgtggcgacaaatccaaattcattgaatgaatgaatgtgtatatttactcgttacttcgtt

SEQ ID NO: 9597 - DNA, 365 bp, Setaria italica
  Peptide Sequence Number=SeqID_75571
gcctttatatccgacccacacgctcccttccttcgcttttctggatgacccatcgcggatttcaaatagctgcgcagcccagctgaacctacccagatcggacgagaggaggaggagacacggcggagaggagaggacggagtcacaggaggaggaggattgccgccgcccgcagcaggaagagagagcatggacttcctcgcgctcccccgccgcgacctgcaggcgctgtgcaagcgcaacggcgtccgcgccaacatgaccaacgccgccatggccgaggctctcgccgcgctccccacggttgatgggatcggggagtacgtcaaggagcccgtcaccgttcctgcgccagaggttaaggc

SEQ ID NO: 9598 - DNA, 417 bp, Setaria italica
  Peptide Sequence Number=SeqID_75572
ggggattcaatcccaccttcaactgttccgtaagatattccaggtgaagccgcagccaaaactggagtgtactgcagtagtcgggggcgctgaaattcagatgcgggagaatagtagtagcttgtacttggagtatgagttgttggagtcacactctaggtggaaggagaagtggttgtacattggagaccatgatccaaagctgccaaaggtgactggtcaccatccaaagtggaacaataggtggatagacgagccgacgcacgggaatagtcttcaagtacccgagctcttaggcaagattgcccaattgaagaatcaaggactgacaggagttggagtagcctttagttttatgaagaagtgagttcaacccctgcagctccgccacacctggggctatgagtacttgggcct

SEQ ID NO: 9599 - DNA, 283 bp, Setaria italica
  misc_feature (200)..(283): n is a, c, g, or t
  Peptide Sequence Number=SeqID_75573
cctccggcgctgcgtcaccatgctcctgtgctggcacgagcacgacctctcagactgatcaccatggtccgcccgctccgtcctggctggtttccatgttcgatttgtagtaggaagcatagagagggatcgagttttcattttcatgctgccagccaaactgtgaaaatgatcagatgctggtggactttcgctttagnnnnnnnnnnnnnnnnnnnnnnnnnnnnnnnnnnnnnnnnnnnnnnnnnnnnnnnnnnnnnnnnnnnnnnnnnnnnnnnnnnnn

SEQ ID NO: 9600 - DNA, 298 bp, Setaria italica
  Peptide Sequence Number=SeqID_75574
gtattgtaactgactcctgaaacagttgcaacaacattagccctagctgaacagcaccattgtgctgagctaaagttcgcctgtctaaagtttgttgctgttagagaaaatttgggagttgtggacgatgatcatgcatctgttaaccgaaagaggggagtttgtgggaacgaaggcgcaacaccagtcgaaagtgttgaggctagtgaaaggcgcatccggaggaggttttagcgggctggttagatgcaagctgtaaactaatgtaactaaaatgctgcctcgcttcccaggatcc

SEQ ID NO: 9601 - DNA, 1733 bp, Setaria italica
  misc_feature (1717)..(1733): n is a, c, g, or t
  Peptide Sequence Number=SeqID_75575
cactctcaacccccaccccagtaggaagagagggagagggagaggggggcggagggcgacggtgggtgtcaatccatcgccatcgacccctgccggacccagaaccaccccctcgccggaatccaccacccacacccagagcccacccagagcccagagcccctcctagtcgtagcgtaggcacggccaggcctccccctcaccgggatccaccatcccctccctagggtttccggatgcgatggcgattccgccgcagacgcctcccccgccgacatcctggtcgcgctccgtcaccgaggcggtgcgaggctcgcaccagttcaccgtcaagggtttctccctcgccaagggcatgggccccggccgcttcgtcaccagcgacatcttcgccgtcggaggataccactgggccgtctacttctatcccgacggcaaaaaccccgaggacaacgccaactacgtctccgtcttcgtcgcgctcgcctccgacggcgccgacgtccgcgcgctcttcgagctcaccctcctcgaccagtcaggccgcgcgcgccacaaggtccattcccacttcgaccgcgcgctccaggcaggcccctacacgctcaagtacaggggatccatgtggggttacaagcgcttctacagaaggtcactcttggaaacatctgatttcttaaagaatgattgcctagtgctcaactgcactgtcggtgttgtcaagaaccgtatcgaaacaccaaagaacgcccaggttcattttccactttcggacatgggccgctgcttcaaggagctcctcagcctcggcattggatgtgacataacctttgaagtgggtgacgagaaagtcagggcacataagtggattcttgctgctcgctctccggtgttcaaagcccaattctttggtcctattggaaaacctgatctgcacagagttgtcgtggaggatgtggagcctgttgtcttcaaggcaatggtgaacttcatatatgctgatgaacttcctagcattcatgaacttgctggatctgtctcgatgtggacatcaacagtagtagtacagcatttattggccgcggctgatagatatggattggaccggctgcgtatcttgtgtgaagcaaagttatgtgatgaactgactcctgaaacagttgcaacaacattagccctagctgaacagcaccattgtgctgagctaaagttcgcctgtctaaagtttgttgctgttagagaaaatttgggagctgttatggatacagaaggctttaattacttggaagagacatgcccgtccctactatctgacttgttagccactgtggcagttgtggacgatgatcatgcatctgttaaccgaaagaggggagtttgtgggaacgaaggcgcaacaccagtcgaaagtgttgaggctagtgaaaggcgcatccggaggaggttttagcgggctggttagatgcaagctgtaaactaatgtaactaaaatgctgcctcgcttcccaggatccgtatgctatggtgggggaagggggatggaagttctgaggtgacggttcaatgtagacttgagtagcttgtgaataatcttgtatcctgatgattttgtattgcagaagttgtaaatttgttactagcatggaaaaattatgttgcaggttgacatgtgcagctgtgataatctgtgtcatgaaaaatgaggaatttaccatgnnnnnnnnnnnnnnnnn

SEQ ID NO: 9602 - DNA, 651 bp, Setaria italica
  Peptide Sequence Number=SeqID_75576
ccacttccaaatctcatagctccggcgatcgttatccgcgctgaagatcgaatgcagcgtagtttacaactttacacggttcgtactgttcgtcatctatcagaagtggcatctctacaagaagcgcattcgcacatgccaaactgctaggacacaacggaacatgtgtgttcctcctcttgccaagcaagtccctgtgactctaagctaccaactgcagaaagtgagcttaaaaccacggtcctcttaggcacaggtcactcgtctcccattgcaagttctagcgcataatcatctctttccacaggccctcgtgcaaaatatctcccgaattggagccaatacacctcatcttcatcttgagtctcgacttcaacatctccggatgggaagccaacacacaacaaggcataaccctgatcctttagttctgcggatatcccaagtgcttcaggttgtcttatttgtcctgattttatccggactgcacagcttgtacaacaaccatggcggcacgcgaacggcagcctgatgtcctgcgcctcggcggtgtgcagaatgtactggtcctcgggcacgacgaactcgtggacgaccccgcgctggcggtcgtggacggtgaccttgtgtgtggggacgggagcggaggag

SEQ ID NO: 9603 - DNA, 763 bp, Setaria italica
  Peptide Sequence Number=SeqID_75577
cgtgccaagcgcggaaatgagtgcggtggccgcgttggaccgcggcgtgagcccgatggcctgcgcggaggcgaggagctcaagcgcggcgtccgggaggcgccgcccgcgcgaaggccgagataaggtcggagaagagcggcgcgtcgggctcgagccgcgactccctgaggtcgccgaggagacgctctagaagtgcggcgtcgggcgggtccttggtgttaagcagcgaggcgaggaggtgcgagtaggacgcgaggtccgggaggaagtcgtgctcccggagcaggcccagcagccgcagcgcgacggcggggcgcgaggccgcggcggaggcggcgaggagggagtttagcagcagcggcgagggcgggtcggtgagcgacggcgggaaggagagcagcagcgagtgcgggagcaggcggccggagacggagagcgagtggagcaacgaggagaggagcaggtcgagcgggaagcagaggcggtggcggtggaggaagggcagcagcgcgaaggcgagcggcagcgacgcgtcgctggcggcgagctcccgcagcagcgcatgccactcgtgagacggaacggccgagtaggacgcggcgaggcggcgctcgggcgccggaacggatgccggtggggacgacgaggtgagggaggccgatacagacggggaggagaggtaggacaggaggggctcgaagtcgtagcggctcaagggagcaggggccgaggaggcggcgggggaggtggtgcagccggg

SEQ ID NO: 9604 - DNA, 308 bp, Setaria italica
  misc_feature (1)..(1): n is a, c, g, or t
  Peptide Sequence Number=SeqID_75578
ngctgcagctcgacgccggagcgcgggatcagtgcctgcgcgtcgctgatgaagatgctgagcagggagaggccggcgccgcggaggccacagagcgccgtccatgccgacgacggggagctagacgacttggaacgtcagctgcaggcagtgaataattaatctatttattctttttaatttggtaattttcctcatcatttgtacatcccgcacttgcgtgagtggagaagtactaagagaagtgtgtgagctcctctatttttttaatggatgtatgggctcattgggaaagaagtgatattcgg

SEQ ID NO: 9605 - DNA, 280 bp, Setaria italica
  Peptide Sequence Number=SeqID_75579
tttggatgaaaggttatttctttagtagtgggaccaactgaaataacttgtaagagtaaattgaacataaattttttttagggttgtcaggtagataaagtggctgaaatagtaaaatagatattttgccttttatttataatggcagatgaatgtagcatggaagcatattagatcatgactattatattgctgtcaacagtgatcgagtccacaaaatgtacgactaaatgtctttgctttagttttggaatttctaggatttcttttttaagtgtta

SEQ ID NO: 9606 - DNA, 456 bp, Setaria italica
  Peptide Sequence Number=SeqID_75580
ctgctttagcgacgttgctgtgttgtctgacctgacgcggaggaggaaggctccgggcggcggcaggtgcttctggcgggtgctgccgcggccgccgcgtttatttcccggcctaatccggcggcatgtgagttgctcttcgattttactatctcctttgaatgctcgtattctgctgctttaaccacttctactttgctggtcactgagggacaagcttgctttgtgaatatggcttatttggtcaaaactgcgcctctgagtgccattctgatctcgtatagtcgcagcagaggctaagaaagggttcctgcctgtcgtcgacaagaaggctgggtactctttcctctacccgttcggatgggaggaggtggccgtgcaagggcaagataaggtgtacaaagatgtgatagagcctctggagagtgtgagcatcaactctattcccactagcaa

SEQ ID NO: 9607 - DNA, 1405 bp, Setaria italica
  misc_feature (1336)..(1405): n is a, c, g, or t
  Peptide Sequence Number=SeqID_75581
ctcgccgccactctgccccatgccaccaccagctccggcaaagagagaagcccaatgggctcttactctcctcggatggaggagaaacaggccgggccggtttgagcgcgggcgcacggcccagatatccaggcctcctgctgctcggcgcgcgtcgtgtgtggaccagaaacgaagcgaaatcctactcggcgcacggagtccgcaagcttcgtcgctacgcttgcccccatccggccatcatcctcgtcgacgccacgtccgccatggccacggccgtgcccgccgcttccctcccgcttccttgccgcgcgtcctcctcctctccggcggccgccgcccgccgtcccaggtccccgtcgctacgcaagcggcattgcgtcatcacgcccctcgccgccgcctgcagccctgcgccgccgcctcagctcgacaacgaggaggaaggctccgggcggcggcaggtgcttctggcgggtgctgccgtggccgccgcgtttatttcccggcctaatccggcggcattcgcagcagaggctaagaaagggttcctgcctgtcgtcgacaagaaggctgggtactctttcctctacccgttcggatgggaggaggtggccgtgcaagggcaagataaggtgtacaaagatgtgatagagcctctggagagtgtgagcatcaactctattcccactagcaaggaggacattcgtgaccttggtcctccggataaggttgctgaggctttgataaaaaaggttttagcacctccgacgcagaagacaaaattaattgaagcaaaagagaatgatgttgatgggagagcttactacacttttgagttcactgctcaggccccaaattacaccagacatgcacttggtgctattgtaattgcaaatggaaaattttacacactgactactggagcaaacgagagaagatgggaaaagatgaaggataggctgcatacagttgttgattccttcaaaattgaaaatagaatatgaggaaggtctgggttcttgtgctgattgttctttgttgatgtgttctcttttggagctgcaatggtgagatctaaatagtaaatgtcgggaatgtgaattgcactgatcagtttttatttttgaatgttttgttcttgagacacctgtttgtacttggtatgtatatgttttcactgtctgtagtgtgatccttggaataacgagatccagacagttgtgtaaatgtatcaaaaataagcaatggaaaggcttcatccatgggagattatgtttgtgcttaatccctcatgttcaaagccaaatttcagtgtgtgcaaaataaaaaaaannnnnnnnnnnnnnnnnnnnnnnnnnnnnnnnnnnnnnnnnnnnnnnnnnnnnnnnnnnnnnnnnnnnnn

SEQ ID NO: 9608 - DNA, 992 bp, Setaria italica
  Peptide Sequence Number=SeqID_75582
tagcagtggaaacagaggatgaagaagtactgctcttgcctcccaacctacagagcctgcgaatgtacaagtgcccaaatctgattctcatcaatcttccgtccgatttgcactccctccaatctttggaaattgaggtgtgccccgagttcctctcctcctattcatcgtcgtccacttcgtgtttccccttcgcatcctccttgcaatttctcgaacttcgtagcttggagggcatggaggcagcagcagtgcctctctcaaaccttgtctctctcacaacgctatggataattggatgtggggacttaagaagcgagggcttgggaactctcctcacccaaggtcaactcacagaactaggggtctccgacagccccagattcctcgttgactgttccaagccatcacggacgcgtgaagaagatcctcttccctggtcctccaagctgcagaagttgggtagtgacgacattgcaggcgtcctcactgactccttctgcagcctcgtctcttcctctcttgccaccttaagtcttgcatttaactacgatgtggaacgcttcacaatggagcaagtggaggcgcttcttctcctcacctccctccacgaccttgagttcgagtggtgcggcaagatgcagtaccttcctgctgggctacataaacttgacaaactcaaggcattatccatcgtggactgtaaagctctccggtcgctgcccaaggacggcctccccacgttcgctgcagcatctatcgatcggctactgtcctgccatcaggtcactgccaaaggtagacacactcgccagttctctgctctcattaacggtcaatgcccgcaacagcaaggagctaataagacagtgccgcaagttaaaaggaacaattccaagagtctacacctgactcatccagggtctcatgttatacgaatcgagcatctttcttgtcttgtcagatttcctctgcaaatatattccagtcac

SEQ ID NO: 9609 - DNA, 470 bp, Setaria italica
  misc_feature (429)..(429): n is a, c, g, or t
  Peptide Sequence Number=SeqID_75583
ctctccccctcctcacgaccccttcccagcacacctcctccactctccactgctcccttccacctctagatctcctccattgcagcaaggatcgagaagagaaggagcaagatggattgaagaggaagagaggatcgaggagatatgctagatcggtggtttagcagggtattgctatgaggcttgtacgtctacatggtcggtaaaggtgcaaaggtgactctgaaccagtcagggatggtgttgcagggatccgcaagcaagatgaaggataaagcacaagagcagcttgatggtgcatcggtggcagaagatggagatgcaatggctttggactagttcatataaaagatgtgtcatcactagcaacttagcaagtgttgttcgccccataactatttggatagtaacaatgatggatgtaagggngacttttggttgcccagtaacgtaagcttgtggagactttt

SEQ ID NO: 9610 - DNA, 930 bp, Setaria italica
  Peptide Sequence Number=SeqID_75584
tagacaattaattaagcatcgtctaattggtataatgatgtagcttcataccttgatggatatgaaggtaggagtttcatgtgcattgatattcatttcagaatggtttgaatgctggatgtgatgaagttacaatgtgaatatactatggtaaattatgcccttatgttgacatgcactgtgctatggtatatgggatttcagatacacgatatgtgggcttttacatccacatgctttgttttacctatatttggatattggattgacatagctacattgaagcaaatatgataaggggttcctcttggtggtcatgtgtgtgatatggcttgtgtgattatggagatattatgtgtgttgttgccttgcattccaagaaacttcaattacattgcaaatgatattttatttttttgttacggtatatgttctgcaacctttatttctattagttacggagacctatacgctatggatttttttagggctttttttagtctgctaaccatcattctacatggatcttatattaattatcatggtagctcttgtacaaactaatgtttcttgtcatgatcgtctaattcttgatatattaattcttggtatatcaagtagattggtggagctgttaatacttgttactttatcaaatgattggttaatctactgtggtttaaatagcttgttgaagtagttcgcttgctgagattattcaatctcactcttgttttaccctccccaggttgtcctttgaagctagcatggagggaagtgggttagttgcacaacatacactcccacgttatcccatataatgctaagatgtgttcttctaaatttatgatatgttaggttatccttatttttgtttgttaaagatgcatagttatcatgttggagaatcacgtttcatatatagtctta

SEQ ID NO: 9611 - DNA, 635 bp, Setaria italica
  Peptide Sequence Number=SeqID_75585
tagtaagtaaagaagagaaggagcaagatggattgaagagaaagagaggatcgagtagatatgatagatcggtatttttccccaacctcccctttcggatttccatggggaagccttggtggtgttgctacgaggcttgtacgtctacatggtcggtaaaggttgtcctttgaagctagcatggagggaagtgggttagttgcacaacatacactcccacgttatcccatataatgctaagatgtgttcttctaaatttatgatatgttaggttatccttatttttgtttgttaaagatgcatagttatcatgttggagaatcacgtttcatatatagtctattttttgttgctttccgcattgtgcttacttcaaggtatatgccgctgaaatttttctagtttagctttttttagtgtagttgtgtagcacctcagaactgcgtgatactggggttgttacaccctggctccatctggctccatctatcgacgtacgtacattgcccggccggacataagtactgaaaacatgcatgggtgggggccagaggtttattgagtaaattcggtttgtgtgctatgggaaattgtaatgttccttattgtgccgcttggactttaaaaaaaaaaaa

SEQ ID NO: 9612 - DNA, 399 bp, Setaria italica
  Peptide Sequence Number=SeqID_75586
tacgtaaccccttcccagcacacctcctccactctccactgctcccttccacctctagatctcctccattgcagcaaggatcgagaagagaaggagcaagatggattgaagaggaagagaggatcgaggagatatgctagatcggtgcaaaggtgactctgaaccagtcagggatggtgttgcagggatccgcaagcaagatgaaggataaagcacaagagcagcttgatggtgcatcggtggcagaagatggagatgcaatggctttggactagttcatataaaagatgtgtcatcactagcaacttagcaagtgttgttcgccccataactatttggatagtaacaatgatggatgtaaggagactttggttgcccagtaacgtaagcttgtggaga

SEQ ID NO: 9613 - DNA, 1596 bp, Setaria italica
  Peptide Sequence Number=SeqID_75587
atctattacaaaagtgacccacaacgatgtgattccaggactatcctgattcctcatttccctactcattagcttcatccgcaccaagttcgtcttcgtgcgtatcttgccttcgtcaatcgagaccttcctgacctcgtgctccggtcatggcgtctcctcgaagccaagtcgctgggagttccgtggaggccttaactttggaaatcttctcctacaagaccacagagcgaacatctttggaccaattagcttcggttaattactaacttcgggagaaggcgcaactacaaagtcagtgttggtgtcggggaaagctccgcgccagcttcgttcagggtgtgcttatggggcgatccccaacaatactatttatatcgaataggttctttgtgcatctctttgtatatattatcatggcttgttctcttgtcattatggactatgtggtatttggattttgaagatggcatttatcttgtggtattgcatttcattgcattgcatggcatttggagttatgtcgcgaacctatcgttacgatcgtaccggtacagaatcgtttattgggtataaagatgcagcttcataccttgttaggtatgaaggcaggagttcatatgcatatgcatatagcatcgtctaattggtataatgatgtagcttcataccttgatggatatgaaggtaggagtttcatgtgcattgatattcatttcagaatggtttgaatgctggatgtgatgaagttacaatgtgaatatactatggtaaattatgcccttatgttgacatgcactgtgctatggtatatgggatttcagatacacgatatgtgggcttttacatccacatgctttgttttacctatatttggatattggattgatatagttacattgaatcaaatatgataagggttcctcttggtggtcatgtgtgtgatatggcttgtgtgtgatatgctaacaaattgacgtcacaatgtgctgcttgatttgtattcaaaacctccaacttgccatggttccccgatgctgaaaattgctcttaactgtagactaataccaatggcaggctacatatggattgtttggttgcatggcttgcacaggaggtggctaactaatggtcactttttagataggacagctgaatttttgacgtgactcaaacattgggctgttctgctggatgcaggtgcaaaggtgactctgaaccagtcagggatggtgttgcagggatccgcaagcaagatgaaggataaagcacaagagcagcttgatggtgcatcggtggcagaagatggagatgcaatggctttggactagttcatataaaagatgtgtcatcactagcaacttagcaagtgttgttcgccccataactatttggatagtaacaatgatggatgtaagggagacttttggttgcccagtaacgtaagcttgtggagacttttatttagctagtgatcatcctgactcttgagaaaaatgtatgtctaaactttgttaaatgctgcttggtctttgtatggatgtggtcagccttttgtatcagtttatcttctacaatttgctacaaaaaaaaaaa

SEQ ID NO: 9614 - DNA, 410 bp, Setaria italica
  Peptide Sequence Number=SeqID_75588
ttatggttttgtggtgttctagctaggagtttgctctttgcaaatgatagggcacgatcaagctttatgtggtatacaacgtactagagatctttgcaaactctgtcaatcattcggtgaggatgtattgcaagttcttttcaactcagctgaggggttatcagcttgctcaacagataatgtgacatttgaattgctgcggttccttttggatgaggcaatagccgttgttgcatttgttgtccattcatttgtcctgttagctcaggcgatcaccctgtcaacatgtattattgcccacaacaatgcattattggctcttctggtatcaaacaattttgctgagatcaaaagcaatgtatttaagcgtgttagcaaagagaaccttcataatttggtatactatgaga

SEQ ID NO: 9615 - DNA, 984 bp, Setaria italica
  Peptide Sequence Number=SeqID_75589
ttggcgaactatatggtggcaatgcacttagaagcacaattgcagtgggtaatgagaaaaaacgacagcgggtgtacaacactatgtttcatgtaccatggagatgcgagcggctaattgtcacaggattcttcgtctgcttggattcatttttgtcattgctcacaattatgcctgcacgaattgtggttactatctggcggctgctgaagaccaggaagtttctgcaaccaaatgctgctgatttatcagattatgggtgttttgtggttctagccctaggagttgcttctttgcaaatgatagatattagcttaatttaccatgtcattcgtggtcagggcacgatcaagctttatgtggtatacaacgtactagagatctttgacaaactctgtcaatcattcggtgaggatgtattgcaagttcttttcaactcagctgaggggttatcagcttgctcaacagataatgtgacatttgaattgctgcggttccttttggatgaggcaatagccgttgttgcatttgttgtccattcatttgtcctgttagctcaggcgatcaccctgtcaacatgtattattgcccacaacaatgcattattggctcttctggtatcaaacaattttgctgagatcaaaagcaatgtatttaagcgtgttagcaaagagaaccttcataatttggtatactatgacatcatcgaaagatttcacatcacagcctttctgctattcgtacttgctcaaaatatcttggaagcagagggtccatggtttgacagttttcttattaatgcgtctttggtatttttatgtgaagtgcttatcgatgctatcaagcattctttccttgcaaaatttaatgagataaagccagttgcttattcggagtttttggaagatctttgcaagcagattttgaatgacaaacctgatgaccgtcagaaggacttaacattcattccccgagcctatcttg

SEQ ID NO: 9616 - DNA, 562 bp, Setaria italica
  misc_feature (486)..(562): n is a, c, g, or t
  Peptide Sequence Number=SeqID_75590
cccccgtcaagcgcggccgcggcaggccccccaaggtacgccccgccgtgcccagcgagacggccgcggcctagtcgtcgtcgtgagagaggttattagggcgtagcgatccgtcctccgcgcgtcacctgctgctgcttcgccgtgttggttaatcttagggttcggttccttgcttggtctaattgttcgtcgtggcttaattaattaatggagtaattaggggagggatttgatgtgccgtggtttctttcgctgttcagttcgtgctgctggtgtgttgtaagctagtaagctctaaagctagggatctgcttctgctgagactgagagtgctgttctggtcgattaatcaggctgctaatgtggatgtgtacaatttaattaattagcggatgatggtgatgttaatgatgttgatttaaggcagggttcttccaagtgccccctagtttgactaacaaaaaaaaaaaaaaaaaataaagnnnnnnnnnnnnnnnnnnnnnnnnnnnnnnnnnnnnnnnnnnnnnnnnnnnnnnnnnnnnnnnnnnnnnnnnnnnnn

SEQ ID NO: 9617 - DNA, 590 bp, Setaria italica
  Peptide Sequence Number=SeqID_75591
tttaagaaccaaactaacggaaagttaacgtaaggtagtagtttagaataggtagtacaattagaaaaataatgacacttgcattggaagcacagagaagttgtcaaattaatttcaaagcagaagaccttgtcctttgttcaggagacagtacgacttctagagtatgagagtggtggtatactagttgcaatcgaaagagttcccaagggttatgcactcatattttaccgtggaaagaactataggaggcctattaacataaggcctagaaatctcttaacaaagctaaggcattgaaacgtgcagttgcaatgcaacgtcatgaggcccttagtcaacatatagatcaactggaaaacaatatcaagcagatgaagttggatttgggcattgagtactacgaggaacaagaggacgatagctcagattcagaaaatgaagatggcacagcagtcacctctgcaagctatgatgaggcatgcactatttccaaaaacctggtactgtttgtttctgaacctccctaaaaattcgccctttactttgtggccaggaccaagacgatttttctgaatcagctgatgaag

SEQ ID NO: 9618 - DNA, 1127 bp, Setaria italica
  Peptide Sequence Number=SeqID_75592
tttccccaacgagcttgggcctcctgaaattcagcaagagtacccgcaagggcatgcccatctaagccatcatctggaggttgtccaatcgaaacgtttcttctctgttcctccatattctggatatcctttgtcaactcctctctttcagccaacacagctgcaacggatgttgggaggaagtcttttccacgatatattacaatgtaaaatttatttcgaagaagcagggtaccccctgttagattctttatttcttctgccataagcttattatttgtgttctgaattccacgttttacagctattttcaccaccaaactcttctcccagagcttaacaattgccgctgccaaaccttgatgattccggtttctccctagtgcaaaatggcatggaaggttcctagctaactttcgcaagttagtcagctctgcattggtaagtgtcgaacgcattccagttggaagaactctatatggtgttttatactcagggattgtttgaggcagcaagtcagcatccactggcaagatacctgttccccaccaatccacaaaacgaggacccaattcatcaagcatttgattgaactccagctcttcctctgtcatgtcctcagtattctgcatgttcaactgggacgcatttgcatgttgcgcagccaaatccttcccctgactatcattctcagcagggctggaggcatctgggatgaacaatgcaccatcttcccccttcacttgtgatgaggcaccattcagagtttgagatttcagaggtcttttgtaattgctccctcggtaaaccaccattacacttccagatctccatatgatcaatccgcctgtgcgtcgctcaacaagctcatgagcagtcttcatgtcgtgcgcgaggtcctcgtggaacttgagccgaaccagctccgatttcctccacgcgtcatggatcttctccgtgatggccgtcgtgaccccggccttgggcaccgtgatgcggtctcgaagggtcatccccagcctgcgcagccgccgcagctcctcgtcctcgatcgtgagctccgccagcgtgggcgccttgacccgcctcctcttggccccatcctcctcgtccctaccccccgccgc

SEQ ID NO: 9619 - DNA, 1640 bp, Setaria italica
  misc_feature (1556)..(1640): n is a, c, g, or t
  Peptide Sequence Number=SeqID_75593
caattgttaagctctgggagaagagtttggtggtgaaaatagctgtaaaactggaattcagaacacaaataataagcttatggcagaagaataaagaatctaacagggggtaccctgcttcttcgaaataaattttacattgtaatatatcgtggaaaagacttcctcccaacatccgttgcagctgtgttggctgaaagagaggagttgacaaaggatatccagaatatggaggaacagagaagaaacgtttcgattggacaacctccagatgatggcttagatgggcatgcccttgcgggtactcttgctgaatttcaggaggcccaagctcgttggggaagagaagtaactgctaaggagcaagaagaaatgaaagaagcatcttccagatcagaaaagcaaaagctttacaggaaactcgaacacaagctttccgttgctcaggcaaaaatacatagagcagaacgcttactatcaaagatcgaagcttctatggtgctcgctgatccatgtgatgatcgggaaatgattacagatgaagaaaagtccgttttccgtagaattggtttacggcttaagtcatatttgccactcggagttcgtggtgtgtttgatggtgtcattgaaaatatgcacttgcattggaagcacagagaagttgtcaaattaatttcaaagcagaagaccttgtcctttgttcaggagacagcacgacttctagagtatgagagtggtggtatactagttgcaatcgaaagagttcccaagggttatgcactcatattttaccgtggaaagaactataggaggcctattaacataaggcctagaaatctcttaacaaaagctaaggcattgaaacgtgcagttgcaatgcaacgtcatgaggcccttagtcaacatatagatcaactggaaaacaatatcaagcagatgaagttggatttgggcattgagtactacgaggaacaagaggacgatagctcagattcagaaaatgaagatggcacagcagtcacctctgcaagctatgatgaggaccaagacgatttttctgaatcagctgatgaagatgaatatgattacgatgatgatgaagatgaggagaatgacagcttgtaatatggaattttgtcttgtgatgtgcagttctgaagtactgatcctctatgttatactgctgtccttcggacattcatggagccaagtttaccgatggcccttgattggtgccgcagtgactgcatttgatgtctgtacttccttgcttcgttcttggcagaatgggtgtcgagatccaccttgttaacgatgtgattcatgagatctatgctcacatcatcttttctctctctttcctttttgcctttcttactttgtgaattgtgactatagcttagagggctcggtgtaggaggtatttttcttcttttctttctccaattctatccagaaaatatacctggcacgagcattgtgtaactcagtccggctggaggcataaatttgagcaaggatgtttcactgttcaaaatcaaaaaaaaaaaaaaaannnnnnnnnnnnnnnnnnnnnnnnnnnnnnnnnnnnnnnnnnnnnnnnnnnnnnnnnnnnnnnnnnnnnnnnnnnnnnnnnnnnn

SEQ ID NO: 9620 - DNA, 420 bp, Setaria italica
  Peptide Sequence Number=SeqID_75594
cctgtattggctcatcgagaggatggtcgatctgagggtggcggataatgcggtgatgctgtggagtgatcaggttgccctggctactgatttgcagaagttgctgagtgatgcggacatgtggaggaacatgacgcctgggcttccggtgcttgtgaccagatgcacactcaggctcgccaattcagttgtcactggggagactctggtacctcggcaggagcaattccaataaggattggatttatatgtatgtaaatattgttattggagttagggatggtaaagagctgaaagaaggatatctttctagaggatggtaggaataatacttgaacccagattgtattcagacaaaaagcttctacctgccaactgaatattttttaataagtcagccaggacaaaaaaaagagagcg

SEQ ID NO: 9621 - DNA, 442 bp, Setaria italica
  Peptide Sequence Number=SeqID_75595
gtactgtttaggtttattttaatacaaatttcccttccatccgtgcatgtgcagtttatgtatctattggctgatgtttccttcgagccatgcaacattctagtactttgatgtcatgtaattgtcaaactgaaccgcaacctcattctttccattgcatctgtgcatttgaagccctttctactatatgtcttgtcatcaggtgaggacgaagctcgtcagttgctggctccctgtcctgaacgtctgccggggcatagttcaaccaatgcacttccacaaatcaacgaactgccaggagctggaggaggcgtttcttcagatcatctccactctgcccgtcccagaggcccaggagctgcttcggcaatgtctcgggttctcgacccgcaacgtcgacgactgcccgcatctggttgccgcgttcaagacgtggttccgg

SEQ ID NO: 9622 - DNA, 601 bp, Setaria italica
  Peptide Sequence Number=SeqID_75596
ttaagtttagtagaattcaatttaggttaagtgctattcatgcattaattgaagtaataggttgcgaacaggattatcttgcatgagttggttgaaccgatgaagttgttcagacttcagagtgatctatttttgacatgatttattaatggcgtgggttgcactgtcatttttggtaatacaacctgtataagtgctttgatgttgattggtaacctgaatgagtatttgcgtgaatttacaggagcaattccaataaggattggatttatatgtatgtaaatattgttattggagttagggatggtaaagagctgaaagaaggatatctttctagaggatggtaggaataatacttgaacccagattgtattcagacaaaaagcttctacctgccaactgaatattttttaataagtcagcccaggcaaaaaaaaagagaggaaaaacccccgctcaggtctgctgtcagatttgtgaacaagaccacaccattgacattctcttgaaaccacaaccagaatttttgtcatcataaaaacaaagctttgcctgaaggccacaaactaaagatattcaaggatgcgttaaggaatgcccc

SEQ ID NO: 9623 - DNA, 1119 bp, Setaria italica
  Peptide Sequence Number=SeqID_75597
cgggtggccgtctctccctcgccgtggtggcgtccccctcgtgctctcgcccattccacgcccacgtcgaggtgctccgcctcctccacacgctcgacttcgcgggcgccatccgctcccccggccgatgccctcgacctcctccccgtcgcgctccagctcctctttgacgcctgcgtcgaggcttgcatccgcttcctcgaggcggtgccctggtccgaggacgaggaggcccgcgtcatcgacctcgccccgctcctacccgccgatgaggcaaccgacctgctcgccagggtctcccctccccccgtcgccactggtcccacttccgctgcgggggaggccgccaggtctccctccgaggccatgctgcacggcctgatccactcggcgatccatggccaccccgtccacgctgccaccaaggcgttcgtcgcgatgctcctcaaggactacccgtcgcgggactgcgtccacaaggtgctcgacgaggcatttcagtcgcgcctggagacagtcaaggagctcatggggaagtacgccagcccggacttcagggtcgctgtggacagtgacgaacgcgaggccatacagaggctgaacctgcattctgcagtgttgaatgtgaagcacctgtattggctcatcgagaggatggtcgatctgagggtggcggataatgcggtgatgctgtggagtgatcaggttgccctggctactgatttgcagaagttgctgagtgatgcggacatgtggaggaacatgacgcctgggcttccggtgcttgtgaccagatgcacactcaggctcgccaattcagttgtcactggggagactctggtacctcggcaggtgaggacgaagctcgtcagttgctggctccctgtcctgaacgtctgccggggcatagttcaaccaatgcacttccacaaatcaacgaactgccaggagctggaggaggcgtttcttcagatcatctccactctgcccgtcccagaggcccaggagctgcttcggcaatgtctcgggttctcgacccgcaacgtcgacgactgcccgcatctggttgccgcgttcaagacgtggttccggcgcgctggccgggctcctctgggtggc

SEQ ID NO: 9624 - DNA, 463 bp, Setaria italica
  Peptide Sequence Number=SeqID_75598
aattcagaaatggcttcatcacagcatgttgagatggaggctgcgaaacttcttcataaacttattcaggagtccaaggatgagccttctaaactagcaacaaaactttatgtgatatgtcaacatatgaaactaagtggaaaggagcagtcactgccatatcaagtcatatcgagggctatggagacagttgtaaaccaacatggaattgatatggaagcactgcgatcatcgcgaattccatttgccggtggccctcacgcaggtgattctagtggtgccatgtcaaaagacaaggaggtcattggtaaccagtctcccatggttggaagtgacgcatcccagaatagtgggcaagctggattatggcagtttccatcagatatgacaaggcatgtggcatctgtttcgggcagggttaccaactagggcctaaacttggggttgtattttcccagcagct

SEQ ID NO: 9625 - DNA, 1405 bp, Setaria italica
  Peptide Sequence Number=SeqID_75599
ttttttttttttttgtctgcataataccatacattgttgttcatcatggattgaaacatcgctgattactccttgagtataaccttgataatttgtcaggcgcccagatgcggacaatgttgaatatgacttcagtgtccagacctgctttccagtttgagcactacagcagtgatatgcaaaattgtgcattttcaccaaatcaccaattgaaatagcatttggctggcaaattcagttgccagatcaacctttttacacatgtcatcagctcacaaccaaaatcttcactggttctaagttagacaccagttatttctcaatttcatcagatgatgaagcagatgctgccagcagagaagaaagtgatggacgtagtagaagatacagtgagggccccacaaaaggtatcagcgcaagcagcagaagccatgaaccatttttccatcgtcttgctgtcatgtcattgtagacccagaatggagagaaggcagagagcaaagtgaaatcaaggcaggtggcatgaataaacttgctctccctaaagtagcgaatgaattccttccaatcatcacctccagctttgcctgcatatataatcagtccaatgcccagggcaaataccactcctgcagttaactttgactcaagaaatttcaatggccattgttcaatttcatcttcatcaataggaggaggtggaggcttccatagaacaaagtaaggaatcaaagcatatgctcctccaatgcatgaaagaaccaggaatggccatacagggatcttgcttttggaacttctaccagtaggaaggagcaacatactgtagactagcggccagatgcccataatataccacagagcaacaagaacgtcattcattcgaaagccatcatcacctttcagatttaaaagtttctgcaagaagtatgtgtctctgtacggggtctggttgggcgcgagctggaagatgtagtacatgaaccccgcccagatgccgaagatgagcaccgacgtggtccagtcgctcagcttcccaccgccgccaccgccactcgcaatccgtgcagcagcagccgccactgcctcgctcttcttcttatcctcctggtcctgcgcaggagagtcggcgccgggaggtccctggagcgaggagtcccggcatatttgagcccaccccctgcgccgctctcccgtgcggcacgcggcggggctggcaaacagaggggcaccggctgtggagcgcctggtgatgccggccaaggcgattctcgtgacgtggaggctcggcagtggccttggagagaagcgtggacgcaggtgagcacgaggtaggtggaggacgaggaggccatggcggctcgtggtggtagcgctggtggggtgggggcgtggtggtcggtga

SEQ ID NO: 9626 - DNA, 847 bp, Setaria italica
  misc_feature (1)..(42): n is a, c, g, or t
  Peptide Sequence Number=SeqID_75600
nnnnnnnnnnnnnnnnnnnnnnnnnnnnnnnnnnnnnnnnnnttttttttattagcccgggtgacgaggcaatttattaagcttggtacttggtatcgttatgcatcagacatcattacacgcaaggtaaaccgcgaatgtaccatgcgaatcatgccagagtcaagctacagtgtacatgtttacaacgacagtacgacacaccgattatactctgcagaaacctgagacacatatcaatagctatgttcagaacatataggagcacgggtattcatctgttaaacagtcatcaggcagaacggttgtgcgctaattagccgcagcaggatccacaagcagggagagaactgtggtcattggatcgaatgtcagacagcgtgcgaggaccacgggaaccaccgccgccaaagcctccaccaccgccgcctccaccgccatatgggccgcgcccaccaccaccaccgggtccaccatcccatttcttaccagagccatatcctttcctgtagttgtctgttttttccactgagaacattgtgagaaagaagactctgatgaagttcacaacagcacgaaagaagtcagagattatgctgagtcgccatatagtccgcttgtctttcacaacacctctctcgacgtaagccatggtcgccctggatccccttgccgccctctgcgatggaaactaggatggcgtgttttggttcggcgcgggataataagaggtgaagggacaagccaaggggattcccgaaccttcctcgttgtgcgtggagaccgccagagggcagaggtgcttactcgtgaggccgatgcggtcgggactcgcagtagacgagcg

SEQ ID NO: 9627 - DNA, 500 bp, Setaria italica
  Peptide Sequence Number=SeqID_75601
tccgtcgccgcccgcgccgccgtctcctcccgcgtccggcccaccgttttcacctgcaacgccgtcgccgcggccatggtcctcgccgggcgccacgacgacgccgtcgctctcttcgagttcttcttccgccgctccaacatcgtccccaacatcgtctcctacaacaccctcatcctcgcccactgcgaggccgtccgcgtcgacgacgcgatgcaggtgtaccgcgacatgctctcgtcggcgcccttctccccctcctccgttaccttccggcacctcaccaagggcctcgtcgctgccggacgaatccgtgacgccctcgacctcctccgcgagatgctcaaccgcggggctggcgctgactcactcgtctacaacaacctcatcgccggctacatcgacctggacgactgggacaaggccttcgagctcttcaacgagctcacggagaggtgcgctgtctatgacggcgtcgtccacaccaccttcatggaggg

SEQ ID NO: 9628 - DNA, 2129 bp, Setaria italica
  misc_feature (2016)..(2129): n is a, c, g, or t
  Peptide Sequence Number=SeqID_75602
agttccgccacctgctcatccgcgggggttcgccgctcgccgccgaggacctgcaggcgtccctcctccgccggctctcgctcacggtaccctccttcaactcctccgccgtagacctagattgcccctccttcgccatccacgccggcgagggcggagacgagtctggcggcaggagctcggtctccgatgacgagatctcgccctacctcatcgctccggacaccgtcggcgccctcagggacatcgcggacgtcatgctgcgcgcgggctacgcgcccgagctgtgccaggtctacggggaggtgcgccgggacacgctcatggagtgcctcgccgtgcttggggtcgacaagatgagcctggaagaggtgcagcgggtggagtggggcgtgcttgacggcaagatgaagaaatggatccaggcgctcaaggtcgtcatccgaggccttctcgctgaggagcgccgcatctgcaaccagatccttgcggccgacccaaacgctgaggaggagtgcttcactgaggcggccaaggggtgcgtcctgcagctgctcaactttggtgatgctattgcaattgggaagagatcatcagagaagctattccgcatccttggaatgtatgaagcgttagctgaggtgctaccagagctcgagggtttgttctcgggtgaggccaaggatttcatcaaggaagaggctgtggggatacttgtgcggcttggagatgcagtgcgtggtacgattgctgagtttgcctgtgccatacagggagagacttctcggagaccgctgcccggtggggagatccaccccctcacacgttatgttatgaactatgtacggcttcttgcagattacaatgcctcgctgaatcaacttcttgagtattgggacactgagctgaatgggggcgataatccaaacatgactccgttggggcattgcgtgctcatgctgatcacacacctacagagcaagattgatgagaaatcgaggctgtatgaggatgaggcactgcagaacatatttttgatgaacaatctgctgtacattgtgcagaaggtgaaggattcagagctgaagacattgcttggtgataactggattcgcaaacgccgtggtcagataaggcaatactctacagggtatctccggtcatcgtgggctaaggtgttagcttgcctgagagatgatgggttgccacagacaatgggttcgtcaagtgcactcaaggctgcactgaaggatagattcaagaacttcaacttggctttcgaggatttgtacaggacacagacatcatggagggtcgtagatcctcagttaagggaagaattgaagatttccatctcggagaaggttcttcccgcataccgttcgtttgttgggagatttcggggccaactagagggagggaggggttctgcaaggtatataaagtacaaccctgaggatttggagaaccaggtctcagatttctttgaagggaaaaagccaaatgcttgatggtcaagggatgttcatatcaatggtgcaacctcctttctatgttcagggatgtctatatcaatggtgcaacctccaagttccatgcagattttgatgatgctagttccaaaccccgtccaaattttattggcactactgtacagggaacttgaccttccaaacatcttttgaaggtctgaagatggaagcataaacttttcctgactgacagaaatggtgtgaactgcaaagcaaccaaaattgaatgatttagcttgtcatccttgatcctgccaaggtgagtgatgacattattgaggcttgcacatggaattatgacaactgaatctgtcatgagctgtgtaattccaattcttacattttgcccttcttttgttgattgtaacatctcgtgactattgtttgacttcaaagaatgttggtgcttggcatttttatgtacaattatactagcagttatgtccacatttaacttgctagtaaaaaaaaaaaaaaaaaaaannnnnnnnnnnnnnnnnnnnnnnnnnnnnnnnnnnnnnnnnnnnnnnnnnnnnnnnnnnnnnnnnnnnnnnnnnnnnnnnnnnnnnnnnnnnnnnnnnnnnnnnnnnnnnnnnn

SEQ ID NO: 9629 - DNA, 353 bp, Setaria italica
  Peptide Sequence Number=SeqID_75603
attctataactggtgaagactcaagagctaaggctttatcacgttggtttgctaacttcagagtgtgattcagatgtgtggttaaggagggcctctatttttctgaaagcatctcccttaccaccttctgtgtgtgcagacatgagtttttgtcacacgtgtgctgcaaattcccgatcattgtatctttgcaattgataaatttgaacaatgagatgctgggaagtggaaagattagcaacaaggttaggctttgttacatttctattcttctttccactttttgaataagaacataaatcagaaatactggagaggttgaaaagcattcacgttcttgatttgctgtctaa

SEQ ID NO: 9630 - DNA, 325 bp, Setaria italica
  Peptide Sequence Number=SeqID_75604
gtctccgactcagtcgcactagtgtgcgccgacgccgtgccgcgcaactcgtcggagggacacttctgcgggagctgcaacttcggctgccccaccggcgacaagcgcggcaccgacacgacgtggctcgtggacgccgtcgcgagcggcgcggtcatactaacaggatgcaaggccgagtgtttcatactcgagagcaactccggcgaaaacgcccggcggagcaggaagtgcgtgggcctggtggcgacgtgcatggttgctggcgtcaccaagaagctgcgcatcgaggccaaggtctcgatcgcggcgtgcggggcgctga

SEQ ID NO: 9631 - DNA, 596 bp, Setaria italica
  Peptide Sequence Number=SeqID_75605
tttttgtctagtagcgaagaaataactgcattgtagagcactggatcggatcttattgtggcatcttggatgctgtcaatcatctgaataaccttgttaattctaccttctcttgagagggcgcaagctattgatgaataaatgattgtgtttggactcatccctttgttgaccatcacatttaacagctccagtgcttcatccgtcttgccagccttgccaagcccatcaatcactgtgctgtaactaatcaggtcgggactgcaaccattcactagcatctgcttaagaagttcaatggcctgctcaaccattccctttttacacaagaaattgatgagcgtattgaacgtaaaggatttggaggacaaccttgctgaatcatttgagccatcagctcctcagcatccacccatcgttccgcgctgcacaaacctttcagcacaatagtatagcttatggtattcggcttgcatccgcaggctgccatacttttcaacaacatgacagcttcgtcgataagcccttctttgcagaagccattgatcaccgtagtgtatgtgatgacgtccggcatgcatccgtgctccaacatc

SEQ ID NO: 9632 - DNA, 1306 bp, Setaria italica
  Peptide Sequence Number=SeqID_75606
ataacagcatccggagctttcagggcagcttctgcttcttctctttttgagaactggacaaaagctttttcactgttagatgggatataaatatctattacttgaccaaacttctgaaaatgcgagagaagggcctcccatctgttgttttcttggggaattccatgtacataaagtgtacgggatgctttgtgagcagctcgattactttgccggcccacgtctccatatattctcgaattggactgaccattagtatccttagcagcagcagactttgattgggccgtgctgggagccatctcatcataatcacttttttggttccggtggtacttgttgatgtaattttagctgtgttactagtccctgattttctctttgatgctatccgcccccaaacagaagacttcaaaccctgcgaaccatcagtagcaaaaacctggtttgaatgctcctgccccatttcatagcctgaggattcaggattccacattccagcatcagtatgtacaaaaccagcacatgaagcttctgggtgttcattgttccatagaggctgatcaggatcatatacatcagcatcagcaacagctgaagtggtgcttccatttagctttactgcgtcgcttgcaacaccagatttgacctcttttgcaggaacacttttactgaccgaaccagtacctccctcattttggattcccagtccttgagtatttggaacagatactggaagattgaattgcgagagactctgcatatcatcaacaacaattctattaacaccatgctccatggggcacatatcccctctcaggcaaaatccacgttcctcgaagtctctacagcgttgacgaggcaggccaagatcaatcaaaggagatactgcaggctgaataggaccttgcatcccaagtgggtggattggatccaaaattccatgaggcattccaggcataaatccatatggaccacttggcaatgcagcgcccataaataagctagggtgtgcaggtggtccttgtggagccatctgggatgcaaaatccatcatatcaagggtgttaaatcttgggtcatgctgagtccagggtgcaccattccgtcctcttcctcgtggagggcgagcagcaacagaagctgatgaatcggctcggaaggattggttcactctaggcgctcgactgtgagctcctgctccgggacgcctcttgaattttggcataaaatccttctgtgattcgccttgagaaccagctccgccaaacggttgcccattaccagaaaccctgcttccttttta

SEQ ID NO: 9633 - DNA, 376 bp, Setaria italica
  Peptide Sequence Number=SeqID_75607
ggggaaaagttaacttgagccagtcttcctggctgtagcctgtgatgttcagccgcttaataacaccactttctccaatttaggctttatatatgcctcaggttgaccggagagtggagagactttaagaatttattattcaatcaacatatgtaagtaattatatgctatagctccaacaagttaccagtgacctttttattttttgttcgaacacctcgttcccatttttcaaagtccttaatgttcactacatttggggaaaaaaataaagatggactggtttatgttagacgagggcacttttagcaccctgattagctaactttttgttgccatgtacacatgttttgtcaaaagtggatgattaaaccac

SEQ ID NO: 9634 - DNA, 531 bp, Setaria italica
  Peptide Sequence Number=SeqID_75608
caaacaacgcagcagaaaggtacctagattgatgccaaatcgtctggcagatgtctcgaaacgagtctcaacagatacgctaattaaaagatcccatcacgatatcgacagaacatgacagacaaattcctaacttcctcagatcgcggcccacgaacggcccccattaccgaacccgcgcggcggctccccctcaggcgaggtcggcgtcgtcgaagtcagcgccgtcgaagttgttgtagaacgtggagaaggggaggggcccgcggacctcggcagtgcctccgccgcggcccccgcggtgcggggcgaggaacaactcctcctcgccgtcctcgtcgaggaagccggccccccgcggcgccgagcggcgagtcgtcgatgtccatgagcgtcgagacggcgtcgtcctccatcgggaagagcgggtggaagacgtgggaggcggcggcggcgggcgagaggctagggttctgggggcggtggtggtgcgggggcgcgtggtggcgggctagctagtgcttcttgctt

SEQ ID NO: 9635 - DNA, 467 bp, Setaria italica
  Peptide Sequence Number=SeqID_75609
cattttctagttgaatagaccacatactcggaattgggaaaattaagtgatacccttatggcaatgggcattgcagtaatgtaactaaatttgtatatttcggaagaacttacatattttcatactcgtggaggactggaggtaaatctagcttttttccaacttcatgactcgtgtgttaagttctgaactggaagccaatttgcaggaccaattggggccaagagtatataaggcctatagtagctaagttccttttttccttttatgattggaagatccctccttctttgcaatttcctggctagcagtagggtaaccaacaaatctatagatagcaatcagctagtccctttgtgctattgaaaacttgcatgatcattattctaaatttaaagctagagaaattagttaatttcaatatacttcctatgtatgtttttttgcatctattatattccaatttg

SEQ ID NO: 9636 - DNA, 447 bp, Setaria italica
  Peptide Sequence Number=SeqID_75610
tcattgttagcggtaagaggcaggagcgtctaccagtctttctagctgcagcgtcaataccctgctccttgctggatacagaagctgcaccattatcctctccataaagcaaggagatctcagggtgaaggtcatataaggtatccttggtacgccgtggcccagctcgacgggagtttgcagagcactccaatcgagaagaacgatagaaaccaccagaaaaccacttctttctctgaaaatttcttgcactttcaccaagaagtgtgttcccaacatttttcggtgaaatgcctaatgggcactggcaactggaaacattggaaaagactagctgcgctgccatcctgtactctgaatcagagttttgattgcacaagagaatgtagcctcaaatgcctcggtaactagttccagaggagtttttgccttgaaactgttcactgg

SEQ ID NO: 9637 - DNA, 260 bp, Setaria italica
  Peptide Sequence Number=SeqID_75611
cttcactcttggtctctcgcggcgacgatttggcgcgcggcagcgccttcccccaccgtcttcgccgggccctttgccggcgacgagcgcccaacagaattctctggagcgagcgtctcaacatgtcttgggctgcaatcgagaatgatcctggtgttcttacggaactgctgcagcagatgcaactgaaaggtcttcaagttgatgaactctactcacttgacctggatgctctcaatgatcttcagccaatttatggg

SEQ ID NO: 9638 - DNA, 620 bp, Setaria italica
  Peptide Sequence Number=SeqID_75612
ctgtgtacatctccttccggttctttcaagattgccatcacactgaaccttatctcattctgagtgaaccggaaggagatgtacacagcagagctgaaagacctgcagaggaagagggagaacctcttgcagcagatgggcgatacttctgccaggcatgtgccatctgtcgagcagtctctagcagaggtggctgctcagatcgaggctgtgacggagaaaatcataatggaggaagagaaggtgaagaagtggaagacggagaacaagaacggcacaactacgtgccgttcttgttcaatttcctcaagatttcttcgaggagaagcagcagttgatgcccctgatagagaaggcaaaggcgaaacagaagtctcacagtcacagctccaatcctaggtgaaaaagctgcaatgcatccatattgtttgctttagttgcgatttcttgtagagattggctgtgactaggagcagatccaggatccccccaccttatccattaataaaaaatggtcatacaagaggttcgtggcacaatacaaaggatgtataatgagtgaccattgctcttcttcctcagtttcactaacttatacatggaaaaaaaaaaaaaaaaaa

SEQ ID NO: 9639 - DNA, 1361 bp, Setaria italica
  Peptide Sequence Number=SeqID_75613
ctcttggtctctcgcggcgacgatttggcgagctgcgctgcccgcccgttcttcgttgggcgacgggcgtttcgccggcgacgagcatccaacagaattctcggagcgagcgtctcaacatgtcttgggctgcaatcgagaatgatcctggtgttcttacggaactgttgcagcagatgcaactgaagggtcttcaagttgatgaactctactcacttgacctggatgctctcaatgatcttcagccaatatatgggctcatagtgctgtacaaatggcgacctccagaaaaggatgagcgtcctgtcatgaaggatacagtcccaaaccttttctttgccaaccagataattaataacgcgtgtgcaacccaagctatcctttctgttctcttgaactctcctggcatcacccttagcgatgagcttaaaaggctgaaggaatttgcaaaggacttgccacctgagctcaagggattggcaatagtgaattgctcaagcatccgtatgttgaacaactcatttgcaaggtcagaggtctccgaggagcagaaaccatctagcaaggatgacgatgtctaccacttcataagttatgttccagtggatggcgtcctgtatgagcttgatggacttaaggaagggccgataagcctggggaaatgctcaggtggtgttggtgaggccggatggcttagggtggcacagcctgtgattcaagagcacattgatcggttcactcagaatgagataaggttcagtgtgatggcaatcttgaagaaccggaaggagatgtacacagcagagctcaaagacctccagaggaagagggagaacctcttgcagcagatgggcgatccttctgccaggcatgtgccatctgtcgagcagtctctagcagaggtggctgctcagatcgaggctgtgacggagaaaatcataatggaggaagagaaggtgaagaagtggaagacagagaacatgaggaggaagcacaactatgtgccgttcttgttcaatttcctcaagattctcgaggagaagcagcagttgaagcccctgatagagaaggcaaaggcgaaacacaagtctcacagtcacagcaccaaccctaggtgaaaaagctgcaacgcgcccagtgtttgttttagttgaggtttcttgtagagattgtgtctgtggcccatgttttcttggccagtgtttgaatctatgcttacccctaatcttagctagtgcacaaatgtctgccaaaatatgttcaggtgaatggatcttgaaggggcgagtgccctgtggagtttacccagtcatactgtatgagaactatacactttttttttccttcgtctaaaaaaaaaa

SEQ ID NO: 9640 - DNA, 697 bp, Setaria italica
  Peptide Sequence Number=SeqID_75614
cgcctcccgcatcaaacacgagaccgtcgacgaggaggccggagagagagtgggcgagcgcggagagaagatgatactggccgtgctcttcgccaactccgacggcaacatcctcatcgagcggttccatggggtccccgcggaggagaggctccactggcgctccttcctggtgaagctcggatccgagaacctcaaaggctccaagaacgaggagctccacgttgcttcccacaagtcggtctctattgtttataccacaattggggatgtctgcctgtacattgttggcaaggatgagtatgatgagcttgctttggccgaggtgatatttgcaattacatcagcggtgaaggatgtctgtggaaaacctcctactgagcgccttttccttgacaaatatgggaggatctgcctgtgccttgatgagattgtttggaagggtctgcttgaaaacacggagaaagacagagtgcggaggttgattagactaaagccccctgttgagccatgatttccatgtgttgttgtgtattgctgtaattcaaatccaatctcatttacatttataggctaaagttcagagtttgcctctgccctttgtatctataagaccatcactcactcatttgaggtctgtgtgcgacatttacagaagatagtctatgaatacgtgaatttgttgttaaaaaaaaaa

SEQ ID NO: 9641 - DNA, 273 bp, Setaria italica
  Peptide Sequence Number=SeqID_75615
atttttaaaagtataagcacttttaatttgatggatctgttgatatttaagataaacatagcaaacaataaagtattgaagttctattggcctgtagcatcatttaggacacttctgcattgaattcaaatttaagaagaaacactttaatgtaaacagagcaaaaaaaacgaaccacaaacaattgtaccacatgttttcacgacacatcactgtgcgctagaaacctttcagcattcatattatgaaatcgataactcatgcagagaagga

SEQ ID NO: 9642 - DNA, 254 bp, Setaria italica
  Peptide Sequence Number=SeqID_75616
agaaatgcactttctaaacgcccagggtcaaggtaagctaccgggaaaaacaaaacaaaacaagctgagtacagaggtgaaaccagtacagcactacaggcatctcggagatcggcctgaaccatcacaagagcacgtcacagcctgcacgagcgcatcgatcctaaaattcttacagaaagcccctacacagcaagcagacggccaacttcatccatccagatccagaacaaccaaaaaagccccaatctctc

SEQ ID NO: 9643 - DNA, 400 bp, Setaria italica
  Peptide Sequence Number=SeqID_75617
acgtaattggagtgatggatttatattgatattgctaaccaagatatcttttttgaacaattgaacgaaaacaacatcatgtatgatatgcatatcttttacgaaaatcttagtgtgttcaattgatgttcttgagccatctgaaattaatatcctgcaacatctccttggttcttaacttgggtgtcgcatttcgatatcttggaatccatgatgaaaatgactgtagtcttgttagataaataagaaaagatcatttaaacttagagaattttgaacatcaaattttgatgatatcaatatgttaccacgaattactctctacacactcaaattcaagtaattgatcacctgcctgcacaattagaaaactgagcagttttgatgaatgattatcttg

SEQ ID NO: 9644 - DNA, 338 bp, Setaria italica
  Peptide Sequence Number=SeqID_75618
gcggctcgacgagatctccgaaaaccgcgccgcctacaacatcgagcacacgcccgcgccggcctgggccgcctcctgctcctccgccctgaatttccccggcagggacgacctggaggagtacacggttggcttggacaagtacagcgacatgctgaaagagcagctcctcgacgacgccgtgaccgcgcgcgccgtcgtgtccatctccggcgagagcagcatcggcaagacgacgctggcgcggaaggtgtaccagagccccgaggtccgcaaccacttcgagatccgcacgtggacggtgctcccgcacaagtgccgcgccgccgacgtcctcc

SEQ ID NO: 9645 - DNA, 1835 bp, Setaria italica
  Peptide Sequence Number=SeqID_75619
tttaagcttaactaaacagagcttcggtacgcaaggatagacaagggctccccggattcaggggacataaccacgaatgctagaagcctaatccacctgatcccagacatactttacacatccgcccaaatactactgactgggtcaatttgatgattggtacaataacaaagaccattctcatcgcagctagatcccagggcctcaatcagggcaaaatccgagatagctcaaacatggcagctttacctatgtgacaagccaacaacttccttgatcccttggaccccaatggacatgttgcatgctctcttgagtcttcactctctgcattccagggataagttgcatactctctgagtcttcactctctgcattccagctcccagtgttatctaagatgcagtataacatcattcctcgatggtccactctactttggaggcaggccagtgcagcttttgtaaattgcattcaatactcaacagacaagctcagattcagcaatacagccactgcccgctgcacctcaaggttgccatgaaccattgttgggcatattgtgatgaccagacatcctatctctgcatgaagggcaaatgaagccaaaagaaccagcttgctgtccgtcaactggtccaaaatggtggaactggctgttgcaccatatgcatacacatgtgaccatgctgcctccagtaaccattcttggcaaggacgaatcccatcctaactggactgctggtggagggacagttcccatctgtggtgcataccccaacactagagttggctccgatgtgctcacaaaattttgaatgggcatgtttccaaactgtgacgatacagaaggatgtacagaatgtgttctggatatgcttccaagctgagaggattcaacaggagctgcagaattaggtcgagccatactcccaaaagactgagaagaatcaggaggtacagaatttggtctggccatgctcccaaactgaggggactgagcaggaggtacagaattagggccagccatgctcctgaactgggaggtattagcaggaggtacagaatcaggtcgacccttcctcccaaactgagaggattcaggagatatagaattaggttgaaccatgcttgcaaattgagaggatgcagcagaatgtacataattaggttgagcaatgcttcctagctgagaaggtgcagcaggcacagaatttggcctggcaaagctcccaaaactgtggggttccagaagggaaagatttaggtccgtccatactcccaaaattgtgaggatccagtgggtagagaactattcctggcattgcttccaagctgaggggatccagttgcagccgatctaagctctccatggctagaaaatatttgctgcttttgggcaccaaatccaagttgcaaatcacactgatcttgggatgtgctggtcactggaacatcgccaacagattggactgcagaggacatgttaacaaaatttgcctgtgtagacataagaccattgacatttcggcaagttctagatgcagcatgaggttgacaaccaggaacacaatcattatagcggttttgcatctcattattcgacttccgcatcacctcaagcatgggtacatttggttcattgttattgatgggtttgttggcaaatgaaccctttgcgaagttgacatcacctctattagccaaagagcccttcatgcagttgacatcacttccacttcccttgataaagttacctgctgccagagtgtttgattctggttgtgaacaatggctagaagggggttttatgtgagtaaagctgttattgaatt

SEQ ID NO: 9646 - DNA, 1065 bp, Setaria italica
  Peptide Sequence Number=SeqID_75620
ccatcgtcggctacggaggagttgggaagactagcatcgccaccgcattgtacaagaaactcggggaccaatttggctgccgtgccatggtgacggtgtctcagagttccaacattgaggctatcctggacaacataaggagtcaggtcaagcctcagagcaacaaggatcaggagcgacacggccgttcggaagagagctgtctcgcagcagccttggaaggcttgcaagctcaaatcaggagaggcaagtcgacaattaaggccaagtgccgatgcctcggcaccgcgcaggaaacgaagggtggcaccaagcgaaaccagctcaacgacgagctcaagggccacttccagaaaaacagttatttggttgtgatcgatgatgtgtggtctgcgacgacgttggaggatatcagaaaggcatttcctcaaactgataagcatagtgaacgaggaagaataatagttactactcggttcccagcagttgctacagcgcgtagagaacaagaaggcgatcgtgttcataaagttgtccctctttcccttggaaaatccatggagttatttaaccaagcttactctgaatccaaaccaagtgaaaatgtaagtgttccagaggaggtatggaaggtatgtgggggtttgccattggcaatagtggccatgtctggttatgtggcctgcaactcacacaaacatctggactgggataaaatctatactaaattatttcctgacaagaagaggcgcgaagaattgaagagtggggacatccttaattccacccctgctgaggcgggtaaggatacaaggaaaggtcttacccaggaggagttaggcaggatagttagtcattgctacaatgatatgcctgctgagatcatcacctgctccctgtatttgagcatatttcccaagggcagcaggattagcaggaagcgcttaataagacgatggatagctgaaggctttgttagtgagaaggacgggatgggtgtggaggatgttgctgagacgtactttggccatcttgtgaggaggaagatgatacgatcagtggagc

SEQ ID NO: 9647 - DNA, 2631 bp, Setaria italica
  Peptide Sequence Number=SeqID_75621
gcccggtcgtcctatgggctgtgtcagttccaagcaattccacggcggggacgagcatggggacgggaagccgcgccggcgaccctcgagcaactcgctgaagcgcctggttagttacagttccagcaagaggcatgaggacttggaagaggaggatgaggaaggggcagttgtggcagccacgtcctcgaccgccggccgctgtgctgggaacgatgccagcactgcgaggctgatccggaagcctccagcaccggtggttgaggctgtaccggcattgccagaggaggcagccactttggcgataggtgtcgttgatgccgagagggcagttgctgctgcagctgggaattggaagcgggctccggcggatgtacaagtcaatggcgcagcagagcaagagcccaggagtgcaggtcctaggactgagggggaggccaaaccaaggatcagggatgtgcccaatggagtccagggggagcatgtggcggcagggtggcctagatggctcacagaggtggcagcagaggcggttcgtgggtggcagcctcggcgggcagagtcttttgagaagttggacaagataggacaaggtacatacagcagtgtttacaaagcacgtgatcttgagaacggaaaaattgtggctctgaagaaagttcggtttgccaatatggaccctgagagtgtccgatttatggccagggaaattcacatcttaagaaggcttgatcatccaaacgttgtgaagcttgaaggtttggtgacgtcacgcatgtcgagcagcttgtatcttgtatttgaatacatggagcatgaccttgcaggacttgctgctacacctggcttaaaattcacagaacctcaggtcaagtgttacatgcgacaactactttctggacttgaacattgtcataatcgtggtgttttgcaccgggatataaagggtgcaaatctccttattgacaacaatggcattcttaaaatagcagattttggtctagctacattctttaatcccaaccaaaagcaacatttgacaagtcgtgtcgtaacattgtggtaccggcctcctgagcttttgttgggtgccactaactatggcgctgctgttgatctatggagtgccggttgcattcttgctgagttgctgtcaggcaagcctatcatgccaggacgaactgaggtggaacagttgcacaagatatttaagctttgtggttcaccatcagaggagttttgggctaatctgaagttgtcccgagctaccatattcaagcctcagcatccataccgccgatgtgtgaatgatgtatataaggacttccctactacagctttagcactactggatcgtctacttgctgtagaacctggtaataggggtaccgctgcatctgcccttgacagtgaattcttcacaacaaagccttatgcctgcgatccatcaagtctacccaaatatcctccaagcaaggaatacgatgccaagcttcgagatgaagaagctaggaggcaaagagcagctgctaaaggacaggaagctgaagctggacggaggaagcaacttcctggacctgatggcaacagtggattgcagcaacgccgagttcaggtgaatcccaaaagcggcagttacaagttcactccaaaggaggatgctgtttctggttttccaattgatccaccagcaagggctgcagacaatggttaccctcagcgtgttcctttgatgcatgctggccgttcgtcctccactctgggcagatcaagtggagtggatccaaaggcccaaagatttcacacctctcaaattgttggcgctgatatgtccaaccaatctactgcagctgggcagcgaggcaatgctcctaagatgtctaaccttggggaaagtgccaggaggcagtatttgagagagcatcggtccagttcaagatacagtcagctgactggtgctgacccttctgacagacccgaatggactcatcaattccaagaaagaccgtcatcttcccataggaaggatgatgcggtggcaaataaagagcccacagtggtaaatggcacaaagaagaacagaatccactattctgggccattgatgcctcctggagtgaacatggatgagatccttagagagcatgagcgacagatccaacaagcggtgcgaagagcccgtctcgataagggaaagggaaagcacaacggtgagagagaccagtcagaggcactgctgtatactaccgtgaacatcagggccgatcgctgaaaagtttggttcagttcggtctggaccccgatttgagcagcaaccatcaaaagcatagagaatagcgttggatcccttttacttttccgtccctcaagcggagaggtttttgttttgccagaaactcgactccctgatgcggtttggtatacccaggaggcagctacaaaaagaaaacctgttcatgtagagatttaccgccccgagcttagcataggctgtctgaaatattttctgaagatttgttggttatccatagtcgtcaattgtatatcacaagagtacactccctgaaaattgattcatacacctgtttttggcatatgacaagaggaatacaaatcaaattacaggccaac

SEQ ID NO: 9648 - DNA, 673 bp, Setaria italica
  Peptide Sequence Number=SeqID_75622
ttttttttttttttgggtctgagaaactgattaattcgtcataaattaaacatgaacagtttgttacacgactgtatcacaattcacatgctaaacctacaatccatcagaaaatggagacagtgaagggcataggcgcatagcaatacactccacgccatcagttggccaaatacaccagtcacagttgataatcagcaggatctcacttcagacttcatgcagttcgcaggggtggggaaaccaatatgacaccatcacctcggacaaaaaggaaggggatagtgcgtttagtagtgcgcacaatttcttcatatgtttcatcatctatctcaacagttgtcactacctcctcaacatctccaaggatcatgtttaaatgttgatcgtatgcatggagcttgccgcggagctcgcggtcggatcggagcttgacgtagatgcgctcgtcgaggctgagacgtatcagatccagcggctccttcaccgcaatctcctcctccgctgacgccatctccgccgcctcgctccccgcctaccctcctcccgctccgcgcccaaaaatctctaaaccctagctacccaaccaatccaacgccgggtcgcagcaagcgcgcactggcggcttcggcgatggattgcgcttgccgttttttggggtgggggtccgggg

SEQ ID NO: 9649 - DNA, 452 bp, Setaria italica
  Peptide Sequence Number=SeqID_75623
agactaaaggaatgatgtttgatccagttcgtttgtatgcaacagctatttatgttggatgtgttgttttggctctaatcttcgctctttggattcatgacaagctgctaacgctgattgcgatcatatgtgagatctgcgccctgttttggtacagtttgagctacatacctttcgcgcgaaggatggtttctgacctgatggtgaagttctgtgacactgaactttgagttatggtgtgctaggcaacattcatcagggcctggaatcagaagttctgtgacactgaactttgagttatggtgtgctaggcaacattcatcagggcctggaatcagggaagcccctgggcacttgcccctttacccatttcatctgggtctagttttgtctgataaaaaccaagctatgtatattgcatcatggcatttctattttattacttaaaatta

SEQ ID NO: 9650 - DNA, 695 bp, Setaria italica
  Peptide Sequence Number=SeqID_75624
tttgttgagatgttcaggacgaggccttgctttaagatctttgagcacgctctacaggagctggctgagcctactattaaggatgcttttggaaaatgtgtgcaacaaggagcatcccgtattattgttagtccatatttcctttcccctggacggcactggaaacaagatatccctgctttagcagcagaagcatccaaggagcactcaaatgtaccctatattgtcactgcccctcttggactgcatgagcttatggtggatatcatgaatgatcgcatcaagtactgcctgcagcacgttgggggtgatgttgatgagtgtacagtatgcgctggaactggaaagtgccgcctctactcctgatgggagtacctgggaggctacttatccatactgcagcttagaatctgaatagctgtcgcaatggcatctcaatgccacttgttttttaccatttaccaggtctgggccaatacttttctcgtctgtacgaggtctgacgagtgtatatcctggtccggtgccccaaccaaaagttaccattgcaactgtgcttgctccgtccgatcgccgccactgtgctctgattttaacctcagaggagccttgctccgtcccctaacgtgctgcttgctgcggctcaccaaggcccagttagccacatcctcatctttcgagcacctgcgagaaca

SEQ ID NO: 9651 - DNA, 588 bp, Setaria italica
  Peptide Sequence Number=SeqID_75625
ttgttgctctgtttcttgtttccttcattgtattcacatgtgacgacatggagaacccgtcgtgaactgaagcggaacaattctcagaacaaaagacacctgaaactcttcaaaggtcacaaagaaggttacatgcgcctatgacaatagttacaaactacggagctcatctcagcggtaaggttaatgacagtgatgttgtaaaattagaggaaaagatcctagacagtcaacacatgtacaggtttgaaggagaacctccattggaggttcatatcttgttcattgattagttcatttttgttgtagtctttggtatgttggggaagcatataagctcatggtcgtaactgtaacattttttcccctcaaaactgtgacaatttccccatgatacttggccattgttcttccaggctgctctttatgtagtcaagcaaatttggtcatgtttatggcacgctgaaactgcaacgtgctgaacaaatgcttggcctgttcttctgaatcatgttggtgtgttcattgctttgctgcatgccagcatgattgcacattcctagcaattgacaattgctggcaaacatg

SEQ ID NO: 9652 - DNA, 467 bp, Setaria italica
  Peptide Sequence Number=SeqID_75626
attttaatggtatggcagcagaaaggttttgtgtccgcaattcaggtgctcaagcagtagttgaaggaattggcgatcatggatgtgagtacatgacaggaggcactgtcgtcattctgggaaaaactggtagaaactttgctgctggcatgagtgggggtattgcttatgtttatgatctggacgggatgttcagtactcgttgcaatcatgagtcagttgatctgtatagtgtagatgaagaggatgacattgtaacgttaagaatgatggtagaacaacatagactcaacacagaaagtgggttggcgaaagacatactctctaatttcgaggatcttcttccaaaatttgtaaaagtatttccaagagattacaagcgggtttttggagaatatgaaggtggaaaaggttgcaaaagaagcagagcaaaaagctaagtaaaagtctagggttttggttattaa

SEQ ID NO: 9653 - DNA, 315 bp, Setaria italica
  Peptide Sequence Number=SeqID_75627
cctcctccttcccctgtccgccgcttcccctccctcttcccctcccggcgaattcgcggggagcgccaggaatttcgcttggagaaaggagtcgtttttgtatctgtttctccggatccgcgacccagctgttgatttgttcgccccgttcggctcgatttagattcgttcgtattcgttcttgttcgattggaggttggcgccgcccggatttctcgctgcgctgactggatctggtgccgctgagccccggccgcccggaatccagattcgattcggccccgcccggtgccgccccgcctcggcgcgttcgga

SEQ ID NO: 9654 - DNA, 2154 bp, Setaria italica
  Peptide Sequence Number=SeqID_75628
gtttttttttttttttttttgttaaaaagtcgagcagatgaaatagaaagtcaacacagagcgcgtgatagcagaacacaacccaatggacgccgactcgacttcgtccagccggtgcttacatgtggtttgaaccgggcggcacatgcgtctccagccttcccctctacggaacgggcggcgcgtggtttgtttgaatcatcgcaacgatccgtatacacagcactttactatatgatacgtaccgtaattatctatcaacaccaagtagcagcagacatttcgctgacaggtttcgtatttacgtcagcactgcgacggcgagctctgcctgacgcggcgccgccgtcgttatctgccggcggagagttcgatggcgtcctggttgtagatggagtcctcgccccagtcgaaccgctgctgcatccgctcgtagtcctgcctccgcgtcacctccacctgctgccactcctcccaccgctccgcgaggccctcgccctccagcatccggaccacctccgacatggacgggcggtcctcgggcgacgcctgcgtgcacagcagcgcgatctggatcatcatctccccctcctgcccgttgtagttgcggttcaggttgcggtccacgatggcgtcgaggtgcccttccctttgcagcttcttgacatgatcaagtaagagcacgtcgtcttcctcctccaagcgtgaaaagtcgatggcacgctgccctgtgactagctcaagaagcattatgccataaccgaaaacatcagttctctcggatgactttccagtggacaggtattcaggggcaatgtggcccatagttccccggacttgagtagtcacggatgtcttctgtacatccaccagcttggccagaccgaaatcaccaacgaccggttcgaaaccttcatcaagcaagacgttggcagccttcacgtcacgatgtataatcttaggattgcagtgctcgtgcagatactccagcccacgagctgtgcctatagccactcgcttccttgcagaccaatctaatattggctccccaggtttaaattctcgtaggcggtaggctacgctaagattctgcatgaaaggataaacaagtaggcgctctgtttgtgtagtacagaaaccaatcaatcttaaaagattccggtgaactgcaacgctaattagctcaacctcacgcaagaaggcagcctctcctccaggactttcataatcagttaaccgtttgacagcaatcttagtgccatcaggtagtgctcctttatacaccttcccaaaacccccttgtccaagaacatttttctcactgaaattatcagttgcaagttgcaattctcgccatgcaaatcgtttcaactggccaaatgcaattctacgatcatcctcacctgatacatccacaaatacttcacgtagatggtttttcctcctttcattacagataataaatagagtccctaggatgagaagccccaacacacctccaactgttccaatcacaatgcctattttcgaaccacgggatgaaccttggtaagacacatttgaggcgcatgtatgggggaagtttgctccacaggtcaagttattacctgaaaaattgtaacgtgcaacttgaaagagttgaggaggtatgaccagtgaaggaggtatttgaccagtgagtttattgtaagccagccgaatgtctgtcaagcttgagatgcttgctagcgtttcaggaatagatccattgagatagttttgactcagtatcagaagctgaagctttgaaagctggccaagagaagctggtattggcccaaccaacaggttgtcttccaaatctaagctcgtcaaacgagagaggttgccaaactgctctggtatgccaccagtgatgttgttaccaggcaaggacagaacattcaaatactccagctctcctattcttggtgacagaactccagtaaatcccatagaagccaatgttacttgcacaacattgttattattgtcacaaataacagaattccaagtgcatgggttaacttgattttggtgagactgggaaagctgactgccagaagcatttagtttcagcttcatatcgtacaaggcatcaccttgacgatctgatgctgagaatgggaggagaga

SEQ ID NO: 9655 - DNA, 239 bp, Setaria italica
  Peptide Sequence Number=SeqID_75629
ctccacccacccccttccgcagagcaggtgagcgatcagcgcaggcgccgctcattaagctccgccagttacatgtgtgctcatcactgttctttggtctcttgtattttcgcaggatttcctgaacgatgttcttcagggagcagtacaagccgatcccgaacgtgtacaacctggtgctggccatgctctggaggcaccccgagaacgtgcagctggagtaaggtgaaggtcgtgca

SEQ ID NO: 9656 - DNA, 259 bp, Setaria italica
  Peptide Sequence Number=SeqID_75630
cccttcttatgttaaacatgatttgcagattgcaagattgtgactgattgcctgattgacaccgatccgatgaactcaaggcgatcgataacttaccgaagagcgtgaggtcgccgtcctcaagaaccggcacctgcccaaacgggtttctggcgaggtgatcggggcggcggtggtcgccggcgtcgcggctcatggggacgagctcgtactccacgccggcctcctccagggccagcagcgcccgcgccacgtacgg

SEQ ID NO: 9657 - DNA, 161 bp, Setaria italica
  Peptide Sequence Number=SeqID_75631
agatcggctactgccagcagtgccccgacagggtcgcgtggccgaccgccgagctcggccctccgccggcgctctacttcaacgcgggcatgttcgtgcacgagcccagcagggcctttgcggtggccatgctgggctcgtgcacgaacatgcccgcgttg

SEQ ID NO: 9658 - DNA, 350 bp, Setaria italica
  Peptide Sequence Number=SeqID_75632
ctccggcctgtacttgcgaagaacgtgccttccgattgcgcgcgattcgaagacggtgaggtctccgtcctcaagaaccggcacctgaccgaacgggttcatggcgaggtggtccgggcggtggtggtcgccggcgtagcggctcatggggacgagctcatacccgacgccggcctcctccaggcacagcagcgcgcgcgacacgaacggcgacatcgcccacccgtgcaccttcatcacagccgccatcgcccgccgcaagcaccgtgcacgtaccctccgccgtttacctgtcgtgctccgatcagctcgtcgcgggatctgttacctcaggtgaacctttgggcagg

SEQ ID NO: 9659 - DNA, 662 bp, Setaria italica
  Peptide Sequence Number=SeqID_75633
taaaagaaaaaaccaaaaagaaaacgaaacaaaagttaaacgaaccaaataaggaacctaactaacgtacaatacaaactaactaccaaagactaccgacatctgggagttcgtggagtacgagaggatggtgtacctggacgcggacatccaggtgtttgagaacatcgacgagctgttcgagcttgagaagggcagcttctacgcggtgatggactgcttctgcgagaagacgtggagccacaccccgcagtacaagatcggctactgccagcagtgccccgacagggtcgcgtggccgaccgccgagctcggccctccgccggcgctctacttcaacgcgggcatgtccgtgctgtggctggcgcggtcatcacttcagaacattactatgagatcttttattttccatttgtttttaattagggtgcctaatttccgctcagttcagttcgctgttgagtgtgagcttactataccattccaaggtgtaagtgttggtcaggattgagctttgtgaatacgccctttggtcacagcttaagaagtaatttagtacctaggtaaccgggggaattaatactagtaattttaggttaggtaaaattaatagaataataataagtaagacaaagaccgagaaattaataggacaaaaaaaa

SEQ ID NO: 9660 - DNA, 1160 bp, Setaria italica
  Peptide Sequence Number=SeqID_75634
tttttttttttcaaaattctctaacttacaccagttgactgtttatcattaaacgtttactgaacatcttgcatcaactcccatacttctgatgtttatggaaatttcaaacaaaaactacttgaaactccataacttcttacaacaagggactgtttagcgttaagccgtttagtgaaaccttacatcaaacttcttttattcttgtgaaaagttgaaaagaaaaatcactcgaaactctaagattattattatcacactgaaagcattagcacaagcaacgcgtgacactgttcatcactgctcatctttcttggacagcccaaaatccagcggcatgagctccgccaccttcctggccgccggccgggcggcgaggtcctcccaccacgccctgacgtgcggcagcgcctccaccatcgcggcgtactcagtggccatgaagtagcgcatgagcgggaagtggctgaggtcggcggcgctgacgaagtcgccggcgaggtacctgctccggctcagccgcgcctcgtagatctcgaacaccgcccggagcttgccggcgttctcgtcgacgaccgcctggtcccgctcgccgccgatcaggggcgtgatgaggcactgcatcacgatggcgcccgccgccgggtggtgctggtgcgcctccacctccagccacacgtccaccatggcggactgctcgaggctgcccgccccccaggagctccggcttgtgcttgcggagaacgtgccttgcaatcgcgcgggattcgaagagcgtgaggtcgccgtcctcaagaaccggcacctgcccaaacgggtttctggcgaggtgatcggggcggcggtggtcgccggcgtcgcggctcatggggacgagctcgtactccacgccggcctcctccagggccagcagcgcccgcgccacgtacggcgacaccgcccacccgtacaccttcaccgccttattagccgccgccatcgccgccgcggcggctcctctgaatctctgatccggcgaacgcttctgagggatcaaatcagtcgacgcagcacggcagcagtggcaatttttggatcgatgtgtgcttctctgctcgctatgctgggctcccgctgggcagtccaccagtgaggagatttgaccgtggctgggaagaaag

SEQ ID NO: 9661 - DNA, 1270 bp, Setaria italica
  Peptide Sequence Number=SeqID_75635
gggaagtaaagaatagatagagcggagggcccgaggaggcctccaaatataacagcagaggtgcacgaggcgcacagccgcaagcaaacaagcggagccgcacccaaacgcgcagccgcagcgtagaaggagcagagcggccatccgctgccgtcctgttccgctccagactccagaaacgcacgagcgctgcagagctgagcacttgactggactgactgaggcggcggcggccgcgcggcaggagcgagcgatcccactccctccccatggcgcggtccaagaacggctgcctcaagatcctcgtctgcgccggctccggatccgacccgtccgccggctccgacgccgacgccgacgaacaccccgacgagaacaaggccatatcagataaaagcagatggagctttcgtaggaggtctacaaggcatcgagttctgaagaactcggatatctcagaacctgaaactcttagttcgagcaaagcaaaggctgaaattacaccaagcaacaatgtttatacttcaacatactcttatgcctcggagaagcctctgcatcaagacaagccagatgagaagattctacatgaagaaaaatcagaggagaagcctctgtatcaagagatgtctgatgaaaagctgatggataagccaattgaaaagcctgttgacaaacttatggaagaaccagctgaccagataaatgaaaagtcaattgaacagcctgctgaggagacaactgaaacaccaactgaagagtcagtcgaaaaaattactgacgcaccaactgaagtgccagctgaaaaaataagtgaggcagcatctgaagatccagctgaaaggatagtggaaaattcaatcgaagagacacccgaaagggaagttgaggaactgattgaaaagccaactgaaagtatttctgtctcatcaactgtgccgaagcaggaggaaaccacctcacttgttgaaggaagcagtgcagaccctgaggaggatcacatggagtctgcagctgctgctcttcagcctggctgtgggacagactttgtatgttgcaattcttggccttgtaatgttatgcttagttatttctcttttgatgttttcaattattatgatattatcagctaaaaaaattaagccgtttgcatgactgcaggcaaggcaagaactattgaatcagaaggatctggtgaaactgcaagctgttatacgtggacgcctagttagaagcaggcttcagaatctttgcattgcttgcttgctaa

SEQ ID NO: 9662 - DNA, 1219 bp, Setaria italica
  Peptide Sequence Number=SeqID_75636
gaaggtgatggcggggaggattgtattggagattggagctatggaaaatagaaactatgttcccgacaaagctaataaggatgacagtattgtgcattccgaagtgaaaaatgctcatgaagtagaagctcagccgcaagaggaggaacaacagaatggccatgtctctgaccctgaagtagaagcccaggcacaagaggagcttgttcaggaactacatgttgagccagaaaattcagatttgcatgaccatttggaaaacctgtagaatcttatgccacacctgaaggaactcctatgagccgagccactgttccagaatctcacggaacaccatcaagtgaggtctctgttaataccaaaaagagcaggagcaaaaagcccaagtcccatgcaagcaagaggtcactggctagtccaagcagtgattcagtaggacggagcagcaccgataatttctcaaaggaatcaaggcgtgccaagagagaaaactcaagcaaggctgctaagtccgaccacgtcgaccaagaacctcgtatcagcaacagcaacccgttgcctagctacatgcagtttacagaatctgcaagagcaaaggcatctgctagcgcatccccgaagatgagcccagatgtgcaggacagcaaccctagaaaaaggcattctttgcccatgacaaatggcaagcacgattcatctccccgcatgcaacggtcatcgtcgcaggcccagcaaaacgtgaaaagcaacagtgctgttcctcacaactcatctgacaagaggtggcatatctgatgagtccctgagcagcatactcgcgcggtgccatcgaatatctagatgggtttctcgtgatgactctttccttctcctcgcactccatactctgctaccaattttttttcctcgattcgttgttggaacactgagtatggttggaagaagggcagcagctgccgcttgatatgtgtacatttgttggttgttattggttgtgttatttgactgatgatagtggtttctgtgtgtaatatatatatccttgacatgtaacgcaacagcagcggcctgaagagtgtgtggattggtctgttatatttggcaatattgaagtttcagttggtgtggataacacaaccaataacaaccaacaaatgtacacatatcaagcggcagctgctgcccttcttccaaccatactcagtgttccaacaacgaa

SEQ ID NO: 9663 - DNA, 1485 bp, Setaria italica
  Peptide Sequence Number=SeqID_75637
ctgaagcaactcaagcaagcaacaagagcttaatccacacacaaatcaaccactgtccactaaccagcctccaaatcccaccaaacagagctcgctcgtagctcccgagaaccgaaccctctgcgacgagatggctcccgagctggccggcaagatgaccgccaaggctgccgccgccccggcggtgaagcccacgacgagggcgtacgtgacgttcctggccggcgacggcgactactggaagggcgtcgtggggttagccaagggcctgcgcaaggtgggctcggcgtacccgctggtggtggccgtgctgcccgacgtgccggagtcccaccgccgcatcctcgtctcgcagggctgcatcgtccgcgagatcgagcccgtgtacccgcccgagaaccagacgcagttcgccatggcctactacgtcatcaactactccaagctccgcatctgggagttcgtggagtacgagaggatggtgtacctggacgcggacatccaggtgtttgagaacatcgacgagctgttcgagcttgagaagggcagcttctacgcggtgatggactgcttctgcgagaagacgtggagccacaccccgcagtacaagatcggctactgccagcagtgccccgacagggtcgcgtggccgaccgccgagctcggccctccgccggcgctctacttcaacgcgggcatgttcgtgcacgagcccagcatggccaccgcaaaggccctgctcgacaccctccgcgtgactccacccacccccttcgcagagcaggatttcctgaacatgttcttcagggagcagtacaagccgatcccgaacgtgtacaacctggtgctggccatgctctggaggcaccccgagaacgtgcagctggagaaggtgaaggtcgtgcactactgcgcggcggggtcgaagccgtggaggtacacggggcaaggaggccaacatggacagggaggacatcaagatgctggtgaataagtggtggaacatctacaacgacgagtccctggacttcaaggggctgccggccctccccgccgacgccgacgaggtggaggccgtggccaagaagccgatccgcgcggcgctggcggaggccggcacgatgaagtacgtcaccgcgccctcggccgcgtgattcccgtgggccttggcttcccacccacccggtgggcggtggccgtgctgtggctggcgcggtcatcacttcagaacattactatgagatcttttattttccatttgtttttaattagggtgcctaatttccgctcagttcagttcgctgttgagtgtgagcttactataccattccaaggtgtaagtgttggtcaggattgagctttgtgaatacgccctttggtcacagcttagagtatttgtcctgtaccgggggattatctgtattttggttggtaaattatgatatatagtagcaagccgcgaaattatgggcaatcttttctgct

SEQ ID NO: 9664 - DNA, 1410 bp, Setaria italica
  Peptide Sequence Number=SeqID_75638
caagcacacacacacgcacagcaaattaagcaagcacgagagtgttctggagaggatctgaggaggaacagctagcatcacctgcgacgacgatcgacgatgggcccgaacatgtcggcgttcagcagcaagcagcaggcgtcggcgaagcggcgggcgtacgtgacgttccttgccggcgacggcgactactggaagggcgtggtgggtctggccaagggcctgcggaaggcgaggtcggcctaccccctggtggtggccgtgctccccgacgtccccgacggagcaccgccgcaagctgcgggagcagggctgcgtcgtccgcgagatccagccggtgtacccgccggagagccagacgcagttcgccatggcgtactacgtcatcaactactccaagctccggatctgggagttcgtggagtacgagcgcatggtgtacctcgacgcggacatccaggtgtacgagaacatcgaccacctgttcgacctggagaagggccggttctacgcggtgatggactgcttctgcgagaagacgtggagccacaccccgcagtacaagatcggctactgccagcagtgccccgacaaggtcacctggccggagcatgagctgggccctccgccgccgcgctacttcaacgccggcatgttcgtgcacgagccgagcctgggcacggccaaggacctcctggacgcgctggtggtgacgccgccgacgccgttcgcggagcaggacttcctcaacatgttcttccgcgacgtctacgagcccatcccgccggtgtacaacctggtgctggccatgctgtggaggcaccccgagaacgtgaagccgctcgacaaggtcaaggtcgtgcactactgcgcagcgggttccaagccttggaggtacacgggtgaggaggccaacatggaccgcgaggacatcaagatgctggtgagcaagtggtgggacatcttcaacgacgagagcctggactacaagggcccggcggtggacgacgacggggcggaggtggtggaccaggcgagggagccgctgcggcaggctctggccgaggccggcgccgccaagttcttcccggcgccgtcggcagcctaggcggagcgatcggttccgttgaaggaggccgttaataatactgtacggatttaccagtagttaattagcggtctacaggttttggtattgtagacgatcatcatcaggtcatatcagtaccgtgcaaacattgtacagtacccccgttaactttgcaggttacctattttggtatttgggtttgtaaagagtacgtaattaattaaggtcggtctaaccatagatcttcctgctatgtacgtaccacatgcattttgaagccaattaaataataaatattttcctagtttgctttgatgttc

SEQ ID NO: 9665 - DNA, 2326 bp, Setaria italica
  Peptide Sequence Number=SeqID_75639
aagaaccagctgaccagataaatgaaaagtcaattgaacagcctgctgaggagacaactgaaacaccaactgaagagtcagtcgaaaaattactgacgcaccaactgaagtgccagctgaaaaataagtgaggcagcatctgaagatccagctgaaaggatagtggaaaattcaatcgaagagacacccgaaagggaagttgaggaactgattgaaaagccaactgaaagtatttctgtctcatcaactgtgccgaagcaggaggaaaccacctcacttgttgaaggaagcagtgcagaccctgaggaggatcacatggagtctgcagctgctgctcttcagcctggctgtgggacagactttgcaaggcaagaactattgaatcagaaggatctggtgaaactgcaagctgttatacgtggacgcctagttagaaagcaggcttcagaatctttgcattgcttgcttgcaattgttaaaattcaaggattaataagggctcgtcaagcacagcaatcaggaggaaaggttcaggagactattgtgcattcttcaggtgagagattgcttcgcaatggatttgctctcaagctcatggccagcatgccgactccaaaatccgttcacataaaatgtgatccatcagaatctgatatcacatggaaatggatggagaggtggacatccttaattccgccaatcagtggggagaacttgccagagcacagagaaaatggtgagttgatgggtgagaatgtgaaagaagatgctcagcatgatgatgaggttgttcctttggattcggatctatctttccccaagttggtgcctgatgatgtgaaagagacactagggacatctgattctagtgccttggaggctcctgcaagtatcccagatgaaagctctgaggtggaaatcaaacgtgaccctgaacctgagttgattgaaaatattgatagagatgctgaacaagtgactgaccaaaagactgaaaatcctgtggacgagtttttgatgtcctcagatcaacaatcttcccaagctgatgcatcaagtgaacccatccctcttcctgaaaaaactgaatcacccaatgaggacagtggtgatgcatatagttctgagaagacactggagatggaaggtaaaaggtctgtggggagaaagttgtgcaatccagcttttgctgctgcacagttgaaatttgaagagctgagcacaaattcgacaatcagcaggtccagcagctcatcatatctggatggggcaagcaagtcaagggtgcatactcctcgtccagaagaagattactcgtcaaagcaagataatgacatgggcctaccagaaagctcggttgctcatgatgctaaaatgataattgctgcttcagaatgtggaactgaaatttcaatttcctctacactggactcaccagatagatcagaaggtgatggcggggagattgtattggagattggagctatggaaaatagaaactatgttcccgacaaagctaataaggatgacagtattgtgcattccgaagtgaaaaatgctcatgaagtagaagctcagccgcaagaggaggaacaacagaatggccatgtctctgaccctgaagtagaagcccaggcacaagaggagcttgttcaggaactacatgttgagccagaaaattcagatttgcatgaccatttggaaaaacctgtagaatcttatgccacacctgaaggaactcctatgagccgagccactgttccagaatctcacggaacaccatcaagtgaggtctctgttaataccaaaaagagcaggagcaaaaagcccaagtcccatgcaagcaagaggtcactggctagtccaagcagtgattcagtaggacggagcagcaccgataatttctcaaaggaatcaaggcgtgccaagagagaaaactcaagcaaggctgctaagtccgaccacgtcgaccaagaacctcgtatcagcaacagcaacccgttgcctagctacatgcagtttacagaatctgcaagagcaaaggcatctgctagcgcatccccgaagatgagcccagatgtgcaggacagcaaccctagaaaaaggcattcttgcccatgacaaatggcaagcacgattcatctccccgcatgcaacggtcatcgtcgcaggcccagcaaaacgtgaaaaagcaaacagtgctgttcctcacaactcatctgacaagaggtggcatatctgatgagtcccctgagcagcatactcgcgcggtgccatcgaatatctagatgggtttctcgtgatgactctttcctcctcctcctcc

SEQ ID NO: 9666 - DNA, 578 bp, Setaria italica
  Peptide Sequence Number=SeqID_75640
gcaagctactggctcgttcaatttattgcgaagcacatcagcattacaagtaccgagatcatttttcacatttttttctctctctaccagagtctgacagtgctgggtggtctaaaattgagcccccaaatgtaagtagtaatcagtaatacacttcattttactactacatggcaaactcaaatacatgtggaaattgtattcgaatgggaatcccgcgttctgaaacggcctgccaaccaaccaaccaaatcatcaagcaaagcatatgcaaatcagttaaaacttccgtagtgctgctaccaaactgctgttccgattccgattcacactccgacggccatgacaagaacgaaagaaagacggggaagaaaactgtacaccgatgagtccaaggtcctgctctacatactcaaatctgcatgcacgccggcggccgcgcacgcgctgatcatctctccgggacgacggtgggggcgacgggcggtcggtcggcgccggcgcggaggccgccgagccagcggccggcgccggaggcgaagagggagagccaggcgacgagcggcgtgccgaggagg

SEQ ID NO: 9667 - DNA, 713 bp, Setaria italica
  Peptide Sequence Number=SeqID_75641
ctcgaagctgttctttggggcattggaactgcactaggagagcttcctccatattttctctcaagagcaggttccgtccatactgctttacacttaccacttagttgttggcttacagcataatttgcttgattaactttgttttctcttacctgtccactttatccacctcttccactttgaagtttgaatcatcagttgtcaaagggctaattaaaatatgcaacccttctatttttcctcttttcatgataataccattttccgctgatatatacttatgctggaatttccttccagagtagcagattaaaattatgtttatttcttgatattctgctgtgaagttctgttactaaagattcagttacaagattggaacatgcaagagaatgcagtatttttcgaaagataccttttttcttgtctgttagttttgaaactctcttgttagcaggttatcaggcttgtaggttgtaagttgaccatagccatccataatacaaagttatatgtaggctcagtttgccttacaagattatgccattatttggaaaccatcaaattggatgatgcattcagcccattctgttaaagttactttatgttgctgactcctttcatatgaatgaaccacagctagcatgtcaggccgcagaatagatgagttagaagatttcaatgctcctgtttcagaaggctttctgtcatca

SEQ ID NO: 9668 - DNA, 1351 bp, Setaria italica
  misc_feature (1319)..(1351): n is a, c, g, or t
  Peptide Sequence Number=SeqID_75642
cgtattgtatttaggtccccatgttgccctatttactatcaaagcagttcagtgtggtagggttgatctaaagagtgctccttatgacactattctccttaaaaggatgccatcatggctagacaaagactgtctggagtttggagcccctatatatcaggaaacaattccattcagcaaaatactgcagaaagtttatctcgaagctgttctttggggcattggaactgcactaggagagcttcctccatattttctctcaagagcagctagcatgtcaggccgcagaatagatgagttagaagatttcaatgctcctgtttcagaaggctttctgtcatcaactttacatcgggccaagcaatggatcatgtctcatctaagcttcgctgtaatcttgctacttgcttcggtgccaaaccctctgtttgacctagccggtatactgtgtggacaatttaacatacctttctggaaattttttctagcaactttgattggaaaggctattgttaaagtttgtctccagacaacattggtgattactctctgcaacaaccaactttttgatttggtggagaaaaggcttatatgggcatttggcattgtccctggagtggcatccgtcgttccctctttagttgccaagctgaagacggccaaggataagttcttatcagctcatgttgctgcatcagcttctattgctgtaaagggaaagtggaatctgtcattcactttgatctggaacactgttgtttggctcatggtcataaacttcattatccagatagttacttcttcagcacagggttatcttagaacacagcagcagctggagatcagtaaaaagttgtcagagaccaaactttctgcctctgaaccttcttctcgctaatccaaatgattcaacctggatgatcaatctgatttgttcatttgtgtgtatacttatattgagtttagcgaggaaacttgcatgaagaatgtggtaactgatttgggaaattcaaaggattgtcaccaatagtctgctgctacttcttctggaaagagcattgatacattgtacataaccaccccatcaagccatcagtgcaagattgaggctctcctgcactattgcggagcactacttattgctgtatttcattgaaaacctcgaaagagaaaagttttactagctgataatgtaaagtcgcccagctaattgtggccttctgtacatagcaaccaagatattataagtgaaaaaggactggaaaaatatcaattatataaattatgccttcattgctgaaaaaaactctgcaaaaaannnnnnnnnnnnnnnnnnnnnnnnnnnnnnnnn

SEQ ID NO: 9669 - DNA, 396 bp, Setaria italica
  Peptide Sequence Number=SeqID_75643
cgccgtccaacaccgggcgcatccgcccggccgtggacttcgcccggaagtccggcctgccggtccggctcgtggagctcccgctcgacctcgccgcggaagggctccccgacggcgctgacgacgtcgaaaaggtgccgtctgatctctggaccaactacttccgcgccctggcgcgcctccgcgagccgctcgagcgccacctccacgccgccggcgcgccgtacccgacctgcgtcgtggcggacttctgccacccgtgggccaaggagctcgcggcgaacctcgccgtcccgcggctcagcttcttcagcatgtgcgccttctgcctcctgtgccagcacaacgtcgagaggttcaacgcgtacgacggcgtcgccgacgacaacgagccgg

SEQ ID NO: 9670 - DNA, 607 bp, Setaria italica
  Peptide Sequence Number=SeqID_75644
taaagttaaaggaaacgaaacaaaaataaggaacaaagtttaaccaaatacttagaaggactacggacaagtcaacttgtaaccccttgggagcgtggaggagctgctagcagcatacgactcgaagcgcgatgatctgcccccaccggtgatcgtgtgggagtggggctggacgaagagcgcggagacctggaatggccgcgccgccatgctggccgtgctggctctgctggtgctggaggtgacgaccggagaaggggttccctgcaccagtggggaatactgccgccgatccgctgagccttgacggttctgtcccatctccatctggacgttttgatgctgtatatgaatgcatttgctttcgctcgtgtcgggaaaaaggtaggaacaaaatatggtatatcatgttgtactgtacggattcgtcaaaaaaaaaagaagttataccgtacctacaggggacatgaaaatgacaaataatgggacactcaaacgagcctggagcacacttccgaacagaacaatcatatatggttgttatgttagcgagccagcttggtatttatttagggctcattggaaacttggaaccgaggggatcccg

SEQ ID NO: 9671 - DNA, 1864 bp, Setaria italica
  misc_feature (1819)..(1864): n is a, c, g, or t
  Peptide Sequence Number=SeqID_75645
ggtgggcggcgccaccgctctcgcgggccgtccccgaccgaggggaggagggagaggatgtggtcgtccagccaggcgagcacgaggggcgtcgtcgagatggggagggtggaggccgggccttcccatttccccaagaggcccgcgccccgtaatcccaccagggtcaatctatcaaggacacatgcagttaaaccttgctcagctggcgaccgcgcaggaatttcagttaaatgtaacttggggtggtcttctcaaccatcgcccgacttgaagcatcactttatagtacattcatcagcatcagaggcggttcttacttcccaatctgatatgagaaaactttttgttggcaatgaaaaaattggtgttctcttgctgaatctcgggggaccagagactcttgatgatgtgcagcctttcttgtttaatctttttgcagacccggacattatccgtcttcctaggctgtttcgctttctgcagaagccactagcaaaattcatatcggtagttagagcaccaaagagtaaggagggttatgcatccataggcggcggttcccctctccgacaaattacagacgcacaggctgaagcactgagggaagcattatgtgaaaaagatgttcctgccaaggtgtatgttggaatgcggtattggcatcccttcactgaagaagccatagaacaaataaaacgggatggaatcacaaaacttgttgtgctgcctctatacccacagttctccatatcaactagtggttcaagtctccgtttattggagagcatattcagagaggatgagtatttggtgaatatgcaacatacagttataccttcatggtatcaacgagaaggatatatcaaggctatggcaactttgattgagaatgaactgacaaaattttcagaaccccaaaaggttatgatatttttcagtgcccatggagttcctctggcatatgttgaagaagctggtgatccttataaagcagagatggaagaatgtatcgatctcatcatggaagaacttgaaaaaagaggaataatgaatccatgtatacttgcttatcagagccgagtaggaccagtggaatggctgaaaccatacactgatgagacaattattgagcttgggcagaaaggggtaaagagccttctagctgttcccattagttttgtcagcgaacacattgaaactttggaagaaatcgatgtggagtacaaggagttggctttagaatctggcatcaagaactggggacgagttcctgcattaggttgtgaacccaccttcatttcggatcttgctgatgctgttatcgaaagcctgccttatgttggcgcaatggcagtttccaatcttgaggctcggcagtcacttgtaccccttgggagcgtggaggagctgctagcagcatacgactcgaagcgcgatgagctgcccccaccggtgatcgtgtgggagtggggctggacgaagagcgcggagacctggaatggccgcgccgccatgctggccgtgctggctctgctggtgctggaggtgacgaccggagaagggttcctgcaccagtggggaatactgccgccgatccgctgagccttgacggttctgtcccatctccatctggacgttttgatgctgtatatgaatgcatttgctttcgctcgtgtcgggaaaaaggataggaacaaaatatggtatatcatgttgtactgtacggattcgtcaaaaaaaaaagaagttataccgtacctacaggggacatgaaaatgacaaatatgggacaactacaaaaaaaaaaaaaaaaaannnnnnnnnnnnnnnnnnnnnnnnnnnnnnnnnnnnnnnnnnnnnn

SEQ ID NO: 9672 - DNA, 1294 bp, Setaria italica
  Peptide Sequence Number=SeqID_75646
ccttcacttcctcggcccgccacaacgctcgtttcgctcctctctctccacgaccaccgacgaaatcatcccctgctcctccggccaccgcggcgagcggcccccagacccgatggcgccaacggtggagatcagccacctctccttcacctacccgggcatcgacggccgcccgccgcccggcgcgccgccgcttatcgaggacgtctgcttctccctcgacgccggccaacgatgccttctcctcggctccaacggcgcaggcaagacgacgatactgaagatactgggcgggaagcacatggtggatccgagcatggtgcgggtcctgggcaggtccgctttccacgacacggcgctcacctcctccggcgacctctgctacctcggcggcgagtggagacgcgacgtggcttttgccggctaccaggtgaatattcagatggatatatcggcggagaagatgattttcggtgttgctggtgttgatccaaagaggagagatgagcttatcaagattttagacatcgaccttgcctggcgcatgcacaaggcatcagatggtcagaggagacgagtccagatttgcatgggacttctcaagccattcaaggttctccttcttgatgagatcacagttgacctagatgtattggcaagatcaaatctgttaacatatcttaagaaggaatgcgaggaaagaggtgcaacaatcatctatgccacacatatttttgatggtcttgatgattggccaacacacattatttacattgctcatggaaagctgcagttagcactgcctttggaaaaggtgaaagaaatgagccagttatctctcatgagaactgtggagagttggttgaggaaagaaagagacgaggacaggaggaggagaaaggagcgaaaggagaaagggctcccggaattcgacaaagttgttgagggtagccgggttataggtgatccagcaaagagcgctgccagagtcgtaaacaacggttgggcagcaggacggctcacctcaacaatcgcaggagaggagaacttcgttttcagctctaacagcgttcttagacaatgatattgttttgtaatttgctctttgtttatttaaaatggtgaataacagtcttgtagatccaatagatacaccatgggagctttggcacttacaacgaaatttctggcagtaaaggataatgatgttttcttggtacttggatttgcacatttgcacttctgtatgtgtatgtaacagcatatagttcgattccacaatactgcgtgaccc

SEQ ID NO: 9673 - DNA, 172 bp, Setaria italica
  Peptide Sequence Number=SeqID_75647
taatgatattggcagtgctcataatatggaacaaggggacaagcaagacatctaccagtttcgggccctaaattctcctcgaagtgatcacaggcaaaccgacagattctcaaagcgaactggagtccctgaaagctctcgctgctcgcccacccatcctgcacttgcatgg

SEQ ID NO: 9674 - DNA, 367 bp, Setaria italica
  Peptide Sequence Number=SeqID_75648
aggacaaaaccgaacaagaattactacaaaagacgaaactaggaagtataggtacgtggcaaaccgacagattctcaaagcgaactggagtccctgaaagctcaggttaggcgcaagctccattttctcatcacaacgatgagtctgtacttctcaacaaaatgttgtttttttgtgattatcctcagctaagcgaggccctgactgaagacccagatagactgaaagacatggcagacccggccatccaaggtactttcgcagtggactccctgtgcacggtcgctgagatagccctcaactgcacggccggtgaaccgagcgaccggccttccatcgatgacgtcatctggaatctgcagtactc

SEQ ID NO: 9675 - DNA, 538 bp, Setaria italica
  Peptide Sequence Number=SeqID_75649
accaattatatcaactagcaagaatggcagatcttctcagagatcccaatttgctgtccatgaagataatgatattggcaggtacgttgtccttgttaccttgtggagagaaagggacatctccaaactatatgcattggttatcggtaatctgaataaataggaccccagtgattgcagttgttaggttgccaatcagtttttctgaacgaatgaagatttgattagtagtacaattttcttgaattgaatcaaccaacatgattctctctgctccccagtgctcataatatggaacaaggggacaagcaagacatctaccagttcggcctaattctcctcgaagtgatcacaggcaaaccgacagattctcaaagcgaactggagtccctgaaagctcagctaagcgaggccctgactgaagacccagatagactgaaagacatggcagacccggccatccaaggtactttcgcagtggactccctgtgcacggtcgctgagatagccctcaactgcacggccggtgaaccgagcg

SEQ ID NO: 9676 - DNA, 471 bp, Setaria italica
  Peptide Sequence Number=SeqID_75650
ggtgttgcgagagggatccagtttttgcacaatatgactgctccaggcatcgtaaagaatgatctcaacatagaaaatattctgctggacaagaccctcacatcgaaaatcaatgacttcaacttccaattatatcaactagcaagaatggcaagatcttctcagagatcccatttgctgtccatgaagataatgatattggcagtgctcataatatggaacaaggggacaagcaagacatctaccagttcggcctaattctcctcgaagtgatcacaggcaaaccgacagattctcaaagcgaactggagtccctgaaagctcaggttaggcgcaagctccattttctcatcacaacgatgagtctgtacttctcaacaaaatgttgtttttttgtgattatcctcagctaagcgaggccctactagtgcgactgagtactagtgcgactgagtcggagagagtcggaga

SEQ ID NO: 9677 - DNA, 1464 bp, Setaria italica
  misc_feature (1415)..(1415): n is a, c, g, or t
  Peptide Sequence Number=SeqID_75651
aaggaacaaggggaagggggaaagggacggacgaagaatacgggatgatcctcgcgattgccggcgccgtcgtcggtggcgcattactgattgcgctggtcatggtcgtggtgctgaggagggcgaggacgcggcacccggaggtgagcgtactgcctaagtcgccggcggcggcaccggccaagaaggcggatggatggaaggctccggctaaggcgacccagaagattattactcctgctgataagagacatgcatcacaagctgctagggtgaatacattggaagtgccagcgtaccgtgtgtatacattggaggagctccaggaagcaaccaacaacttcagttcctccaacatgatcaagactagtcctctcgcacagcattataatggtcagcttcaagatggttcaagagtcttggttagatgtctgaggctgaagccaaagtactctccccagagccttgccccgtacatggagattatttctaaacttcggcaccgtcatttggtcagcatcattggtcactgcattgtcggtgatcaggaaaatcctaatattgctagctcagtatacctcatttctgaatgtgtgacgaatggatctctaagaagtcatcttaccgagtggagaagacgcgaaatgctgaaatggccacaacgggtttctgctgtcactggtgttgcgagagggatccagtttttgcacaatatgactgctccaggcatcgtaaagaatgatctcaacatagaaaatattctgctggacaagaccctcacatcgaaaatcaatgacttcaaccttccaattatatcaactagcaagaatggcaagatcttctcagagatcccatttgctgtccatgaagataatgatattggcagtgctcataatatggaacaaggggacaagcaagacatctaccagttcggcctaattctcctcgaagtgatcacaggcaaaccgacagattctcaaagcgaactggagtccctgaaagctcagctaagcgaggccctgactgaagacccagatagactgaaagacatggcagacccggccatccaaggtactttcgcagtggactccctgtgcacggtcgctgagatagccctcaactgcacggccggtgaaccgagcgaccggccttccatcgatgacgtcatctggaatctgcagtactccatgcaagtgcaggatgggtgggcgagcagcgagagcttaggcttgagcgtcaaatcgcagggctgaagagcagagaaatagaaaagggtggtatgcttttgtttcgatccaatcatagcaatgaagttatatgcgccatcaatctgcctctggtttttgttgtgcaagagagatccttggtgttctttatgtacagaagtggaatttttttaacttaaaaaaaaaaanaaaaaaaaactaaaaaaaaaaactaagaagaactacgaccgaaggacaa

SEQ ID NO: 9678 - DNA, 214 bp, Setaria italica
  Peptide Sequence Number=SeqID_75652
tctcaagttcgtagtgccttttaggattttgtttgttgttgttgctgctgccccctctcctgctggctgctgagatgagacgatggaaatcgaaaatacgcgtgtttccgtacctgaataaagatgaccgtctgcgttttttttacccgacgggcttgtcatgcttatgagttatgatggatatgaacgtctttgaaaagaagcaaaaaaaaaa

SEQ ID NO: 9679 - DNA, 627 bp, Setaria italica
  Peptide Sequence Number=SeqID_75653
ctgagactgtccacgggctcccgccgcgctcacggcgccggcgccatcataaactacatggaggtggacgcccaagaggtggccaacgtcacgcaccagctccacaatctgtggctgatgccgctgcagatagctgtggcgctcgccctgctctacacccatctcggccctgcagtgctcaccgcggtcgccgccatcaccgtggtcacagtggccgtggcctttgccaacaagctcaatatcgaataccagttcatgttcctaggcaagcgcgatgagcgcatgaaggccatcaccgagctgctcaactacatccgcgtgatcaagctgcaggcgtgggaggagacgtttggggacaagatccgcaagctccgggaggaagagctcgggtggctggcaaagtccatgtacttcatgtgtgccaacaccatcgtgatctggagcggtccgcttgccatgaccgtgcttgtgtttggtacttgcgtgctgaccagcgtcgagctcgacgctggaaaggtctttacagcgaccgcgttcttcaaaacgctcgatgcacctatgcagagtttccccgaggctattgctgctgtgacgcaggcaaccgtgtccgttggcaggcttgacaga

SEQ ID NO: 9680 - DNA, 849 bp, Setaria italica
  Peptide Sequence Number=SeqID_75654
tacctttaccttacttaattgttaaagttaaagtacgtaattctaacttattgttctattcgtggacaatgtttgctggagaaacgctggttattgcatcacaaaacattgtccactggtacaaaacggacagacagttacagctccaacaaatgtcacaaattggcagcgtcagatacgttccaaagggtaacaaacccatcacaaaattgtggtacaatcggttctcaaaggacgctaggccagccgcgaagcaaaatgtagggcaaaatacacagaaccaaaaaccacttttatctagctagcttcctccagacggtgcgcccacggttgatctcatcaccgttcctggcaaatctcaagcagtgcaggaactgctgctgctcttctttgtgttgcgccgcagaagcagaaccgttcatgcttttctcctccccttcctctatgtaagtaagcgaatcaactatgtcatcgtgttgacactctcttctgtagtcaagagtgattgtttgcaactcgtgcgtatcaattatatcttgaggtatgctttcaagtacccaaccaatgtaagtaacattattgacatgttggttcatgtccagatcagctcttcttggcactagtcctagtcttgagtattgtgcaggatctgaaagaattggaatcttcttcaaactgccattattttcctctgggaatgctaatcttggagtctttggacaatgtataaacacctcatccctcacatcatcactgactcgctgaagtctccgcgtattttggctcatcatgacccacttgctagtagctctgcccaataacttcaccattagccaagtcccttgagga

SEQ ID NO: 9681 - DNA, 1157 bp, Setaria italica
  Peptide Sequence Number=SeqID_75655
ctttcagtaaagacaacaagaatagatatgccctgcttattcaagtgaacagtaaatgccaccgagaggaacaggcaggataaacccacacaagtttacgattcacaccaatcaactaaaggtctacaccacttccttaaaaagaggtagaacgaagttttttagagagcgagagaaatttagctcaaacaggtatgaaattgaccttttcccgtttcatttcactaagacatacaaatgtggcatggaatgttattgcaagcatggtatcggcctaaaaaagaatgaaacactgatgaaccatttttaggccgtgcattgtaatacctaactgctgctgctccgtcgtgttgcgccgcagaagcagaaccgttcatgcttttctcctccccttcctctatgtaagtaagcgaatcaactatgtcatcgtgttgacactctcttctgtagtcaagagtgattgtttgcaactcgtgcgtatcaattatatcttgaggtatgctttcaagtacccaaccaatgtaagtaacattattgacatgttggttcatgtccagatcagctcttcttggcactagtcctagtcttgagtattgtgcaggatctgaaagaattggaatcttcttcaaactgccattattttcctctgggaatgctaatcttggagtctttggacaatgtataaacacctcatccctcacatcatcactgactcgctgaagtctccgcgtattttggctcatcatgacccacttgctagtagctctgccaataacttcaccattagccaagtccttgaggatccaatcacgacgagtaccaattcttccatcttcttggcaccacgtttcaatctcaacaacatcaccccaagctggatacttgtagatctcaatgtgcattcggtttgtcacccaaatgagtccaagttttctcattgtagtggtcgtggcaaaaccatcagtggagaacccaacactttgtgcatggttacatcctacctcctggaggaggttggcgatggtctcgacggtggccgtcttgttgatgcccacctcgtagcagcgcacgatgaagctctccttgtacgagagcccgtcctccaggaggctccccaaccgcagccgctcggcgaggttcggccgcgcgccgccccc

SEQ ID NO: 9682 - DNA, 296 bp, Setaria italica
  Peptide Sequence Number=SeqID_75656
gtgttggtccattggttgccctcgtatatacacctgatacatcatcatccatgcacagtcgactcgaagactcgatttttctgctgcatcagatcggtggcgtcttcctcgacggagcggcgccggacttgtgcgccaggaacagcttcttgagcagcctcagcatcatgagcaggcccatcctccgccgccggacgacggcgtgcttgcgcgtctccgcggccccttcgtagccgtcgccagagaaccaggattccttcgtcgccgcccacgacggcgtccccttggtcagcggg

SEQ ID NO: 9683 - DNA, 508 bp, Setaria italica
  Peptide Sequence Number=SeqID_75657
tttttttttttttttgttaagataactgccgcacgccaatgattttttttttggttatcgtcggcactcggcaccactcgagattcaacacccatcaatcgtattattaatgcaacatctccagtccaatggacgcacacgacactcaaacattgtgtttgtgtattacattttcatttcccctcctcaggaagctcattacatataggtagaggggcgactaaaagcattgcattattgtcttcagcgtgcttcatattggacaatgcggcgggttcgcttcttgtagaggatgcggtatccacattcacggcactggatgacatctcctggcttcagggtgttctcagctccgcaatctccgcagaggtagctgacgggctccggctgctgcgggtccatgggtcgggcgatctagggtttccggcggcggggatggtgcgtggagaagggaggaccggaggaagggttttggggtttctttcttctccttctaaacaaagaacaa

SEQ ID NO: 9684 - DNA, 921 bp, Setaria italica
  Peptide Sequence Number=SeqID_75658
tttagtaataccttacaaatacgcgtgcatggcagcatgagacagagtcagaacagtaatctcccaaatatcgctctggattgcagtcaatatgtcaatacatcaaagattatgagtggaaaatttcatcaattcaaattgggcgaggaggcctagatgtctgcaccagggcagagaacgatcttctatggataaacgattggatccgatgtggaacagaacctcactgtgtacagtcttgtggagtagtggtgcatccgtgcatagctcaagattagtgataacttaccaaagccaagctaccctctgagcatctgaagcttttgcaaagcaaagctaacagaaaaatggatgctaaatttactggtaagttaaagattttttgcattttcatcgaggtgatgtgagccgagccctttgaacttgcttcgtaggctcaataattaatttgaatttactccactttcatgactatcttcattaactcgtaaacaaaatagctgattgacgccgatggcagaacctgtagcaagctggggatcaggccagcataaagtgctggtactccaccttgatcaacaattttaaggcatgtcgcaaatgcattcatccttgttgcttttacttgcatctgtagctgcctccgaactacctcaaatgggtatgtggcggcttcagcacaacaaccagcaatggccccatagagtaaggttctgacagtacccagctcaagttggtctaatgcatttgcctcttgtttttgttgtttcatcatcgataccctcttctttccttcaggggaatgcagataagccatcttcaatctgtcctagggtccagtgccttcacttatcagcatggccacctcaggccctgtattttatggagtgtatgacatattgaagatggcttatcttcttt

SEQ ID NO: 9685 - DNA, 684 bp, Setaria italica
  Peptide Sequence Number=SeqID_75659
ggaagaaggcggtggaggaggtcgcgttggcggaggggggagtgctggtgctgcaggagaaggaaaaggagaaggatgttcgtgctggcgctggcgcgatgaacatgacaaagcatctctgggctggagccgttgctgccatggtgtcaagaacacttgttgctcctcttgagaggctaaagttggagtatatagttcgcggggagcagaggaatctatttgagcttatgcatgctattgcaacaacacaagggttgaaaggcttttggaaggggaactttgtgaatattctccgcactgctccattcaaggcagtcaacttctatgcatatgacacttacagaaaacaactgcacaaatggtctggtaatgaagaaactacaaactttgagagatttattgctggtgcttttgctggtgtaacagcaacgatgatgtgcataccaatggatacaattaggacaaggatggtagctcctggtggtgaagctttgggtggggttataggtgttgcccgccacatgatccaaactgaaggattcttctctctgtacaagggattagtgccttctcttatcagcatggcaccctcaggcgctgtattttatggagtgtatgacatattgaagatggcttatctgcattcccctgaaggaaagaagagggtaatcgatgatgaaacaa

SEQ ID NO: 9686 - DNA, 1176 bp, Setaria italica
  misc_feature (1)..(44): n is a, c, g, or t
  Peptide Sequence Number=SeqID_75660
nnnnnnnnnnnnnnnnnnnnnnnnnnnnnnnnnnnnnnnnnnnntttttttttttttttttttccagagagtttcaatcagtttgcagccaggctgaacatacaaatcattttacatgactgagccttgcaaaccagccaaacactttgctgcactcttgtaaattttgtaaaactgaataatctacatacctgttcatgaagtgacaacatccgtgtagcacagaacaaagcattattggaactaatcaaccctcggattagtacccaaaaacattattacaggtgaacaacaattagagcacctagtgatcattacacggaaaaggcaaaaagaaccagcaggtcctgcatttgcaaacgctgcattatgcaaaccacactgaggaatgataagcttctgattctttcgtagaagctcggaccatgaatcgcatcgagtctcgtcgctgtaattccaaggtcatgattcctcccctccaaagtttttgcagaagcagagatcactcatgctgcttcgatgccacgaagcagaagcagctcctgaggagtatctgcatcccatatcccaaacccatacaggcagattcctcaacttccagccaaccttcagttcatcctgtcatagcatactctaccagaaaacagctagccagcctccattagctgcagagcttgacagtgcatgctactgcttgagcccaatacttcaacctcgccttcacttcctctggatcatcgccaggtccagagatcctccaattcgggagaggcgtcgccgaagtctcctgctcctggcccggctccctctgctcgtcgaggaacctccgggtcatggaatagcagagctcgagcgcgggcagcgtcccgcagagctcggggatctcgctgtacgcgaagccgaatccgaggtcgaggcagcccttgagctcctccaggtcgtcctccgtgaggctcctcgtcctgaccaccccgtcgccgccggtgcccgaggacgcctcgaccgtcacgaagctgctgttccggcgcggctgccgcaccagcctgctggcgcttgcgatgggggtcgcagggtcgccggcggtggaggccgggagctgcggctgcgaggagaagtaggcggtggaggagacggcttccatttctgtgctccgtttggctcggctgatggcgccgc

SEQ ID NO: 9687 - DNA, 2618 bp, Setaria italica
  Peptide Sequence Number=SeqID_75661
caccatccccgtttggagtcacagagagcggcgaagcggctgtagcaatgctgggaggcaggccgaaatctgcggcggccgaagccaagagcggcaaggtcacgccgccgacgcccaaggggggcagggcgagcaagccggcctccgccaagccggcaaatggcaccccgccgcaagcgccgcgcgcagccgataggtcccccaggtcgggggacaagccgccgtcgggcgaccgccgcacgcccaaggtcttcgaccggctcagcactcccccggccgagaagcaaagcagcgccatgaagctgtcccaggagctgcaggctcagctcgccgcggtccaggaggagctcgtgaaggccaaggagcagcttgtggagaaggagaaggagaagggcaaggtccttgaggaactggaggatgccaagcggctggccgacgaggccaatgccaacctgatggtcgcgcttgccgctcggaagaaggcggaggaggcctccgagaccgagatgtttcgggcagtcgagctggagcagacgagcatcgagtcgatgcagaagaaggaggaggagctgcagaggaagctggagagcatgcggagccagcaggagtctgacgctgcagcactgcggtcgaccgtggaacagctcgagaaggcgaggtatgagctggctgatgcgatcgatgccaagaacttggcgctcaaccaggtggatgatgcgacccggcttagtgaagtgaatgctcacaaggtggagctcctcaatgcagaggttactcgcctgaaagaattgcttgacactgagctggagagcaaggagaaagaaggtgctaagcagatcatgaggctcgaggcagaggtctcggcattgaagattgagctccagaaagcaaaggatgctgaagagaaggtagctgaattagaagatgtgattgaagggcttagagttgatgtcgccaatgctacaaaggccaggaccgaggcagaggagcaggctgatgaatggaaacaaaaggctgaaatactggaaattaaattggaggcagccaaccagtcttacatgttgaaggtcgattccttgaattcagtgatgaaagaattggatgaagcaagcaccttgcttaccgagaaagaatgtgaactttctgaccttcagaacaagctgcaagccttggaagatgaggtagctaggcagaatgaagatattaacgcgtcagatgagcgtcttgatgttgcagagaaagaagcgattgaattgagggaagagatcaatgagctccagtcgaagctccaagcactggaagaagagaagatggatgctatcaacaatgagaacaatgcaagttcacaaatggagtcaatatgtgaagagaaggacaagctggctcaggaactagaagctagcaaagatgaatatgagaaagttaagaaggctatggaagatctagcctcagcgttgcatgaaatgtccggtgaagcaagagaggcacgggaaaggtacctcaacaaacaagaagagattgagcgagccaaggcacaaatagaggagctcaacattaatctcaagaacacccaggagaactatgaggttatgcttgatgaagcaaactacgagagagtctgcttgaagaagacggtggagcgaatggaagcagaagcaaagaacacatctgaggaatggcaatccaaagaggtcagctttatgagctccatcaagaagtctgaagaagaaattagtgcaatgagagttgagatggataaggcaacagagacggcgagggactgggagaacagaaatgctgaattggaggagaagctgaaggagctggaagctcaggtggaggaagctaacagagccaaggatgaagcaaaagctgaagcactggagtggaaagagaagctattggacaaagagaatgaactgcagaacataaaacaggagaatgatgagctgcaggtcaaagaatcgaccgcctccgagaaactcaaggagctttcttccatggttggcaatgcaaaagatagagtgttaaatggcacgggtccgaaagacgagaatgaaaagggaaataccaaggaagacgatcctgtggtggtagttgcgaagatgtgggagaacagcaaggttaccgactatgacttgtctaccgagaaggagaaagatggcgaatcagaacttgatctggagtccaacaagggagatgctgcctcggactgccacaggctctccacagacaccaggatgaacaacaacacgaagctgatcaagcagcagcaaccgaagaagcctttgatgaagaaattcggtggtttgctgaagaagagaagccagcattagaacaaactgtaccatcccaaagaaacaaaatatcaatgtatgctatggatgactatttctctagcttcaccttcgctttggtcctgcagagttgggagtaaacataatagtgtaagaagttttcagaagagaacagaagggtgatgtattttcttccctttttctgtctaattccttatatcgtgtatgtttgaggagcattcatactctagttcatgtatttgttggcctgctgggggtaatgttaatgtaaagggatgtgaggtttcgaattaaaaaaaa

SEQ ID NO: 9688 - DNA, 469 bp, Setaria italica
  Peptide Sequence Number=SeqID_75662
tagctcttgctaagctgtctataggcctgatgtccaaattttgtagattctatgactttgaaaagttccataatgtatgatccgggtggctcgtgttgctgctgagcagttgcatcatagcctccattttgataatacagtaatacaagcattcatctccacaaagttgcagctgtaaattgtagttacaaaattaactatacccctctttcaaatctcaggcaattttacagtgcagtttagaggtcattttaagcaagcagcaaactactggaactagattattctgttcctgttccacctggtccagaggaatgtagaagcaaatctacctgggaagcatgtgcaggcttctggaggctagagcagtgtacttctttgttattgagaccaaggcatggtcccataagggctttcatcatgttaccatatatgattggcatggagggatggtaatatactagtatcc

SEQ ID NO: 9689 - DNA, 285 bp, Setaria italica
  Peptide Sequence Number=SeqID_75663
ccggcttctgcatgttgtcgaagatcttctggtagtccagggtcttgaactcgtcccactcggtcaggatgcacagaccgtgggcgcccttggtggcctcgtacgcgtcccagacgcagctcacctgcttcacggccgtggggctcgtcggctgcaggtgcatcgggtggtcccagtcgaacttgttcatggccaggtcccgctggatctggtcctctgtcaccgtgggggtcgtagatgctgatcgtgggccttgtccgcccagcaggcccttgcagacgtcga

SEQ ID NO: 9690 - DNA, 508 bp, Setaria italica
  Peptide Sequence Number=SeqID_75664
gtacacattggcaccggtggcctcgcagagtgcggagaataggacgttagaacaagaaggaagaatacctctgcgccaagaaagcgttggcagcgagcttggagagctcagcagaccacaggttggtggtgaggatcctgtcctcaggaacccagtgagcgtacacatccttgagggcctggacggccttcctgccctcaggggtctcccggccaccgatgagcaccctgtcaggcttgaacaggtcctcaatggcagtgccctcagcaaggaactccgggttggagaggatctggtagttgatgcccttgctgttgtgggtcaagatcttctcaatagcctcagcagtcttgacagggacagtggacttctcaacaacgatcttgtcagacttggagacatcagagatcatgcgagcagcgctctcccagtaggtgaggtcagcagccttgccagctccaagaccacgggtcttggtggggtgttcgaccgagacgaagatgatgtc

SEQ ID NO: 9691 - DNA, 729 bp, Setaria italica
  Peptide Sequence Number=SeqID_75665
gcctcgtacgcgtcccagacgcagctcacctggcttcacggccgtggggctcgtcggctgcaggtgcatcgggtggtcccagtcgaacttgttcatggccaggtcccgctggatctggtcctctgtcacctgggggtcgtagatgctgatctgggccttgtcgcccagcaggcccttgcagacgtcgatggcagggggtctccctggtgtcaccggtgtccttcttgaaggcaaagccgaggacggcgatcttcttgccggcgacagtgttgaacatggaggacaccacgcggttcacgaaccggctcttctggtagtcgttgatcttgatcacctgcttccagtagttggccacctcgggcaagccattgcactcgcagatgtacaccaagttcaggatgtccttctggaagcaggagccaccgaacccaacactggcgttcaagaacttggggccgatcctggtgtccttgcccacagcgtacgccacctcggtcacattggcaccggtggcctcgcagagtgcggagatggcgttgacagaggagatcctctgcgccaagaaagcgttggcagcgagcttggagagctcagcagaccacaggttggtggtgaggatcctgtcctcaggaacccagtgagcgtacacatccttgagggcctggacggccttcctgccctcaggggtctcccggccaaccgaatgaagacaaccctagtacaaggaca

SEQ ID NO: 9692 - DNA, 1782 bp, Setaria italica
  Peptide Sequence Number=SeqID_75666
taacataaaactagcttatatttggatatagatttaacagtaggagccaaaaggtaaacgaataaacaaagaacgacgaacatgaatacatcagaccactgggctacagctgctgcgaacattgaaacttaaacagagatactaagatccgattttatgcctgagaaaattgtagtgcctccagcaaaagcaaactaatgaatggccaacaaattcctgctgctcatagatttcctgcggttccagtgggtgcccttttgatggaaatatgattaagcaactgcaggcatgtccttcagccaggcatcaagtggcttgccaatagagtagacgataaagccaatctccctgagcttctcactgtcaacgatgttgcgcccatcgaagacaaaggctggcttctgcatgttgtcgaagatcttctggtagtccaaggtcttgaactcgtcccactcggtgaggatgcagaggccatgggcgtccttggtggcctcatatgcgtcccagaccatgctcacctgcttcactgcactggggcttgtaggctgcaggtgcatcgggtggtcccagtcaaacttgttcatggcgaggtcccgctggatctgatcttcagttacttggggatcataaatgctgatctgagccttgtcacccagcagacccttgcacacatcaatggccgggggtctccctggtgtcaccagtgtccttcttgaaggcaaaaccaagaacggcaatcttcttgccagcgacagtgttgaacattgaggaaacaacacggttgacaaaccggctcttctggtagtcgttgatcttgatgacctgcttccagtagttggccacctcggggaggccgttgcactcgcagatgtacaccaagttcaggatgtccttctggaagcaagacccaccaaagccaacactggcattcaggaacttggggccaatcctcgagtccttcccaacggcataagccacctcagatacattggcaccagtggcctcgcagagtgcagagatggcattcacagaggagatcctctgtgccaagaatgcatttgcggcaagcttggagagctcagcagaccacaggttggtggtgaggatcctatcctcaggaacccagtgggcatacacatccttgagagcctgaacagccttcctgccctcaggggtcctcccggccaccaatgagaactctgtcaggcttgaacaggtcctcaatcgctgtgccctccgcaaggaactctgggtttgagagaatctggtagttgatgcccttgctattgtgagtcaaaatcttttcaatagcttctgctgtctttacagggacagtggacttctcaacaacgatcttgtctgacttggagacatcagcaatcatacgagcagcactctcccagtaggtgagatcggcagccttgcctgctccaagcccacgggtcttggtaggagtgttaacagagacaaagatgatgtttgcctcagcaacatgcttctcaacatcagtgctaaagaaaaggttcctgcccctgcactgcttcacaacatcatcaagaccaggctcatagattgggagctgatcgctgttccaagcttcaatgcgaggcttggagatgtcaacgacaacaacctcaattgctgggcacttgagggcaatgacagccattgtagggccaccaacatagccagctccaatgcagcagatcttcaccatcttgtcagttcactccacaaccagatctcaagtttaggagagggcactagtagagaagagatgga

SEQ ID NO: 9693 - DNA, 1456 bp, Setaria italica
  Peptide Sequence Number=SeqID_75667
tccagggtcttgaactcgtcccactcggtcaggatgcacagaccgtgggcgcccttggtggcctcgtacgcgtcccagacgcagctcacctgcttcacggccgtggggctcgtcggctgcaggtgcatcgggtggtcccagtcgaacttgttcatggccaggtcccgctggatctggtcctctgtcacctgggggtcgtagatgctgatctgggccttgtcgcccagcaggcccttgcagacgtcgatggcaggggtctccctggtgtcaccggtgtccttcttgaaggcaaagccgaggacggcgatcttcttgccggcgacagtgttgaacatggaggacaccacgcggttcacgaaccggctcttctggtagtcgttgatcttgatcacctgcttccagtagttggccacctcgggcaagccattgcactcgcagatgtacaccaagttcaggatgtccttctggaagcaggagccaccgaacccaacactggcgttcaagaacttggggccgatcctggtgtccttgcccacagcgtacgccacctcggtcacattggcaccggtggcctcgcagagtgcggagatggcgttgacagaggagatcctctgcgccaagaaagcgttggcagcgagcttggagagctcagcagaccacaggttggtggtagaaggaatacctgtcctcaggaacccagtgagcgtacacatccttgagggcctggacggccttcctgccctcaggggtctcccggccaccgatgagcaccctgtcaggcttgaacaggtcctcaatggcagtgccctcagcaaggaactccgggttggagaggatctggtagttgatgcccttgctgttgtgggtcaagatcttctcaatagcctcagcagtcttgacagggacagtggacttctcaacaacgatcttgtcagacttggagacatcagcgatcatgcgagcagcgctctcccagtaggtgaggtcagcagccttgccagctccaagaccacgggtcttggtgggggtgttcaccgagacgaagatgatgtcagcctcagcaacgtgcttctcaacatcagtgctgaagaagaggttcttccccctgcactgcttcacaacatcatcaagaccaggctcatagatcgggagggtgtcgctgttccaggcctcaatacggggcttggagatgtcaacgacaacgacctcaatgtctgggcacttgagggcaatgacggccatggtcgggccaccggacatagccagcaccgatgcagcagatcttcaccatcttgtcagctagatctgtgaccagatctcgaggagccgcagggagatctcgctcgacgagggcgggcacccgcaccaccgacggagagaggcggcgacctcgctctcttcctgtgcgcgatgcgtgtggtaggggagggagacgctcgctgcctccgagttgtgt

SEQ ID NO: 9694 - DNA, 1979 bp, Setaria italica
  misc_feature (65)..(65): n is a, c, g, or t
  Peptide Sequence Number=SeqID_75668
ggttgaccatctttattatagttgtttttgtcaggagacgctacgattttctcttctgtcaggcntaaaaagttaggtcggtgctgctagtattctctgtttcgtgttttcatgttggaggacgtctgtagatgtaagatcctcaagcagatagcacaagggcttgaggatcttacatctacagacgtcctccaacatgaaaacacgaaacagagaatactagcagcaccgaccaactttttatgcctgacagaagagaaaatcgtagcgtctcctgcaaaaacaaactgtaataactttaggaatacaattgaagaatcaaccggctatagcaggtccatgggtacaaggaaatttcctcaagcagatagcacaagggcttgaggatcttacatctacagacgtcctccaacatgaaaacacgaaacagagaatactagcagcaccgaccaactttttatgcctgacagaagagaaaatcgtagcgtctcctgcaaaaacaaactataataaagaatggtcaaccagttcctcttcctttctcggatccaatccctgcaggcagcagctctcggatgtggagacttaagcgaccgcgggcatgtccttgagccaggcgtcaagcggcttgccgatggagtagacgatgaagccgatctccctcagcttctcagggtcgacgatgttgcgtccgtcgaacacgaaggccggcttctgcatgttgtcgaagatcttctggtagtccagggtcttgaactcgtcccactcggtcaggatgcacagaccgtgggcgcccttggtggcctcgtacgcgtcccagacgcagctcacctgcttcacggccgtggggctcgtcggctgcaggtgcagtcgggtggtcccagtcgaacttgttcatggccaggtcccgctggatctggtcctctgtcacctgggggtcgtagatgctgatctgggccttgtcgcccagcaggcccttgcagacgtcgatggcagggggtctccctggtgtcaccggtgtccttcttgaaggcaaagccgaggacggcgatcttcttgccggcgacagtgttgaacatggaggacaccacgcggttcacgaaccggctcttctggtagtcgttgatcttgatcacctgcttccagtagttggccacctcgggcaagccattgcactcgcagatgtacaccaagttcaggatgtccttctggaagcaggagccaccgaacccaacactggcgttcaagaacttggggccgatcctggtgtccttgcccacagcgtacgccacctcggtcacattggcaccggtggccttcgtctagtagttgtcggtagtattggtcgtttgtacagaggagatcctctgcgccaagaaagcgttggcagcgagcttggagagctcagcagaccacaggttggtggtgaggatcctgtcctcaggaacccagtgagcgtacacatccttgagggcctggacggccttcctgccctcaggggtctcccggccaccgatgagcaccctgtcaggcttgaacaggtcctcaatggcagtgccctcagcaaggaactccgggttggagaggatctggtagttgatgcccttgctgttgtgggtcaagatcttctcaatagcctcagcagtcttgacagggacagtggacttctcaacaacgatcttgtcagacttggagacatcagcgatcatgcgagcagcgctctcccagtaggtgaggtcagcagccttgccagctccaagaccacgggtcttgggtgggggtgttcaccgagacgaagatgatgtcagcctcagcaacgtgcttctcaacatcagtgctgaagaagaggttcttcccctgcactgcttcacaacatcatcaagaccaggctcatagatcgggaggtgtcgctgttccaggcctcaatacgggcttggagatgtcaacgacaacgacctcaatgtctgggcacttgaggg

SEQ ID NO: 9695 - DNA, 430 bp, Setaria italica
  Peptide Sequence Number=SeqID_75669
tgtacggtcgggtaaggtaagactaacgaaggcggccgcggaggaggaatccacggctacgtgtggtgagggaaggagggagggcgctgtggtgcagctagcggcagggaggagcacgtggtgacggtggcatctcgcgagggggagggcgacgcgcgaggataggataaggttggcaggggtatttcgatcttttcgcgagttccagtgcccattagcacctatgagcacctccccaccagctaatgcttttgcatctttttggaggtaggctaaagtttagccgtccccattagcactcctgtttggatgtgttaatgcataaaggtgctaaactttagcactttcacccattggcacttggatcaaacaggccctaaatatataataatgtgccattccaattaaatgattggacatagtaatgggt

SEQ ID NO: 9696 - DNA, 610 bp, Setaria italica
  misc_feature (1)..(4): n is a, c, g, or t
  Peptide Sequence Number=SeqID_75670
nnnntttttagttaagttttttttttttttttttgatgaaaattgttctttttcttgatatcatagcagtacaaatcatgggtttatccatacattttcgtaggttattaacagcagcagaagagcatcagactcaaatctccctgctaagcttcgaacatggcaactacgtgccatgcccagtcacccacccctaacctcgcagcttcctttcccttcttacactttccagcggtacacgcgccaaatcggcatggccgatcagcgcagcttacgaatcgtactactagtacgtagcagtatggtgtatcaccgtctagagatcgaacaagccaagccgcgggggaacgcgacgccccggtcgattagttggtgagcgcgacggcggcctcctgcacgagcggctgggtggcgtgggcgacgccggaggcctcccgctccacctgctccctgcacatgtcccgcttcccggcgccggacatgcgcttcacgaacgcggcgaagcggcgccagttgtcgggctggaacaggtcgggccccatgcggaggtacgtgaacgccaccatccgctcctcctcggccttctccgccgccgtcgccaccacctggt

SEQ ID NO: 9697 - DNA, 440 bp, Setaria italica
  Peptide Sequence Number=SeqID_75671
ctccggttcttacttaccaatttgctcaaacaaacaccaaataggcacgtgaacaaaattctaagttattcaatagaattcatatttcaagtatcttcaaagaccgttcaactactttacatgtaacttgaattatataatttttaaataacttgaattataatttaccaagataggttttctgtcatttcaaaattcagagatggcagattgtttaccgttcaagtaagtttgaaagtttatacaactaaaacctagatatttaaacattaaaataaagcaatttccagcatatcatcacataataaaaggtaatatcatttcaataggttaaagcactttagatctatattgcaaaattacaaggctatcatattacagattgagctcagcccctcactccctcagcacatcaacccaaatcaatgaggtcaattaaa

SEQ ID NO: 9698 - DNA, 394 bp, Setaria italica
  misc_feature (340)..(340): n is a, c, g, or t
  misc_feature (367)..(367): n is a, c, g, or t
  Peptide Sequence Number=SeqID_75672
ggagcaggcccgagaagcggtggagaaggggaaggcgcgggcggtgccgtgggcggcggcgagggacgagggcctcaaggtcgcgctgcggcgggagaagaaggcgagggagcccacgcgcgcggaggcagagctggaggccggcgagctggaccggctgcagcggctggcgcgcgggatgggtaggtgggcgcgagccaagaaggctggggtcaccgacgaggtggtggaggacctgcgacgggagtgggccaggggcgaggagctcgccgccgtgcgcattgtagagccgctgcgccggaacatggaccgcgccagggagattctggagataaaaacnggaggcttagtaatttggacaaaaggngatatacattttgtttacagaggaagc

SEQ ID NO: 9699 - DNA, 758 bp, Setaria italica
  misc_feature (523)..(523): n is a, c, g, or t
  misc_feature (714)..(758): n is a, c, g, or t
  Peptide Sequence Number=SeqID_75673
gcgccgagcagaggctgcagtcgctgcggcgggcgcagcatgcggcgggcggccgaggcggcgcgccggatgcaggcgaacggggagtgggagcccggcctgcagagcatccccgaggaggtctactgatgataaccaccgctagtagatgatgggtggcgtccgctgatggctagtaatctcttgactaattatgggtttgggtacgttttgatcaccgctaagtgctagatgtatgtgtacagcgctgttttgctccggaccctgcttatcatgggctccaatggctgcttaatcgtcctccgcgagtttgtgcattttgccctgtgattttttttggtgtgaaccaagcaaagagggaggaaagagatgtgttttggaccttgggttgggtcatcacaatgcaagtgctgacggttgatgaactgatctcaattttggcatccaacctgctgtgaatgatggatggtgtgagcaggttgttcagggggtagcaagctgccaggattgcttctgtttttcnctcgtctggcagtgagattttactttgtcgccattccatgccactgtgaacccgtgatgaaacggtgaactgtgaaaccggcatgtgtacatgtactatttactgtggataaatgtttaggtgttcggttgttttgccttttggtggcatggaacataaccaaaagtatcagtggttaggaagaaaaccgnnnnnnnnnnnnnnnnnnnnnnnnnnnnnnnnnnnnnnnnnnnnn

SEQ ID NO: 9700 - DNA, 2165 bp, Setaria italica
  Peptide Sequence Number=SeqID_75674
tgggctcagcaggccgaggagacctaccagctgcagctcgcgctcgcgctccgcctctgcgccgacgccgcctgcgccgcggacccggggttcctcgaccccggcgaaacggggagcggcaggggcagcgggaacgggagggccttcccgctcgcgcatcccgcgccctcccccgagtccctctcgcatcgcttctgggtaaatggctcgctatcatacaacagcacaataccagatggtttttatgtgattcatgggatggaccccttcgtgtggtcactatgcacggatatacatgaagagaaccgcataccctccatggaatccctcaaatctgtccttccagatgattcctcaattcaagccattctcatcgatcggagaactgattttgatttaggtatgctggagagttatgcttccagcctttcgtccagctgtacagatgccaaggatgtggtaacccaactagccaaagtcgtatcttcaaggatggggggtacaacgtccaacgaagagaacttgcttccacgatggaaagagtgcaatgaggccatcaagtcaagtgcaggatctgttgtgcttcatctgggaaagctccctgtcggtctctgcaagcaccgctcattgctattcaaaatgttagcagataaagtcagtattccatgtagagttgtcaagggttgtaaatattgtaaatctgatgatgcctcctcctgtcttgtacgctttgggcttgaaagggaatacttggttgatttaattggggatcctggccaacttagtgatcctgattcgtttgtcaatggtccctactcactatcggtgtcctcacctcttcatcctcccaaatttaggtcattggagatcacttcaaatttcagctcggtagccaagcagtacttctcagattgccattcactgaatctcttgttcagtgattcttctacaggtgctgctactagtgcagtaactactctggaccaaccttattccaagaaacatattgctggggacgagattattaacagctggatgccaggaaaagggcaagcagcaataaagccggacattattgtgccagaagctcctcgggaggttttgccactaattacttcctccaatataaagcttgataagaagaaagaattgaaattaattgaggagactcagcacttgcggcatacagtcagtgatctgtcacttgctgcggatgatctgatcattccatggaatgagctgattttaaaggagaagattggagcaggttcttttggaacagttcatcgtgctgattggcatggatcggatgttgcagtcaaaatacttatggagcaggattttcatccagagcgcttcagggagtttatgagagaggttgcaatcatgaaaagtctgagacatccaaatattgttctattcatgggtgctgtcactgaaccgccgaacctatcgatagtcacagaatacttgtctaggttgggaagttccttttggttgtacctttgtttatctttatagtatgatatcataatagtttacccactaggctgcttccaacaagtgatgcctttctttcattgcaggggtagtttgtataaacttttgcataggagtggtgcaaaggaagttctggatgagaggcgtcgattaaacatggcatttgacgtggccaaaggaatgaactacctgcatagacgcagccctccaattgttcaccgtgatctgaagtctccaaatcttctagttgacaagaagtatactgtcaaagtatgcgactttggcctttcaagactaaaagctaacaccttcctgtcttcgaagtctttggctggaactcctgaatggatggcacctgaagtgcttcgagatgaaccatccaatgagaaatctgatgtctacagttttggtgtaatcctatgggaactaatgacattgcaacaaccatggtgtaacctgaatcctgcccaggtggttgctgctgtaggttttaaaggaagaaggcttgaaatcccgaaagatctgaatcctctagtagccgcgttaattgaatcttgctgggcaaatgagccatggcgaagaccctcatttacaaatattatggaagctttgagaccattaattaaggttccagtgccgcagctgattcgttcagattcgtagcc

SEQ ID NO: 9701 - DNA, 1102 bp, Setaria italica
  Peptide Sequence Number=SeqID_75675
ttttttttgtccaaaataataataaatttcatgttccaaaaatttaaaatttcgaaataaattcatagttccaaattaaggtcgttacaataatcattgcactaattccatgttagggcaattgatgtagccatactatcacgaaaggtgtccatagtcacaaagcttgattccgaagttgatccattagaggtatgttgagacacggcatacttgttgtatctttccggaatagtaggcatgtactatcactcacctaatttcgtggtatgttacattacaatttacaagagatgaagaaacaggcatacatacagatatacatcagcttctacggaactgcactgcttggtctaggtcagtaatagaatcaaaggcctgaagcaagtcagccaaaatcttttgttttcatggctacctttagttacatactgtacaaagaaatctatagactggaatttacaggaaatggtcaggaaatttgaacccaacgtgcattctctgatgtgagcaagatatcatcacaggataactccgtataagaaacaaactgaaaatccaaattagcaaaggatgtcatcccacatctcatggggaagttagactaacagttccatctgatatccattgaagcaacatgcagacctggagatatggaaagaagttgctaggtacactttgtttgaaagtgtagatgcaggaaaccatattctcagaatgaagtgatgctgacaatggattattcagttatagcaggtcaattcaaaaccctccttcgtgttgatcttatcacgacaactcactaaaatacaccttcctgtaactctataaagcaggctacgaatctgaacgaatcagctgcggcactggaaccttaattaatggtctcaaagcttccataatatttgtaaatgagggtcttcgccatggctcatttgcccagcaagattcaattaacgcggctactagaggattcagatctttcgggatttcaagccttcttcctttaaaacctacagcagcaaccacctgggcaggattcaggttacaccatggttgttgcaatgtcattagttcccataggattacaccaaaactgtag

SEQ ID NO: 9702 - DNA, 1130 bp, Setaria italica
  Peptide Sequence Number=SeqID_75676
agcacaagtcacatgcccaaggccatggggactgttgcattgcccacagagtgttttctgggatcctgaggtcagatgtcacctgcacaagctgtgggttcacatccacaacttttgagccctgtatggacatttccttggacttggatgttggagataacagttcttttggtgttgcaaacacaaagccacatgcgcgcaacggggaacggagttcggctggtgtgaattccaaggtctcaactcttatgagatgtttggagcggtttacaagggctgagagacttgatgctgagcaaaagttcttctgtgaacgctgcaatgagaggcaagagtccctgaagcaaatgtccattcgcaggcttccattagtttcctgctttcacataaagagatttgagcattcgtcagtcaaaaaggtgtcaaggaaagttgatcactgtttgcagttccccttttcccttgacatggcaccttacctgtcatcatccatcctcagaagtagatatggtaaccgcatatttccagcagaagctagtgacgcagatgcagtttcagaactgtcatcagaattcgagatattcgcagtaatcacacatagtggtaaactagaagctggccattatgtgacatatctgaggttaaacaatcactggtacaaatgtgatgatgcctgggtaacgagagtcgaggagcatactgtcagaacttctcaggcatacatgctcttctatgtgcagaagacactctactacaaagcttgtgaaagagcagctgcagtctgatctgaactctgaagcaaacattgatggcactactccacaacaccaagacaaagttttcattaaatcaggtacacatttagttcgtcaagaggaaaaatgcatggtattagtttaaaaaacaaggtattttcacagcgcagccatcgagacagatggtcaaagttttgcattctcattgacctatagttccagtcagaggtaagcttttttggcgattttctttacagccagttgaccagagggaagatggtcgaattttatttgttgttttatcgtattatcctgattgatggattcttgtggtggctggctggctgccacaaaactgtaagcgctcattatttg

SEQ ID NO: 9703 - DNA, 461 bp, Setaria italica
  misc_feature (454)..(454): n is a, c, g, or t
  Peptide Sequence Number=SeqID_75677
tcgcctcccggctagaacttgacatcatggaataataccacaatgaatgcgttgtataacaatcgaattatggaactaatgttgaacttttgggcattacctgatgctagcagcaggtagctcactccatgctgcccagtgtagcaggtatactgagtgccttaagtactgcttacacagaagtgcctttcatttgactcttagtagatgtttcaagtgttcattgtgtcgcatttgctacctcatccccataggaagtttatatctggctcagctgtcacccgttttcatgccaccttgtattgtttgcactgaatatcttcaaattctgactggcttttcattattttataatttatctattgcttactttgggacatattagtaggctggttgttcattgttaagggttttatccattgtagcctaagactgtaaacagctagaaaaaagntttgaac

SEQ ID NO: 9704 - DNA, 427 bp, Setaria italica
  Peptide Sequence Number=SeqID_75678
tctttctacatctccatcgaaacgagctccgaccgccggccaaatccgtcgaactccggccatagctgttcaatagctgccaaccgcagctcctttacctcccacacgacctccccagcctttccttgacgcactccgacgaccgaatcgccaggaaatcccgatttccccggctgccacaaactcctccaccgctcgaagctccaccagctgtggtgagtcctaactcaattcctcaaaggcaaagcttccttgcttcaatccgaactctattgagcacctatcttcacgaatcgatgccaaggatggctggaaccaaagttttccccactagaaattgatggcgcaacaaagagcttcgagcttcgtcctttagtccttcctttcccgtcttcgtccttattgtcttccgtaccggtcttaccta

SEQ ID NO: 9705 - DNA, 397 bp, Setaria italica
  Peptide Sequence Number=SeqID_75679
ttatgaaacaataatcctccaacaatgacaaacgaaaagcatgtgatgagcaaagtaacaatagacaagacaatattccgttcaagctgagaattgaacagatagtacaatcgtgaaatactccatctgacatcaggcaatggtggaaaagtcacatctagcttaagaggcatgggttttctggtaggatcagatatgcaagcaaatggcaaacttgtaatgccatttgatatccatgggggtaaattcatcaactgcatccggcgagacacaattccgtgtagaaagcagattgctatgcttataatggcagccatgttttttccctgtaagggagagcgcgaggaatttgcagttgccgttgaagtgttcggcgtttctgcattcttcacattag

SEQ ID NO: 9706 - DNA, 422 bp, Setaria italica
  Peptide Sequence Number=SeqID_75680
tatatacacatctaattggcaaacaagtcagcaagagctagcatgtctggtactctggttcaccaccaacctaggcaggggactggatcaccggcagggttacctttagaaggcgctgcagacatgtcatagacttgttcggatcatcccctgaccaaaactgcaccacgtcctagttgttcacacttcacagttcactgcagcatggcacataccctgggatacaatgactctaggtaacgaatagaagtgtcccaactctattgatacatacaagaggattaagcaaaggataggaggatcttactgccttatctcatccaatcacgagtacaaacaagtgcctcgattgtcttgatgcttaacgtactgtggtgcttgggaatcactggtccgctgctggtgaatgccgacttacaaga

SEQ ID NO: 9707 - DNA, 1971 bp, Setaria italica
  misc_feature (1)..(74): n is a, c, g, or t
  Peptide Sequence Number=SeqID_75681
nnnnnnnnnnnnnnnnnnnnnnnnnnnnnnnnnnnnnnnnnnnnnnnnnnnnnnnnnnnnnnnnnnnnnnnnnnttttttttttttaagaataagaaacagttgtagttgcagatgtttctttcatcaacctaggactgctccgtaaggaactagggttcatcaacaaagcatgtctgcgacattacattagaggcatgaaaaaaacatctgcaactacaacaagcaaatggcacgggctgatatatacacatctaattggcaaacaagtcagcaagagctagcatgtctggtactctggttcaccaccaacctaggcaggggactggatcaccggcagggttacctttagaaggcgctgcagacatgtcatagacttgttcggatcatcccctgaccaaaactgcaccacgtcctagttgttcacacttcacagttcactgcagcatggcacatacctgccttatctcatccaatcacgagtacaaacaagtgcctcgattgtcttgatgcttaacgtactgtggtgcttgggaatcactggtccgctgctggtgaatgccgcttcagattgaacagcagatgctggcatagccaggatgtcctgtgcgatagcagcaagccttgggtactttgtggtatggcacatccaccagttcagaatatcgaaatcatccttccttggaactaacccatcctcaaggtagttgtcaagttccgtagatttttgactacttgcttgctcattgaggtgctgatcccaatcgtccaaggagtcgttatcatctgcatcaaaggcttcgctttttgtagcacctccgttcggctgatccacagaattgcagtattcatggaagagttcctggagtgtttggcgtatggcagataagtagctcgctgattttaatccaaaagctcgtttcagacggaactcaatgaaactgattttgaatctaggatcaagaataacaggtaaacataaccacaagtacgaattttgccaataccgattgaacatttcctgcatctccgtaaccattgtagcaatttctccatgctcatttgatgcttcctcttgcaaaactgttctcactttccatatctcattgaagtacatatttgctgttggacaattaggactagaaataacttcaataacacgataaaacgtcctcaaaatcttgcaaatggactcagcaactccgatatcttctggagacgccacttcttcagaaggaaatgatttcttgaaatgcaaaagaacttcaagcctaaaataaaatttgtgccaccacttggcatcttcctgtgggcacttcaaactcatctgcgaaatgacttccacaagctggtgttgtttcgatgatgaagatgtatgtaccccaaaaaactcagtaaccatgtcactgacgaggtgaatgatattttgttgcacttcagaaacaatactgttaaggaaatcatccacacaagcaatatcgtatatcttgcctctgataggaaggcacttcttctctacaagtgtttcctttaactttgaggtgcttgtatcatccctaacctcgccaacataagtcaagctcaaaagcttctgatcaagattccaatctctaatagcatcccatatgacgttgtatgctccactttcagactctgggacacaggcttccttacaatgtatcatcctttccacattggcaggtgaggactgaaacatgccaaatttgattatcattctgttaactttccagtctttatcaataaaatgtgctgtcagacaaaggtaatttactgctggctcagctccatcaggagtccagatgcttgctgaaagagagacacgccgggaggaaagggcaagtttatttttaaggtttgccttttccttctgaaataaagcgcagcaatgtccttccatatcattatgagagactgcgttaaccataggggtttgaggtttctttacaaatct

SEQ ID NO: 9708 - DNA, 664 bp, Setaria italica
  Peptide Sequence Number=SeqID_75682
aagaagaatggtggcagtcattgggctgttgaggatttctcctggctgcaaggcccaatggcaatggtcggtggagagctgtatgtgctaagcaatagctgtattatgaagcaacgtggggagaacttccctgataagatggtgtcttgtgcatctgaatttcaaagcaggatcggctttgggatgattggtcttggcaacagcatatatttggttggaggagtgattggaccagggccaagaaaccagtgcatcaagccgctgtctgatgttgatatcttgaatgtcacaagtgagagaccaacctggcgaccaggttcaccaatgacacattgtcgagggagcatctgcggctgtgctttgttgaggatttagcctgtttcaagtgatgaatgctagtattccaccgttgctgaattgactggagacgaattttattcacctaaattttattttatttcaaggagggctgtttattgtgctttgcctttggatatcatgttgtagcattgaggtcatgtattggtcatgacctaatgtctgattgctgatcagatatatactccctctgctccaaattgtttgtcgtttttggctttttcttggttcatagatgtttgtatgcacctaaatatagtgtatgtctactagaaaagctaaaacg

SEQ ID NO: 9709 - DNA, 508 bp, Setaria italica
  Peptide Sequence Number=SeqID_75683
agtacaacaaagtagaagaagaaccaaacctaggacgaaccaacaggttcaccaatgacacattgtcgagggagcatctgcggctgtgctttgttgaggatttagcctgtttcaagtgatgaatgctagtattccaccgttgctgaattgactggagacgaattttattcacctaaattttattttatttcaaggagggctgtttattgtgctttgcctttggatatcatgttgtagcattgaggtcatgtattggtcatgacctaatgtctgattgctgatcagatatatactccctctgctccaaattgtttgtcgttttggcttttcttggttcatagatgtttgtatgcacctaaatatagtgtatgtctactagaaaagctaaaacgacctacaatttggaacgaatggagtactatgaatgttgttccaaacgtagtagatattatatgttcatttggaactgacaagtcttcgtgctatgttaaatgacaccttgctgttc

SEQ ID NO: 9710 - DNA, 516 bp, Setaria italica
  Peptide Sequence Number=SeqID_75684
caggaatatgatactaagctgctggagcaaggatgttaaacatttattgaatcttgcagaatgtggtgtttccgttgttcctttgaaagatgagttgccacgtcacacgcttattcgtgatgtgtatttattcttagaccaaaatggctacataaatgctggaattgcatcagataaggtggcaaaggagcacgacactccagaagttgtggatgtacccaagctaaatgaatcaaatcaaatggaatcagtcagcattcaagatggcattgtctctgtaccactccagaatggggattttgagtatggcacaggcattgaatgctgcagaactgtatgtgtaaaaaatactgtagaagcatcaaatgacaagaattgccccactgttgactgtgatgctctggagttgctaccttacttgaagtctgaagaacagcccactgaagaaaagaatctaggcgtgtcaactgaaggtagagatgcatcactgccgtccaacaatttggatatccaagg

SEQ ID NO: 9711 - DNA, 537 bp, Setaria italica
  Peptide Sequence Number=SeqID_75685
caccttctccacggcgaagcgggtgcggaaggccgccaacgacgcgccgcccgccgcggaggcgccctgcgacctcgggctgtgcctgagccccgggtccccgccggcgccgggggagcggagggccccgctcctgcggccgggcacgccgtccatgagctcggacgagtccgtgaccaccaccacgaccggcggcgacagggagccggtgctgctcaacctttttccctaagcctgacgaggccgcagctaatcctaatccacgcgtgcgcgcgtgcgtgggttccctgaccaccgtgtgctaccaggacggacaatcccggcggcgaagtacttagttcttttctcttgtcgccggcggcgaggccatttttccttcgtttctgcgcggcctttgattttttttcttttgaaaattagcacggcctttgattttgttgtgtagtagaaaaagaagatagaggcccggcctggacgccccgtttgcgtgggcgagatgagagcgccggtggccaccccacccgagtaacaattttt

SEQ ID NO: 9712 - DNA, 278 bp, Setaria italica
  Peptide Sequence Number=SeqID_75686
gaggcccgcgagctccggcgggaggttcttccacgagcgcggtggcccagccatgggccgatctcggatcctggaaccaagagaaggacgaacgcggacgcgaggcagtgaggcaatacgtcgaacagctcgcgcgcgtgacggggtatgggcggcggaagctaactatggccggggaagttgagcggcacagaaggcgtaagtggagaaggagaccggaggtgtaaggagagggtagtaccagacacgaacgggagcggggaagctgcggattccgg

SEQ ID NO: 9713 - DNA, 689 bp, Setaria italica
  Peptide Sequence Number=SeqID_75687
caagcgatagcacgcgcacagaaaggcgaagccgaacaccccttccccctcccggctcccgccgccactgcccgctccaccgtcctacggccatgggcgacaacagcgcggcggacgcgccggcgccgggcaggttcggcaggatctgcgtcttctgcggcagcaaccccggcaaccgcgcggtcttcggggacgccgcgctcgacctcgggaaagagctggtggcgagggggatcgatttggtctacggtggcggcagcgtcgggctcatgggcctgatcgcgcagacggttcttgatggcggctgcagtgtcctcggggtgatcccaagagcactcatgccccttgagatatctggtgctagcgttggtgaagtaaaggttgtctctgacatgcacgaaaggaaagctgagatggcgcgacaagctgatgccttcattgctcttcctggagggtacggaacaatggaagagttgttagagatgataacatggtcacaacttggaattcatgacaaaccagttggattgctaaatgttgatggttactatgacccgttgctcacgttatttgataaaggcgcgacagaaggttttattaagcaggattgcagagatataattgtttcagcgccgaccgcccatgaattgctgaagaaaatggagcactacacacgatcacacacggag

SEQ ID NO: 9714 - DNA, 612 bp, Setaria italica
  Peptide Sequence Number=SeqID_75688
ggaattcatgacaaaccagtgagtattagtatatggctgtgaacaagtagcttaagggcactgaacaacttatcacatactgcaggttggattgctaaatgttgatggttactatgacccgttgctcacgttatttgataaaggcgcgacagaaggttttattaagcaggattgcagagatataattgtttcagcgccgaccgcccatgaattgctgaagaaaatggagcactacacacgatcacacacggaggtcgccccacggacaagctgggagatgtcagagctgggctatggaaaagcaccggagacatagcatacgcttgccaagatgacatttagcgttactgggctgcaggcactggctttcaattatcatcttttgatccatctatttagtagccattcatgctacttgtgcgctcaattgttacttcatctggtgaacaagagtacaagaatttgtatgttcttcaacagtaacagtgttggcaaatgcatacgtgattacaatagtttgttccccgtggttacaataatacccattgtacaacaaaggtatattatgtttactgttgctacgtgtggttatcattacattttgttcaagaa

SEQ ID NO: 9715 - DNA, 304 bp, Setaria italica
  Peptide Sequence Number=SeqID_75689
agagagagagagagcggaacccttcttcgccatttccgtccaagtgtttccccgtggagtcgtcgtgccctgtccggtttaggtgggcgctagccggggcgacgggacgggagcatcggccggccggctgcggcgtggcggcgctcgagttctcttctccccggcgaggcgttttgattgaacctactagaaggaaaggaggacaaatgaagcacactgctgcactttgtacgaggattgaagacaggtagcgctatggtagttgctacaactgcaggaatgtttcttgtgtgttttgagtccc

SEQ ID NO: 9716 - DNA, 395 bp, Setaria italica
  Peptide Sequence Number=SeqID_75690
acggggctctcgccatggagctgccgctcccgctctcccctccgcgcgcccacgccgccctcctcacctgcagctccactcccatcgccttcgggctccgctcccactcccacccagccgctccgagccgcggcgcttggccgctccgagcccgcaggaacaagaactaccggagcgaggaggacgcggccaccgcggagcccaaaatcatcaccctcggccggccggggaagagccggcggcggggcaacaggaagcagctgccgcagaaggcagacgccgacggcgaaggcgaggacgagggtgacgacgacgacgagcgcgacgtggcaatcccggaggtggtgaccgaaccggatgatgcggcgcgtgggggtgtcggtgggcgcgccgct

SEQ ID NO: 9717 - DNA, 705 bp, Setaria italica
  Peptide Sequence Number=SeqID_75691
aaaagggccatctcgtgtgtttgttgttaacaattgcatgtaacaaacttgtcgtaacacaatgtgacaacggttgtcaaatccttcaattgtccagaatactgcaatcactgagataccaccaagctttgaaatgcttcatctgacacggtaatagatgagtatccggaataatgtgatcaatgatcaaagagccaaagttgctagtgcggctactcagagaattgagtcatgaatcagtttgcttgctatttccttcgagagccccattacgctgtcgctggagccaaccactgcttcaacaaatggcagtgtcagtggatgctcaagaagcaagccgcctgcgaccctgaatactaccccctcatcaatcaggttctcaatgacctcatctggtatatcatggaaataaacctcagctttgtccaagcttccaagcctcttcccagttgtaagattagttacaactacagacccaacagttgacacatgaccaccggaatagcctttcaggaattggcgtgcttcctctttggtggttggcttttctctaataatcccttcatggacgaccactatgtcagaggtgattagaagtgttggttgattgtcttctttctggtaatcagcaatgttcagtctagacatgatagcatcagccttggcctccgcgagaaccatcaccaggtcgtcaggatcctcccg

SEQ ID NO: 9718 - DNA, 302 bp, Setaria italica
  Peptide Sequence Number=SeqID_75692
gctcaggactatttcggtgcccaataatttcccatgtggtactaagagagtgcacgaaattaacagcccaaaatacccgtcacctagcatcttagtcgatgaattgcatgcggcatcaatttggtccacagccagcggcggattttgccgtcggcaaggggttcagatgaacccccaataatcccggcgcataagcccaatctaatatttatattaaccaattcgcgatgaactagatggattgtttcgggttcagggaacatattatcactaaaattcaggggctcacatcaaagggcgga

SEQ ID NO: 9719 - DNA, 601 bp, Setaria italica
  Peptide Sequence Number=SeqID_75693
ccggcgaccgcgcgcgcgccatccaagttccctctcccaaaggcccaagccgcctcgacccctcccctgccccatcgacgaccctcctcgcccccgctcctcaacccccaggacgactcccccgcttcctcgtcatcatcgccgccgccgccaccgccacaacctgcagcagcaggggcagcggaagcagctgaggctgatgggctgagagagaggaaacagaagggcaagaagagggaggaggaggagacgactggtgctgctgctagggagtacacggcggagcagctcgaggtcgtgcgccaggtcaagaagcattccagggactactaccagatcctcggcctcgaaaaggactgcactgtcgaggacgtgcgcaaggcctaccgcaagctctcgctcaaggtgcaccctgacaagaacaaggcccctggtgcagaggacgccttcaaggccgtctccaaagccttccagtgcctcagtgatgacgagggtcgcaagcgctatgaccttgttggctcggatgagccagtaacacaccacaggaggccctccactgcccgtgcatacaatgggttctatgaggatgactttgatccag

SEQ ID NO: 9720 - DNA, 1278 bp, Setaria italica
  Peptide Sequence Number=SeqID_75694
tttttgtttttcttttttgtttttaggtttttctttttgttttattttgggtttcttgtagagagaggaaacagaagggcaagaagagggaggagagagagacgactggtgctgctgctagggagtacacggcggagcagctcgaggtcgtgcgccaggtcaagaagcattccagggactactaccagatcctcggcctcgaaaaggactgcactgtcgaggacgtgcgcaaggcctaccgcaagctctcgctcaaggtgcaccctgacaagaacaaggcccctggtgcagaggacgccttcaaggccgtctccaaagccttccagtgcctcagtgatgacgagggtcgcaagcgctatgaccttgttggctcggatgagccagtaacacaccacaggaggccctccactgcccgtgcatacaatgggttctatgaggatgactttgatccagatgagatattcagaaacttcttttttggtaatatggcgcctgcgaccaccaggcagtttggacagttcgggacgttccatttcagaactggtggaatgcacgcccatgggcagcaaaactctggtggctcaactgtcaggatgcttattcagctgttgccagtcctgctgctgctgctgctcaacttcctgccatcctctgagcctgtttactccctcaaccgctcctacccatacgagcacaagttccagaccccacgtggagttgcatactatgtcaagatgcctaattttgaggagcagtatccacaccaaagcactgagcgggtgacactggagcggcatgttgagagggattattactcaataattacgcagaattgcagggttgaactgcagcgccgccaatggggattagcataccagacaccgcactgtgatatgcttaaaaaatttgaggcggcagcacagtaaatcattcagtagtccaaggttgagaatgctggacgtgtgcaaaagtttccatacccgtactcttggctgtcagcttcaaatcggagggtacatctagtttggactagcagtaaatcttgtggaataagtgcctttgatgactatacaccaccgcccagatgctatcttagtagtgctgaggagcgcatcaccgtagctacttcaaaaggatattttgtaatggttaagctttataggggttgatcacatgcagacctgtgtatgtatatgaagtatatcgatctcaatttttccgtactgttttgagacaatacctgacttaaacagaaatgcaactataaacaaaaatggg

SEQ ID NO: 9721 - DNA, 673 bp, Setaria italica
  Peptide Sequence Number=SeqID_75695
gggccgtcgcgggcttcggccgcggcgcgccgtccgtgcccgcgcagctcggcctcaacaagttctcctactgcctcctctcccgccgcttcgacgacaacgccgccgtcagcggctccctggtcctcggcgactccggcggcaaggccgacggaatgcagtacgtcccgctggtcaggagcgcggccggcgacaagcagccgtacgccgtgtactactacctcgccctgaccggggtgacggtgggcgggaaggccgtgcgcctgccggagcgggcgttcgccgccaacgccgccggatcgggaggcgccatcgtggactccggcaccacgttcacgtacctggacccgacggtgttccagccggtggcggacgccgtgatcgcggcggtgggcgggaagtacaagcggtccaaggaggcggaggacggcctgggcctgcgcccctgcttcgcgctgccgcaggggcgccaagtccatggcgctgccggagctgtcgctccgcttcaagggcggcgccgagatgcagctcccactctagaactacttcgtggtcgccggccgcgctcccgtgcccggcgccgccgccgctgctccggccgccgccggcgaggccatctgcctcgccgtggtcaccgacttgggaggcgccggagacgtgggcagcggcccgg

SEQ ID NO: 9722 - DNA, 1162 bp, Setaria italica
  Peptide Sequence Number=SeqID_75696
tcttcgtaaatgccactcgaacccagagctagctggttctccccgaaatgcgttgaggcgcagcagttgactggacatctaggggtaaagcactgtttcggtgcgggctgcgcgagcggtaccaaatcgaggcaaactctgaatactagatatgacccaaaaataacaggggtcaaggtcggccagtgagacgatgggggataagcttcatcgtcgagagggaaacagcccggatcaccagctaaggcccctaaatgaccgctcagtgataaaggaggtgggggtgcaaagacagccaggaggtttgcctagaagcagccaccctttaaagagtgcgtaatagctcactgatcgagcgcccttgcgctgaagatgaacggggctaagcgatctgccgaagctgtgggatgtcaaaatgcatcggtaggggagcgttccgccttagagggaagcaaacgcgaaagcgggggtcgacgaagcggaagcgagaatgtcggcttgagtaacgaaaacattggtgagaatccaatgccccgaaaacccaaggtttcctccgcaaggttcgtccacggagggtgagtcagggcctaagatcaggccgaaaggcgtagtcgatggacaacaggtcaatattcctgtactaccccttgttggtacggagggacggaggaggctaggttagccgaaagatggttataggtttaaggacacaaggtgaccctgctttttcagggtaagaaggggtagagaaaatgcctcgagccgaggtccgagtaccaagcgctgcagcgctgaagtatgagccccgtggactagccattgcttctccacgaggctcataccaggcgctacggcgctgaagtatgtaacccatgccatactcccaggaaaagctcgaacgaccttcaacaaaagggtacctgtacccgaaaccgacacaggtgggtaggtagagaatacctaggggcgcgagacaactctctctaaggaactcggcaaaatagccccgtaacttcgggagaagggggtcgcccccctcgacaaaaggggggtcgcagtgaccagggcccgggcgactgtttaccaaaaacacaggtctccgcaaagtcgtaagaccatgtatgggggctgacgcctgcccagtgccggaaggtcaaggaag

SEQ ID NO: 9723 - DNA, 374 bp, Setaria italica
  Peptide Sequence Number=SeqID_75697
gattgtgatccctgtaagaggatctttgccaataaagggactgcgtgttagtgacctatcctggcaggatttccttggaagggttaatgataccaaggtggaaaattatgctgctgttaagcaacctgcctacgcatttaccaatatcctattttcgtcagggaccacagggggagcccaaggcaattccatggacacatataacccccctaaaggcagctgctgatggttggtgtcacatggatattcgtaaaggagatgttgttgtgtggccaactaatcttggttggatgatgggtccctggcttgtatatgcctccttactgaatggccatgtgacggctctgtataacggctccccaaatagttcaggc

SEQ ID NO: 9724 - DNA, 1003 bp, Setaria italica
  Peptide Sequence Number=SeqID_75698
acgccgccgcgctccacgcggccctccggcgcgcgctcgactcccgcgccggcgccggggaccccgccgccgtgtggggggagctctgtaggtcccttctccgcccggacgtccccttcgccgtccaccggatgctctactacggctgcttcgccgggttcccgtcccccacgccgcccgcctggacccccgaccccaaggaggcggccttgaccaatgtcggccgcgtcatggaggtgcgggggagggagctcctcggcgacgcgtacaaggatcccatcaccagcttccctgacctctacaagttctccaatgagaacccagaggcgtactggaggatggtctttgaggatatgggtgttgagttcagtgtggaaccgtcttgcatctggagagagagcgatgcatatcccggtggagagtggctaccgggcgctgagctgaatgccgccgcgaattgcctgaatgctaaacctgggagaagttcccaggatgttgccattgtttggagggatgaagggaaggattcagaacctctcaacttcatgacccttgaggagttgaggaaaaagtttgccttgtggcaaatgcacttgatgccctggacctgccaaagggctctgcaattgctatcgacatgcctatgaatgtgaatgctgttgtgatctacctagcgattgttttagcaggctatgtggttgtctcaattgcagacagctttgctgcacctgcaatatcgacaaggttaaagatatcagaagcaaaagcaattttcacacaggattacatccttcgtgatgacaaggaactgccgttgtacagtagagttgtggaggccaaggctcctatggcgattgtgatccctgtaagaggatctttgccaataaagggactgcgtgttagtgacctatcctggcaggatttccttggaagggttaatgataccaagtgagttattttcttatcatgtattgaatttggggacgaacccacaacagtcttt

SEQ ID NO: 9725 - DNA, 453 bp, Setaria italica
  Peptide Sequence Number=SeqID_75699
tgatggaaccatgtggatagcacatgtgcataaaacgcaagtcaacctcttctgctggtcctctttcagcattgcataaatgatcatttgcccctctatgtcaaccctgctgaatcataggttctcatgatcagacataactttaccaattgcatcaggatatgcaaggcaggcaaaagcctaggagtatctgaagcaaaatcctcttttgtttctgttgtccgaatgccattttctttcaggccgatataacagcaatgagtgatgacatgtacataagttcttgcatagaacacgtatacacatattgcaggaatgataatgttccatggcaacttgtttcatgatcactttagaaaaacaagcaaacaagcaagcactaaaggccatggaatcaatctagatgttgacttagcattcaatggataaaggcacactcttcgagggcagtta

SEQ ID NO: 9726 - DNA, 331 bp, Setaria italica
  misc_feature (289)..(289): n is a, c, g, or t
  Peptide Sequence Number=SeqID_75700
ctgggttccccaatcagatggtttctcctgtctgttgttcacatagtctcattcatttgattgtcatgttgtaagtcgtatcattcgggaggtgaagcagtgcagaataaaggttccccttcatagtcttgttgtgcagaagattgtacatataaagctaggtatatcaggggaacaaaatgttgttacactgatctggtttgttgcgttaaggcagtggagtgaacatggatatagtagcttcgataaatcagtttttagttgtagagcagaataaaggttccccttnatagtcttgttgtgcagaagattgtacatataaagctaggta

SEQ ID NO: 9727 - DNA, 468 bp, Setaria italica
  Peptide Sequence Number=SeqID_75701
cactagtaattatacaagggtatggtacagttggacgagctagcattgctgctggaggacgattagaatctggggctctgctctgcgtctgcagcacacgggcctaaagaatcaaccacattacctgggacaggaaactgcaacctagaagcaaaaaaaattggccaaggcaaaattgaatgatcactgatcaacaaattgcgacagcgacattcgccaaacccacaatgcaggttccatgggctacacgatgaaattgtccatcatgtggttgatcacgtctgctccatccgagtttagccagtagcttttcacctagcattggcagtgtagaagattttgttatggccatgtaccaggcatacacaattttaggataaaaagcgtagagaaagtacaatgatagtttcaagctagagctaacacaagcaatggcagtaaacataagcctccgattataggtatcct

SEQ ID NO: 9728 - DNA, 1392 bp, Setaria italica
  Peptide Sequence Number=SeqID_75702
ttttctatgccaatagaatcagacaagagacatctatttccagcaacatctgttgactagcttagttgtgcaatacatacaattatacaagggtatggtacagttggacgagctagcattgctgctggaggacgattagaatctggggctctgctctgcgtctgcagcacacgggcctaaagaatcaaccacattacctgggacaggaaactgcaacctagaagcaaaaaaaattggccaaggcaaaattgaatgatcactgatcaacaaattgcgacagcgacattcgccaaacccacaatgcaggttccatgggctacacgatgaaattgtccatcatgtggttgatcacgtctgctccatccgagtttagccagtagcttttcacctgaatggtgttatgcgcaactaatctttggctgcttttctggaagctcacatcaacacgttcccacggaacttgcgtaaggcctcttatcatctcctcttctgggtcatagaaatcagcatgggcttctgtttcattattgtttgtaacttccttttcaacatagacaatatgtggatacttttcatcacgaacaagaagacgatgttttggcaactcgtgttgacgtcggattgatgatgtcctccacccaaccatatgatcaaaattagcattagcatatgctacacgccgtttgaaagagcgcaacgctgatctgaattgtaaaccatcacagtcatcaaccattcgaaggaggagcgggcgtctaccatcatcattgtctgttaggaataaatgctttccagttctcccaacaatcaagtgtgcggtttctgatgctcttctctcaaggaaaggcaggccacataaaaaaggtagctggtggaacaatctgtttgtttccacttgaacccaaatgtggtgacgcaaatgttataaaattcataggttctaagccagcaatgagaccttccaagtgctcaacgtcatctctgctcttcccggcataagaattacttctgttattaggttcataaagccttcctatagcatatctggcaacaagaccaccaagagagtgtgccacaaacgagatcttcttcacaccacttctttgctctacaaccgatagaacctcattcgcaagcctttcacccattaagtcaacaccatcaaatgtctgagtggcagagttgcattgacttcggtgcacaatcaccttgtccggcatccgcctgacgaactgctccgccgcgaacttccaatcgtccgcgctcccgacgaggccattgaccatgatgacgaggtgctcggggaagcccccgccctgcgccacctccgcgtcggcatcggcgctccacacgtcctcccctccgccgcgcgctggctccacctccacctcc

SEQ ID NO: 9729 - DNA, 467 bp, Setaria italica
  Peptide Sequence Number=SeqID_75703
ttttgtaaaaattcatgtacagtagcattgtaccgcttctgcactggtagctttcttaatcacgtgcctaggatccgacattaatcccccgaacatgtgcgacatgttaaagaccgcgacgctgccctgcccccccatgtgcgctgcttccacacatctctacagttccgcagcagcacacggagatccaaattcactacgctccccggacggacccacccgttcgtgaatccacccgggtacggtaaaaatcagtgccgctacacgaccatctacggcatacgcgttcgtacatgtactagctggggtagtatccgtatcgccatcgtgagtagcgcacaaccgacgggcgtgaggtgacgtggctagctacctcgacgacatgctggcgttgctcgacgtgaagctgctgacgccgcagctgggagcccgggacgcgcccagcgccgccgggtccgttggggccc

SEQ ID NO: 9730 - DNA, 400 bp, Setaria italica
  Peptide Sequence Number=SeqID_75704
ttttttttttgactcaatatccacttttatttcactaatattaacagtgatgtacaatcatttcgtttattgtttctgggagtccctacattccagtacacaaacagcatccaggaggggagaaacaacaggaacagtctgaagaacagggttcagattagctgaccagtgagtaatagtggcaaaacccctcagatggcttcagcttcagggtggactttggagccaggataagaaaacagcttggtagcatttttgtaactcagctctgccagttctgcctctggcatttcaagcagtgatgtcacatacttcaaaacgatatggatattttctgggtggttcaaggattcatttgatgcagtagtggcctgtgacttcttgaattcttttgtttatt

SEQ ID NO: 9731 - DNA, 543 bp, Setaria italica
  Peptide Sequence Number=SeqID_75705
actcgtctaacaggctatcttgtggcttgttaggctatgaagtgcctccgttcagaattcagatgttgcttagctgaccagtgagtaatagtggcaaaacccctcagatggcttcagcttcagggtggactttggagccaggataagaaaacagcttggtagcatttttgtaactcagctctgccagttctgcctctggcatttcaagcagtgatgtcacatacttcaaaacgatatggatattttctgggtggttcaaggattcatttgatgcagtagtggcctgtgactctgaatctttgttatgattttcagtatctgcatctgaactgggcacagggaccgctgatacagaaacatcatccaattttggcaatgcatcaggtgcatccgtctctaaaagaattctatccaagggtattgacttcagcatttgctttgctttagtggatttcatgcctgtcaagaagccagacaatgaaaagttagtctaaccttaaattttgttcttaaggttccttaggttcttaccttattttctta

SEQ ID NO: 9732 - DNA, 1012 bp, Setaria italica
  Peptide Sequence Number=SeqID_75706
gcaccaacgcacaagcgctctctccctctcccgcaacgcgcttaaggaagaatccggtagagggagaaggggagagagagagccatgaagacgtcgagcggcagccatgtgatcggagtggcagtcacctccaaggcgtacgccatcgaggaggggacgagggaccggccggcggctaagaaggacggcgatcgccttgcggtctcgctgacgcacccgagcccctacgcgtctttcagctacaagcacagcagcaagggtcaggaaaaccactgggtgaacaagctgggaagacgagctcagagcttcagggaccatgtgacactggggccgaagctctcggagacggtgaagggaaagctgagcctgggcgcgcggatcctgcaggctggtggcgtggagcgcgtgttccggcaggcgttctccgccgagaagggcgagcggctggtcaaggcgctgcagtgctacctctacaccaccggcggccccatcgccgggatgctcttcgtgtccaccaagaaggtcgccttccgcagcgaccgccccatcacggtggcctctcccaagggtgacacggcgcgggtgacctacaaggtggtgatcccgctccggaggatcggcaaggtgcggcccagcgagaacgccgacaggccggaggagaagtacatccacgtcgccacggtggacggcttcgagttctggttcatggggttcgtcagctaccagcggtcgttcaagtacatgcagcaggccgtctcggagctgcaatgacttgcacggccggcctggggcctggttgatgaggaggtccggtgcagtgctagtggctgccctgtcggcacgatgagaagaggatgttacgggttgcttcgccatcttttgttgcgaagtagccgtagctaggattgccccatctaatcccggatcggcgcaatttagttccttccgcgtacgatttggatcaactttgtgttgctccaagtggttgctttgtagcacggaccgagaaatt

SEQ ID NO: 9733 - DNA, 1057 bp, Setaria italica
  misc_feature (1035)..(1035): n is a, c, g, or t
  misc_feature (1052)..(1052): n is a, c, g, or t
  Peptide Sequence Number=SeqID_75707
actagtcggccagcactcctaacagccatgaggaagtcgggcagcagcggccatgtcatcggagttccggtcacctccaaggcgtatgggatagaggagggaacgtgcaggaagagcgacggcgatcaccttgctgtctcgttgacgcaccccagcccttacgcgtctttcgactacaagcacagcagcaaagatcatcaggtgatccgctgggtgagcaagctgagcaggcgggcgcaaggcttcagggagcatgtgaccctgggcccaaagctgtcggagacggttaagggaaagctgagcctgggcgcgcggatcctgcaggccggcggggtggagcgcgtgttccggcaggcgttctccgccgagaagggcgagcggctggtcaaggcgctgcagtgctacctctacaccaccggcggccccatcgccgggatgctcttcgtctccacccgcaggatcgccttccgcagcgaccgctccctcgccgtcacctccccggccggcgacgtcgtcgcccgggttccctacaaggtggtggttcccctcaggcggatcaagcgggtgaggccgagcgagaacgccgataagccggagcagaagtacatacaggtggcgacggtggacggcttcgagttctggttcatggggttcgtcagctaccagagatgctgcaagtacatgctccaggtgatctccgagctgtgatcggcgagggcgggggtcgaggcgtgtccggttgccgtggaggtggaggtccgtgggagcgagcgtgcgtcctgtcagtatggcagtcgaagtgatgaagtttgtgggctactgcacacagcaacgtcttgttggaacgttggtagcctcgaactgctccaccacctttttgatgggggcacgttccttccgcttgcgatttgggttggttgacgattgtttggtcacccaagttctgttaattgctactgtaggattgatggaccaaggaacttggtttcgccaaatgaaaatatttaaattgttctacaaaaaaaaaaaaaaaanaaaaaaaaaaactaagngacac

SEQ ID NO: 9734 - DNA, 430 bp, Setaria italica
  Peptide Sequence Number=SeqID_75708
aaggaaagacaagtagaaagtaatagttaagcttgagcgacaatgttgtcaggctctttcttaacaggctcttccttctctgacaggatcaactcaatgtggcaaggtgaggacatgtaaggattgatgcgtccatgagcaacggtaatagtagacggacgacctctagcttctgggcttggttcacctggatgtgtgaaacatagaggttgtcgacatccaagcctttcacatcagcgttactctcagcattcttcagcaaatccaatatgaacctggctgatttgacaggccagcgaccctggccatttgagtggcgagactttgcttgagcagtgcgaccaacacccctgcagtatctccggaagggaattgcttgcttgtgagccataacatcctcaaggtaccgcttagccctttggccaaaggc

SEQ ID NO: 9735 - DNA, 781 bp, Setaria italica
  Peptide Sequence Number=SeqID_75709
agtgaaccaagctcagaagcagcggcgcaggacctaccgtgctcatggacgcatcaatccttacatgtcctccccatgccacattgagctgatcttgtcggagaaggaagagccagtgaagaaagaggtttgtggttctatacattgtttgcgcccatccatccaatacatataaacactgttgtgctaatgcagtcgatggtttgctcttcaggctgagtcccagatcgcaaccaggaaggcttagagaagggagctctgcagtattagagtggattgtagcttgtctttggctgagtgaaattttggctgattatctgtcgtcacttttatcagtgtactgctagctcatacttttgtcaccttgatcactgtctgtactgtgcatgcaactcaatgtggcatgggcaggacctaccgtgctcatggacgcatcaatccttacatgtcctccccagcctctttcttcactggctcttccttctccgacaagatcagctcaatgtggcatggggaggacatgtaaggattgatgcgtccatgagcacggtaggtcctgcgccgctgcttctgagcctggttcacttgaatgtgcgacacatagagggtatcgacatcaagaaagaggctgagtctcagatcgcaaccaggaaggcttagagaagggagctctgcagtattagaatggattgtagcttgtctttggctgagtgaaaattttggccggttatctggtgtcacttttatcagtgtactgcatgcacagtacagatagtgatca

SEQ ID NO: 9736 - DNA, 762 bp, Setaria italica
  Peptide Sequence Number=SeqID_75710
aagcagccatgacaggcaaaaactggagatacttttgctcagtatgaacaagaaccacttgagatacttcaacttcaaaataggttcgattaagtgtgcgccaacagcacagaaaaaggagatacagggataagttcactccctaaccaacattagcgaaaccatgcaaagctccctgtcttctacgccttcctggttgcaatttgggtctcagcctctttcttgactggctcttccttctcagacaggatcagttcgatgtggcacggggaggacatgtaagggttgatgcgcccatgagcgcggtaagtccggcgccgctgcttctgagcttggttcacctgaacatgcgagacatagagcgtatcgacatccaaacccttaacttcagcgttgctctctgcattcttcagaagatccaaaatgaatctagcagacttgacaggccaccgtccctgaccatttgagtggcgagacttggcttgtgccgtacgtccaacaccaccacagtacctatggaagggaatcgcttgcttgtgggcaatcacatcctcaagatatcttttagccttggtcagctgcagcttcctgatggcaaaagctgtctcgcgtgtgttcttaaagtgcacacgcaagtcccggcccatggccttggcggacttggtggggttggatggctccctcgagtacttcaccatggctgcagctgccgagcgtacccgaggaagcggcggcgacggcggcggcggcgagcgagcgaac

SEQ ID NO: 9737 - DNA, 911 bp, Setaria italica
  Peptide Sequence Number=SeqID_75711
tatatctttaaacacagcaaacttttgtaatcaaagttcagcgccaaatccggatgaataaatctcatgataaccatattcaagttgatcaagcagacaaagtgcccagatacctttaaactattgtaaaatatattacgaattgtgcgtacaatctgaagcacagcatcaaacctagcaagaccagattcgaagcattggaaccaggaacatctcaagaggcaaggctgccaggaaaaagcacataagagctacagctataattcttcgacaaaatagcctcgctcaagctaacatacttcactgcttccttggtgcgacaatgttgtcaggctctttcttaacaggctcttccttctctgacaggatcaactcaatgtggcaaggtgaggacatgtaaggattgatgcgtccatgagcacggtatgtgcggcgcctctgcttctgggcttggttcacctggatgtgtgaaacatagaggttgtcgacatccaagcctttcacatcagcgttactctcagcattcttcagcaaatccaatatgaacctggctgatttgacaggccagcgaccctggccatttgagtggcgagactttgcttgagcagtgcgaccaacacccctgcagtatctccggaagggaattgcttgcttgtgagccataacatcctcaaggtaccgcttagccttggccaaaggcagcttgcgaagtgcaaaggctgtctcccttgtgttcttgaagtggaccctgagatccctgcccatggccttggccgacttcgtcgggttgcccgcctcctgcgagtacttcaccatggcggcggacagaggagtgcggcggcgcaggagggacggtcgccttcgcacgaacaatctgcactgaggaagcaccgaggcgaacgaagaaagcg

SEQ ID NO: 9738 - DNA, 1150 bp, Setaria italica
  misc_feature (1122)..(1122): n is a, c, g, or t
  Peptide Sequence Number=SeqID_75712
gttagttcccaaccaccatacagaaattttcactcacgaggcgaaagaacaaaccacaaccaaacaaaggatctgtgaaacgtccctagccaggcaattaacaagcattgacgtcaccatcgatagaaatatgaaaagaatccacgaacacttgatccagagctttgagttgcatgcacagtacagacagtgatcaaggtgacaaaagtatgagctagcagtacactgataaaagtgacgacagataatcagccaaaattttcactcagccaaagacaagctacaatccactctaatactgcagagcctcccttctctaagccttcctggttgcgatctgggactcagcctctttcttcactggctcttccttctccgacaagatcagctcaatgtggcatggggaggacatgtaaggattgatgcgtccatgagcacggtaggtcctgcgccgctgcttctgagcttggttcacttgaatgtgcgacacgtagagggtatcgacgtcaagacctttgacctcagcattgctctctgcattcttgagaagatctagaatgaatctagcagacttaacgggccagcgtccctgtccattggagtggcgcgacttagcctgagcagtacgcccaacaccgccgcagtacctgcggaaggggatggcctgcttgtgggcaatcacatcctcaaggtaccttttggccttggtgagtgacaacttcctgagggcaaaagctgtctcacgggtgttcttgaagtgaacacggaggtcccggcccatggccttggtggacttggtggggttggtcggctccctcgagtccgccaaggccatgggccgggacctccgtgttcacttcaagaacacccgtgagacagcgtttgccctcaggaagttgtcactcaccaaggccaaaaaggtaccttgaggatgtgattgctcacaagcaggccatccccttccggaggtactgcggcggtgttgggcgtactgctcaggttaagtcgcgccactccaatggacagggacgctggcccgttaagtctgctagattcattctagatcttctcaagaatgcagagagcaatgctgaggtcaaaggtcttgatgtcgataccctntatgtgtcgcacattcaagtgaaccagg

SEQ ID NO: 9739 - DNA, 1018 bp, Setaria italica
  Peptide Sequence Number=SeqID_75713
ttttttttgtacaaaccaaaatgccttgtatttcaagacggagggaaccaaaatacctgtatctcaggattgagagagtagtctgtatcaatctccaaccatgtgtgaagtttctgaaattttactcacgagatagaacaaaccacaaccaaacaaaggatctgtgcaaacgcccctagaccaggcaattaacaagcattgatgtcaccatcgatacaaatatgaaaagaatccacagacactcgatccagagctttgagttgcatgcacagtacagatagtgatcaaggtgacaaatgtatgagccagcagtacactgataaaagtgacaccagataaccggccaaaattttcactcagccaaagacaagctacaatccattctaatactgcagagctcccttctctaagccttcctggttgcgatctgagactcagcctctttcttcactggctcttccttctccgacaagatcagctcaatgtggcatggggaggacatgtaaggattgatgcgtccatgagcacggtaggtcctgcgccgctgcttctgagcctggttcacttgaatgtgcgacacatagagggtatcgacatcaagacctttgacctcagcattgctctctgcattcttgagaagatctagaatgaatctagcagacttaacgggccagcgtccctgtccattggagtggcgcgacttaacctgagcagtacgcccaacaccgccgcagtacctccggaaggggatggcctgcttgtgagcaatcacatcctcaaggtaccttttggccttggtgagtgacaacttcctgagggcaaacgctgtctcacgggtgttcttgaagtgaacacggaggtcccggcccatggccttggcggacttggtggggttggtcggctccctcgagtacttcaccatggctggcaaccggcgagcgggcggcctcgagggggatgggaggcgtctgcggcggcggcgagctgagacacgcaaaggggataggcaaggcacacg

SEQ ID NO: 9740 - DNA, 481 bp, Setaria italica
  misc_feature (25)..(25): n is a, c, g, or t
  Peptide Sequence Number=SeqID_75714
cgcttttattctcacttattacttnacccctgtagaatcaatagtagtaggcaactacatgtgcatatcaatatgccatgccccataaaagaaaatgataagaaaaaagttccctccccaatccatgcagcacaagcattaattttgtaatgttaatggctcaatgcttctttggaacagcactaaaaatagaagcacaataggagaatggacatacacatggctctgaacttaggtcgatatggcatagcaggcaaggcaagatataccaaccaggcctagtatttttccagtagtactaggaaatgtgcgcactgcactagatatggaatttttagtttacaaaaacaagtccacacaaaatcatggcgcaaatattctttcttagaactagctactttgtgaaacccattgtctacaacggcaattttgtcgaaagtactagagggatatttagcagaaacatgttgtcagagcacca

SEQ ID NO: 9741 - DNA, 618 bp, Setaria italica
  Peptide Sequence Number=SeqID_75715
tgttacagataatgaaagcagctctccagaaagaaaataaacaaacttccacgctgattctttaaatttattgattttctttctactatcatctgtttcagcaagcttgtcatatccctttccaaatataagccttcgtgctaatacctcgaagacgagccggtcgaggaggaaccggacggcggggaagaaggcgacgagcaagggaagcgcggcgaagtccccgtagatcgggtacgcctctgcctcccagtccaccggcgccgacgtggagcccaggaacagctccacgagcgccgccattgcggggaggagatccaacaactagaaaccagctctcggacggatccaaaccactccggcaaccaacaagaacgcgaaatgggcgcaagattcggcgccgacacggcccgctggcctccccgagccgatccaaggagccactggttggaggtagaggcgagtcaacgcgagcacctaagagctggaaggaggtgagatttgggattggactattggaggaagggtagggatggagcaggtcgacttcacggtggcgagaacaaggaacggaagctgatgaactggctggcgcctttttctgtgggggcggcaaac

SEQ ID NO: 9742 - DNA, 607 bp, Setaria italica
  Peptide Sequence Number=SeqID_75716
cgtaaagaacagccccaacccaaggaacttcttgccgtacctgccgctaggggcgcggcggaggcggtgccggagcggccgcggacggagcgtatcgcgttccggacgaggtcggagatcgagattctggacgacggctacaagtggaggaagtacggcaagaagtccgtaaagaacagccccaacccaaggaactactaccggtgctcgacggaagggtgcaacgtgaagaagcgggtggagcgggacaaggacgaccccagctacgtggtgaccacgtacgagggcacgcacaaccacgtgagccccagcacggtgtactacgccagccaggacgccgcctccggccgcttcttcgtcgccggcacgcagccgcccggctccatcaactagccgcgccgatcgcttcacccggcccaagtaagctagccagatagctagtcgctatagcagtaggataataggtgatctgggtcggtttctcgaggtggatcgtttgggatctagcgctcctctttttccccgtccttttcggcggcggcggctggctgttgcgatcgaatagtgtgctgccgctgttcatgctgcaggctcatcaggagctaac

SEQ ID NO: 9743 - DNA, 393 bp, Setaria italica
  Peptide Sequence Number=SeqID_75717
cagaggatctcaacaagtcagtacaaaattgtccatatgtgcagcctttcttttggacttcacttaggaaacaaaatgagaaaagggaaatatgctgaaaatggccaacaaggaggaatgctatcaaaacatacataaacaagcacatcctataggtaaattacatactacagtactgtaatctttgcatggggaagaaagttactaaagttctttcattacaattcattagctaatcataaataagctatactctacatcctaaaatgaactgtccattgtaacagattaaactttgtcacttgtgagcagataaaaaggattatccacggtaagtcggtaatagcctttctccaaatgttttctagcctaaatggcattgtctagaaagat

SEQ ID NO: 9744 - DNA, 630 bp, Setaria italica
  Peptide Sequence Number=SeqID_75718
cgtcgtgggagcccctctctaggccgcacgtcgacgccactgccgacctcggccgcgtcctctccgcggcctgcaccagcgtccccttggccgccggcgcggaggccgacgtggagtcgctgcacgagaccgtgttctcctgcgtgggcaccgtcgacgagatcgaggccatcgtcgacaccttctacgccaaggccggcgcgacgagcggcgcgctgggcgagctcgcgcggacgatccagcaggaggtggagtgcctggaggaagcgacgcggctgtctagcatcgtcaccggcttgcagatgcaggaggtgagcctcagggcaaatctgatccaggcaaagcagaggcttcgcctggggccggccgtcgccgcaccggcgtttgcagcttccggttggtgtttttgatcggaccggacatgaacagaagccagagtacaactactcacccactataaattaagaaattgattaaggcgcaagacttgtgttcgacgccatctgattcgacgcgtgattacttgtgcgtgcgtgtctgaaaataagttaagcggtacacagagaggtgcgccgtgcgcgtgttccacgtacgcccaggtgtgctagtttattgggggtatacatgcat

SEQ ID NO: 9745 - DNA, 523 bp, Setaria italica
  Peptide Sequence Number=SeqID_75719
ttctattgtctattaattgttcccttgttctagtcttattgtttcttgtcgacgaaagtggagccagccacattgcgctctaagctcatacctagacagctatgtttggtagagtgcttctttcaccgcgatcgagtgagagaagcgtggaggcatgaataacctgcagccttttcaccgccatgagatgccgaccctaacaaccgccaatttactgaccattcctgatctcgactttacccttttctaccatgttgacaatgaacgggctggacagagatttttcagtatggatcgatggacttaccgacgcgctggtcacggtggttgagcgcgatgcgcttgtagacgttgcgccagttgggcctggcgaagtgggtcttgacgcgggtgccggagacgacgtcgacgccgtgcttggcgtggttgagcgactggagcatggcgatgagcgccgagcgtgcgtccccttcctcgtagacgctggtgcagtagttgtggagctcgatgacgcccttcttgt

SEQ ID NO: 9746 - DNA, 2403 bp, Setaria italica
  misc_feature (1)..(75): n is a, c, g, or t
  Peptide Sequence Number=SeqID_75720
nnnnnnnnnnnnnnnnnnnnnnnnnnnnnnnnnnnnnnnnnnnnnnnnnnnnnnnnnnnnnnnnnnnnnnnnnnnacaaaggtaattgtattattgattcttctagagtaaacaaaaaactgatgggattttgacccaactggcctgtcacaatcaagcaatacctacttttctctactccttccctctacatccatatatacgctacatgtgtcgaatacacggtatgtaccgaactgtcatgcaaaaacttgctgatgctaaatgaattagaagttctccttgtggaactcgaacttcgtgttggttttccgtgagaaatcctgcgcgagctcacgaagctcctttgtcagcaccggggcaccacaatagaacactccgacgcgctggtcacggtggttgagcgcgatgcgcttgtagacgttgcgccagttgggcctggcgaagtgggtcttgacgcgggtgccggagacgacgtcgacgccgtgcttggcgtggttgagcgactggagcatggcgatgagcgccgagcgtgcgtccccttcctcgtagacgctggtgcagtagttgtggagctcgatgacgcccttcttgtctgtctcggccacctcgtccatgacgccgcggaaccactcgaaggagccctgctcccgggtgacccagtagaagtaggcccggcgcgtgcggaaggaggccgtggagacggagttgtcgttgccggagccggcctccaggtcgccgtccagctgcttcatgttgttgatgatgtccttgatgatggagatcatgggcgtggcgccgatgcccaggccgacgagcaggacgacgtcgtacttcttgtagtcctgcgccggcgcgccgtagggcccgtcgatcagcaccttcgggaagctggggttggtcatggtgctgccgtcgcggtcgtactccgcccggagcagcccgctcttgccctccgtcggcggccggcaaaccttggagaagacggtcttgagctcgcgcgtccagtcgcccagcgtcctgatgtggacgctaacgtagtcgtccttcggggccgacgtgatggagaacgggtgccactggaacggcgagacggcggcgcagttgacgaagatgtactggccgctcttgtaccggaacccctggggcttggagaaatgcagcgagaggacgttcccggggtacacggcgaccttgaggatcttcaccggccggacgctggagcgcagcgcccgcgtcagccgctcgcacgcgtacatcaccaggggcaccgccaggtacatccacgtcgacttcttctgccacttcttggtgaggtacaggtagtgaccgtgcacgatcagcagcgcgtacaccaccacgaagcagtggtgcgagtaccagaacgcgttgaaccccgtcagcctcttgagcgggccggggagcgccagccgcccccgccggaaccacggcgtcgccagcgtgaacgccaccgccatcagcaccagcatcaccagccccgtccacccctcggtgcccttcacgaaccaccagtagtcgttcggcctcgggaacccgaagtactgccccagcggcgcgtactcggcgtccgtggcgcgcaacaatctagggaagtcgcaggtcaagtgggagatgatgtggagcgcggcaccgacggtgatccccacggcgaccaccttgtggaagttgaggttgtcgtcgaaggggacgacgcggccgacggcggtgcggttgcggatccaggtgatggtgttccggcagaccgggagcaggatgagcgccatgttgaacttgagcgtctcggcgccgcccttggcgatgcagacgcagtaccccatcacctcgaacacgtagcggcgccggtactggacgaacttccacgtgaagagccccgcgcagatggagagccacagcagcatcacccacacgcgcttccagttgtcctccaggaagtactgcgcgcggcggtaccagcgccggagcgggttcggctccggcgtcggccggaggttctgggagagcatctgggagaggttgcggctgttggtggtgccgatgcgcaccgactggctgggcgcctgaaggaggagggtctccaggttgtagaggtcgatgtagcccaggttgcccgggtccagctcctccatgatcagccgcgcgtactcctcggcttgctcctggatcttcgacagcttgttcgccgacgcgctcagcaggatgatctctttcacctcctcctcggtgatcctgccgtccgcgtccttgtcaaccatgtcgaagaaggtctggaggcggccgtcgaagctggtgtcggagatttggtcccagaactcgagcagctccgccttgctgatggtgtcgccggagatgttgcggcggcgcgacagcgcgtcgaagagctcg

SEQ ID NO: 9747 - DNA, 306 bp, Setaria italica
  misc_feature (292)..(292): n is a, c, g, or t
  misc_feature (299)..(299): n is a, c, g, or t
  Peptide Sequence Number=SeqID_75721
atgagttctcaaccaaagtgctacgtgaattcagcagtgttgtgttcagaacaaatgctaggaagctggcagataaaatatcctctgcagcaactagtggaactattataaacatgcaggagcttttgatgaaaacaactatggattccatcttcaaagtgggattcggattcgagctgaacacactatctggaacagatgaatctagcattcagttcagcgatgcattcgatgaggcaaactctcttgtttaccaccgatacgttgatctattctggaagctgaaaaggtnttttaanatcggat

SEQ ID NO: 9748 - DNA, 661 bp, Setaria italica
  Peptide Sequence Number=SeqID_75722
gctgcacaaggaaggagagaaaccggattcatattatatacctgcttaaagcaacaatgcctaaggtcaggtcaatcttcaccgttctcattgtgatgctgctattggtcagtgcatcttcaggacaaactgcagtaacagaagggaaccatgaagatactttggaagtggcagagagacacggcaggagggttctgacggacattcaggattacgactacggtggatccaaccccaaacacgatccacgcaggaagccagggaatgggcactcccggtgagccatgtcgctgcatgtccgaggacaggataaactccccgtgacggcctgacggggtgacccatgacgctgcagccactggactggtatcctttgcttactgagttactgtaacgaacactagaagcaggatggtttgatccttttgcttgcacctttgccaccttatttaagtcagccagttgcacacgagcttcagaccagctgttctggatcgtgcttgatgcaagcattcaggtgtgtttgctgattcaagcactggttatggaaagctaaggctgttcagtttagttgttcagataagttaacgactatgtcactatctcagtatgtaactattgctctcttctcgaaatcacgtatgaaagtgaaacaccaatt

SEQ ID NO: 9749 - DNA, 377 bp, Setaria italica
  Peptide Sequence Number=SeqID_75723
cttttatctttgagcaggatagtgtttctcaaagctggtgccccagctaaagtacaagatgtctgcgatggccacgacgcagcagccagtggaggagaaggagatgtcgccacctgcgaaacgcgggttcttccgctacaactccccactgacgcaggtgttcttgataagccttgtgtgcttctgctgccccggcatgttcaatgcactctctggccttggtggtggcggccagatcgatcacaccaccatcgacaaggctaacactgccgtctacgcctgctttgccgtcttcggcgtcgttggcggcgcagctcataacatctttggcccacgcaataccctgctcctaggtgccctcgcgtacccactctatg

SEQ ID NO: 9750 - DNA, 556 bp, Setaria italica
  misc_feature (10)..(10): n is a, c, g, or t
  Peptide Sequence Number=SeqID_75724
gggccatagntgtccttcctgattgctttgaagcggaagagaggtctgtgtatgagacgtctgagctattgcacattgtatctggccgtgatctgtttggtattgttagtgtggctgatagtgtcaaggagctgtcatatgcttgtcatgagaagctgacacagtctggttttagaggcttctgggtttactccaaatgtttcaagaaacgcgaataaagatccagcgtcgatgaatcctgttgatatccacaagaaagaaaaggggcatgaagatgatattctttcatcggatgccttcaaggatattgagttgcgcatatgtgggaaagtagtggcaactgcaactaggagcccaaagtgcaattgcattgacaattcggatgtggaagatcacattcatgtatatcttgttcctaatgcggatgcatctgatttaatgcaagagcatcttctcctaggcacaattactgggttagccaccactggggaggaaggatcttgctgtgtctatgatggccgtggcataaagcgcacgtaattatgaaaacacagga

SEQ ID NO: 9751 - DNA, 250 bp, Setaria italica
  Peptide Sequence Number=SeqID_75725
tcactggaactctccatttcataatatatagatatataaagagaaacatttccgggagttgcagcatgaaaccaaataggccacgagagtgatacaccttggacatccatgtagttcagcttggaactcaggaattacatccaatggcaatggagcaaagagcctcgctccaccgatccaatcctgtgtggctgtgtaagatggcactcaattagttccctgactgaatttatcatatgaatatgcgtgg

SEQ ID NO: 9752 - DNA, 1902 bp, Setaria italica
  Peptide Sequence Number=SeqID_75726
agtttttttttttgggaatcaatataccatatggcctcaacaaacattgggcaaacaaaatttatcattgtccatacagcaatgttatcaagaagattgcctgattaccttgtaaaaaagtacagaaaatttatctaattgaactatcactacatactgcatctgagaaaacgtctagcagtgtgttaagattaaacaggatgtacaagaatagtacacgatcctactggctactaaccacatcaacagttgcacaagcaaaacctgtattgtcaagtctctatcatccgttaccaatgcttgtccctcaaaattttaccaccaacaattgtatacatgtactgaccagaatttatcatcaacctggactttgcgtaaatatatcagcaccgaaccagaacaatcgtgcgcatatccacgcatattcatatactatattcagtcagggaactaattgagtgccatcttacacagccacacaggattggatcggtggagcgaggctctttgctccattgccattggatgtaattcctgagttccaagctgaactacatggatgtccaaggtgtatctcttcagcctggtgattccctagacactttgaagaacagtaacataaaaaggatgtccttgaccgctaccggatgacccatttttactttcatccacttgtgctccctcagatggatgcactttccattgcagctcataattggaaaaattgtatgtgcctggtgcaaatatgcatacttttagaggaactctagcacagctatctggttggagctcaatttgagcagaactcaatgaacaccaaacatatggtgaaatgctttttgaagattgcttctcatgttgtgtacccttggcactagagatcgccttgatgtcattttccaatgagacatcataccatccaccctgaacactggaaggatcatgtggatggacagtttggcttttctctggcatgacatcagaagtaaccactctcaccgaactcggatgtgctgctgaattgtgaattaccaactggatgctaacctcacagtaagacttcgaaaaatcatgagtaattgttcgaggtccttccataatccaccatacagggctctggctaagggcactgcaatgacatgtgtgatgagaaagtagttgcaagtctggagaaggctcggaagagttaccagctgcctttgagatcacaacaaaatcaagaaggctgcatggcccctttactaacttgccttgcctatatctttcttgaaagtgaaaatcagctaaaggagatcgagcaatgtcaaacacatctccgctgctcccaggatataaagtcatatcagttctgtaggaacccctgtccgcctctttacatgaatcagcctcaaaatccttaatcttgaagaagcatgacacggcctgatttgctgatactgtttcaacagagctgatagaactgcacgaaggcaatgctgaaactgcccatttactgccaacacatgacaactgatgaagtacaaatgactctgatggggtcttgttcctgacatccatgcgaactatatactcttgtaatcttgatgaggacatacttatagcaaaggatatgtcaagtgatggcaagacctcaagattgtaatgcatgcgcagtgtgcggtatttaatatcactggaactctccatttcataatatatagatatataaagagaaacatttccgggagttgcagcatgaaaccaaataggccacgagagtgttgcacctgcttgaatttcaatatcctgaggaaatgcaaagagtaaacccttgaaattttccttcgtgcttttagtaataggtaacaaagaattagaattttactagtaatttagtacgttagttagtacttttttaaagta

SEQ ID NO: 9753 - DNA, 962 bp, Setaria italica
  Peptide Sequence Number=SeqID_75727
cttgaatttcaatatcctgaggaaatgcaaagagtaaacccttgaaattttccttcgtgcttttgtatggtacaagattgatttctgattgcgtgtgcttttttaagcagtgcgggaacttgaggccaatgtccgatgaatcaccaggaattaaaaatcttgggttgctgattttcatttttatgcccttcacagcatattctgaatggtttctcagatttaatttgagcagctgtaaatcaccagcaaatgcttttgtcggcatgcgatcaatagatcctgtaagttttggtaaacccttgattacaaccaagctgctgttcaaagaacgacgatggcctcttttccctttcttgtttttcttttgagcatcaaattcgaagtattgatatcctactacggaatttgaaagtgtccaccatatcccaaccaacttcagaataccttcaacttttggagtaacatcaagttgcactcttttactttcaccacctcctaatataatgtcaagctttgacactacgaaattttcttcatcggtctcaaatactgaaacagatggctctgtgttaaccttatcttcaccaccatccaaggtcaacccacttacatcagaagttaaagcatccaaattggtcgaatgttggcatataagagagatgccagaaacatcaacaggaatttgcagaggattcttaagctcaacgctcacttttactgcttctccagccacacaaacactggaatccttgtattttcttgaagatttaggctgagtatccagccagtttgttctgactactgatgatgatgggatcaattcttcctccagctcatgccaagtgctttcactaacgccaacatctgcatctgatgcataagtgcgatgatcttcatgtatcactctgagcgatgacatagttaaaaacaggaagttgaagcttgtatacatcaaacttctt

SEQ ID NO: 9754 - DNA, 682 bp, Setaria italica
  Peptide Sequence Number=SeqID_75728
cgccgatgggggccggcggggcagcggcggccggaccgggatccatcctggtcgagcaggtggccgccgcggccgcggacggcggcgcctccgccacggaggcggcgcggcaggtctggggcctggtggtgcaggcgcgcgggatggagtgcgcgtcgtgctacgtgctcgacacctgccgcgtccgctcgtcggccgggttctgcacgcacttctgcctcgcccgggcgcagtgcttcggcgatcccgtcgagctccagctccgcaacgcctggctcaaccgcctcgccggccgtcgatagcccgccgccgccgcggccccgtggccgctactactactgatctactactactaaaagtattcgatgcgccaacgaccaaatgcaatgatgcctccagtttgccggcaagaacgaggaagagaagcatggggattggattggaagcaggggaggcgaactgaatcgatccaatcttttcgttcagttcagtttctccctgatttcctttagatgtcaaatgtacagattattgatcgtaattcttgcttgcttgttcaatgatcaagattcatcgaggcaattacaatgcattgcctcgatgaatcttgatcattgaacaagcaagcaagaccaaaaatttccagtccttacttttcaaaaaaaaataccagtccctttgg

SEQ ID NO: 9755 - DNA, 264 bp, Setaria italica
  Peptide Sequence Number=SeqID_75729
agtcatagttcacctatggctgaatgaatacccttgcattagggactatcttgaatgctcaaaaattcatacaaaacacaagttcaattctcgtatgaaacgggaagaattcaccgttccgaattggagcctcaaattaattagtaagcatacatcaacaagtagaaacaaggtccggcgtcaattaattaggtacactcgtatcagcgtagtgaatgcatcacggcagctcacgccctgtcttgccggccaagcccgacgacg

SEQ ID NO: 9756 - DNA, 1000 bp, Setaria italica
  Peptide Sequence Number=SeqID_75730
gtatatctctctcagctttcatgtactcggcatgattcttctccacaaccttgtccttcctcataactttcattgcatatatttctgaagtaccttctttctcacctgatagactttgccaaatgctccttggccaacaagcttcaagacttcgaagtcatcgagtccaacaccctcattctcctttttgacatcatcaagctcatcatcactaaggggcccttggttaattggcttttccttagaagagcactctgaaagttccaatgagctctctgtctcacgtagggtaagcttgctgaatggcaaagcttggctaacaagagatgatggaccaacaagagaatgagatcgcttgacaatgacatcagggtcattgtaaacctcatcgttggactcagccacaggtgctggactgtctggagtgagaatactcacttctgtgggagtctggactgcagtaggtccgaaaacatcagaaaagtcgaactcaacattttcagatgggacaacatctggaggccccccaggcagaagtatcttccctctaaagagcttggggccctgtgcacgagctgctgaaacagaggttatctcagaggaaaccatcttcaagaacctatgcgattcagcagtttagagccgtgacctaaggagtcttgggccacaatttagccggggcagctccccacaaccaattcccagattaacaagaatgatgccttatagggcagctgactaagggaggctccctccgcagattcccaggacaatagaagatgcagggctgcgaacaatggccttgaacaagtggaagtttacaaaaacaactgggaacccaagaaatcctggaaggaggcagggtgggaagctgccactgtttcccgctgaacaggaaactttggatgccactgttcttcctgaactcatgagatcaacttgtctatgggcttcgcagaggggagcgagcggcgaggcgaacgacgggcggcggcggcgg

SEQ ID NO: 9757 - DNA, 1150 bp, Setaria italica
  Peptide Sequence Number=SeqID_75731
ttttttttttttttgtctagttagtagataattatgcccccttcagtaagaaattttggcaattattacatggtcacttggcctagcactctagcagttgtcctcgagcaaatagattgcctccccccacaacacaacaatcaagttacacttacatcactgatgtcttgaaggattttccagacacgaaatcacaaaagtagaaatcgataaatattcgaactccagggtcgatcttctctgataatggaagtagttcctcagccaagaggactcggcttttgcaggaacgaggaaggcctcacataactgaaccccacaaagttgctgttggctgcgacagggctggccactggagagtccaagacgggcatgctcgtccagcactcatcaaagttcgcaatgcaggtcttgccagcaacgttcgggcggaagcttggctggatctgccgggcctccagcctcttccagttgattgacttgaaccacttgtggttctttatttcatcactaccgcctgtcccgcttcccagccgtctgccagcttctttgtgcagcaatcctttcaacagagagtgaacttcactagacaaatatgttggaagctttatcttctccttcactatcttctgctgaatcttgtctctgtttccaccaacaaacggtggcttgcctgtaagcatttcaaaaagaaggattcccacactccaccaatcggcagccttatcgtgacctcggccctgaacaatttctggggccatgtactcaacagtgccacacatcgagtttgatcgagattttcacagaattcctttgcaaggccaaagtcggtgagcatggcatggccatcagcatcaaggaggatgttttcgggcttgagatccctatgcatgattccattggcatgaagatgagctacagcagatacaatttcagctgtatagattcttgcaagctcctccctgttatgtgaaaccagaaaagtttcagtgccagtgctactgccttttgacaaacaaaactattagcaagaaatggaagatacctaaataatccttgcttgtagagctgaaagaaaagatgccccccatttatgaagtccaggacaaggtaaagtcgatattttggttcttgttaattgtagttacct

SEQ ID NO: 9758 - DNA, 2079 bp, Setaria italica
  Peptide Sequence Number=SeqID_75732
agtgaatattgagttaccaaacctcaatattcacttaccattaacatatttcaacatgataaaataaactatttgttcctagcctgtgtttccatgcaaatggtatatggttgatacacaacacgatacagaaacatcgtctcttctgcagatacatcacagaagacatatctacataacgtctcactcgatcaaaattgtacgcatattttaaatgcgataaccatcctagtctttcagcctagagcttgatggcttcacctcctcaaggatcggcgcaggcctgacataagtgaaccccgcgaagttgtcgtgcccgccgccagcgggagtggccaccggggagtccagcacgggcgtcttcgtccagcactcgtcgaagttggcgatgcaggtcagccccgcgacattcggccggaagcttggctggatctgacgggcctccagcttcctccagttgatcggcttgaaccacttgtggttccttatctcgttgctgcccccagggccgctgcccagccgcttgttgggctccttgtgcagcaggcctttcaggagggaatgagcttcactagacaaaaatgaaggaagcttcagcttctccttcactatcttctgctgaatcttgtctctgtttccaccaacaaacggtggcttgcctgtaagcatttcaaaaagaaggattcccacactccaccaatcggcagccttatcgtgacctcggccctgaacaatttctggggccatgtactcaacagtaccgcacattgagtttgatctagtgttttcatcaaattcctttgccacaccaaagtcagtcagcatggcatgaccatcagcatccagtaagatgttctcgggcttcagatctctatgcatgattccattggcatgaagatgagctacagcagatacaatttcagctgtatagattcttgcaagctcctccctaaataatccttgcttgtagagctggaagaagagatggcccccatttatgaagtccaggacaaggtaaagtcgatactttgtctgaaatgagtacctcagctgcactatgaaagggtggtcgacttttgtcaatatctctctctcagctttcatatactcagcatggttattttccaatatcttatccttcctcataactttcattgcatatatctctgaagtatttttctttctcacctgaaatactttgccaaatgccccttggccaacaagcttcaagatttcaaagtcatcaagcccaacaccctcatcctctgtcgtagcattatcaaactcttcgtcgctgagctgcccttggtccccttccttttcttctgagaggcactttacaagttccgatgatccctctgtttttcctagactgagcttgctaagtagcaaggaccgactaacaagtgatgttggaccgacaagagaatgggatcgcttgataatgacaacaggatcattgtaaatctcttcattggactcaacagtatgtgcagggctgttcggttcatgaccacaaagatttgttggcgtttgcactggggtggaaccaaaaacatcagagaaatcatactcaatactttctgatgagacaacatctggggggcccattgggagaagtatcttgactgggcagaggttggggccctgtgcaagggctgctgttagagacgaaggctgagaagagaccatcttccaaaggcctaccaaatcctaggacagcttctgcactaaattcttctcccacagttaggactaaattaggcttcctccactgcgaataacagccttaagcaaggggaagcttcgaccaggaattcccaagtatcccgcaaaaaggcagagaaagaagatgctgctgtttactgttgaatgagaaatgctggatgccagtgctttccctgaactcatgaagccgaagacgtcaacgctatcgccgatggaagagaggagagggctagcggcgtcctcagctccggcctccgatccgctttgctccttgggcggcaggggcgaggagcgcgggggcgcgtggatggatggttggttggtggtggcgagtggtaggtagttgtccgt

SEQ ID NO: 9759 - DNA, 645 bp, Setaria italica
  Peptide Sequence Number=SeqID_75733
agctggcattcgacgaggatcagcaaattgttgcagacaaatggattcatattctccgtgctttgagtgacgagaggggaccatggtctgctgctccttttccaaataatattgtgacatactggaaacttgacaagactgaagataaatggcggcgccgactgaaactcaaacgtaactataagtttgacgaacgcctttgtcacccatcatccaccaaatctagtaacgagaatactgccccaactgttgacccatctggtagtaccaagataccagaaaaattgaagcacttacttttaaaaggagtacgtggaattacaggggacatcaattctgaatcatttgaggataacaacgatacgagtgattctccccagactttcccgccaaagacacaccctgttagtgacactgcagattctgcagactctgattatcatgctattgttcaaaatagaaaagaaagtccaaccagtggagatagtgattatattgaggtactatcatcggtccattgtgttctcgtaacacccaaaagaaaattagctgggcaattgactatcacgcgaaatgccctgcatttttcttttgaatttctggtcgaaggcactggtggatcatctgttttcaatagatttcaag

SEQ ID NO: 9760 - DNA, 815 bp, Setaria italica
  Peptide Sequence Number=SeqID_75734
aggctgccgccgttgccgaggtggatcaattggtggtacagcacgaggaggccaaggccgcggctgaagaggatgtgaaaggcggcgccttcgaggaggaggggaaggaggggattgaggcggaattggaggggagcagcaaggtgagggcgatgaggtccaagacgatggccaaggcgatgagcagcgttccagatcccggttccggccgcgtcaagcatctggtgcacgctttcgagagcctgctcaccatctccggcgccacctccgacgcagacaaggccggtgagggctcatgggccctgcccgggttgcagtcgttgaaggatgagggtgagggtgacctggggctcccacaggtatcagtattcttgtcatctgatttcctgaatgcagggcctaataggctctgctcgtcacttgatggcaaggccgacaggttcagctgggatagcaaaacatcggctggagggcgcaggagcaggagaacctcatcggaatcactaaggagcagctggaacagaaagcttaaggtcacaagccagcatcccttcaagctaaggactgagcaaagaggaagatttaaggaacaacagctcgcccaaaaggtgcaagaaatgcttttggaagaagagaagaagcgtatccatgttgctcaaggattgccatggactacagatgaacctgagtgtttgataaagcctgcagttaaagaaagaactgagccgatagaccttgttctgcatagcgatatgcgtgcactggaacgcgctgaatttgatcaacacgtgttggagaggaataagttcgcagag

SEQ ID NO: 9761 - DNA, 595 bp, Setaria italica
  Peptide Sequence Number=SeqID_75735
cctacgtgctgtcccgcatccccaccctctccaagcccagacccgccgccgcctccgagttcgacatcgagcagccgcccgcgcacaccccgtccccgcggaccccgtccaccgcgggggagttcgagctcgtcgagcgcatgccgggcctgcgccacccgtccgtgctccgcgccatgacccgcgccgtcgccgatgtctccgcggcccgctccgcgctccaggtgctcggcccgcggcccgaccacgagctcgtcgactcctcccgcgccatcgtggccgccgccgaggccggggactcgcggatccccgagggcgacgtcgaggcgtgccgcgccgtggtgcgcctcgaggagacccacgacgcctacgaggccctgctgcaggaggccgaggccaggctcgagagggtgtaccggtccgcgatggaggggacggaccttgacgtcgaggcggtggagaagggcggggaggacggcgggcccgctgcgggcgctgacggcggggacgccgcggtgcaggaggaggtggtggcggtgctcaggcaggccgaggagggcaagccggtggtagagcgttgtcgtccttcgttggt

SEQ ID NO: 9762 - DNA, 378 bp, Setaria italica
  Peptide Sequence Number=SeqID_75736
cgtcgccgcatcctcccgccggccactccaatggaggccgtcctacgacatccatcgctgtcccgcctcaagcctccgaacccgaaccctcacaggacgccaccgccatccctcgcctccccttctctcctccgcctccgcgagcgccggctcaccgtcgccgcggtgttccaggaccagaaaccgagagagccagcgagcaaggggggcgacgacgaggaggcgtacggcgaggtggaccgcatcgtctccagccgcacgatcaagaacccggtgttcgcagaggacgggtcggccaccacgtccgtcgccacggagtacctcgtggagtggaaggacgggcacgagccatcctggatccccgcggaggccatcgac

SEQ ID NO: 9763 - DNA, 572 bp, Setaria italica
  Peptide Sequence Number=SeqID_75737
ggagtactcctcatcccgcgccgccgccgaattggccgacgccgagctcccccctggcctgcgcagccgacgagtggtgcgcacgctgagcctgagcaacccggggcggcggcggggggttggcgcgacgggcaggcccgacgaccggcgccaccgggacggcgccgttggcaaggcccaggggcccggagacggggtcggcggtgggtatggcggggatgttgacgggctcgatcctcgggagctcgtaggagaccggcgggccgtcgtactcgagcgcgatggagtagtcgaggttggcgggcggctccgggatggtggtccccggcgggaacatccggcgcaccaggtcctcccagtcgcccccgcccgccgccgccatgtcccggcctgtggaggagaaatccgtcgaacacctggcgcgcacgctgtggtggtgttctcctactccatcaccacaccagcgaggaagctagcaactttccccaaccaaaaatctccagtccaatggagaagccgggtcggtcaaagagaagaaaggcaacctctccagcagcggcggtcaccaccaa

SEQ ID NO: 9764 - DNA, 559 bp, Setaria italica
  Peptide Sequence Number=SeqID_75738
tacttaggaaagacggaaactttagaaagaaactaggaagggaagacaagaagttggaatctcagcttctggagcctgttgcagctcctcctgtgcatccagtgcatgtccctaccaagcaaccagctcgccctgctccacagaaagctacagctgaagatgatgagcttgctgcactgcaagctgaaatggcgttgtgatcaggttcccaatgaagaggtgaaatgtgtaaatgattggcgttacactaagaaggtccaagcgagtctggctatgatatatttgcccatgtgtgtataatcttggggggtgtatttggcaaccgaagcagaaaaaaggctgctccagccaatgtttgtttcagtggttttggggtctgttctcaatagacggtttcattttaatgtggctcggtttgctccatccatgctaacctcccacatcaacgtgcattgttgtcatacagtatttttcgttgacccatattgtctggaagccaatagtaaaaaatagttaataaaataccccaagggttacaacaatttagaatagacgacca

SEQ ID NO: 9765 - DNA, 1311 bp, Setaria italica
  Peptide Sequence Number=SeqID_75739
acggtacgtctccatccaactccaactcgtctcctcctccttcccctcccccaatcatcaaaaacctagaccaaatcttccccatcgatcccaactcaccccacccagagccgccttccaaccagattcctcctgtcccctctcgagtcgcgcccgcccaatccagtggccgccgccgccgccgcttccgccggcgtcgaatccggtgttttgagtttcggttgcgagcgcagccatgtccatgttcaacaggatctttgggaagcccaaggagcaggccaactctaatgcgttggccactctggacaagttaaatgagactctcgatatgctggagaagaaagaaaaggtgctggagaaaaaagcggctgccgagctagagagggccaaggaattctcgaaagcaaagaataaaagagctgctatccagtccttgaagaggaaaaaactttatgagcaacaaattgagcagcttggaaatttccagttgagaatccatgatcagatgatcatgttagaagcagctaaagctacaacagagactgtcgatgcattgaggactggagctgcagctatgaaagcaatgcaaaaagcaaacaaatattgatgatgttgacaagactatggatgaaattaatgaacagacagaaaacatgaaacaaattcaagatgctttatcagctcctcttggagcttctgctgattttgatgaggatgaactggaagcggaacttgaagaactggagggagcagagttggaatctcagcttctggagcctgttgcagctcctcctgtgcatccagtgcatgtccctaccaagcaaccagctcgccctgctccacagaaagctacagctgaagatgatgagcttgctgcactgcaagctgaaatggcgttgtgatcaggttcccaatgaagaggtgaaatgtgtaaatgattggcgttacactaagaaggtccaagcgagtctggctatgatatatttgcccatgtgtgtataatcttgggggtgtatttggcaaccgaagcagaaaaaaggctgctccagccaatgtttgtttcagtggttttggggtctgttctcaatagacggtttcatttaatgtggctcggtttgctccatccatgctaacctcccacatcaacgtgcattgttgtcatacagtatttttcgttgacccatattgtctggagccatgtaaaaatgttataaatccccagggttcacatttgatgcgccaataagcagctctcaatttttaaagaacaaaaaaaaaaaaaaacctaaaaagagactgccaaggcacaca

SEQ ID NO: 9766 - DNA, 290 bp, Setaria italica
  Peptide Sequence Number=SeqID_75740
ttgcggtatgagaaatccacccaatcgccgtttgttctaacaacaaagaggcaccttgattgcctgaactcagggtgcctgtcaaccattataccatcaagcccacaaccaatcttctcatctacacaaggatgatgggaaagaagcttttctactacaaccttttcttcagttgggcttagaaatccaccattttcatacctgcgggagtggaggatgtccttgacgagctccacgacgggctcgacgtcgcggaggatctccgcctcggcctcctcccacggatccgg

SEQ ID NO: 9767 - DNA, 330 bp, Setaria italica
  Peptide Sequence Number=SeqID_75741
tcgttatttcagtgtgttctaagttctaactgttgtggttatctcccccaatgatgtaggtactgcacttctgtcgtgcgtccaatgctctaataagctttctgaacattagacatccagtttatctatcaactgaattattatgaacacgctgatttctgctatgatctacttttcatctttcttggcatgactaacttcataccattacacgcttttagcaacaaagcgtatcttcaataattatcagcgcttggtatatctataagaccagttagttgtatctatgtgtgcctatctgcctgagcccaattccatggtgatttaaaa

SEQ ID NO: 9768 - DNA, 502 bp, Setaria italica
  Peptide Sequence Number=SeqID_75742
cgcacgacagaagtgcagtacctacatcattggggagataaccacaacagttagaacttagaacacactgaaataacgagtcatcaactgcattctgacgatacacacatgattaattcccaagctaccaaactaacattccccatagtacttgcataaacggagcaaaatcaagaacaagacgaatccactgcacgatcaagaagaagaagcaccgggttgaagagaagcgctgcctagatacatacatacatggcaacacgacgcaggagtgctgcagctaggcgccccacacggtgatcccctgcatcatgttcttgaactcgctgaagtcgacgcggccgtcgcggtcggcgtcgacgttgcagatcatctcctgcaccgtggccaggttccgcgcctctggcaggccgagcttcttgagcacggcctggagctcggcggcggagatgtagccgtcgccgttctcgtcgaacacgcggaaggcctccttcatgtcccc

SEQ ID NO: 9769 - DNA, 1092 bp, Setaria italica
  misc_feature (1078)..(1078): n is a, c, g, or t
  Peptide Sequence Number=SeqID_75743
aactgttgtggttatctccccccaactgatgtaggtactgcacttctgaacattagaaattcagttgatagataaactggattctaatgttcagaaagcttattagagcattggacgcacgacagaagtgcagtacctacatcattgggggagataaccacaacagttagaacttagaacacactgaaataacgagtcatcaactgcattctgacgatacacacatgattaattcccaagctaccaaactaacacaacccatagtacttgaaaacttggcacaagttactgatcttgtggttgctcctccagtctttagatgctccagaacatacatggcaacacgacgcaggagtgctgcagctaggcgccccacacggtgatcccctgcatcatgttcttgaactcgctgaagtcgacgcggccgtcgcggtcggcgtcgacgttgcagatcatctcctgcaccgtggccaggttccgcgcctctggcaggccgagcttcttgagcacggcctggagctcggcggcggagatgtagccgtcgccgttctcgtcgaacacgcggaaggcctccttcatgtccccctcgtcgtcctcctcgggcacctcctccgggatggggccgaacagcgcgtccccgagcgcgcggtggagggactcgaagtcgtcgaagcggagccccgcggcgccggccgggatgtagcccccgacggcggcctccaggccggagcggtcggcgccgaggccgagcgcgtcgagcgccgaggccatctcgtcgagggtgatctcgccgtcgccgttgcggtcgaagaggtcgaacacgcggcgcaggcgcagtgcgttgaggctgccgttccggaggcggaacgacggcgagggcttcttggacagcgacggcttcgcggcggcgggaggaggagcggcgttctccatcgtcgcgtggactcgcggcgccccttctcttcctttcttcggcggtttgtgggcgttgcaaatgcgagtggtatagctttcttgaacattagacatccagtttattctatcaactgaattatttattgaacaaaaaaaaaaaaanaaaaaaaaaaaaaa

SEQ ID NO: 9770 - DNA, 1900 bp, Setaria italica
  Peptide Sequence Number=SeqID_75744
aaataaagttacttttatttaacagaagtacatggagtggaagtgtcaaatgaacagcctgcagcttaactccgccaacaacaagacacacagattaaaaaaaataccctagcaataatcaaaatagcgaagcagtctgtcatgctacaaactctgataaatgatcttcagacaatggaaggcaacatgggtagactggagttaaactcagaatttgagtttaggtttggcaggtgaaaatgtctcgacaaatcctgaaaataacctacttctatttctggtcatttgcttccaaaacctgccgtttccttcatatgccttatggttcatggtgtcgtcctaatctcctttggttttctggagtgtaaacatgactttgcatccagatgtcttacaaagacattcctgtttgcattgactcagagacaagagcatcgtttctgtgttactgaatgtttcttcttggtccaaatcggacgttcaggttgtccaaaacacgggtaacgttgagaagtcgtggatcgtcagcagggatttctcgttccttcaaacccttgtggtatgcttcaacagcaggtagggatggagtgatattacggctttgcaggagatcccagacataattcgcagtcgtatatccaccagtcctttcaccagcagctgaaagtaagagatcagttcccatcctcggattcaagaagaaatttcttgaaaccattttctctatggtttcttgagcaacttgcattcctcttggagtgtgcccaatcatagctccctcagcaagtgtcacgtacaactctgcagctggaaatcttgaacttgtatattcttcaaacatcttaatagcagaatcaatatctccacaacgtagataacacctcatagcttgcatcaccataaaggcatcataactagatccatctctattatccttattgaacatttcaagaagtgcttcaagtgtctctttgctccgcagttctgcacaagcatggatagcaacatgataaactgtgaactgcttaaggacaaatcctcctcgtctatttacatattctgctgttggtaggttatacaactcttcctctgatacattcatcattacattctcagcattgtcctttgacactctttcaacatatttccaaccttttgactgctcgacaaagtcaagaatctttgccatagtctcctcagtggttggtgtcttgttcttgaatgcagttatcagtccagcataacagtacttgtttaatccaagaccagcagcactcatatcactaactattgcataaacttgatcagttcgccctgttgctgcaagtgcattcaacagacaaatgtaggtttctcctttcaacttaacgccatgcgccttcatttcttctaaaagcatgattgctgcatctgagttcttgcattttccgcaagtggagatcaggaagttataaatgttaacatcaggctgcaagcccatttctttcatctgatcacggaagtagagtgcatcttgtagtcggctgcctttcatagtaccgactatgagtgtgtggaatgtgtcccgcacaggctgcacgccgtcaagcatcatgtcatcataagcatcacgcagaaggtagggcctgcgctgggcgacgagggaccccatgaccgtgttgtactcggaggcgttctcggcgtagttccggcgctggtactcctccgtcgaagtcgccgctccgcgccgcgccgtgaacgccgccgccgccgcatggcgcaaccttccctggagcaggacggagttcttgaggagagccatgcggaggccggagggggtggtggcctggtgggcgctgcggggaggaccaagacgaaaggaagaagaagggttttaggcttgcggttcacttcgtagctt

SEQ ID NO: 9771 - DNA, 330 bp, Setaria italica
  Peptide Sequence Number=SeqID_75745
ccggacgacatcgacgagcgggtgctcgccagcaggctcgccaccagcgccgccggcgagctcgcctgccccgacctcgtcgtcaggaccagcggcgagctgcggctcagcaacttcctgctgtggcaggcggcgtactcggagttcttctacaccgacaagatgtggcctgacttcggggaggccgagtacctggaggcgttgcgttcctaccagagcagggatcgtcggttcggtcaaacaagagtctagctgcagccgcaaaattgtagcgaataggcatttgtatgcgttgaatgaacacgtgagttgttcttgttcaatttagtt

SEQ ID NO: 9772 - DNA, 506 bp, Setaria italica
  Peptide Sequence Number=SeqID_75746
gtcgccaccgccgccggcggcgaggtggacgcggcggcggacgccttcatcaacaagttccaccaccagctgaagctgcagcgcatcgagtccttcatccgccacagggagaccgtccgccgcggccaggcgacggccgcgggcgtctaggtgggcgcgcgccaatccgagccggccgagttgccaagaccgcaagctctgcaagactgcaataacggagatggtgagcgaagaagatgaagaagagaaggcgtgttggggggattggacggaggagatggatggtaactccgttccttgttcccatctgatttggggttttttttcgtcgttcctggtgctagtacatcgtagctccatgagttttggatagaacccttgcgcaatgcgccatcgcatcatgtgaatcgataaaggaacaacccgtagctaagttgctgtaaattatgcctgtttttgcaaatgtggcttaagcatatgcaaattcttcattaaaaaaaaaaaaa

SEQ ID NO: 9773 - DNA, 821 bp, Setaria italica
  Peptide Sequence Number=SeqID_75747
taaacccgtaaagaaacttaaccttaacctaaactaccaagacaaccaacgacgacgacgaccgacgacctagacgcgatcccgtgctcctcctactccagcaccagcagcaccttcagatcctcgccgctccgcgcgattaccggcctctccgggagccgacggtgcgccggccgcggcgcgtccgtattacgcgccgtccagggtcaggacaccaccatcgaagtatcagatgtgacaaagtcaacatggcaaacacttgtgatggagagtgagcttcctgtccttgttgagttctgggctccatggtgcgggccgtgcaaaatgatagatccagttgtcggcaagctctcaaaggactacgaggggaagctgagatgctacaagctcaacacagacgagagcccagacatagcaagccagtacggggtccggagcatccccaccatgatgatattcaaggacggcgagaagaaggattcggttatcggggctgtgcccgagagcacgctgaccacctgcattgagaaattcgttgagaggtgaaatgccccagtgatctcttgagcacagtttcctttcaaaaaaactgtggtcagatcagtggacccatacacggaacagtcctatatatacctgcttgtagatattcgaatcacattcgattattgtttgaggaaagtggcatgggttgctgtcccaccctagcctggtctttgttggctccgaagtgcgtgacatggacgttccaagaaccacattctatcttattagaatatatttatatctacatctttcattgtgataattacccaaaaaaa

SEQ ID NO: 9774 - DNA, 382 bp, Setaria italica
  Peptide Sequence Number=SeqID_75748
aacaacaaacacacaccatttaggatcgacgctagcaaataacaatggcccagagcaagaccgtcgccacaaccctcttcatcgtagccttcatggcggcggctgcttctgtggcaacagctaatgcgtttaaggctgcagcccctaggaaactcctgtcgggtgacggcatgatcccaatcaccaccgatgacctgctccctgcatcagccgcgaagtccctcacgacgggcagggctagcgtagtcgccatccagaggcagctgctgtcaggcgatggcatgattccaatcaccaccgatgatgtgctccctgcatcggctgcgaagtccttgacgacgggcagggctagcgtggtcgctagccagaggcagctgtcgga

SEQ ID NO: 9775 - DNA, 1315 bp, Setaria italica
  Peptide Sequence Number=SeqID_75749
cccgaacgagcaagaaagtactttcagcacctagagaggttcttatcttcaagactgagcaaaaatgaatttgaaaagctgtgccttgtggcacttggccatgagaatctcccattgcataaccacctcatacgttctatcctacacaatgccagtagagcatgtggcccacctgtaattaatgatcctaagttggtcagaggtgccaccccatctggccatgcatttgttcctcctgtctgggacaacggtagtgctttgaaccagaatgtcaaagagaacaaaccatcaagcagaagggaaaatgcattaacccaaaagtcatcactgaaccattgtgcgactattcaggagaatggtgttcatcatttgagtgatctgaagagatgtacacaagttcaaaaaggtgaacatgtggaaccgcttatcaagcgaccgcgtctggagaaggaaccattcagtttacactccctgcatagcaatggatctgctctgccttcaggagagaacctgggacgagaaattatacaccaatcccaaggtccagttcaagcccacttggcattcagttacgtcctggtagtttttgctgggttccaaaaaccctcagcccttgcttctatcagttcaaaggatacctctgatacttgtattgaatttggtgaactatgtgatactttgtcggtgaagaagaggatggacaaaatagcagaatcagaagggttggaaggggtgtcaatagagtgtgccaatttgttgaataatggtatagatgttttcattaagcagttgattggaccttgcgttgaattagtaacagcaaggtctcaacttggcaaactaagaaatgaggcattgaagcagcaacttcgccgaaaactaataaatggtgtgtcactgcaaaatcatattcctgggcaaggtggtattatacctccagagacaaattccatctccatgcaggacttaaaggcagtgatggagttaaacccttgcttgcttggggttaatgcatcactgctacttgaaaagattaattcatacgactagttggatggagcaggttggaatgatctcctcacaaggttctaggatcttgatggcgtgtcttgcttcatggctgttctagtcaggccactaggtggaaaatgctgatgaattctgtgtgcagtgtcctgattgtttggcatctcagctccagtgcaattttccagaataagcaaagatctgcttatccactggtgctgctattttagaacttattcctatcatctcactttagcaccactatgcaaaagtgcttcagcgagaacta

SEQ ID NO: 9776 - DNA, 620 bp, Setaria italica
  Peptide Sequence Number=SeqID_75750
gccgatgatcctggcggggtgcccccggtgcatgatgtacgtgatgctgtcgcgggaggacccccggtgccccaagtgccacagcaccgtcctcctcgacttcaacggcgacgcccccgccgccgacccgcgcaacgccggcgccaagagcaagggcaggcgcggctgacggctccgggcgttggagccatgcgcatggtcgccgtggctcgctatcatcatcagtcctaagttacgtacgtgcgtgttggttgtgtccgtgtgtgtccgagttgatcagaaaggaattatttcgtagacccgttcttccatggaccaggtggtaggggaagtaagctctgagctgtgcgtgtcgggcattggggtgccaatggaacgggtctaggtaataatttcgggtccctctctacccttgtgtgttggtgacttggtatgtgatggtctctgcaggtgcagaagagacgtgcgtgtcatgtgtgtgtcgtggtgaaagtgatgtggtgttctgtacggggcagtactggtaaggattaagattttgtctcggagattttatgggagcgtaatgctctcgtccagccgtgtcgtcctctcgccttgacgccgcgtaaataagcagc

SEQ ID NO: 9777 - DNA, 877 bp, Setaria italica
  Peptide Sequence Number=SeqID_75751
gtttagacctttttctttttttttcgttcttgaaacccggcgatccccgtcgaccgtcctctggcaaggtccaacaaccgcgcgtgcctcccctcgcttcgagatccgtccatctccggcagtccggttcgccccatggcggcgatgctagaggccaaacactccaccaacaagccccagtccccacccccgtcccattcagcttccgcccccagctcgctcccataccaccaccaccactacggcacctttcccccgccgttgcagccgccgctcaccttaggcgccgcctaccacgcctccccggtcgggttcggtggccagggcgtagtggccttccccagcgccgtccagcagcaggtattcgtggagggcgttcccgtccgggagccgccactgcccttctgtggagtcggcatcggctggtttcttttcttattggggttcttcttggctgccataccctggtatgctggtgccttccttctattctttgttgccttggaccacagagagaagcctggattaattgcatgcaccattgctgccatatttgcactagtctctttcattctgaatggtatcagaatgcatcctttctggtgaacaatgctggatgtcgccaatcaaaatccatatgtagttaacatttctggcgccacatttgatatgtccatagctctattgtattgcccctgcccgtgaagaatgaaatatatgagcttacgtgtaaaaaaaatcaccatattttccatccgctggctcacatgccctgtgatatatatgtgtaatcatgaattctacagtttatctatatgatatggtaccaatttaacagcttaccggagcaggaaattaaaaaaaaaaaaaaaaaaaa

SEQ ID NO: 9778 - DNA, 2810 bp, Setaria italica
  misc_feature (2781)..(2810): n is a, c, g, or t
  Peptide Sequence Number=SeqID_75752
ggccgcgcctctcgttcgaccgctcgccgagatccgcggactccaagcccgtcgtcgagcgccgggtgcccaagatcggcacgccccctgataagcagccgcggagggaggctgaactacaggcacggcttgagtccgcccaggaggacctgaagaaggccaaggatcaactggccttcatcgtcggcgagagggaccgtcttgtcggggagctcaatgaggccaagcgagtcgctgatgagacccacgagaagctccaggatgccctcatggccaagaggtgggctgaggaggccacggagatcgagaaattccgagcggatgagctcgagcaggctggcatcgacgaggcgcagaggcgggaggaggagtggcagagggagattgagtgcgtgcgtggccagcacgccgccgacctggagactttggtcaacacaacagaagagctggagaggctcaggcgtgacctttcgatggctaacgaggccaagaaggctgcacttggccatgcagatgatgccatgaagattgctgaggtcaatgcggagaaggtggagatcctctcaattgaagttgttcgcttgaaagggttgcttgattcaactgctgcaagcgaagagagtaaaaaccgtgaaactgaggttcttgttaagaatctggagtccgaggtttcatcactgaaagttaaacttgaggaggcaaaagtcctggaggagagattggcagaggcagagaaaacgattcaggagcttaaatcacagatagctgatgcacagaaggtcgagtcagacatccgtcagcagttagaagaatggaaggagaagtcagcatcacttgagatgaaattggaggaagtgactctgtccgagaagttcaaaagtgactcccttgcctctacaactgaacagctggacaagatccattctatgttgcaagatagagaatcagaaattgaagttcttaaaggaaagacaaccgccttggaaattgaggtggcaaggcttttagcagaagttaatgattccaatgagcatttggatgcatcgcagcaagaggtgtttgggctgcagacgacaatagatgttctgcggaacaagcttgagactgcagaactagctgcttcagaggctttgaacaatgagaagactgctaacacgaagatagaagatctgactgaggagaaaactaagctaattagtgagctggatgatgctagagatagagaggagaaagagaaaagagcagtggaggatcttactgctgcattggacaaggcatgttgtgaagcgcaggaagcacatgataggtttcagaagaaagaagatgattacgagcatgctcttgctcagataggtgatctgaagatgtccctaaagagtatggaggagagctatgaggcaatgcttgatgaggcaaaccatgacataactcgcctaagggaaactgtcgagaagctggaggctgaggtgagcaagtacagagaagaatgtgaatctaaggagcttgaccttatcacagcaagcaagcagtctgaacaagaaattgctgctcttaaagtagaagtggagcaggtagctgcatcattgcaaggtgcagagcacgagattgaagcagtcactgaagagaaagagaggcttcaagagaaactgcggaatacggaagcagcagttgctgaagccaacaaggctgtgcaggaggcaaagactgagaaggagcagcttcaagaaaaacttgcacacacggaatcagcggttgctgaggccagcatggctacgcaggaagcaaagactgagatggagaggcttcaagagaaactgacgtatacagaatcggcagttgctgaagccgataaggctgtgcaggaggcaaaggcggagagttcgcagctgaaggagaggttacttgacaaagagaatgcgttgcagaacctaacccaggagaatgatgagttcaggatgcgagaagctgatgccatgaagaaaatagaggagctgtctgctcttctcgctgaagcgatgactaagaagcatcctgaagaggaagagaagctagtgatcgtggatgaggtgcacaattctgcgcgtgaagaatttacccgttctgttgcagaaaatgaagatgcggaagaaagtgatgataaaaaactgcatctggaagtcgacgcagatgatatgaggtccaatggagacatgaaccacgaagagaaagatgacagcaaggtcgaacaagaggaactgaaaattggcagtgtacaagagagcgaaaaggttgtcttcgagaaggaagcacaggctgaaaacagaaagcaagagactgaatcgtcgaacgatgaattggattctaagaaagaggacagcagcactgagaacacaaacggcacgaccgtaccagaagatacggccagtaaagtggcaatgtccccgacgaaaccgcagcagcagcagaaaaagaacaagcctctgctgaagaagtttggaagcttactgaaaaagaaaacagcaagtagccgaacagcgcgtgtactattagtgtcatcttgattttcctctgttttttttggtttgtttgacgcggtgttgtgcttcctatgcgtttactgccaatgcctgtatttttggtgattggagaagtttgtgggtgtcgtgattttttttctcgccttattcgtttaactcggacctatatggtgcttggctgctacctgcctccacgtttgtggcagttcacttgtgtgtaaatggagttcctcctaatcagaatggctggctattcgtttctagnnnnnnnnnnnnnnnnnnnnnnnnnnnnnn

SEQ ID NO: 9779 - DNA, 2357 bp, Setaria italica
  Peptide Sequence Number=SeqID_75753
tctctacactacgcagcattcacgacagcattctacttcccccgaatgctattataatgtgaaacagtctgctctgctgacatggattgctaatcttagtcactaaacaacgccggagttcgcaccttctgtacaatcagtactaccatgccttgaatgaaaaggaccgctaaaaggcatgtcagcagacatcatcacctcaaactccaattgtcagttctgcggccacccaccaccataagagccctgtcgtccgaatgggtactgttgaggcaaggagctctccggtcttgtgttgtttcttccatcaagagagggagcatatctatcaataatggagctctgtggcccacttggacccaagagcccgtacccatacttgtccattaccgaacctcgttgtaagcctgaacctgagagcccaaaagagggagtagatgcaggctggctaaatctagcaccagaagatcctagggagaatcttgccaacgggtaatcagcaccagttccaccattcatacttagatgtgtttgtgagcccgtggctagcgggatcttactagcttggcaactgtcaccatggccatcatatcttatgccgtgtccttgcatagccacatcagcaactaggttcctcccagtagaagtgttcaagtcttctgagctcggacgcctgtagaagctgccatcgtctctagactgagagctgtacagactggttgatgcgccaatatagggtttggttacttcatcaatgctggagcccctcatccttgagctattgtcaatgtcagcatacttgagttcatcaaagtattcatcattgcttgccaaataacttcccttaagattagccctgtttagcatagggtcataaagttcttctgagggacagtaactatctgggtgggctatcctatcagaagggtgttcagttggtatagcaggggaatagcttctggatttgcttccagcattattgctgtcaggggatgggatactcatgtcagaatcccctccatccatggacttgacattcagcatccctgctgctgtttgctgatagttgtgccggctcttgatttcctctccatgagaatttcttctattttcgtggcaagcacctctgtgttcattatgaatactctctttcctaggaatagtaacttttgtttcctcatatgcaacttccacttgcttttcgggagggaggctctctacatgatcaggtgtccacttcctcctgttatcagatctgttttcataactgccattctctttctctttccctgggatgaccctgctggtaggttcagattgtttcttaactggaaggttatctgacatattagcctctttcacatggactgcaatcttccctagagttcctctctcttcttcagatctagcttgcttcttagcagcatggtcatcaggtaggttggcctctctgtcattgcatgcagtcttgtctgtccctctctctttccctgacctagagttccatttgttggtagcctcagcttgtttcctcactggaagatcatccaatatattatcctctttggaatggaaagatgcttttcctgtattctcctttcctttccctgatctagtttttattttgtcagaaggttcagcttcttccctcacagggtcatctgatagagagtcaacatggcgaggtttcttcttccccatgctggtgtgactatgctcttcagctattttcatgtgcttctttgtccaatcaggacgactccacaggtagaggggtggtgcagatgcattccacccttcaactgttttatcattaagatccacagaaccaggcaaatagaatgccttcccagcaagacattcactgtcctcccaaatcaaatcataaggcgtcttcttttgatctaaccttttagtttctttagggacaattagtacaacgagcttaggcttgaatgacaatgctttgtcaataaatttgtttgcaagacttgctttgaccccaaatggaggattaagccccataattagttgagatccacgaggcagctcattcagcttgacagtcatccaatccctcttttcaaagccgaagtgattctttggttggataagatcataattcttgaaatggcatttcttctgaactttgtcaagtttttctttcaacagccggctgaaatcgtttgcaccacaacagaaatccactatcgtgtcaccaggttccacataccagtgaagtttatcagcaatctcaacaagcttttccaccttcgtaaaatgtcgaccaaaagaactgtagcgtgtgccatgaataaaaggtgataaatatactctgaacttactatgccattttg

SEQ ID NO: 9780 - DNA, 706 bp, Setaria italica
  misc_feature (1)..(1): n is a, c, g, or t
  misc_feature (89)..(89): n is a, c, g, or t
  Peptide Sequence Number=SeqID_75754
natataacacttatccataaagtgcacatgattcaaattcaagagaagcagaaaagcaaactccagctgttaaatacattaaggtatgngtttcaaggacccaacacgatcaagaattataacaggaatttgtttaacaagttcaaaaatctcgagcttggttgctcctgtaaatttcaatatctcacaagatgtagaaaaatttacagtttaaaaagtgatacaatcaactttttcttatatacctcaacaagagaactgtagtgtggatttcaaccacctaattatacatggtatctcaacatgatatgtagatttcaatatacctcaacaagcttttccaccttcgtaaaatgtcgaccaaaagaactgtagcgtgtgccatgaataaaaggtgataaatatactctgaacttactatgccagcatataagttcataaattgattggctactaactaaggaataaagaagtgcttatttttgcaagctgtctcaaaacatcaggttcacatactgctttagcatcattgacattacctccattttccagcttttttaaagcagctcctacagcctgaacagaacgctcaatctttccctgcgcaatcttgtctgtctgcctgccagagtatacatgagttgttggcacactgcatttccttgtaacatctttcagtgtcaatttagaggcttcatttcccaga

SEQ ID NO: 9781 - DNA, 699 bp, Setaria italica
  Peptide Sequence Number=SeqID_75755
cgactcagtcgcactagttgagttctgtagcagccgctacttctgcatcagtagcattatgtgctctcgtcaaaagaccttggcaagcatagcctaatgccagtccacaagctccttttgcaagaccgctttcagtttttgagataacctcaagaagcccattaataacctgaaacctgctctttttatccgtgggatgaaaacaattgaatattagtccaagagagagtgctgctgaccactgctggtgctcatgctcgtattgaaacagccattttaaaagaaaatctgatgcagaagatattaccaaatgggcagttggtggaacaatcaagcatagtgctccaatgacaagggcaatgttaacagcaactcgaggagtagatactggaacgtgatcgcacaaaatcttaaatatatcattagcagcttttaaagctttgtttaacttcgatggctctttactgtcaagcaaagcaacaactgcttgcatccaattggaaacaaatgacttccatgaatgcaatgcaagaagagctacctctatgtttcttgatatgtacatagattcagcaatttctgtaaatgcttgctcaaaagcagtatgaactctaggcaaactcttagatttcccttcattaagatatccttgggtaaattagagttagaagagcagcaccaggcaatgatgatgagttg

SEQ ID NO: 9782 - DNA, 330 bp, Setaria italica
  Peptide Sequence Number=SeqID_75756
tcgcctggtcaccgccgcgcccaaccccaatcccctaaaccctagcgccgccgccgccatgctgcgccgcctcgccgccgtcgccccgcgggccttctcctcctcctcctccccgcacgcgccgcctgcggcggcgtcgggctacaccccgcgccgcgagtacgggctggtgcccatggtgatcgagcacacctcccgcggggagcgcgcctacgacatcttctcccgcctgctcaaggagcgcatcgtctgcatccacggccccatctccgacgacacggcctcgctcgtcgtcgcgcagttgctcttcctcgagtccgagaaccccgc

SEQ ID NO: 9783 - DNA, 1159 bp, Setaria italica
  Peptide Sequence Number=SeqID_75757
gggctccgccgggctcgggccgcgccggctcgtcgtggcggcgcccccgcgggcgttcttctcctcgtcgccctaccagccgccccagccggaggggttctcgccgcaccgcgagtacggcctcgtccccatggtcatcgagaccacctcccgcggggagcgcgcctacgacatcttctcgcgcctcctcaaggagcgcatcgtctgcatccacggcccaatcgccgacgacaccgcctcgctcgtcgtcgcgcagctcctcttcctcgagtccgagaacccgctcaagcccgtccacctctacatcaactcaccggggggcgtcgtcaccgccgggctcgccatctacgacaccatgcagtacatccgctgccccgtcaccacgctctgcatcggccaggccgcctccatgggctcgctcctcctcgcggccggggcgcccggtgagaggcgcgccctgcccaacgccagggtcatgatccaccagccctctggtggcgcgcaggggcaggccaccgacatcgccatccaggccaaggagatcctcaagatgcgcgaccggctcaacaagatctaccagaagcacacgcgccagcccatcgataagatcgagctgtgcatggagagggacctgttcatggaccccgaggaggcgcgcgactggggcctcatcgacgaggtcatcgagaaccggcccgcctcgctcatgaccgaaggactcggtggaggcggcctcgatgtgcccaacctcggcggcagcggcggcggcggacggggaagggatgttgaggagccctctgcggtgtgaggaacggtggccacaaaggtgaaatcctatcgcgtccggtggctgtgtttgtcgttagatccaaaggtttaattcttactagacaaggttaaccttgttgttctggttgccgaggcgtccggctccccattcctcttcttgcttcaattgcctgaattgagttattggtgataattattgcaactccaaggaaatttcgttcctgatacggataaattgacacagtattgtgtatgttgtactatattagtatcaattccataatggagcattgaaaatctcaaaaaaaaaaaaaaatcctcacatcacagtaaatgttcttgagctttgtttctatcggtgtcaaacttt

SEQ ID NO: 9784 - DNA, 234 bp, Setaria italica
  Peptide Sequence Number=SeqID_75758
ggtcgtgattacatggaagatgcccatgtgtgcatctctgatctggcaaagaattttggctataaagcagtggatgatgaagtgatttccttctatggggtctttgatggacatggtggcaaagatgcagcccattacgtccgtgataacttgccacggctcatcgtggaagatgctgattttcctcttgagcttgaaaaggtagtcaagaggtcgtttgtggaaactgaagta

SEQ ID NO: 9785 - DNA, 620 bp, Setaria italica
  Peptide Sequence Number=SeqID_75759
cgtctccgtctcggccgtcctcctttcctccgcctcggattcgatcgccgcgctcccctcttacccctgctcctgcctgccgccgcctttttatcccgtcttcccctgtccgcccgggactcttttccgcagttcttgctcgttgcgttgcgtcgcgtcgaggagagcggacctttcgtttccggatcgtgcggcgcccccgacatgtgcgtggagggactggaggacgcagggaggcttgatttcggagaccagggcatcgacaagcacgccgatttcgcgatggagagagtttgtgagaacacagtgtctgttgatttcaagcagactaagttgaacaactttgttccgttcatccggtcaggggaatggtctgatataggaggtcgtgattacatggaagatgcccatgtgtgcatctctgatctggcaaagaattttggctataaagcagtggatgatgaagtgatttccttctatggggtctttgatggacatggtggcaaagatgcagcccattacgtccgtgataacttgccacgatgagccgtggcaagttatcacggacgatgctgattttcctctttggagtcttgaaaaaggtgtcaagaggtcgtttg

SEQ ID NO: 9786 - DNA, 264 bp, Setaria italica
  Peptide Sequence Number=SeqID_75760
gtggtggtggtggtggtcgctgccggcggcgtcttgctactccacggccgagaagctcatccagtgatcgtacccgtgtagttggccgcctcccgtgctcgaatcgacgatggccgcttgggatctggcggcagctaagagagggagaggagaacagaggcgggagcctcctgggcgtcgggaggatgacgacgggaacacggagaatagtggggcgctgtcgagtggaaaccgccaagcgccgccgcccgagcgccgcctcgg

SEQ ID NO: 9787 - DNA, 412 bp, Setaria italica
  Peptide Sequence Number=SeqID_75761
ggcggtggcggcagcggcatcgcgcggcggagcaggcactggcgcatcgggctgaaaaaactggcccgacggcccgcgggtcaacccggtgaccgacgtctcccgcttcgtcgatgccggctcccctcctctgctcgtagatgctcgtcgtcaacggcggagcagggcgcacgctcaggccggtcggcgcgccgccaggctggagctgggggcggttgctggatcgccggcctagtggatgagggcagccgcgtgcccgcccgtgtggttggccgcgtgcccgcccgtgtggttggccgcctcccgtgctcgaatcgacgatggccgcttgggatctggcggcagctaagagagggagaggagaacagaggcgggagcctcctgggcgtcgggaggatgacgacgggaacac

SEQ ID NO: 9788 - DNA, 432 bp, Setaria italica
  Peptide Sequence Number=SeqID_75762
attgacaacaatgacacaagccttgccttctttctcaattctctctgctctgtaacacacgccattgcttcaataacaagggcaaccacatcagagcgtcgaattgcttgaaatgcacgtttaaccgaaagagattccgttgtgctgccagcagaaataactgctgccctgcgtcggatcccagcagtatcaatgagtttgtacttctccccatctgctgtagtaaactcagtatcaatagcatcacgtgttgtcccactaactgggctcacaatagttctatcttctccaaccaaagcatttagaatactacttttccccacatttggtcttcccacaatggcaagagcaggaaccttatttttctcttcttcaactccatccaatccctcaaattttctcagctctgaacaaacaagatcaaggagatct

SEQ ID NO: 9789 - DNA, 1319 bp, Setaria italica
  Peptide Sequence Number=SeqID_75763
gtcctaaccagctgcaaagctgcctgtaactgtaacctgcccatctacaggaacaagttgcatcttaggtagaatacctagtagactaccgtaacgcccaagcatcctcgtacccaccactccactttcccttgtcttcctagttcccatataacaccatcttccggatcattcacttgcaccccccactcaattgcccctgcatcgatctcctccacactctggcatttcgatgtcgcggaaattcgtctggaacctcgaaactccactacacatctttagcatcagccacggctatactcaggtctgaacgagatctacaaaggtggctcgattaggaagccagagccatcctgcttggggtccctgggctcggcagtttgctgtctgcagatttacctcgtttatccggccgcctcctgctacgccacaataaccggatgggggtgcctgggaatccagcatctgaccggagtttcttttccatgtaacggcggtacatatcagaaaagagctttgcatcgtttacaaatagaacaaatgtcggtggacccacggcagcctgtgtcgtgtaatatacacgacctcttttgccacctcttgttcgtggtggtggtttgaatgctatagcttctctaactacttgattaagaatagaggtgccaagccttctagacctttccttctcaaccaaagcagcagcggaaattatcttttcaacactggtgccatttgtcgcagaacagtagacaataggtgcccaatcaagtatgcgaagcttttctcttacatcttgctcataatgtgtcgtactctcatggttcttgtttgggattgtatcccatttattgacaacaatgacacaagccttgccttctttctcaattctctctgcaattttatagtcctgctctgtaacacacgccattgcttcaataacaagggcaaccacatcagagcgtcgaattgcttgaaatgcacgtttaaccgaaagagattccgttgtgctgccagcagaaataactgctgccctgcgtcggatcccagcagtatcaatgagtttgtacttctccccatctgctgtagtaaactcagtatcaatagcatcacgtgttgtcccactaactgggctcacaatagttctatcttctccaaccaaagcatttagaatactacttttccccacatttggtcttcccacaatggcaagagcaggaaccttattttctcttcttcaactccatccaaaaataccctacaaaattttactacaagactactagaaacaaaacaaagaatacaaaggaagaatactacca

SEQ ID NO: 9790 - DNA, 576 bp, Setaria italica
  Peptide Sequence Number=SeqID_75764
agaacagagaaggtgctgctaaagccaacaaggctcaccaacaccagctatagattttttttttttttagagtctaacacagtctgctcattgccttccatacaagtttcactccaagtctgcaatctgtcccttccttcccacacagcttgcacttagatccattcctcctcccaagtcctaaccagctgcaaagctgcctgtaactgtaacctgcccatctacaggaacaagttgcatcttgtgcgtgcggtgatcctgtgctccgtacgcccagcatcctcgtacccaccactccactttcccttgtcttcctagttcccatataacaccatcttccggatcattcacttgcaccccccactcaattgcccctgcatcgatctcctccacactctggcatttcgatgtcgcggaaattcgtctggaacctcgaaactccactacacatctttagcatcagccacggctatactcaggtctgaacgagatctatcgaatactacctaccaacaactactaggacaatttacgaatagtacgacggaaaattacgtactaggaaacctacgaaaa

SEQ ID NO: 9791 - DNA, 949 bp, Setaria italica
  Peptide Sequence Number=SeqID_75765
agtaaatgctttgcaactgacagtctcaactgcagcacagtagtacaagccgcctgccatgagcctcgaggttttctccaaatcagcaagcaaaggcatctcatgcatgcatgctcctacaccttcctgtttaagcatttagccatttacacctcatgaatctacaatgattggagttggcatggaggcttcatccttggatacttcagccattgcatctgtgtggatattggtcatcactggcatctccttctccctccaaatcgcatgaacttcatcagtccggaatctttgtgtaaatgtcgactcctccaggggagtggttgcaccatgtgcatacgccagtaaaccagtgtatgcaatcattgccccattgtctatacaatagcggtcatcagttgcaaacagcctaccccctctttctgagcacataatcctcatcatctcttgtaaacgctcattgcaaccaacgccaccaacaataagaacgtcctttgaatcacaatgtgccatggcacgttcagtaatttcaacaagcatggcaaacagagtttcctgcagtgagtagcacaggtctgcaggtgtgcactcattgtttttaagcttttcaattgccgtagcttcaataaagctcaaaatgccactaaatgacacatccataccctttacaacataagggagatcaatgaacttctctcccttctttgcaagctgctcaatgttatacccagggctggggtcattggagagctcaaggaccctggcaaagcggtcgaggcagttcccaactgcgatatcgatagtctccccgaagatccggtacctcccttcgctgtaggcgatgacctgcgtgttccccccggagacgtagagcacgacggggtccacggcccccgtgacggcacgccccatctcgatgtgcgcgacgcagtggttgaccgccacgagc

SEQ ID NO: 9792 - DNA, 455 bp, Setaria italica
  misc_feature (418)..(418): n is a, c, g, or t
  Peptide Sequence Number=SeqID_75766
ctcattcatcaagtaggaaaactgcgcctagcaaaaactgtggctgaaggtgttgacatcattgcaactagctgcattacagtaaacgggcttgtcatatttcaggagatccagaagcagaaaacaagataaaaaataaatacaatgttctaggggtattgagcagcagtacttgagataggccgaggacccaaccacataggaacatagacttgtgaccactttcacaataacatgttatgattctttctgtgacagtctcctactatatttacaaaaaaaatgaagagaacagggatgttgataccttagagtagtagtcaattgcagtcttaaaatccttgtctctaaatgcgatgtcaccaaccttctttgtgttcagcatctcttgaacttgctgggtccattcttgaaaggntaacttcaatttttaacattgctaccagacaaatagg

SEQ ID NO: 9793 - DNA, 2118 bp, Setaria italica
  Peptide Sequence Number=SeqID_75767
tggtagaattgaatggaattctgatggctctagtttattctccttagctaatcacaaggtacccgcctttttgcacaccactcatgtcctctggggcccaaagattccaatggaaacgaaaaggagaagaaattgttagaaagcatccccttaattacaacaatcttctctccagaggagcactgaaattgcaattatcagcagatcctcttgcaatcactcgcgatacaaagcgcaactcgagagaaaatatgcattgcatgctcctgcctttatcttcccttccaggccacaacattgccactatcaacattcgggtggagattgcacgaagcacgataaaacagtgcatttcaatcccactcctagcagttcaacagatgtcccagtgaacaatttggaggacactcaccattgtacctttttctatcaaaaggcaatggtatggggaacccgcaaatttgacccctaactgcgccagctgttttgcttcttggcctcaaatgtggctccatcgttgagcatgtcttgtgcatcagtttccatgccaagctttgatagagcaagagcttgaaggtagaaagctgtaggccattcctgcatgcagacctgggcctgcatggcgtcccggagggcaagttctgcttgctcattcatcaagtaggaaaaactgcgcctagcaaaaactgtggctgaaggtgttgacatcattgcaactagcttagagtagtagtcaattgcagtcttaaaatccttgtctctaaatgcgatgtcaccaaccttctttgtgttcagcatctcttgaacttgctgggtccattcttgaaaggataactcgttttctgcaccctcatcatctttataacctgttttaagcaatatatcatgcaccgctgtaagatccaaaacagagcaggccttcccaagtggagaaagaatagctggcaatactgatgtggcttttgtaatacccattaagacatgggatgctacctccttttgcttctgaagaggaccaacagaagacaagagatactttatgtttggtctatccctagcttcaaattgcaaacactttgatgcaagatcaaccaatttcgaagcatcctcattagcatactgcccttctaaggaggaatccatcagcaacagtatattcttcccccttatcaaatccagtgcatgactcggaggaatgtgcttcccgctcaaaagatccaacaggacagttccatagctatatatcacactctcagcaattactctgccagttcgtagaaactctggtggagtgtaagccaggttggtactataactttttccatcacggctattcttcatcagtccaaaactagacaagcgaggatcaccttcctcatcaaaaagtactctgtaagcattcaagtcatgatagattttccggttctctgcattgcaatggtcgagtgcttgtgcgatgaaatatgctaccctcaaccgcatttcccatggcaatggctgcttatcccagtggaagaggtgcttggagagggtgtcgtttggcatgtactcggcgacgagcagcctctcgtcaccctcggcgcagcagccaatgaggttgacgaggcgcttgtgccgcaccttgcccacgcccgccgcctccgcgacgaactgctgcgggtcgggccacgagacgcgagagaatcgcttgacggcgatgagacggccaccgtcgaggcggccccggtagacgacgttgggcgccttctcccgctctcggagacgatgaggtcggcgctgaaccccttggtggcggcgcgcagctcggccagcgcgaactccctgaataccggcaccgcgcgcttcgccgccttccttgtcgtcgccggcgtcgccgccatccgccccgccgttcgccgcctcgggatctgccgggttgtcggcggggagcgcggcggcgtcgttgggcggcaggggccccgccaccttggactggaagcaccccatgggcggagtggagatctaggcgttgtggtcggtgggaatgcgagtgcgggagcgtgcgctcaactcgactccagtgcggaggagtgcggagtggagcagagcgagctcgtgaaggtgtggggggggagcagg

SEQ ID NO: 9794 - DNA, 384 bp, Setaria italica
  Peptide Sequence Number=SeqID_75768
tttctgcagcacggagcacactgatattggcaaagctccttgcaggcccatctggtagatgagaaaatgctgacactgccgtgttagactgggggtgacctctgtatggcaaagggagattgttgtcagcaccaaaagcagccactgcctcgccacaaagtatcatcatttcagatacaagctgcattgccggattggcttggtcttcaacatataaattaatattcggttcaggatcatcaggatttgacaccttgatacgtggctctatcatcgcagtgtctattgaaccctggctacgacgccactgtgcacgaatggaagcagcttcttgaagaatccttagttcttcctcttcttccaggttcatgtaaagcaattcag

SEQ ID NO: 9795 - DNA, 1723 bp, Setaria italica
  Peptide Sequence Number=SeqID_75769
taagctggagtgggcattggctttggtgccatggtatctggagtgtacattgccgaaatctccccagctggtgcccgtgggactctcacatcccttcctgagatatgcatcaactttgggatcctcctaggctatgtttccaattatgccttttcaggcctttctgagcacatcaattggagggttatgctcggcgtcggtatccttccatctgtcttcattggttttgcacttttcgtgatcccagagtcccctaggtggttgatgatggagaagagagtttcagaagcaagagcagtgctgctacagataagtgagtctgaagctgaagttgaagaacggctgtctgagatcgaggaagctgcaggtcttatgaaatcgatgaaatctgaggagaaggaagtgtggagagagcttctgaacccttctcccgccgttcgtcggatgctgtatgctggctgtggtattcaattgttccaacaaattactgggattgatgctactgtctattacagcccaacaattttcaaggatgctgggatcaagtctgatcaggagcttcttgctgcgactgttgctgtgggtttcaccaagacagtgttcatcttggttgcaattttcctcattgataaagttggaaggaagccacttctttatgtcagcaccattggcatgactgcatgcttgtttctcttgggggtggcacttacattgcaaaagcatgccatggggcttatgtctccacgtgttgggatcgatctagcaatttttgcagtttgtgggaatgttgcattcttttcaattggcatgggaccaatatgttgggtcttgtcatcagaggtatttcctttaagattacgagctcaaggatcagcacttggtcaagtaggcggtagagtgagcagtggtttggtttccatgtcattcctttctatggcccgtgctatatctgtggcaggaatgttcttcgtcttcgctgcaatatcaagtatctctgtactgtttgtgtacttttgtgtgccagagacaaaagggaaaacactggagcagattgaaatgatgtttgaaagtggggacgaatggagaggaggtgaaattgagcttgaggatacacagcatttaataccgagtgataagaagtctgtacctcttggttgatatccttattagcaagtctgaagcttcatgtctcaatgacaagccaacctgatccggctctgctggattcgactatcagtttaaaaaatgatcaggctgcagtggactacaaccgattttgaggatacagaagggcattggtactttaataggcaaaggtggcagtagattgattatgctgttagtctgaaagttccatcatatttttatgtcctaaatgggagatgatcgacatgtatgatgtttataagttacaactggtgtatcttcaacaaaaaaatatacttgctaaaaaatctttctacagatcccattcttttaacactacaatagagtgtgagttgatatttgcagaagtcagaagtgtatgcgttgtattcgatactccaacccattcaaaaccatgacatgtactatacatcttcagagtgagtgtacgagtaaacatcggtgtggttccggggttttatttatttttgaaaaaaacatcaatattggataaatgtacttgtactcttgtcagatcttcaggtttaccgtaccatttcctgacaattctgctttc

SEQ ID NO: 9796 - DNA, 836 bp, Setaria italica
  Peptide Sequence Number=SeqID_75770
ttttttttggtaatagaacttggagtgtatttacaagcaaccgataaattatcagatgcatatcttgttattccgtcccaacaaaccaaaggaaaaaagaacagaaaaaatatggtcttgcactagggctcaatgcctaactgagctccctcttatgcaacacagctctctctctctctctctctagtgtagactatagcggaacagcagtggccatcggccacaaatatcttttggagggaaactctcctgcactaaatgtttgcactcaaacccctctaggacctctcaaatcacgtaatccgaccacccctgctccatggtgaccccgggttgctcctccggccgccgctgcggcaccgccttcttcccgatcgccttcgcggggttcccgacggccgtggttccctccggcacgtcgcggagcacgaccgcgcccgctccgatcttggccccggctccaatgtgcacattgccgagcacgctggcgccggcgccgatcagcaccccgtccccgaccttggggtgccggtcgccggactccttcccggtgccgccgagggtgacgccgtgcaggatggagacgtcgttgccgacgacggccgtctcgccgatgacgacgcccgtggcgtggtcgagcaggatgccgcagccaatgcgcgcgccggggtggatgtcgacgccgaacacctcggaggcgcggctctggaggaggagcgccggcgcggcgcggccgtcggcccacagcgcgtgcgcggcgcggtgcgcctggagggcgaggaagcccttgtagtagaggaagcagtgcaccatccggtcgcatgccgcgtcgcggt

SEQ ID NO: 9797 - DNA, 254 bp, Setaria italica
  Peptide Sequence Number=SeqID_75771
agtatttaagatcctgcaaatcacggatgtcatgggcctgggcccgtggttatgacgtgggctcagtgccccgaaaattcattcaaagcagcattcagcccgggatgccatgttagtagcggttacgtggtatgcttcacgattcgtgctggctagctcctggcgctcttcagccgtccaattcgcccgcctcgccttcccgctgctccctccgtcgtcttcctccgaccatttaagcttccgcttgttcggct

SEQ ID NO: 9798 - DNA, 1233 bp, Setaria italica
  misc_feature (1)..(12): n is a, c, g, or t
  misc_feature (1215)..(1215): n is a, c, g, or t
  Peptide Sequence Number=SeqID_75772
nnnnnnnnnnnnagtgtgagtagttttttttttgctataaaagctttcattcattcatgtagacacataacaacatcagttagatagcttcatcaaacatcactagaaagatatcacgatggcattgtttcatacaggtgcaagtccagaatgtcacattaaatgctatcacactagctagatactacattacacatcatactaaacatagctcatgttggcatccatcagcagttcaacactgtaatcggcttagctttctacctgatgatcgatattcggaactctctcttttgtgagtgccacaaacacatgcttcacgatccaacggaccagagagttatctggtgacttgtagtaccatccattcacaaacgcggccaatattccctgtgctcccaggacaaacacaagcatggcgttcatgccaatcgactccaggaacaggaatggagtcctcaggcccagacatcaattagtatatagaaagctgagagaacgattcctgcggccccgccagtaaagcagacataactgaagctgtagagctgcttgttgattgggatggccttcgtgaagtgtagaagaatgccaagcacaaggagtgaaaagcccatcagaagccagtgcttcagtctccccttgtgagtcttgaaatggattagaacatggccataatgtatcccgattgtccctgatagtattgatgatattgaccttaacaagccttctggttcaaaaggcgcaaggcaccacgctggtgcatcagctcgcaacggacccatgttcggtgagctgaatgtgcagtccttggagaagcacaccccagaagagcattttcagtgttctgagggcaatcttcgtcacagcagcaccgatattgatattgggaactctcttcaatgcgaaggcgattgcgacaccaactatgaagaggaagaatggcatgacaaagtctgccagagtgcacccgttccacggtgagtggtcaatccgctcataagctccatcgccatcatccaccagtatcatgtcttcattcagatataaagataatgcaattttcagctttttctttcatctccatattatctcatctctcttacaaacatatttgctgtataaattcccaattaccatgcataagaaaggaaaatggtacatcgcattacctttatgttggtccacacttcattatttcttttcagcatccanaagcctccagtcagcaca

SEQ ID NO: 9799 - DNA, 447 bp, Setaria italica
  Peptide Sequence Number=SeqID_75773
ggcgccacggcggcggcagcggcggggttcatgtacgccgccgccgccgtcccggggtgcggctggatgtgcgggtgcagccccggcgtgccgcgggcgaagcgcgcgagctcggcgaggtcggccggggtcatgtaggggtggtggtggtgcccgcgcgcgaaggggtcgtgctggagcagcgtgggcaggaggggcggcaccatgtccagcgtgtacgggtggtggtgcggccgcgagtgcgcgttgttggacgggtacttcttggcgcccgcgctcttggcgaagacccggcacaccacccactcgtccttgttagatttgggggctgatttggagtgcaggcgatactcgtgcatgacccagttggtcttctcgccccgaggagctcttcctttgtagaacaccagggttttcttcatccctactagctctggcgtggctggt

SEQ ID NO: 9800 - DNA, 693 bp, Setaria italica
  Peptide Sequence Number=SeqID_75774
aggggaaaataggggaaatgtctccatagatttatcactggagcaaagaaatctactgctgttgcaagagaccttgcttcttccactcgaagtattgctctcctttttaccgctgttcttctggcctggcattgtggtgatacttacagggatatctgtaacttggtgaacagcatcacatccttttgtacatagcttaccacaatcaggcagttttgaattcttcttggtcctagctcttgctgactttctcttcttaatttctgcaccattgacaagctgagcggcattactttcatgatccaatttatcaaatgaaccaccaagattcatgtcctcaacatcatctgtctctgtgatttgatctagaattttcttctaatttacccgtttttttcagcggagtagatcgcagctcaggggagcaaggtctttgactccattcaaagatttcactgtcaaatatctctgaaacctcagctttgctattaggagtcacattattaggtatttcatcatcagaatccatgatatcgctgaaggtaggtgcattgtgacacaagggtgtgtccaatgatagtggttcacttaaacttccagcagtgccaccttcttcttgctcttctcccctcagccaaaaaaatggtgacaatgaagggctttctggtctatcagaattcaatgttttatttt

SEQ ID NO: 9801 - DNA, 366 bp, Setaria italica
  Peptide Sequence Number=SeqID_75775
gaggtgagaccaggattgtttcttgcatttcaagtcacacagatccagatgccacttcaaagttgcaactaacctgttttatgaattaactgtggcagaagaagaagaaatttttttgcttctgaagagaaatgccgtgcaggttacctgcccaccgcttaatagtatgtattttggtgtggtagagcttgtaagtaattttccttgcaatccatggttgcagccccggcttgaaagattccattatctctgtacatggcttttcaagcgcgtctctgcagcctgtttctgtacccttctcaagatccatatccatatagaaacaggctgcagagacgcgcttgaaaagccatgtacagagataat

SEQ ID NO: 9802 - DNA, 333 bp, Setaria italica
  Peptide Sequence Number=SeqID_75776
tgctgctgtccgtcgtgtggacgcattagaggctgaactaattgtgactaagaaggccttgtatgatgctcttatgaagcaggaggaattgcttgcatatattgacagacaagagtttgccaggtttgagaagaagaagaaatttttttgcttctgaagagaaatgccgtgcagccccggcttgaaagattccattatctctgtacatggcttttcaagcgcgtctctgcagcctgtttctgtacccttctcaagatccatatccatatagaaacagtcgtcttatgcatcattcggtggattctagcagccgctctactccttagtagacta

SEQ ID NO: 9803 - DNA, 1992 bp, Setaria italica
  Peptide Sequence Number=SeqID_75777
aagaataggcgaaaaagcgacattcgaggaaattctatatctattgaagatgtgagagactttgaggagctacaaacagttgacgcatttcgccaatcactcatattagatgagatgctacctgcaaagcatgatgactaccatatgttgctacgatttttgaaggcaaggaagtttgacattgagaaagcaaaacacatgtggggagacatgcttcaatggaggagcgagttcggtgctgatactataattgaggactttgagtatacagaattagatgaagttctgcagtactaccctcatggctatcatggtgttgacaaagaaggaaggcctgtatacattgaaaggcttggaaaagttgacccaaacaaactcatgcatgtaactactatggaccgttatgtcaagtaccatgtgaaggaatttgaaaagagtttcttaatcaagttcccagcttgttcaattgctgcaaagaggcacattgattcaagtacaacaattctagatgttcaagccgtgagtctaaaaaatttcagcaagacagcacgggatttgatgaccagactgcaaaatatcgacaatgataactacccagagacattgtatagaatgttcatcgtcaatgccggtccaggatttaggattctctggagcactgttaagtctttccttgacccaaagacaacttcaaagatacaagtccttggagctaagtttcagaccaagttacttgaaataattaatgcaaatcaactgccagagtttcttggtggctcttgtacctgttcagagcttggaggatgccttaaaggtgaaaaggggccctggacagacccaaacatattgaagatggtcatcagtggcaaagcttgctgtaagaggcaaatagtagcagtttccaatgatgatgagaaaataattgcctacgggaaactaaaatactctgctaaaaggggcagtgacacatctactgctgaatctggttctgaagctgatgacattacatctcctaaggcaataagaacttatggtaaaaatcctatgctgacaccagttcgcgaagaacaggcaaaactgatgaaggctgcaaacgtttctgctggttattctgagtacgatgtatgtgtaccaatgattgacaaagttgtcgatgggacatacttctctgacaacacaaaatgctctgaaagtcgtcatgctcgagtaattgcatggcttgtggcatttgttatgatggtgaccacacttttccgtgcattctttagtcgcattccgaaaaacacactggacaaaagttcggaagtggatgacaacctttcggcttattcactggactactcaacaactaaagaagaattccgcccaccttcaccagctcctgaattcaccgaggcagacattctttcatctgtcctgaagagactcgcagagctcgaagagaaaatcgatgttctccagtcaaaaccctcggaaatgccttctgagaaagaggagctgcttaatgctgctgtccgtcgtgtggacgcattagaggctgaactaattgtgactaagaaggccttgtatgatgctcttatgaagcaggaggaattgcttgcatatattgacagacaagagtttgccaggtttgagaagaagaagaaattttttttgcttctgaagagaaatgccgtgcaggttacctgcccaccgcttaatagtatgtattttggtgtggtagagcttgtaagtaattttccttgcaatccatggttgcagccccggcttgaaagattccattatctctgtacatggcttttcaagcgcgtctctgcagcctgtttctgtacccttctcaagatccatatccatatagaaacagtcgtcttatgcatcattcggtggattctagcagccgctccccttgtgctttggagaagcttcatccaatgcctccaattaggagaagggttattttacttctaacaagtaaatacgcatgtacgttgc

SEQ ID NO: 9804 - DNA, 341 bp, Setaria italica
  Peptide Sequence Number=SeqID_75778
tggtcacgccgaccctgcctcggataattgaggtccacgccacacaagcttggccgatttttcgtctggacatttttgggaacacagatgctgcctcagtgcctctctgtcagggatgcaggatgatggacctggacgctaatccggtctccggcgcgacgcgaggccgaggacgagttccagggtcagattcaccctccaaaacgacaggggtgttctcactgatccgatgacaacaggcactgcaagtggagactcctaccccgcactcgcactcgcactcgcagatgcgcattttccgcgaggatatgcggcaaacatgcagcgtctgaatttggagt

SEQ ID NO: 9805 - DNA, 2262 bp, Setaria italica
  Peptide Sequence Number=SeqID_75779
agactaccaagtaattactacttaccaaaccaaataccaagaaactaactctatgcacaaccttttccagcagtttaccagcggcagtggtgaccatgattaacatcccatgattacttgctgatcattacaacgatgctcagttaaattttactggacctcaaaatgggctgaacagaaatccccctctcgctatgcaaccgagcatatataaataataaacacaggcaaccagggtgctcaacacgatactctgcggtcgctcggcagctacattaacagtaccatagttagacggtatatctggctgtttaagcagcagcaataagggctactaatcaactgcgtagtactttcagacttgcttgtagaacaggatatatgcttggtcatgcaagacctcgttctggcccacaggtgtgacggcatcatcgtcaaaccgaagccactgaccgttggcattctttgaatgagcagtgtagtgccccctgtatgggtccttcccatgatgagtgatggtcgcaacaagctcatattttcttccctctgatgacggtgagctcagcagatcacgattaaggaccagttggagagggaaatggagtggcttataaactttagtgctcccatgatttccataactgaacctcttcaagtgcagtatcattatctttgaaagcgtgtgtatcttgaatgattttctagccgtcaccaaaccagcctttccagcagctgttctgtatccttccaaagactcaggagtagagaaaagattaagtgcatcgttaagtgtctgaactgcatctgggaatatatcgaggtggagcagtaggtagggctgaacagtagccgatgctttgttacctgcagctttcacaacactctgtaactgccccccaaaaatagcacttagttcagagggaacgaaactctgagttctaactattgcagatttgttctttcgtccaacagtctcccaagcatcatcatcagcagaagaaacaaccataccctcctttgcatttgaaacattgccattaagcttcagcagttcgtcatgcattctattcatggcaaaacttaagaactcttgagcatcttcttgccttggccgagcagatattccagccggcacatctggtgtaaagtttttgagaacagcatcaaacatggcaggattaagtggttttgcagcaactgtaacagctttctcatttttcttcataactgactcatcaagcacatcaaattgagagatgaactcaacaaatgcattgagagttgggtagccaaccttaggtatacttcggttcctcaaatcctgtaaaaggtggacaaaaggcgagcatgaaagcaacgcctgcaaagttgcattcaggaagcaaatatttcctgtgttcctcaaaccatgaggaagcaagagcatgttctgagaggctttcttgtttaagcttgtgaccgcctcgtctgctggagttgcaacaataggtgtatcaacaattgggcttccattttcagttatttccttttccttatttaactttttgctttgagtggatttgatgccatccttgtccacctctgacactgaatgtggtgctgcattgctgatgtttctggcaggcacaactggaggaacaacagcctccgtcttcttcacattctctaatacaccattggtaggagaaacattcacaggggggcatccattagccagaactggtccaccatttggaaagctagatcctgcagcttcctttttattgctgcatgcattctcccttgtaatggtactgctctgagcatctgctgattttgctggaagaacaacacctttagaaataggactcgatgctttctgtaaactcagcactgaaaagttcagtgaaccaaactggatctctggtagttcccatgatctgttcacacttttagtcggacttttgagaggctgaccctggaacaacttcgtctcgtcctccgtgaaggacccaaacagcaacatcttgtcgccgctgccgctgccgccgccactcatctcgactgcggtggggaggccaatctctgtgcgccggaagtggccgctcgggaaacctcttgggagctcttctgcgaccggggccagaggaagccgaggtcgcaggtgggagacatcaaaggcggcggcgggcggcgccgagtcggggtggccgtccgcgagaccagccgcaagggtcggttgtttccctgggaggcggtcgctggtccgcgcgggcggggctg

SEQ ID NO: 9806 - DNA, 458 bp, Setaria italica
  Peptide Sequence Number=SeqID_75780
ttgggggtaagtcttggattcgctgatctaacacgggaacatgaggccttccagtaacacaaatcaaggtcctttctgcttgcttactccaccaaccacatcagagttggttcatctccctcttgacccttttctcagtgcaccacgtagtgttgtctcactttgttataaagcccatgcaggcccagaaacttgtcacagttattcatcagctgcagaggaacaagcagaacttggccagaattcgggatggccacaggcgcgctgtgcttcagggcgtttgccctctcgatggcctgccttctccttgctgtgccgctgctagtggctcaagcccttcaaagctgagcctggagtactactccaagacatgcccgaatgtggagcacgtcgtccgtacggagatggagtgcgcagtgcgtgcagatacccggcaatgctgccctgatgcttcgcct

SEQ ID NO: 9807 - DNA, 820 bp, Setaria italica
  Peptide Sequence Number=SeqID_75781
ccgaccaggagatgtggtccagcatcgccggctactcgacggctgacaccgtgaacaagtactgggctgaccccgctgcattcttcaagcagttctccgactccatggtgaagatgggcaacatcaccaaccctgccggcagacctctttcagcttgctgaggtatgtctcggatgacagaatctatggcgactttgagatgacgtccaagtacaatccgtcatccgagacatacctcagcaagctgaaagaggtctgcccccaggacagcggtgacgacaacatcagcgccatggacagtcacacctccgcaatctttgacaatgcctactacgagacgctcatcaagggcgaaggcctcctcaactccgaccaggagatgtggtccagcatcgccggctactcgacggctgacaccgtgaacaagtactgggctgaccccgctgcattcttcaagcagttctccgactccatggtgaagatgggcaacatcaccaaccctgccggcggcgaggtcaggaagaactgcagatttgtcaacacataggctggtgaaaagttgaagaaactcgttgcctgcacctgttcttttgatggttggtggtggtttggaaaataagaaaactctgctgaggctattatactgtagcacatatgttgttgtcactctgtaaaacatgttttgccacttgaactacgaagatacacatcttggtcttgtatttctgggttgtttgtaaccttttcgcgtgcacgtcaccagcggattctgataagattttaccaccttttgcactctgaaaaaatacagcctacaaga

SEQ ID NO: 9808 - DNA, 1182 bp, Setaria italica
  Peptide Sequence Number=SeqID_75782
caagaagaatagtttgatgcaactgagatgcactgatgatttccaagattggtgaacccatagccaccaaacactaatgcagtgttgtctcactttgttataaagcccatgcaggcccagaaacttgtcacagttattcatcagctgcagaggaacaagcagaacttggccagaattcgggatggccacaggcgcgctgtgcttcagggcgtttgccctctcgatggcctgccttctccttgctgtgccgctgctagtggctcaagacccttcaaagctgagcctggagtactactccaagacatgcccgaatgtggagcacgtcgtccgtacggagatggagtgcgcagtgcgtgcagatacccgcaatgctgccctgatgcttcgcctacatttccatgactgcttcgtgcagggatgtgatggatcagtgctgcttgatgacaccgcgaccatgatcggggagaagcaggcagaccagaacgtcaattcgctgaaaggatttgagctggtcgacaagatcaaggagaagctggaagctgagtgccctggaactgtttcttgcgcagacttgctcgccattgcagctagggacgcggttgtgctggtaggtgggccttactgggacgtcccagtaggaagattggactccaagaaggcaagcctggacctagcaaacagtgacatccccacggctcagcagggccttgtcaccctcatcgccaagttctggcagaaaggccttgatgccaccgacatggtggcccttgttggctcccacacgatcggatttgccaggtgcgagaatttccgagacagaatctatggcgactttgagatgacgtccaagtacaatccgtcatccgagacatacctcagcaagctgaaagaggtctgcccccaggacagcggtgacgacaacatcagcgccatggacagtcacacctccgcaatctttgacaatgcctactacgagacgctcatcaagggcgaaggcctcctcaactccgaccaggagatgtggtccagcatcgccggctactcgacggctgacaccgtgaacaagtactgggctgaccccgctgcattcttcaagtcttacttcgtacggtcttgtacttaccgtttgttaactttaagttttacttttgggtttcttttgttttaccccgttttctttta

SEQ ID NO: 9809 - DNA, 1283 bp, Setaria italica
  misc_feature (978)..(978): n is a, c, g, or t
  Peptide Sequence Number=SeqID_75783
ttttgtgccaggggttgccactccccttagccgttccgcttttggaacctcgaatgtgaggtagcaagtggagatacacaggaaaagccccaaagtgccctgccaggtcactagatagtttttttgctgcccttctgatctgcaaatatctaacgtgatgtgtagcggggaagtcaagttgctaaggatggcctcacttatttcagctgccaggatatttatttgccgccggacaatggatatgttttttcggctggctcattcgatgaatccatgagtctataactcttcttttttgctcggggagctatcctgtgtctttgccttgaagtttcgtgcgttgtgttcctcttttttctagaccaagttctgtgttactactggttaaccctgttgcaaggttaaacttgtctccatgattttccctttgatctgacttcatctcctgctctaagcgagttgtcatacagtattttcttgaactggagaggtacttgattataggtattgtcaatatccaactaatagctaaaatatatcttgtgttgataaattgagtttcttgctttttttaaaaaaaaagaattttcttgcatttttgtcaagttaatttgtaccttaactatagtttagactaattaaacttattgatttctatcagtattgctatttttatcttttttccccttttatcttacaagtgtaaatttgttgtagcttaacttatgatggtatatgaaatttctttatttgcatttatccctttggttgataggtatttaaatgtttaaccaaacctttccatagaattttcatcctagtgactattcttacctagcagcacaaaaaactacaccactcaagttttctttttctttttctttttttgaaggggcatagcaccttatattgtgaatcaatattcttccctactggtgctagttctatttgttccaccaaaaagcacaattttttccncttgtcaaaaccatctttattccattgcatgagtgcgtgtatgcacagcagttccgtagaggtggtgacaggtaactaagcaactgcagagtgggtccgcaactcaggaatacttgcagatggtgactactaaagtaaattcatggggaagctgatctaacacgggaacatgaggccttccagtaacacaaatcaaggaggcatgcacgcaagaagaatagtttgatgcaactgagatgcactgatgattttccaagattggtgaacccatagccaccaaacactaatgcagggtttgacccatt

SEQ ID NO: 9810 - DNA, 401 bp, Setaria italica
  misc_feature (380)..(401): n is a, c, g, or t
  Peptide Sequence Number=SeqID_75784
ggacgaacgaggcggcactcagtcgcgatagtgacgcggcgtgcgggggcttcttcgccgacctgcagccgccgtcgctgccgtggtggaccgagcccacggagcactgggcctaagccggccgagccgccgagccgggccgaggcgagcggggggaataaagaaactcggcagggtgagggcgtttctgcaaattttgtaaaatggaagtgtacctagtccttttttgtcatttctcccgaaccggcagccggacagcgtcgtcactgcctctgtagtcctactagtcctagttccagtaccacggctacgtcgccggtagccttgtcgcttttggatctacaaaaaaaaaaaaaaaaaactaaaaggactgccaaggnnnnnnnnnnnnnnnnnnnnnn

SEQ ID NO: 9811 - DNA, 1287 bp, Setaria italica
  Peptide Sequence Number=SeqID_75785
ggtatagcaacaagcgaaatgagacatgcgctcttgcaaaactgaataatacaaactggtaaggagaaaaatctccaaagcaatctaatttatcaaaaaagaaaagggaatcagaatgaaacaaatacatggaatttacaccaagtacatccgtaggaaaaaaaatacaagaccaagacaaacttacatcaattttgtacactacagttgtatggaatgcatagctccagcctcgtggcatcagcagataagcatcagaagaacggcgacaaaatcaacacagattctagcattagaatatcctcagtaacaagatattcagatcgccttcatcaggaggtgcagggcaattggagtctccatgccaatcaagtgaccaagtgttaaatcagtggggataaggtgtaaaaaagaatatctcccaagtccaaccaaaaagctaatctaactaccaattcttccacattaagaacaaattttcatttgctggaggagacacgactgtaatactcagtgaagtctagacggaagagaaggaacttcaagtcaacatgctgttgcatcggcaattgagtaataaatgcatcaagagaagctgtataatcttttgcaatgctatccagatcttcacccattttccggaaaagttccccagctagttggatcatggcttttctgccaccatcaagccatgaacctgtttccttagattttgactttggtttacccttgccccttagctgcaactcatatatccgttcaaaccatcgatcagcatggcttcgaaactgtaagatgatgtcaaacaattcaaaaagatttctcagaagtccttgggatcgttcaccaaggagggccttctccagtatcgagttaagatacttgtcgtgtgccaaaagaaggtcatctaaatcctttgctgcatccatttcatcagagaaacgagcccatgaaacctccaggacctcaaacataatgtagtactggaaattggtaacaaagtgattcatctcattgaacagaacttggcatttacgaagaactgaaacaaactgagccctgatgctcgttccttccttgtaaaatggagaagaaacaatgcagttaggcttcattgtcttccatactccagtcagggagtgatccacacgcttgagcttccacaagaagttgaaaaccttaagatacatcttcataactgaagctgtgaacactgtatctaggggcaccctagcatcatactccaacgagaagacatccccaaccacgatcaccatctccatgatc

SEQ ID NO: 9812 - DNA, 402 bp, Setaria italica
  Peptide Sequence Number=SeqID_75786
cttttgcagaccatctacaactctaaagagagacgagtctagaaccttccggggcaccacaccattgaagtgatggaccgcgtggcgaggctggtgtcggagcggacggtggtggtgttcacggtgagcaactgcagctggtgcaacgtcgtgacgtcgctgctggacagcctgggcgtgcacgccgccgtgcacgatctggacagggacccccggggccgggagatggagcgggaactcgccaggaggctcggcggcggcgccgggcgcggtggcagcacaccgaccgtgccggcggtgttcgtgggcggcgacctcgtcggcgggattaacagggtcctggcgctgcacctcagcgacgagctcgtgcgcatgctcaggaacgccggcgcgatctgccca

SEQ ID NO: 9813 - DNA, 2237 bp, Setaria italica
  misc_feature (1)..(31): n is a, c, g, or t
  Peptide Sequence Number=SeqID_75787
nnnnnnnnnnnnnnnnnnnnnnnnnnnnnnnaaaacaatccgattgtaatgttctcagtgaattgtatatctcttttgcaagatcaaaaactcaaagtagtaatgtaccaaagctacaaatatacatcagcaatttctgtctcgatttatgtcaaaattggcagtcggagcttgagtaccagttacatgcagaaatttggagaccacaaaagcatattgatttgcgctaccacagacaacgcttggggccacaactaaacttctaaggttggcctaattttgcaacctgacgacgaccaaaagagacatcaggctccagatgtgaatgacctacctcttatgctatccttattgtccaatcgtccgcaatgcgaacgttgggtctccgaattgttggtgcagccgggctggaaccactccttaaactaactggccctgattcaatttccacttcttggtttccaggctcaataatagccttctttgctcccgatcgtaagccaaggattataattctttcaatcacacattcacttgtaaatttcttcttgcccaaattatcaggtgcaatgttcaatgaagttagcttattgtcggcaaatacaaaacggcgatggatgaatgccccatgctggtaatcataacttttcccatcatccacataaagttcgccttcggcagcatttgagctattgagggctatcaccagggtgtatggatcgttcaccatctgagtagaactgcgcctgaatctatcctttcttggaacaattgtaccgcccctttggaagctaggaatactatcttcaagaacttgtagcttgtgtgacatgcttcccttgtatggagatccgtttcgcaagtcataccatgactccttcccaggaaggtacaccgacactgatttctggccctcttcatatattccttgagctaaaaggcttggcccgaccataaaagcctcaccattgttatatgtttctttgtcatcagggaattctaaccacaaaggacgcatgacaggaattccagttacactagcctctctgaacaacgtgtagaagtagggcaacaatgaatatcgcacatgtattgcctcccttatgatggcagttcttcgctctccgaataaccatggttcgcgtctcttggtgtcatgatgagcatggcccctaaagaaaggatagaaggctcctacttggtaccaacgcaccaataggtcaggttctggatttccaaagaatccaccaacatcagcaccagaaaagggcaagccagtaagaccaagagttaagaccattggaatagaagatttcaggtgatcccagtctgcagagttatcgcctgtccaaactgcaccataccgttgacttccagcaaagaaagcccttgacaaaacgaagggtctgtctttcccttcgcctcgcttgagaagcccatctgccgtagccatatggaagtagtacccatatgcattgtgcaattctcggtgttcaacatctccatagtgtatcacatccctaggcatggtgacctcagggccattgaagacggatggttcattcatatcattccaaatgtacagtgttggagttgatcccttgtagttttcataggagaacttgtcagcccaccactcacgtatctcagggttcaacatgtcagggtaggatgatgatccaggccaacaccaaccatcatagtcattcccatccgcatctttcacatagtaccccttctctgttgcctcctggtggagatgaaacgaattgtcccgtttgatatggggatccacgatggtgaccatcttcctccccttacctgctatctttcgctgcatctcctctgggttggggaatgctgaatggtcccatgtaaaataccgcttgccatcagtatgctcaatgtcaagccagagcacatcatatggaatatcatgctcatcaaatccagcatccactccatcaacatctgcctcatcacggtagttccaccggcattggtgatacgctgtagcaaactgctgtggcattgcgggtgtgcctgtcacacttatgtactgcttgacgacatccttgggctcagaaccaacaaagaagaacgcatcaatgacaccagcctcagccatccacagagtgtcgatccgcccggtctccagggtagtggccccatcccatcctggtgcaagcacatcgatctgcatctcctctccgcagcgttgagccagaagaaaacca

SEQ ID NO: 9814 - DNA, 1073 bp, Setaria italica
  Peptide Sequence Number=SeqID_75788
gcggcgcgccggggcggtgcggtgcgcggcgacggcgccggcaccgatgggggagaagacggagtaccgggacgggccgctggagcgcgcgttcatggggctgttcgcgcgcaagatggagaagtacgcgacgaagaagaagcagcagcagcagcagcagacggagttggagaagaagaagaaggcggtgtgggagtgggactacgagagcttcgtggacgtgtcgcggcgcgtgatggtggggcggacgcgcgcgcagcagcaggaggccgtccgcgaggtgctcctctccatgctcccgcccggcgcccccgagcagttccggaagctcttcccgccgacgaggtgggcgtgcgagttcaacgccgcgctcaccgtgcccttcttccactggctcgtcggaccctccgaggtcatcgaggtcgaggtcgacggcgtcaagcagaagagcggggtcctcatcaagaaatgcaggtacctggagaacagcgggtgcgtcgggatgtgcgtcaacatgtgcaagatcccgacgcaggacttcttcaccaacgagtttgggctccctctcaccatgaatccaaatttcgaagacatgagctgcgagatgatttacggtcaggtgccacctcccttggaagaggatccagtgtcaaagcaaccttgctatccaaacctctgttccatgtcgacgccttctgccccagtctgccccaaacttcagacataggcatcgccgagttgagttcaggttcagtttcgtcagctaaacctttagagaaaccacagttgaaacctcatatagtacatagtagcagaccgttcctaggaaacctttggcttgagacgaccgagaaaacttgcacatgaacatcggcttggtgcggcagcaacattgttttctatacagagtgtacatagtctagcttataactacagttacagttacagagttgttctgattctgaactagtacagagcagatattattatatatactgtgtgtgtgtaagtactagaaaacatcgatcaacactcgtattgcttgttcctgataacaaaaaaaaaaaaaaaaa

SEQ ID NO: 9815 - DNA, 488 bp, Setaria italica
  Peptide Sequence Number=SeqID_75789
taccggaagggacaacgtgacggaggcgctggacgggttcagcttcgtgtccgtgagcgaggtggccgagcgcggcggcgcgctctgggtcggctccgtcgacacgccgtacgccggcgagctcaggcggcgcatcggctagcgtttggtcgtcgtgcatctgtgtccagcacgcacgtgcggtgccacgcacgtcgttcgttcgtcgtcacaagtgtatatgtatgcgtggtgcatcagcagcgtatgtagaacatgtggattgtgattattgtaacattggattggattagatgtgccattggccgccgtagccagcactcgttgcaatggtttccggttatcacgtgtaccttctcttaatgcatggccacgttaatggcgccactattcacctctgtttggtgattgtcgtccacgatccactcggtcgtaccgtgttccatgtgtatctatctattatcttaatataatagtggtaaaaagaa

SEQ ID NO: 9816 - DNA, 273 bp, Setaria italica
  misc_feature (250)..(250): n is a, c, g, or t
  Peptide Sequence Number=SeqID_75790
ccgtttttgagatagactcttgtcatgtcgggggcgtgagtgatggacatgcgtccgtccatgtgcgtgggtcgcgtaagatcgagtgttctgcggagaaacgtagagacacagcgtgatgagtgcgaacgagcatgtgtccagactctggagatctctctgatgggcttcggcatgtactacctccaatgattcagtgagctgcgaacaacattgttatggcgagaaaaaaaaggaaaaaaaaaaaaanaaaaaaaaaaaaaaacaaaaacg

SEQ ID NO: 9817 - DNA, 237 bp, Setaria italica
  Peptide Sequence Number=SeqID_75791
atcggatatgatgcagcttggagatgggctttgctgacggaggtatgctgtaagtggctcccgaagtgctgcacaggcctccattaaattcttgaacagatctatggattggatcatgtcggcgttctcgcatccgtcaggcaggccaaactcaacagcggggaagtggagcttgacgaactggattgtgaggcctgttgccaccgcgtggttgatgaaccctgccatcctggaggc

SEQ ID NO: 9818 - DNA, 252 bp, Setaria italica
  Peptide Sequence Number=SeqID_75792
gtttgtctttattagagtttcagaataactgatctagttgttccagctgtaaaaaactaccttgttgaggtgacggtctatgatttcagatatggtttctaagaacatgttttcacttgaccctgggagaacagcatcctctgcttcctggatgatgtcctcaatctcagagcctctattcacagtttccctacacagtatgtgccctatgtcatatggtgtaaggccacgagctgcacctttcttcagaag

SEQ ID NO: 9819 - DNA, 656 bp, Setaria italica
  Peptide Sequence Number=SeqID_75793
ttttttactaacctaagttgtaaattctattttgtaggtattactaaactaaattgtaaattctatttagttcttctttgtacctagttgcattgtcaacatacttacaacaaactggatacagctggaacaactagatcagttattctgaaactctaagcaaactccttgttgaggtgacggtctatgatttcagatatggtttctaagaacatgttttcacttgaccctgggagaacagcatcctctgcttcctggatgatgtcctcaatctcagagcctctattcacagtttccctacacagtatgtgccctatgtcatatggtgtaaggccacgagctgcacctttctcagaagcatggtgctgatgcgcaggacacgagcgcatcttggagacagctcccacccatggaacttgagaagcttgatgtctttctcagcatcaagtgatttgatgtattcaatggtttcattattgaatggctcgcgggcttggggccagtagagccactcaaacgtacaatcttcaaacttctcaggcaagcagtagccatgatcaattggaatcagcttgtagttgccaccttcttcttccctgtcaaggaggttcacaaaatagcagttttagatattaggttagcaaatgctgatcgtt

SEQ ID NO: 9820 - DNA, 379 bp, Setaria italica
  Peptide Sequence Number=SeqID_75794
agtaaagaatagatgaccaaaaatgggcgtataaatttactccctgttctgttgcatgataggttcgagtagacatcagtgccaggaatcctggttatattcaagcagcactgactgaaaccagaagagttctgaatgagcttgtgctggaacctttgaaagaagagcagtactatgaggtgagggagcctttctccgttatgtcacttttgaagagcccccatggggttgatggtcggttttatggtcctaatggtcttcgtgatgcccaagatgatggagaacataggtaagctttcaacccttttgcatccatgaattggattacttcagttgttagtatattacactatatgtactagccaccagcacatagcag

SEQ ID NO: 9821 - DNA, 289 bp, Setaria italica
  Peptide Sequence Number=SeqID_75795
cgccgtcgtgtcggcgtgcctcggcgccgcagccgcgcatcaggccggatctggcgaggggtacacgatctccgggcgtatcaagatcgagggtgcgaatccgaagggctttggtcttccagctaaaacatcaaacacaaaagtgatacttaatggtggtcagcgggttacgtttgccaggccagatggctactttgcattgtatcctacaagacgtgaatacacaagtttcagctttatcttgaaattctgatggacgcaaaatcacctatcaatctatcatactgtg

SEQ ID NO: 9822 - DNA, 1014 bp, Setaria italica
  Peptide Sequence Number=SeqID_75796
cccaaaccgaaccgaagcaagccgaaggccgcgacgagctctcgtctctcaccttccggccttccgcgaccgcgacgagcagcgacgaccacggcgaagatggccgcttcctttccccgccacggccgcctcctcgtcctcctcgtcgtcgccgtcgtgtcggcgtgcctcggcgccgcagccgcgcatcaggccggatctggcgaggggtacacgatctccgggcgtatcaagatcgagggtgcgaatccgaagggctttggtcttccagctaaaacatcaaacacaaaagtgatacttaatggtggtcagcgggttacgtttgccaggccagatggctactttgcattccacaatgtgccagctggaactcatttgattgaagtctcctcaattggttacttcttttctcctgttcgagtagacatcagtgccaggaatcctggttatattcaagcagcactgactgaaaccagaagagttctgaatgagcttgtgctggaacctttgaaagaagagcagtactatgaggtgagggagcctttctccgttatgtcacttttgaagagccccatggggttgatggtcggttttatggtcctaatggtcttcgtgatgcccaagatgatggagaacatagatcctgaggaaatgaagcaagctcaagaacaaatgaggaacaaccctgtatcattctctagcttgctatccagagcgcagggctagaagtagaacatggggatactgcaaagatgaaaggtctagtctatagtgtgatgaaaagcagtactaaagtgcttgacacgtcgctcagagtaatttcctgggggagaaggtggaaactctttccccaatttttaatgtattttaagctgtaatttgtctgcgatgtagaacattctgaaacctatagctgaattagtcatggagtacatcaacgtatacctggcagattgagatattttgttggatatgttttgcttgaatcagttcattctttagactacaacaaag

SEQ ID NO: 9823 - DNA, 434 bp, Setaria italica
  Peptide Sequence Number=SeqID_75797
gcgctcgaaccgctccagggccgtcttcaccttctcgatcgtgcacacgctgtggtacgtcgtggtggcgccgccgcaggcggcggaggagggggccggggcgggcgccggcgccgtcgtcacggcgcagggcttcgtggccgccgcggccaccgggaacaggttcaggtccctcggtgtggacgggcacgcgtgcttcggcagggacagcttcccgggcactgcatcatgcctcgcggcggtggcgtccctggcgtcgtccgcggcggcgccacccgccgaggaagtccctggtgacgagctccgccggccggccgccgttggctccccgcgccatgaaccccaccgcctcggccgccatcttctctcctcttcttgttccttcctgctaccgcagcatgcagcagggggcaaaaggcaaggcctctcgaccg

SEQ ID NO: 9824 - DNA, 541 bp, Setaria italica
  Peptide Sequence Number=SeqID_75798
agaacggagttactatcaacagatctgagcacaagccaaatgtgtttggtatgacagcatcacctgttataagaaaaggagtctcctctgatatggattgcgaaaatcagctctctgagctggaaaatattttagattccaagatacacactgtgttggatagtgaacagatactatgagccaagaactttgcgttccttcggcaaaagaagtgaacagatactatgagccaagaactgtttcttttgaagatttaagtgaagaactaggaattttgtgttccaagtacgatgggctgatagcacaattgtacagtaggctgaccaaccagtacaaagatgctgatgaaataacaaaggaatcacggaggcgtctctctaattctttagcaaagatttgctattgccttgaagatgtcggtcttctttgtgcgagtgaggctactaaaatttgcatcgaaaggggtcacagaaaaggttggctgaagggaggcggtgacaccaccgatcagcaaagtgatgcaaatggaccaggcttgttt

SEQ ID NO: 9825 - DNA, 403 bp, Setaria italica
  Peptide Sequence Number=SeqID_75799
agagcttcgccgttgtagttggcagcaactgccgcaacggccgccgcagctctcctttgcgtgcggtagctcatcggttgggggtggcatcatggcgaggaggacgagcggtcccaagaagaagctgaggagaggactctggtcgccggaggaggatgagaagctgatgaaccacattgccaagtatggccatggctgctggagttccgtccccaagcttgcaggccttgagaggtgtggaaagagctgcaggctgaggtggatcaactacctgaggccggacctcaagaggggcgcgttctcgcaggaggaggaggacctcatcatccatctccactccatgctgggcaacaagtggtctcagattgcagcgcagctgccggggcggacggacaacggacgg

SEQ ID NO: 9826 - DNA, 270 bp, Setaria italica
  Peptide Sequence Number=SeqID_75800
tttttttttttttgtaaaaatattaattagccatctgtttatgatgaggaaaaaacccaccgtaacatttgtttcgtgttgcatggaacattcaaatctctcattgaaaatgcaacatccagataaaacacttgcaacatgtgtgggaaatatatgcaacatcgcaacatctaagatctactttgcaacatccacgtgaaacacttgcaatatttttctgaaacatctgaaacaattaaaacatacgcttgcaacgtgcaacaaaccctg

SEQ ID NO: 9827 - DNA, 730 bp, Setaria italica
  Peptide Sequence Number=SeqID_75801
atccaggcacaacgatatctcctccatcctccacaccttcctcggactccacgaacaacccggcagggtcggcgggggcggcagcgtacgctccgccgccggcacggcgacccccgagaacgagccggagcccttcgacccggtcatcttcttccagaattacctccacaacctcatggatggaggcgctaacatccaggtgctcctcgacgacgccagcgtcagcctgggccctggacttggcctcggccgcgtcggcggggcaagcttcggggactacttcgtcggcccgggcctcgagcaactcatcgagcagctcgccgagaacgaccccaaccgctacggcacaccgccggccgccaagtcggccctttcctcactccctgatgttgttgtgacagacgccatggtagccgcggcggagggcgccgaatgcgctgtctgcaaggaggatttctcgcctggggaggtggccaagcagatgccctgcaagcacatctaccataacgactgcatcgtgccctggctggagcttcacaactcttgccccatctgtcgctttgagctgcccactgatgatcctgattatgaggggcggaaggcctctaatccacagccgcctgtcggtatcgctgcagcagcagctccatctgggagctctacttctgctgagggaagatggaggagagggaggagaatgccagggtggttgagaggaggttcaatgtgt

SEQ ID NO: 9828 - DNA, 796 bp, Setaria italica
  Peptide Sequence Number=SeqID_75802
tttgttgcttaaatcatatgagagtgatttgtagcttaattcagatgatgcttattgccacttatatgcttagtctttggggaaatatttttttccaaaagaattcaggagtctgctaattcctttttagttcatcttgctactctttggggacatcttgcttatcaggcaaataatgacttcttctgcctttcactttcagtaaccagttctatctctactctccagggacatcttgcttcaatgtcgtgctgcatataaactctggcagatcctagcaagtttctctcatgatttgtagtatgatgtcacctattaaagaatttttgcctttgagttttttcttttgttttttctctcattactctgactgctgtatgttcttttctggcaacgtgtatgtatgcaggcaaggacgctcatctcaaggccgccctggatggatcgtgaagccactcccctctcagatctcgggatttggttcccagttggcttcttcctcatgctccaatcctctaacccttgactttgcagaggatcatgagtcaagttgtttgacatttgtctcagttctaactgcaagagcaagaatcagcagcatgttccttcatacttgtcggttgcccatggggattatgttatttttgttagctggagaagttagaaaaaataacattaatggtgattaattgatatagtactactcactgagaggcagacttcatgttcacctgctcttttccaatcctacgatatatgtaacttagatgatattaatatggatgatggcatcacg

SEQ ID NO: 9829 - DNA, 632 bp, Setaria italica
  Peptide Sequence Number=SeqID_75803
gtcatcgcgctcgccgctcggtgactcctccgctcgtccctcgcggcgccggcggcaagcacagcgacagcgggaagggttcggcaggcagtggtgacggcggcggcgacggcccctgctcctcccacaccaacctcgattcggctcctccagttcaccaaggacatcttgcttcaatgtcgtgctgcatataaactctggcagatcctagcaagtttctctcatgatttgtagcaaggacgctcatctcaaggccgccctggatggatcgtgaagccactcccctctcagatctcgggatttggttcccagttggcttcttcctcatgctccaatcctctaacccttgactttgcagaggatcatgagtcaagttgtttgacatttgtctcagttctaactgcaagagcaagaatcagcagcatgttccttcatacttgtcggttgcccatggggattatgttatttttgttagctggagaagttagaaaattttagcattaatggtgattaattgatatagtactactcactgagaggcagacttcatgttcacctgctctttttccaatcctacgatatatgtaacttagatgatattaatatgggatgatggaacaaaaaaaaaaaaa

SEQ ID NO: 9830 - DNA, 250 bp, Setaria italica
  Peptide Sequence Number=SeqID_75804
gttcagaagcttgttgctataaaatggcacggaaggcaacaaggatgtcaaaccatatacaccctcaaaccatagaatatacacgctgtgcgctgatgtataattcagcaccactttgtggcataataaaaaaaagggttgtagcctcagttttagcttcttttcatgagctgcagctactcttgaatggtcacagtctgtagcttcctcgcgggagcacgcttcacaattctaaactggtcccgtacct

SEQ ID NO: 9831 - DNA, 504 bp, Setaria italica
  Peptide Sequence Number=SeqID_75805
actaccacggtgaatgctgctgctccgctagtgcaggccaaagctgggagggacttatttgggatgttcaagggtctgaagcagactgtggtgaacgggctggtcgcaaccaagcctccacctgtggagcaggagacagacacagaattcctggcgcacaaggccaggtttgaggatttacagcagcagctcaccacaacatcacagcaggctgaaacacttgtcaaagcccaagatgatcttagagaaactacaggtcacttgggaatgacactgattaagctggcaaaatttgaaagagagcaggctacatgtaattccctaagaagaagagccggtgaaatccataattttgcaaatcatgttttgaagatgagcagatcacagataaaattaaactctgaaattgtgaaacacctgggtagcatccatgaatacttggaggccatgatatcagtcaatcatgcatttacagatcgctccaatgctttacatcacgtgcaa

SEQ ID NO: 9832 - DNA, 652 bp, Setaria italica
  Peptide Sequence Number=SeqID_75806
gtgctccctcgtgcctcgctggtccactcaaagcgatcggattttttctaggagccgatagagaggaagtcctcgctcgccgaggcgtgagatgaagcggcttagggatgctaagcatcccatgacgcgctgtactcccttcatgttccggatcggccctatgtcgttgacggccgctatcttctccgggttcgcctcgataccgcgcacggaaacgatgaagcctagcagcatgccccttgggacaccgaacacgcatttctcgaggttaagcttgatacgcttatcccttagcctttcgaaggctagctccaggccgggaacgagctgttcgctcttcctggatttgaccacgatgtcgtcgacgtaggcctcaacggtccgcccgatgagatctccgaagcacttaagcatacatcgctggaaggtagcccccgcgtttttgaggccgaatggcatcttcacgtagcagtaagggccaaagggggtgatgaaggaggtagcaagctggtcggcctccttcatcgcgatctggtgatagccggagtacgcatcgaggaagctgagtgtttcgcacccggctgtcgagtcgactatttgatctatacgtggcaaaggacggatcctttggacacgctttgttgagtaccgg

SEQ ID NO: 9833 - DNA, 584 bp, Setaria italica
  Peptide Sequence Number=SeqID_75807
aaggactaaccctaccctccatgttgattgtagaaactaaaacagaaaaaagtaactactcatctatctcaaattctcaatgtaaaccactccaggctactacttgttttttaggtttcgaagaagatactttttagcagactcgaatcaggtagcttcgtttctgttttgttgtctcacttatgagtagttggtgctatatggtcaagagataagcattgctttgtcaggtgtggtatgtagagatatctcatgtgcatcaagttcaagcgtggctgaacatgctttccacctgaccacctccgaaagaccttgctatgactgtttgcagctcttcatgagatgcaccaaggcccatcctagtaatgaacccaagggacttgtctgctgggccctactgtaaaccagctttactgaaactctgaaacaatttcctgtgtagttctctgtcgacactccttgactgtagtctggattcgcggatgtatctgtaataccagcatgaaagtgttgttctcggttcatagatgttgctgctgagttagcttggtctgagaatgctatatgttgtcattttcaaaaaa

SEQ ID NO: 9834 - DNA, 329 bp, Setaria italica
  Peptide Sequence Number=SeqID_75808
gggtggcggaggaggggatgaggggcgcgaagggggtgaattcggtggtcgacgcgggcggtggaggcggcgatggctgcttggtgggggcgggcctggggttaggggtaggattcgtggggcgggaagcggggtgggaggaggaggaggaggaggagggggaggggccggagccgaggacgtgggaggtgcccttgaaggaggagggggtcccggaggaggtgaccttcttcatgaaatccttcatcttgtccttcatcatcgcggccggcggcggcggaggagcaagcgtgggtgcggtggcgtcaggcgtggaagcgctcacgcgg

SEQ ID NO: 9835 - DNA, 565 bp, Setaria italica
  Peptide Sequence Number=SeqID_75809
cccgccttgacttttccacgttgcgtttggcgctgctgctgatctgcgattcctctcctctcccacttccacacctgaccactccgggagggaatccttgcacgcggcggcgggggcaaccggcgtcgttggtctccgcgcgggtgtttctgttcggcgcttactctgccgggcgagcacggcatttgaggaggaggagatcgggaggcgtgatcgatgggtaactgcgtggtgagcgggggcacgacggcggtgacggcggcgggcgcgggaggggaggacgggaggcgccgcgggaggaggtggaaggcgccgcgggaggagcagctcggctcggtccccggccggatcttctccaacgacggccgcagccgcaccgccgccgtgttcacgcagcaggggcgcaaggggatcaaccaggacgccatgctcgtctgggatgggttcggcggggaggacgatgtcgtgctgtgcggggtgttcgacgggcacggtccgcacggccacctggtggcgcgcagggtccgcgacgcgctgccgctgaggctcatgtccgcggtgcgcg

SEQ ID NO: 9836 - DNA, 1789 bp, Setaria italica
  misc_feature (1738)..(1789): n is a, c, g, or t
  Peptide Sequence Number=SeqID_75810
ggcggattcctggaccggagggagacgaggcaagcctggccttgggaggggaaagggaaggagggaggagacagagagaggcgggcaggggcgcaaggggatcaaccaggacgccatgctcgtctgggatgggttcggcggggaggacgatgtcgtgctgtgcggggtgttcgacgggcacggtccgcacggccacctggtggcgcgcagggtccgcgacgcgctgccgctgaggctcatgtccgcggtgcgcgcgtccaaggccgggctggacatgcccgccgccgcgtggaggaaggccttcgcgcgcgcctacaaggccatggacaaggacctccgctcccacgccaccctcgactgcttctgcagcggcagcaccggcgtcaccgtcctcaagctcggctcggatctctacatggccaacattggcgactcgcgtgccgttctaggctcaagggacgccgccgccggcggtatggtggccgtgcagctcaccgttgacctcaaacctgatgttcccagtgaggcagagcggatcaagaagtgcaggggcagagtgttcgcgctgcaggatgagccggaggtgccgcgggtctggctgccgtttgacgatgcaccgggcctggcaatggcccgcgcatttggggacttctgcctcaaggattacggtgtcatctcggtgccagagttcttccactggtcacttagtgagaaggatcagttcgtcatccttgcatcagatggggtgtgggatgtccttagcaaccaggaggctgtggacatagtgtcctcatccccaagtcgatcaaaggccgcaaaatccctagtcgaggcagccactcgtgaatggaaaaccaagtacccaacatcaaagatcgacgactgcgcggtggtttgcctatatttggatggcaaaatggaccacgagcgtgactccacggcctccatggataacatgagcctcgacgagggttcagtcgcagacccgaacgaagctgagcaggagccagcgctgacccggaatttcacggtcaggacagttgctgggagcgcccatgagaaggtgcttgctggggcagtggacgcagtggtcgccggcgcagcccacgatcagaattggtcgggccttgacggcgtgacgcgggtgaactcgctcgtccagcttcccaggttctccgaggagaaggcaattggctgaggagctgcgtttctttgttgtcaattaacttattttcttctgtttgaatttagtttagttgccagttgtttgagagaaaaggtagaaacgaaacatggtcttgtgatttcctccggtgcacggcaagcgtttgagccactgtgatcagtgcccgagctgtgtgactttttggcacaacaaaattgcacatttccagagacaaaggttgctccttgtgtgtttatctgactttcaggtgtgcaaggatacctgaaaggtcgagcaacaagggaacctttgctcagagcgtgcaattttgttgtgttaaaacgaacagctcacagctggtgctcctgggcacagtggcctcgaagcgcatgctagtcgacagtcatctgggatgatgacgctgtcgggtgacctgtaaattctcccctaccggcactgggctttgtagagagatgtgcctgtctgggcttttgttgacagggcgcggtgcgctgtgtcgcctttgccgatccatcatctcctatcctcctgccgcgtccacgacgcccccgnnnnnnnnnnnnnnnnnnnnnnnnnnnnnnnnnnnnnnnnnnnnnnnnnnnn

SEQ ID NO: 9837 - DNA, 793 bp, Setaria italica
  Peptide Sequence Number=SeqID_75811
aagtattagagcacttgagaaggacgtttctgaaaaggaatcagagattgctcagtgcaaggcacatatctcggagttaaacattcatgctgaggcagcagcacgagaatacaagcagaagttgatggagctggaggccatggcacagcaggttaagaccgacaattcctcagcacatgcctgctccatgagacaagagaagattagctcaaaacctcacggttcaggttctccatttaaatgtatcggcattggctttgtacagcaaatgaattctgagaaagatgaagaactaagtgctgcaaagcagcgtatcgtggaacttgagggtatagctgctagccgacaaagggagatattcatgctgaacgcgagattagctacaacagagagcatgacgcatgatgtgattcgtgatatgcttggggttaaaatgaacatgacaacttgggcggctctagttgacaaccagaaaaagatggagccaacagaatcggctatttctcaagcacaggaaattaaagagcaatccaatgagctgatgaagttgaagaagcagcttgatgaattcattgaagagagacagagttggcttgacgaaataaatcagaaacaatcagaacttggagctgcccgcattaatatagagaaattacgacaacgagaacactttatgatcgcagaaatagagttgctaaaggctgagaattcaaactacaaaaccatcattctcaatcttgaagacgaagtgaagaagcttaccagacaacagaatcttcagcttcgaatcaat

SEQ ID NO: 9838 - DNA, 553 bp, Setaria italica
  Peptide Sequence Number=SeqID_75812
agttaaaacctacaatgtatgaaagaaaatacacaagtcatctcatatctcagatcgaaaacagcgcacatcaaagcctcagatcagcatactgaagatcacaactccatgcctccacagtcaactccactagacaaccggagatgttcctgacaagacaaaattaataattaatatgagaattagcaattatcgggaacacttacaacttaaactccagcaaatgcacttttgctgggaaaaactaaaaacaactagcacagtggtagcgatgcgtcacaaaacataagttgtatatcagaatgaaacctaggtccaaaaaagcagtagtttgcaggacttgggtccaaaaaagccacaagctatggaaatcccttggactttgttcatataacagtttgtgcagtcggttctacgaaaagacatctaggtagtgcatgtactgctagaacacatgtcatcttcaaatttggtgtcactcataaaccaagattgataacaagttcaaagtgatctcaataccattcataacatgtttatagccaacatacat

SEQ ID NO: 9839 - DNA, 1031 bp, Setaria italica
  Peptide Sequence Number=SeqID_75813
tttgaaatcagtgacagcaagatcgtatgattaactgcgcaagcagcccgcattcttgtatgtacgagttgcaatatcccaatatcattgccagtaagatatgcgcccacagtaaacctcatgtatgaaaagaaaaatacacaagtcatctcatatctcagatcgaaaacagcgcacatcaaagcctcagatcagcatactgaagatcacaactccatgcctccacagtcaactccactagacaaccggagatgttccacaagacagcaaaacatttcttttactcgttcttcttctgcttggctgattgcccagccctggtcatgatggtatctatatgccttgatagtacactgtgtgctacaccgagcttttcatcaacatgatcctggtacttctcatacaatggtggaaccaacagagaaagcatcatcccaatgtaaatgagtgtaaggaagttgaagagcattccaacgtatgaaaccacccacaaaaccaatatcacctgtataaaaactttcctatctctcttgatggctatatcatggccaacagccagcaccctattgatccatatcagagcccgatctgcagctttctcgacaaccacatctgaaacctctagattaggaagaggtggaagaggcctgttgagcagcgacgcggacttggcccagaagaagaggatggcgacgaggaggagcagggcgttggacaggaccgaggggaggctgtagcccgcgcgctcgaagacgaaccataccgccgtagcgcccaccacggccgccgccgaggcgttcctccgccgccacagcagcacgtcggcgactgcgccgccgccgaggagggcgtggagagatcgcgggtgggtggccatgcgagatcgccggaggctctagggttcggcgacggcgtggacggggaatctctctccggtttgggtgatttgaaatggggaggaatttgtttggtggctcggtcagtggtggagcacgcgcgaggcgacgacgacacacgagatgaagaataca

SEQ ID NO: 9840 - DNA, 397 bp, Setaria italica
  Peptide Sequence Number=SeqID_75814
tcgcccagcgccgggtccaccagctcgtgccatctcccgtcctgccacagctggtaggcatatcctgtgagattgaagaatttgccgtactggtagaacccggcagtcctcttcccggtgatgatctcgaggagcaaaacgccgaagctgaacacatcggatttgatggagaagaggccctcggaagcgtactccggagcgatgtaaccatgcgtgccgacgaccctggtggtattggcctcggtgacgttggagcagaagatcctggccatgccgaagtcggagatcttggggttcatgtcgcggtccaggaggatgttgctggccttgaggtcccggtggatgacccgcaggcgcgagtgcttgtgcaggtagagcaggccctgcgcgacgccgt

SEQ ID NO: 9841 - DNA, 839 bp, Setaria italica
  Peptide Sequence Number=SeqID_75815
ttgcacatccagctgaaagtgtgcgagagactatttctgttattatgcgtacaattgctgaggaagatgcgatagcagcagagtccatgcgtgatgctgccttgaaagatggtgctcttctgaggcatttgctaaatgcttttttctttcctgctggtgaacggcgtgatgttagtcggcaacttgttgctctttgggctgattcttatcaacctgcacttgatttgctgtcaagaatacttcctcctggacttgttgcatatcttcatacaagatcagatgaagattcacagagccagtatgatgaagcaccattaagcagaaggcagaaacgtatacttcagcagaggagggctcgtggcagtaaaagtatggcagcacaagaacaggggacaccctccaatggtgttgatgatggggcactcttcaggcacaccagtgcgggtacttatggaggagcagatgtcgatcagaggcatgttggccagtacacttccgcccactccccagtggcaggtatgaacattgacccttctcatgcaatgtcggttccacatggttctgtacctgaggccctttctgaaaataatcatcaaatcggggcaccacagctggactcacatgtttatttagtggactccaatgccaatggcaatcttgtcagctcatcgcattcagatttttcagtccctgcacaagttgtggtggaaaatactcctgtgggatctggcaggctcctgtgcaattggtatggattttggagggctttcagtctagatcacaacagagcagatttgatatggaatgagcgcaccagacaggaattgaaggaagcattg

SEQ ID NO: 9842 - DNA, 672 bp, Setaria italica
  Peptide Sequence Number=SeqID_75816
ggtaattttgatttgatggcaggtcgatttctgtatgatgaagttcatcttattttgaatgactgcactatccgatttgctcctgtgtctttgcccttacatattgtaggcccttgttagcccattcctctttgatgacatggcacaagatatgcaggactgtactttgagtgatcacccagatgacataggccttaacaataacgatgaaggcagtgggtatgaacgcttgaaggagattgatcctgtcgcagcccaacggatccacccaaatgaccatagaaaaataaaacgctaccttgagttgtatgcgaccactggtgccctacccagcaatcttttccaaggagaggctgctaagagcagaaatggggccgggctagtaactccagattcgactgttgtttcctgtgggtagatgctgatattcaagttctggataactatgtgaaccaaagggttgattgcatgatggatgctggcctgctagatgaagtatgcaatatatatgatccagatgctgtttacacccaaggactgcggcaggccattgggggttcgtgaatttgatgagtttttcagactatatttaacaagaaaagaatctgataaggataaggcggcttcttctacaactatgttaactgtacattgatgattacaaactttaaa

SEQ ID NO: 9843 - DNA, 657 bp, Setaria italica
  misc_feature (31)..(31): n is a, c, g, or t
  Peptide Sequence Number=SeqID_75817
gtaaacagcatctggatcatatatattgcanacttcatctagcaggccagcatccatcatgcaatcaacctttggttcacatagttatccagaacttgaatatcagcatctacccacaggaacaacagtcgaatctggagttactagcccggccccatttcttagcagcctctccttggaaaagattgctgggtagggcaccagtggtcgcatacaactcaaggtagcgttttatttttctatggtcatttgggtggatccgttgggctgcgacaggatcaatctccttcaagcgttcatacccactgccttcatcgttattgttaaggcctatgtcatctgggtgatcactcaaagtacagtcctgcatatcttgtgccatgtcatcaaagaggaatgggctaacaagggcctggatgtagaagtttgtgccgccgacaataacagggaggccaccgcgattcagtatttcttgtatgatcggcacggcatggtcgcggaaatcgcggcaagtgaactcgacggagggatcaattacgctaaggagatggtgaggaacacctttctgctcgtgcagaggaaccttgttggtgaggacgtcaaggccgcggtagacctgcatggagtcggcgctgaccacctcgacgccggcgaagt

SEQ ID NO: 9844 - DNA, 936 bp, Setaria italica
  Peptide Sequence Number=SeqID_75818
ttactttagtttagttttaccttgttgggttagtattgtcttgtattatttctaagtttcttggataactatgtgaaccaaagggttgattgcatgatggatgctggcctgctagatgaagtatgcaatatatatgatccagatgctgtttacacccaaggactgcggcaggccattgggggttcgtgaatttgatgagtttttcagactatatttaacaagaaaagaatctgataaggataaggcggcttcttctacaactatgttaactgtacatgatgatcaacttaagagcttgttggatgatgctgttcccagcttaagacaaacacacgcaggcttgttcgtcgtcaaagacggagactacatcggctgagtaaagactttgggtggaacttacatcgcgttgatgcaaccaaagcattctgctgtaccacaggcgactcatggaaccatgaagttgtggaaccttgtgtggatgttgtgaaaagatttttggctgacggcgcagcttgtttgccaagcacaaatgcttcagatggtattggagaaagagagttatggactcaatacgtctgcgaggcctgcgacaagcgcgtgcttcgaggggcgcacgagtgggagcagcacaggcaagggcgaggccaccgaagaagagtgcagcgcctgaagcagaggaagagcctgataagaccatcagaatcgtaaaaaccccatagcagatgattgcgatttgcagctgggtgttctttgtcttgtaatcttgttaagcagtagttccaaattttgaagagactagagagtactgtatctgtattgtctgaatgaactattactagtctatctgtttcactgaagactgttgttgtgatgtggcaatccagtcggctgtcctccagctttgatttgattaattagtggaaatgatatttgctg

SEQ ID NO: 9845 - DNA, 924 bp, Setaria italica
  misc_feature (4)..(4): n is a, c, g, or t
  Peptide Sequence Number=SeqID_75819
acancggtgagctaggaaaaattgcacagcagcactaacaaaacttgatcactcaaatggtcactcacctactaaggctactaccatggctgcatcagcagaagacaaacatgctcttgtccgaggaaatcaaccttcgtgcagaagatgtcccaacaatccgctctaacttaagaaggtctagacgggagaaaaggacattgcacttcgggttttctgattcacctagcatatttacaagctctgggtaaaattcttttcttcctggcaatgaataaataagcaaatgctttgttcccctgatcttatatcggtggtagaagtgagatcgttcactataaagcaagatctttttcttgccctcaaaaaaccagagtcttgaacgagatatgtcttgttgtgacgtagcctctccaatccgaacaaaaagatgcttccttagattttaagaaattgcttatccgaatatattcaaagtacgaactgacaaatagcaataatccaccctcatccaagtcctgaatctttggatataccttgttgcagaaataatcaaagcgagcatcgtcagctccagcaatagaagatgcatcaaaccgttcatacacctgccgcacttcaagttgtattttgggaagaacacctgcatactcggtcaccattttaatctttccttcataattgaagcatgatccattaaataaagcattaatctctggtgtaagatatgagcttaacagtattgtctgccgatagtactgtgcatgctgatccaagtaccatggcctaattcgcatcacattggttccatgttcttttgatggcaaatgattaagttgttcaaaaacagcctccagatgtgcccaattctgcatagatatcacatctgcatgatcgacaatcactatttcaattgatgatagg

SEQ ID NO: 9846 - DNA, 796 bp, Setaria italica
  Peptide Sequence Number=SeqID_75820
ttcttgaagaatagatatatcatgaaccttgtgaagacatagagtacggagtgttgaaagcttgcaaaggatattatcgagatttagagactgggaaaggttatccattgtaaggtcagtgagagactgcataacgtgaatgtgctcttgtttatgttgtgtatctctcctttttctgtctgattttttggataatccagctacagcagaaacaggaaggtggatatccctacttttcatgcctgcctctttgactatctgaagaatagtggttttaagaacaagtgcctgctcttctccgaacattgatgcccaacccgagagcaggcgagtgagctcttcttctatggataacctgactatgtggcagctggaatatgtagtgctttcaaattgttcatacaaagaattccaccctcaaagcagagctccttacaatttgaaaggtgcaagtattctagtgataccagtttttgacatggaaggattaacttttgtgagcaatcatttacctttaaatgtgtgagacaagttaaccgatgcaaataacttgataccgtaccagaatatgaaccacaacctgaaagtgaaagttctttgatagctatgctcaaggccataaaaggtagtctcctcaggttgtagcatctatttatctgcagcttttgcaggtttggaaataattctctattctctgcatctgcccaattttcccatttcaccatggatccaaaagtcagctcctccaaagattgaaagaccacatttgtaactttcctattattactattctagt

SEQ ID NO: 9847 - DNA, 973 bp, Setaria italica
  Peptide Sequence Number=SeqID_75821
tccagccatttgtactgctgtgatcttagagcaaagtaatcaatgcaaaacagagcaccctttggatcatcagaatccagtgacaacagaaacttgcagacctctaaagctgaccgatggcagccacgtctatccaaatttttcatgtgactaaagagtgctgtaaaaaatggcttatttatgtcatggctgtatttcaactggtagttaccctgcagtgggctaaacaaagggtgccaagcacactccaatgcaaataggcacttctccactgcatctgctgatgattgatgctctccagaatatttgaaaagttcagcaaatgtcaacagtgattctggatgatatggatattttcctaatatagctgcaatagcattgagatcgttcgccgctttggcagcttcaaataattcctgcacatggctgacagaaggatcaaatgtgtacctgaagtaattcaaaccactcttcgtctcaagaagatccattgatatcgacttatcccatggtggccagtagctaggtggagatacaagaagagtttttcttggattgtgggcaacacgcctgacaccacgtacttgccttgaactgctaggcatattccgttgactttcaaatgagtccactacctttgatccaaaaatgcgtctcatctcattttcacccttcagatgtttggggtcaattgtgagaattgaggtcgccccagcttcatctgtctcaatttcctttccagtcgctctgtcactttgatgaactctttgttgcattggcttcttttcaatagatagatcttccaggattgaatccagtgactgttcatcctttgacttcattgacgatggttccgccttgctctttttcttctttttctttgattttttgtttgtttcaggaaccacattcgtaggcttcttttgcacagagtgtttctgttccgtataactcaaaggttgacttctttccg

SEQ ID NO: 9848 - DNA, 1380 bp, Setaria italica
  misc_feature (1)..(21): n is a, c, g, or t
  Peptide Sequence Number=SeqID_75822
nnnnnnnnnnnnnnnnnnnnnggggttttactcagtcgcactagttcatataggagtattatcaaacccttttacaaagctggataactattaactagaaagtcagtgaaagacgggataaatgatagatcagttggagaactggcataaactaagacaaggatggtacttgatcccaaaaaattgacaagtaaagatttgtcatatagcggatcaggtacctatacatgttgtaacctttagcaatcccataaaaaccgcagagcacttggcttttctttttgtggttattcgagggtgtgcaggtgacacaatgatcaacagcagctttccttaatcctgagtcacatgcgagcgtacaggtgcaattgtgagcccatgcggcttcccttaattaatcaccattgttgtcgtcatttgcatcgtgatgattgtcaccatagtcaacccatgggagcagtgattcaaggaagaccagcgcaggattacgcccaacaacatcacgaggggcacggagtctctctgccccagcagcttcttgttctacaggtggcatctcatgcaccattcctggaccaaccatgaatggccgtagttcttctggtgggagcgacggtgttgtgtcagagaagtctgaaacaagcaaatgagagtactcattcttctcggaagagaatgcctcttttctaacacatgcccagtcctgggcttctctgttatcctgctttagtgattcaatgaccaaaagggcagcctctttcagtaagttctgcagttctgggaatctccacatgatataatggcgttccacatatatgttgatcatatgctcaagtgaagggcttcctggtttcgctgatccaaagaacacatttctgagtatttgggtccatgatgagtctttcagaggagccttgtcaactatcttgcaaagcaccaaaggatgaagcatcagagcttgcttcatgagatcaacagatgttgacttgtcagcatgatcagaaccctcagatgttgcatcacgctcaaggtaaaaccgtgcaatagcaagagaaaatgagaaatttgggaataaccaaagggagttatcacactggtactcttcagcaaattgctccagccatttgtactgctgtgatcttagagcaaagtaatcaatgcaaaacagagcaccctttggatcatcagaatccagtgacaacagaaacttgcagacctctaaagctgaccgatggcagccacgtctatccaaatttttcatgtgactaaagagtgctgtaaaaaatggctcattaattttaattaggtactacttatgttagttgccatgcagtgggctaaacaagggtgccaagcacactccaatgcaaatggcacttc

SEQ ID NO: 9849 - DNA, 332 bp, Setaria italica
  Peptide Sequence Number=SeqID_75823
ggagtcattttgctcttcaagcagcaaaggcatcaaaaccgcatatggcgttaacagcctaatgtagcaattaaataccttgtcaagacagcaaaattttccccaacaggtggagcagatagatcatgttattgaacagatacactgcgaggaagtccaaatccgtgcttccatatcatgcctagtatagtattggcctcagtccttcgcccacaactaacatatgctttgtacatgatccaaaatgtcttctttgtcctgccaaatttagaacattccatctcatccaaaaccctgtgcatctcttccagccgattgtgcttcccatacat

SEQ ID NO: 9850 - DNA, 278 bp, Setaria italica
  Peptide Sequence Number=SeqID_75824
ccggcggcgacccctcgggtggcgtgccccgccgcgtctgccaagggcgcggtggcggcgccggggggaggaaggctagggactactccagctacgtgacgtacgctactctgtatgagtgagccgcttcggtcggtatgcagtaggagacagagtgcgtcggtgggactttggctatttgttccttgtattcttgtgtagtgctgtgtgttggtgtgcttgtgcttgttttctatttgctctgcacgtgttgctgtcacttagatccatctttgtat

SEQ ID NO: 9851 - DNA, 265 bp, Setaria italica
  Peptide Sequence Number=SeqID_75825
cgtgcgttgggtgggttgacaaaaggaagagcggctgcgaaagcagtgcgttggtgggagtggaatcgaacatggccatgtgttgggtccggtaggggtagctaaagccccctaacggcttgattctcccgtgatcttctgagctcgagtgcggattttggcggtggtcacttgctgcgcccgccgcgtggggcaggagggggcgtgttgttgctgctgccggatggtcctcctctctcactactacatgctctcctctcctgca

SEQ ID NO: 9852 - DNA, 354 bp, Setaria italica
  Peptide Sequence Number=SeqID_75826
tgggcgcggcgaggtggaggagggccgcggtgcgggtgcgcggtcgcactgccgccgcggcattgggcggtgggtgcggcggcggaggaggaatggagcagcgccacggggacggcccgcacagcccagtgaaggagaagcctgtaatgtcaaacattgggaaatcaactaatattttatggcataattgcccgatcggacaatctgatagacagaagttgctgggacaaaaaggctgtgttgtatggatcacaggactcagtggttcagggaaaagtactcttgcatgtgcattgagtcgggagttacattgcagaggccacctcacgtatgtccttgatggcgacaacctca

SEQ ID NO: 9853 - DNA, 453 bp, Setaria italica
  Peptide Sequence Number=SeqID_75827
taagttttgaagaaaagaagacggttcactagaagttctttcactatagctaaatctttcgtgcaggagaagtggcaaagctttttgcggatgctggtatcatttgcattgctagcttgatatctccatacaggagagaccgtgatgcatgccgtgctctacttccggattctaaatttattgaagtatttatggatttgcccctaaaaatttgtgaagctcgtgatcctaaaggtctgtacaagcttgcacgcacaggaaagattaaaggtttcactggaattgatgatccatatgaaccaccagtgaacggtgaggtgagcctaaagagcatgtcttactcttacttcctatgtgcccgcaccttacaatttccatatagtaactggatatgaaatataaagagacctcgctattgatgtagtggttcttgacgtcattgatcattatgct

SEQ ID NO: 9854 - DNA, 1033 bp, Setaria italica
  Peptide Sequence Number=SeqID_75828
cgggcctcgccagcggtggtgggcgcggcgaggtggaggagggccgcggtgcgggtgcgcggtcgcactgccgccgcggcattgggcggtgggtgcggcggcggaggaggaatggagcagcgccacggggacggcccgcacagcccagggaaaagtactcttgcatgtgcattgagtcgggagttacattgcagaggccacctcacgtatgtccttgatggcgacaacctcagacatggcctaaatcgagatttaagcttcaaggcagaagaccgtgcagaaaatatacgaagagttggagaagtggcaaagctttttgcggatgctggtatcatttgcattgctagcttgatatctccatacaggagagaccgtgatgcatgccgtgctctacttccggattctaaatttattgaagtatttatggatttgcccctaaaaatttgtgaagctcgtgatcctaaaggtctgtacaagcttgcacgcacaggaaagattaaaggtttcactggaattgatgatccatatgaaccaccagtgaacggtgagatagtaattcagatgaaagatggggaatgcccttcacccaaagcaatggccaagcaagttatgtgctatcttgaagagaatggatgtttgcaagcttagcgcatacgtgagaagattgatctgattcttttgtgtccattactcgtggacacaagcatgatccattgatccagaataaaaggcatcgtcacaaagcaagcaacagagtacagaggtgcagtccattcagagaaagatactgattcatcttattgttgaggctatttgttttgtgtgtattgtgcttgtacagccgcaatgtatctacatcagcaattcagcacgcactggtttaactcgcgttgaccgctgcgcgtgaaggctgatgggtgtttgcgagttgtgttggtaatgtatttgataccaataaatacaaataaattatccaatttgtacatgactcgtttccacttggaataaaagtcaaaggaaagttgtaacacaa

SEQ ID NO: 9855 - DNA, 381 bp, Setaria italica
  Peptide Sequence Number=SeqID_75829
gtgcgagggttttgttcccgttgttggtgaagtagggccccggctttccctcgcgatcgagcaagctgaacgagtgccgggctctgacgacgccctggggcttggcagcgtcgtcgtcgagccggagggagagggagatgcagttgtagtagggccacgacgaggtttgggcgccagggtagtagctgatgcgccagctgtggcctccgacgcggaaaggtgaggacttgatgtcgctgccggtggggatacccgtggtgtgggagtagccgtcgatcctcagcaggtgctggccgctctcggtcacggcgacgatggctgacgccgaccgcagcggcgtgccgccgctggtggtggacgcggccgtcgacatgaaaggag

SEQ ID NO: 9856 - DNA, 1670 bp, Setaria italica
  misc_feature (1605)..(1670): n is a, c, g, or t
  Peptide Sequence Number=SeqID_75830
tcctccctcctcggggccgctccctcctcgccgcggcgcgccgctcccccgtcaccaccctcgtcgtcgccttcttcctcctcgccctcttcatgtacggcgaggacgcccgcaccatcgccgagctctccatcgacgactacctctacccggacgccgacctctacaacgtctcggggctgcccccgctggtgcttcccccgcccacctgcgacctctccgccggccgctggctcttcgacaacgtctccaccccggcctacagggagaaggactgcaccttcctcaccaagcaggtcacctgcctcgccaacggcaggcccgacgatacatggcagtactggaaatggcagcccaacgactgctccctcccagcgttcgacgctcggagattcatggagaccatgcgcgggaagcggctcatgttcgtgggggactcgctcaaccgtaaccagtgggagtcgttggtgtgcctcgtccagcccattctctccaagggcaggaagaagatcgtcaagcggggctccctcaccatcttccacgccaaggagtaccgcgccaccctcgagttctactgggcgcccttcctcgtcgagtccaactccgacaaccccaagatccacagcatcgagcaccggatcatcaggcccgaccggatcgagggacacgccaagtactggaaggacgtcgactacctcatcttcaacacctacatctggtggatgaacaccgctgacatgaaagtcaggagaccaaattcgaggtactggtcacagcacgacgaggttcccaggattgaggcatatgggcgggtgttcaagacgtggtctgattggctcaatcacaacattgatccagcccgcacatccgtcttcttcatgacaatttctcctcttcacatcagcccacagaattggggaaacccggaggggatcagatgtgtgaaggagacgcttccttatcagaactacagccaacctctggacttgtaccatgacatgcggatattcgatctggtagtgaaggtggccagctccatggagaaggttccggtcaccgtgatcaacatcacaaggatgtcagattaccggaaggacgcccatacatcgctgtataccatccggcaaggtaaactgctgacaccgaagcagaaggcagacccggagaagttcgcagactgcatccattggtgccttcctggtgtgccggacgtgtggaaccagatactctacacaaggatcctttcgaaatcatcttggcattctaattctgcgcctcctcccttgcagtctctgcctcttcctccccaatgagaatcttagcagggggcttgggtgttctttttttttttaccgcggcgtagggaaatgtatggttattcatcattttttcttccttttgggtagattgagtaaaggttagagccaaaaggaagtggatgagctgaccactgatggaatggcatgtaagatggctcagttgtagtgtaaatgagttgtgagttagccaatgaacgaacagcggcgctcctgtagacagtttccttctgaatatatatatatactactagtttccagacagaaataacatgtttcctgttgggtnnnnnnnnnnnnnnnnnnnnnnnnnnnnnnnnnnnnnnnnnnnnnnnnnnnnnnnnnnnnnnnnnn

SEQ ID NO: 9857 - DNA, 1149 bp, Setaria italica
  misc_feature (27)..(27): n is a, c, g, or t
  misc_feature (1121)..(1149): n is a, c, g, or t
  Peptide Sequence Number=SeqID_75831
cgagtttatcatctgacttatgcagcnctttggtctgatatggaactttattaaggaaatatgttcttgagaatgagagaagacacagaatttgttccctcgtttccctaccacacagaagtaccaaaagttctgttgtttggtctattgggcttcacatgctctgtgctggctcctctgatattaccttttctgttggtatactttttccttggttatgttgtataccgcaatcagttgctcaatgtgtatcgaacaaggtacgacacaggtggtttgtattggccaattgcacacaacacagttatattctctcttgtgctcacccaggtcatcggccttggtgtatttggtcttaaagaatcaccagtagcggcaggcttcaccatacctctcatcatccttactcttttatttaaccagtactgcagaaaccggcttcttccattattcaggactttccctgcacaggatctaattgacatggacagggaggatgaacggtctggaagaatagatgaaattcaccaccgacttcattctgcttactgccagttccctgatactgaagatgtacccttggagaaaattaaaattattggtggggatgaagagcaaggttgtagctcaggcgagtccactggcaaagatacctgcatggatcccaaaatggacctgtctcacccaacattaaaaggactcccagttagccgtctccggcatgctgtgaggttgattactttcctcatcagattgcagaaaagaggtttatctgaatagaaaattggataatagttagccgctaaccccttcgcctgtccgttcatataaatgtacatactacagaggcatacatagtacaacatcaatccctgagaaaagagggtcaacataggaatctatgagagcatcgttatggtgctgagcaattttggtcttttttagttaatggatgagctgtggccctgcatgttagttgttagctggcagatccagctgttgaaaccttagccttgcacatcgatgtaatgctcaatggttttcttgtatgagattcatgatgccaaaatgatctagaaatggtactgttcctacctaaaccaaaaaaaaaaaaaaaaaannnnnnnnnnnnnnnnnnnnnnnnnnnnn

SEQ ID NO: 9858 - DNA, 1602 bp, Setaria italica
  misc_feature (1)..(27): n is a, c, g, or t
  Peptide Sequence Number=SeqID_75832
nnnnnnnnnnnnnnnnnnnnnnnnnnnttttttttaaaattttattcttgctatgttattgaacttctgcagacaccagagtccgaaacctcgaaactcaagagatcacaatcacttgttatttgtgactcatgagtgtacactaaattttcaaccaaaaacaaggatacattgtcagatatatcaagctgtttgcactaggacaaagacaccaagctatattgtttataaaagggggatttgcaatcctccctgggtaaaagaacttgagaatgtactgcagctaaaacaggatagctcacatgacgatctcaggcttcagaatgcttgacttgatctctttgtgtgggagaacaacaccaccattgctgtatacttcatcgcatacgtgaacatcctcccccaagatagtcatgttctctatccgtgcccattgtccaacagttgagtgccacccgataatgctgtttgagatacaagcatgcttcttgatacgcacaccacgcatgacagtgcaacgggaaagcctcacaccatcctccacaacacatccaggtccaatagcgacatcaggaccaatcagacaaccctctccaatcttggcactctcatgcaccaggacgttgcccacgacatgtgctccagaagccagcttggcagctgatttcttcctaagtgagtctagataaagacgcaaaccagtaatgtagtcccttggctgaccaacatccatccaaaatcctggaaggaccatcgcatggagcttttgatcagctgcaatttgagggaagacctctttctcaattgatgttggcctcagttcaatgcggtcaaggacagatgggttcagcaagtaaatcccagcattaatcttgttgcccacaaatatttttggcttttctacaaatctttccacccttccagttgcctcctccataaccacaaccccatattttgatggttcatccaccttcgtgaccataattgttgcctcaccaccatggctcttgtgaaattcgatgagttcagcaaatgggtattcgcttatgacatcactgttgaggacaaagaatggctcaccagatccatctgcaagcttgtcccttgctagagcaagagggccagcagttcctaagggctcagtctcttgagagcatgtaattgtgatgccaagcttatcctcaaaatccttcaagaagttaatcatcacctctgggcggtagttgatggctaaaaccacctccgtgaccccaacttctttcaaagcttcaatctgatgcagaatcatgggcttgtttgcaaaatcaacaaggggctttgggaagctgagagtcaaagggcgaaggcgggttccgaaacccccaacaagaatgagcgccttcatggtgaagcacctgatttccttcctcaatcccgcaggggacggacggcagggcgagatttggggcgctcgcgcggcacactccctgcgtcggccggtcgcctcgcctcgcgtcctccccctctccccttccggccttcccaatcccagcgaagagggacaccgcaaccagaccagaccgctgcgagcgagaggctggcctgccgctcctgggttctggc

SEQ ID NO: 9859 - DNA, 353 bp, Setaria italica
  Peptide Sequence Number=SeqID_75833
atactttgttctactcggttccccgttttgtcactcacattgacgaccaagcaatccgggctctcacagagtactactctgaagttcttcctccaagtaatacccctggggtggccattctggacatgtgcagcagctgggtgagccactatcctcccgggtacaaacaggagaagattgtggggatgggtctgaatgaagatgaactcaaaaggaactcggtattgaccgagtatgtcgtgcaagacctcaatgtgaacccaaagcttccttttgaagataacactttcgatgttatcaccaatgtggttagtgtagactacttgacaaaacccatagatgtttttaaggag

SEQ ID NO: 9860 - DNA, 1076 bp, Setaria italica
  Peptide Sequence Number=SeqID_75834
cgttgcaggagcgcggccgaggcaaggggtttccccagtcgagcagattttgaagaatgtggagtggcccgatgagtttccttttaagcctgaggacttcagccgcttcgacgaatcatcagatactttgttctactcggttccccgttttgtcactcacattgacgaccaagcaatccgggctctcacagagtactactctgaagttcttcctccaagtaatacccctggggtggccattctggacatgtgcagcagctgggtgagccactatcctcccgggtacaaacaggagaagattgtggggatggtacttccttttagttgctttgcaaacgtctgaatgaagatgaactcaaaaggaactcggtattgaccgagtatgtcgtgcaagacctcaatgtgaacccaaagcttccttttgaagataacactttcgatgttatcaccaatgtggttagtgtagactacttgacaaaacccatagatgtttttaaggagatgcagcgaatactgaagccagccggccttgccataatgagcttttcaaatcggtgcttttggacaaaagctatatctatatggacatcaactggtgatgctgatcatgcttggatagtcggtgcttactttcattatgctggagattttgagcctccacaggcagttgatatatctcctagtccaggacgaactgatccaatgtatgttgtatactccaggaaaagaatagcctagaccgtatactgtattttgcaaggtctttccctccttcctagttcctctaccctccctgctgattatggcagctgtattcgagtcaagccatgtgtcatggttcaatttttatgtggcattctatgttccagttagtcgtccttttattttaaaacttgttatccattttagggcgtgatgtgggactggggagctcatgaaagtaagtgtgacccgcgcgcatgtgtggaagcgtttctaaactgtgttttggaaaaatgtttttgcataacatcttttgttgttggcatagtgacaattggatgagacaataatttcaaatataggaaaacatcatt

SEQ ID NO: 9861 - DNA, 493 bp, Setaria italica
  Peptide Sequence Number=SeqID_75835
ctgcacaccactccccaccccgagctgtccccatttcgcactagctagctctgctcgggtgctcgcactctctcgagttctcgagctcttcttgctgccatggcggctccgctgctgctgctgctcttgctggccatgttcgcaggctcagatgcggcgttctgcgtgtgcaagccgggcatccccgacacaatgatgcagaaggcgattgactacgcctgcagcaagggcgccgactgcaccccgaccgcgatgggcgggccgtgctacggcaacggcaacaaggtggccgtctgctcctacatctgcaacagctacttccagagcaggagctccatgggcgccacctgcgacttcggcggcgtcgccacactcacaaccaccgaccccagctccggcacctgcaagttcgcctccggccccagcagcgcgggcggcggcggcggcggcatgggcggcaccggcgggacaggtgctggcaccggagcaggcg

SEQ ID NO: 9862 - DNA, 359 bp, Setaria italica
  misc_feature (305)..(359): n is a, c, g, or t
  Peptide Sequence Number=SeqID_75836
acttacttaggttaggtagtcggcaattggtgccggcctgctacttaagttaaccttcgtttttctttttcgttggtttataatataatgtcgtgctaaatgaagccagtgatatggtagctgcttaacctcttggtaatcccatggtttgttccttgctcctgctgaactgagctacggcgagcagctttgtagccttgtactactgctacagaaatggtgccatggacaatttgacatggtataatgtagtacttagtgtgctatgactctggtaacaactgacagtgacattttactttttnnnnnnnnnnnnnnnnnnnnnnnnnnnnnnnnnnnnnnnnnnnnnnnnnnnnnnn

SEQ ID NO: 9863 - DNA, 749 bp, Setaria italica
  Peptide Sequence Number=SeqID_75837
tttttttaaggtaagaaggatgttctcttaatcaaaagtaatctgcagtgttacatttttctaggaactgcaggttcatgttatacaggccttgcagcttgtggtttacacttatacaacgtgcagagtatgcacctcaggtcaaagaagaagaagatgaacaaacatacgaaagaatgcattgtacaagatcaaaaaacatcttacgacaaacaaccaacaaaattgttaaccctcatctaaccaattgaacgaacgctgcaacgccttcgaaaacggcggtgcaaagtctgcaactgcggcgacacggcgaggccggccggccatgtcaatgagcagcgccgccggctcacttgcctttgtgcttggggagcgtgagcgccacggccggcgtctggaaccccatgaactgctgcttgggcgaccgcctggtggcccccggcgccgggctcgggattgggagcctggcgctggtcggggtcgggagccccatgtagtggagccgcggcgacagcctgatcctcgggctggggcgcggcgacgggatcggcagcggcagcctgcccgccgcgcccggcgacggcgccacccgcggcgacaggttcacctgctccagcgccatgctctgcaggtccgccgggtagtcccggaggcacccgatgcgcgcgcccgtcggcgtcgaccacttgaacgacggccgcctcgccatcatctccggctccgcggcatcctcctcctcgccgccgccg

SEQ ID NO: 9864 - DNA, 2260 bp, Setaria italica
  misc_feature (1)..(6): n is a, c, g, or t
  Peptide Sequence Number=SeqID_75838
nnnnnngtcaaggctgcacaatgcagtttgatgatcacagctggggaaaaccgtgtagccagatacaacagttgttgggcgaaggatacagggaactaaaaacaacacttatccttcacaatttcacatcatataatctacagtttacatcaatatgcttcaacaaaggggaaaaagaaatcacaattcggtacatcggctaacagggactagcgatcccaacccgatggtcgttttctctccctggaccgatcccgtgaactttctggattttggttcccgatttcattgctatttcctgcaggccgggatgcagggacgaaggagggtgccaacggcgctgaccgggatgcagggacgaaggagggggctgattgtgctggccgcgagtctcctcctatggtgccgccagacacaaaaccgcgaagtgctggtcttacaaaggaaggcgcactgctgcttggtgtattcgaagatccagacacaaagctgctcttaaattgctgcatcatccccgtcttcaacgaatttacagcagcagttcttggagcaggtacttgtgcaccagattcagcattgtaacctatgccaaggccaaaatcaactccacgcacaccacgactgcgcccagcacccccgccaccaccttttcctttgccacctcctttcttcccacctttcctggagtcccgttttgctctaaatcttccatccttcatagccagatccatgagttcattgggtacatcctgaccagcagctatcaaactgtgaaccagttcaccagcaaagcgtgcctccttctgtgtaatcagagtgtatgcagtgccatctttatcaccagcacggccagttcttccaattcggtgaatatgcatatccatctctttcgcaatatcaaagttaacaactgttttaattgacttgatgtcaagacctcgtgcagcaacatcagttgcaaccagaacatggtatgtcccagatttgaacttctgtagggtctccatacgtgaagcttgatccttgtcaccatgaagtgctgcaattctgaatcctctctgattcaactctttctctatctcatccactctagccttcttagatgcgaatacaagaacgtctccatcatcaatcattccaggcaatttctccaaaagccaaggcattttctcagtatcagaagggagtacgttgacaacttgtttaatgtcttcattagcactgccaacctgaccaactgtaactctaataggatcggtcaatatttctcttgccaaacgctccactttgtatggcatcgttgcagaaaaaagtaaggtttgtcggtctggcctaatttgaccaacaatggatcttatttgtggctcaaatccaagatcaaacatgcgatcagcttcatcaagaaccagataagttgccctgaacatcttcaatgccttcatcttcagcaagtctattaatctccctggggttgcaatgactacttcacagcctgctttcagttctttaaactggtcaaatttggaaaccccaccatatacagcagcaactcgaaggttgtaaggctttgcaaacttcttagcttcgagatatatctgatgtgccaattctcttgttggagcacaaatcactcctattggtccttcttctttctcaagctcaggctgatccataatatgaacaatcatagggagtacaaaagctgcagttttgcctgaaccagtttttgcaattccaatgatatctctgcctgaaagtactataggtaaagcctgacactgaattgttgttggtttttcataagcctgcttggcaatagcattcattaacggtacaggaaacccacaatcctcaaagttttttattggccttggcacatcaaaaccggaaaccctaattgccaaacttttcatataatctgccacctcttggtcactcatacctgaaatcaacggcttctcctcgtaaaaatctttggtgaaggcgtcgtactcgatggtcgagtgatcgagtgctggtatgggctcgattttcttcttgtccacgactatggggttgtcgtcagaatcgtattccatcatgccggcgtcgacggccttggcagcggcgtagacctcctcgtcggagtcgtaaccggcgcgcatagcgtcggcggcgagcgcgagcccggcgtctttcttggcccgcaggaagctctcgacggggtcatcctcgtcatcgtcagagtctgcgcggcgaaccgcctcgggcttgggtggcg

SEQ ID NO: 9865 - DNA, 534 bp, Setaria italica
  Peptide Sequence Number=SeqID_75839
tctcttagtttttttttttttttttaatttaacttgataatcagctgctcctttcgtttgcatattacattaaatgctgcctgcgtcttctacctctttcatcttcttcttctctctaccactaacactgggtcactgagcgagcctacgacggacggaaagcacactcacacggccgcgtaattactagttcatcataaggaggattgcgaaaggggagaaaaaggaacggtgattttaaattagagggaaaggaacctaagctttggggttggactttctgggcgcgcacgccgcccgccgccgccgtgtttactcctccgggctggagtcggacaccggctcctcgtcgtcgtcgtcctcgtcctcctccgggtggtcgacgttgttccggccgccaccgcggtgctggtcgtgggaaccagaccccgggtgctgcaggtgcagctggtgctgctgctccgagttgctgttgtgggacatgctggagacttgctgctgctgctgctgatggaagtcggcgtacttcaccgc

SEQ ID NO: 9866 - DNA, 673 bp, Setaria italica
  Peptide Sequence Number=SeqID_75840
aatatttggattttgcaaggtgaatgctctgctctggacaatttcctttaaatgctcgtcactcagattctcgatattatgggcttcagctacacccatggtcataatgcgagccacttctgcatcacgagttgttgttagtactacactgcccttgccaccttgcttaaggcaggtctttagttttccccacttatcagcatcccgattccatacatcatctaacacaatgaggtacctttttccacttattatactctggagctcctgcaatgatttttcacgacctttctcattggtctggcagatgttgcttgcaatggtactgacatcgaaatcatctgacacgcagcaccacctccgaaactcaaagtgcttctcgattgcagggtcattgtaaatgagttgcacaaaggtggtcttgcccatcccacccatcccaacaattggaagaaccatgagatccatgttgctagcttgatcaaggagcatccccacgattttcttcttctcccgatctctagatctgctaagaatatctgtgtcggagtcaatgattatggaatctgtctgtcgccactgccttgatggctgtgcttgctgcaagtgcctgaaaccaaatgtattcatctcggcgaggcgctcgtaattggtctgctactaacctattcta

SEQ ID NO: 9867 - DNA, 683 bp, Setaria italica
  Peptide Sequence Number=SeqID_75841
cttggttctctatgtttcttggcagctgcatgatgttttgagttcattatgtccctgtcttctctgcccaccattgcattacatctcttcaagtcgtccactgtagaagatgttgcatcagtagtgtgcaaggatattagctcttgtatgcaagagataagtaagtttgaagtaccttcagttgcattgtgagagttagtgctggggcagcgttcctcaactccccagccattgttcccagtgaaggtattctgcactatgactggatctttagtaattttatcaccatttaaatggacattgtactgcagtacaataggattttcagattcccctggaagtgctgtcccgacaagatcaatccaaaagttaccagagaggactccaggagtgcctataagagtgatcgaagaacctacaatcagcccacaaggtacttcaatggtgaaagaatcggtctccaacttggaagcgtccattctgcgaattgagtatgggcagagcctctctttttctctgtgctgggattttgcattgtgaactgatgttgtcaagttttcccatgcagttctcccatcgttgatcgcctcgcttgcatgaggaaggccattggtgatgttggttagttgcttcatctgattccatgtgtctagccactgaaacacttcaggagagatgttccc

SEQ ID NO: 9868 - DNA, 475 bp, Setaria italica
  Peptide Sequence Number=SeqID_75842
agaaacctaacaatcagcccacaaggtacttcaatggtgaaagaatcggtctccaacttggaagcgtccattctgcgaattgattctcccatcgttgatcgcctcgcttgcatgaggaaggccattggtgatgttggttagttgcttcatctgattccatgtgtctagccactgaaacacttcaggagagatgttcccaaaatccaagctatttgaagttgaagcatttgctgctgctgcttctggagtggtttcttgtgcagccactgggctgttgaaccattcgagggggtttgtgtggaggatttgatactgagatatccctgaagttgggctgttcactatcaaataccgcacaatcaccagagagaagaatgtaatcgaaactgtagtggcgagcttatttgtcatccacatctttggttgcctttttctctgctgctgtggcgatcacagtcacaccataccttggctt

SEQ ID NO: 9869 - DNA, 236 bp, Setaria italica
  Peptide Sequence Number=SeqID_75843
tctgcagcaacgaggaaaaccactcgagcaagaaacactcatccggtcagcaatgccagccagccaaaccctgaaaagaccttgctacagatccggaaattcctatgcatttttgcacgagcacgaccccagtacaatcattacacatcgcagcaacgccggatcgagctgcaggcaccaaaaagaacagggtgtagatgtcagtacgattgatgatgtcgtcagacatcaccgtt

SEQ ID NO: 9870 - DNA, 388 bp, Setaria italica
  Peptide Sequence Number=SeqID_75844
ttaccttagagcaagcaaaagcataaagatagctacagttccctatccacaagttcatgtttcagtgtcatatctttctgtgttcctgtcatgtgtaccgaataaggctgctcgtttactcaaaaaaaaagaaagaataaggctgctcatttaccagtgggcaacagtggccagatcgatcgatccacatgctgcacgccagcgagcactgagatcattgcgtccgtccggccctcgatctcatttcatgcatgcctgcccaattaattgcactgcagcctgctcctgaattctgcagatcgtttgttaattaggtgtgatcatgagcggtggctagcctaagtatgtattaagtcggtctaaccttcacaaatgaagagctggcggc

SEQ ID NO: 9871 - DNA, 607 bp, Setaria italica
  Peptide Sequence Number=SeqID_75845
tgtacgcttaacaaagttcaaaactattaataaagtgcaaattaatagtttgaagtatccgattacatccaaagctgaggtgctgctactctgtaaccctttatttctccaaccttctggaatcactttttgctccttttttatttccctcgtgagaccgatcactgaacagatgcttcaagagaaaaaaatgaaagtttttgtttaaagcaaatttgaaagtgacctaaccacccatgtgaccttggacggctctaccatgtggtggagatatacacatgcacgccggtttttaaaccgttcctaggacagacagagctcctgctgccagaaaagataagctgagccagcctctccgcaaacaaggaatgctaaaattgtgtagcagtggtccaagctccctccacttgcccactactccgaccactttttttttttttgtagggtcaacgggggggggaggatccccacctgattccctgtgtcctgagagttcctgagagctgttcctttttctggagtgtgatcactacaacgactagtggcacggtggagtgtgacctccacctgagagttcctgagagctgttcctttttctgttgttgtt

SEQ ID NO: 9872 - DNA, 557 bp, Setaria italica
  Peptide Sequence Number=SeqID_75846
attcgaaatgtgtaacattggatattataagaaacaatggagtctctgccaacgtgggctgcttggatcctgagaacttcaagaagttcaaacttgttgaaaagaagcaaataagtcataatgtcgcaaagttcaaattcgctcttccaactccaacttctgtattgggactcccaattggccaacatattagctgcagaggacaagatgctactggcgaagaagtaatcaagccttatacccccaactacattggattctgattttaggatatttttgagcttgttataaagatagtaatacctacaaagggaagaaatgtcccaccatttccgtgagatgaaagttggtgattatttgtccgtgaagggacctaagggtcgtttcaagtaccaagttggccaagttagagcatttgggatgctggctggtggatcaggcattactccaatgttccaagttgcaagagcaattcttgagaaccctaacgacagcacaaaggttcacttaatctatgctaatgtcacatatgaagatattcttctgaaggaagagct

SEQ ID NO: 9873 - DNA, 178 bp, Setaria italica
  Peptide Sequence Number=SeqID_75847
tccccgtcttgtcagcgtaagccttgatgcagcgcctgatgagcgtgttcttccccatgagctcaccaataataagcggtgaccggcatggttctttggtcacgggaacggtttctgaccctgctcgttagttgacatcaggaattcaggattgcatgatcaattagtatcgtgccag

SEQ ID NO: 9874 - DNA, 617 bp, Setaria italica
  Peptide Sequence Number=SeqID_75848
aggtaattacaaagaatagaaagactacaaggaagttaacaacaatagctttatgagaattttctaagacatcatgttgaagattctatagctgatatatatgatagtttgatactaatctgtggcagcaatatatgcttgaaaaaagtccttcattgtatataattcactttggtatctgtcagattggttgcacatgttcttatgatatgatgccatgctgattttaatatttttgttcaatttatgcaggaagagctggataacatggccaagacctatcctgaccgctttaagatctactatgtcttgaatcagcctcccgaaaactaggaaatggtggtgtcgggtttgtgtcgaaggaaatgatccagtctcatttcccagcgcctgctgaagacattcaggtcctgagatgtggtcctcctccgatgaacaaggccatggctgcacaccttgacgagctcaactacacaaaggagatgcagttccagttctaagcaacactgagctcaccaataataatcggtgaccggcatggttctttggtcacggaacggtttctgaccctgctcgttagttgacatcaggaattcaggattgcatgatcaattagt

SEQ ID NO: 9875 - DNA, 1035 bp, Setaria italica
  Peptide Sequence Number=SeqID_75849
tttttttttttggttaacacgggcaaatgcttaacataaccagattcccatcgtcgattacacactactagagacacaactgagttctttgtctactaacaaaaaacatgatacgctaactgataagatgacaatactttggtggtgctgtaataagagaaagcctaaagccgcagcagcatagacggatgtgagcagctctagtcgtcgaacaggctgaagcccatctcctcgtccgactcctcggcaggctcaggcgccttctcttcttccttgggagcagcggccgcgccagagccagcggcggcaacaggggcagcaacggcgaacttgctcggatccttgaggtactccttgatcttgtcagcgtgcgggtacgagtagtctgtctccacagcaacagcaagcacgttcttgtacccattgatgaacatggtggggggcagcagcaagggtcgggtacgagagcgccagggaaagagaggcaaccatggagacaccagtggacaaacttctcaaccaggtcatcctcggtcaggtcgagcacctcagggctgaagacagacccatcctcgtagacattgacgatctgaagaccatacgagaaggggcggatacccagcttggcaagcagggcagactcggatgagcccacttgtcacccttcttgatcagctccacaggggtgatgatttccacagtacccttgttaatcttggtggggatgttgagcacctggaagaaagaggtctgggagggatccagaccagtgttgccaggggggacaacatccccaccaagattaacaagggtactgtggaaattatcacccctgtggagctgatcaagaagggtgacaaagtgggctcatccgagtctgcccttcttgccaagctgggtatccgccctttctcatatggtcttcaggttcatcaatgtctatgaggatgggtcagtcttcagccctgaggtgcttgacctgactgaggaggacctcatttgagaagtttgccactggtgtctccatggttgcct

SEQ ID NO: 9876 - DNA, 864 bp, Setaria italica
  Peptide Sequence Number=SeqID_75850
ccacatgttcatcaatgggtacaagaatgtggggcgcggcagcaagggtcgggtacgagagcgccagggacagagaggcaaccatggagacaccagtggcaaacttctcaatgaggtcctcctcagtcaggtcaagcacctcagggctgaagactgacccatcctcatagacattgatgacctgaagaccatatgagaatgggtcagtcttcagccctgaggtgcttgacctgacagagaggcaaccatggagacaccagtggcaaacttctcaaccaggtcatcctcggtcaggtcgagcacctcagggctgaagacagacccatcctcgtagacattgacgatctgaagaccatacgagaaggggcggatacccagcttggcaagcagggcagactcggatgagcccactttgtcacccttcttgatcagctccacaggggtgaggggtaatttccacagtacccttgttaatcttggtggggatgttgagcacctggaagaaagaggtctgggagggatccagaccagtgttgccaggggggacgaacaacatcaacgggagcaaccagcccaacacgagcaggagcaccaaccttgtacttggcgacctcctcgcggacctccttgaggtcacccttggtgaagatgaggccaacgttgccgacgaggaggtccatgagcgggtcgaaggtgtggttccccgtcttgtcagcgtaagccttgatgcagcgcctgatgagcgtgttcttccccatgagcaccactgagtcgcccctcagcccgcggcggatgtcctggagctgcttggagccgacgttgtcggcgagggcgatgagcaccttggtgtactcatccagcagg

SEQ ID NO: 9877 - DNA, 1471 bp, Setaria italica
  Peptide Sequence Number=SeqID_75851
cccgtcttcctcctcgcacacactgacccacctacctccgccccgccacctcccaccgaccccccgcggcccaaccaaacccgcccactgatttcccaggcgtggtaggcgagggaggccgcgcgcagccatggatttcctgcaggggcagagcaccgagaccatggtggccgtcgccgtcgccgtcgtcgcggtcgccgcgggcggcgccttcctcctcctccgatccaggaagcccaagggctgcttggatcctgagaacttcaagaagttcaaacttgttgaaaagaagcaaataagtcataatgtcgcaaagttcaaattcgctcttccaactccaacttctgtattgggactcccaattggccaacatattagctgcagaggacaagatgctactggcgaagaagtaatcaagccttataccccaactacattggattctgatttaggatattttgagcttgttataaagatgtatcctcaagggagaatgtcccaccatttccgtgagatgaaagttggtgattatttgtccgtgaagggacctaagggtcgtttcaagtaccaagttggccaagttagagcatttgggatgctggctggtggatcaggcattactccaatgttccaagttgcaagagcaattcttgagaaccctaacgacagcacaaaggttcacttaatctatgctaatgtcacatatgaagatattcttctgaaggaagagctggataacatggccaagacctatcctgaccgctttaagatctactatgtcttgaatcagcctcccgaaaactggaatggtggtgtcgggtttgtgtcgaaggaaatgatccagtctcatttcccagcgcctgctgaagacattcaggtcctgagatgtggtcctcctccgatgaacaaggccatggctgcacaccttgacgagctcaactacacaaaggagatgcagttccagttctaagcaacactgagctcaccaataataagcggtgaccggcatggttctttggtcacgggaacggtttctgaccctgctcgttagttgacatcaggaattcaggattgcatgatcaattagtatcgtgccagcaacttgtgcaatccccattttttgagggcaaaggttatctccctaagcagcccacgttggcagagactccattgttactattattgattcgaaatgtgtaacattggatattataagaaacatcacaataccacaaatgagcaatgccggtcaccgcttattattggtgagctcagtgttgcttagaactggaactgcatctcctttgtgtagttgagctcgtcaaggtgtgcagccatggccttgttcatcggaggaggaccacatctcaggacctgaatgtcttcagcaggcgctgggaaatgagactggatcatttccttcgacacaaacccgacaccaccattccagttttcgggaggctgattcaag

SEQ ID NO: 9878 - DNA, 2024 bp, Setaria italica
  Peptide Sequence Number=SeqID_75852
ccgcttctcccccaacggcgagtgggtcgcctccgccgacgcctccggctgcgtccgcgtctggggccgctacggcgaccgcgcgctcaaggccgagttccgccccctctccgggcgcgtcgacgacctccgctggtcccccgatggcctccgcatcgtcgtctccggggacggcaagggcaagtccttcgtccgcgcattcgtgtgggactctggcagcacagttggtgagtttgacgggcactcaaagagggttctgagctgtgacttcaaaccaacacgcccatttcgcattgttacatgtggtgaagattttctggctaacttttatgaaggaccgccattcaaattcaagcattccataagggaccactcgaactttgttaactgtatccggtattctcctgatggaagtaagtttatcactgtaagttctgataagaagggtttgatatatgatggcaagactggagaaaagattggagagctttccactgaaggcagtcacacagggagcatatacgctgttagctggagtcctgacagcaaacaagttctaactgtttctgctgataaaactgcgaaagtatgggatatcatggaagatgcaagtgggaaattgaatagaactttgacttgtcctggtacaggaggtgtggacgacatgcttgtaggttgcctctggcagaatgaccatcttgtgacagtctctcttggtgggacatttaatgtgttctctgcaagcaatccggacaaagaaccagttacgtttgcaggacatttgaagactattagttctttggttttgtttcctcaaagtagcccaagaactatactgtctgcaagctacgatggtgtcatcatgaggtggatacagggtgttggatatggtggcagattgatgcgcaaggacaatacccagatcaaatgctttgctgcagtagaagaagagcttgttacctcagggtatgataataaggtgtttagaattcctcttaacggagaccaatgtggagatgccgagtcagttgatgtaggaggtcagccaaatgctttgaaccttgcaattcagaaacctgaatttgcactgattaccactgattctgggatcgtactgctgcacaactccaaagttatttctacaaccaaagtcagttatactatcacttcatcttctgtttctcctgacggcactgaagctgttgtgggcgcacaagatgggaaactgcgcatatattccatcaatggggatacagttacagaagaagctgtgcttgaaaagcaccggggtgctattacttccatacattattcaccggatgtttctatgtttgcttctgctgatgccaacagggaagctgttgtgtgggatcgggcaagtagagaggtcaagctgaagaacatgctgtaccacacagctcggataaacacggtggcctggtcacctgacagtcgtttggttgccactggctcattggacacctgcgcaattgtctacgagatagacaagccagcagccagtcgcatcaccatcaagggagcacatcttggtggagtccatggtttatcctttatcgacaatgatactctggtgactgccggtgaggatgcttgcattcgtgtctggaaggtggttcagcaataggtgttttttctggtgtgcattgggcatgtcttcacttttggttgcaataaatgttggtttcttttttctttttgtttacggttgtcagtatggtggctgttactcacaggccataggcatcattgatgccttctttgcgtccggagttcaaaatttgctgtacaattcgctttgagttgtattcttcctttgcttttcaggaaggtgttctttgtaagtgtatccctgcatctgtttttgttagaagctgataatatagggatatttattgttgttgctttctttcccccctttccttggactagttgttaatactccgtaactgtttttttgcaatactgcgagctttaatgaatggtgtggagtggtgactttacca

SEQ ID NO: 9879 - DNA, 1543 bp, Setaria italica
  Peptide Sequence Number=SeqID_75853
gccccacatgttcatcaatgggtacaagaatgtgcttgctgttgctgtggagacagactactcgtacccgcatgctgacaagatcaaggagtacctcaaggacccgagcaagtttgctgctgctgccccggttgcttctgcagactctggtgctgcggctgctcccaaggaagaagagaagaaggcggaagagcctgctgaggagtcggatgatgacatgggcttcagcctgttcgactagaagcgtcaagctgctgcaagttttggcatttgtttatgaaacacagcatatcaaatttttttaaaagctacagcaaaaagagcaatagcgacacaaagtgcttaatagagataatagtcgattacactgggacaacatagttctttgtctacaaaaaatttgatatgctgtgtttcataaacaaatgccaaaacttgcagcagcttgacgcttctagtcgaacaggctgaagcccatgtcatcatccgactcctcagcaggctcttccgccttcttctcttcttccttgggagcagccgcagcaccagagtctgcagaagcaaccggggcagcagcagcaaacttgctcgggtccttgaggtactccttgatcttgtcagcatgcgggtacgagtagtctgtctccacagcaacagcaagcacattcttgtacccattgatgaacatgtgggggcggcggcagcaagggtcgggtacgagagcgccagggacagagaggcaaccatggagacaccagtggcaaacttctcaatgaggtcctcctcagtcaggtcaagcacctcagggctgaagactgacccatcctcatagacattgatgacctgaagaccatatgagaaagggcgggatacccagcttggcaagaagggcagactcggatgagcccactttgtcacccttcttgatcagctccacaggggtgataatttccacagtacccttgttaatcttggtggggatgttgagcacctggaagaaagaggtctgggagggatccagaccagtgttgccaggggggacaacaacatcaacgggagcaaccagcccaacacgagcaggagcaccaaccttgtacttggcgacctcctcgcggacctccttgaggtcacccttggtgaagatgaggccaacgttgccgacgaggaggtccatgagcgggtcgaaggtgtggttccccgtcttgtcagcgtaagccttgatgcagcgcctgatgagcgtgttcttccccatgagcaccactgagtcgcccctcagcccgcggcggatgtcctggagctgcttggagccgacgttgtcggcgagggcgatgagcaccttggtgtactcatccagcaggctgcacagcttgcggtcgtacgcctgcttcttctccgccttggtccgcttgatcgccatcgctgcagaggaaacctaaccctagctagaggcgtcggcagatctgtggggtggagatacacggaggaggaggaccaagccttcggaggggggcaagggcggacggcttgtggcggcggcgtcgct

SEQ ID NO: 9880 - DNA, 246 bp, Setaria italica
  Peptide Sequence Number=SeqID_75854
cgaggcccgcgagcctcctcgtcaggtgcggcgccggcggcggggcctacgcggcgccgccgccgcagcttgggcttggcttccgcccagacctgcgcgcgatgatcgacagctacgctcacggcacgcgcatggcgcccgggagcttgctgctgcctcgtcctgccggcctgccctcgccggcgccggggcttcttcaggagcaccgccgctcttcttcgcatttggcggctgcgtacggtggcg

SEQ ID NO: 9881 - DNA, 617 bp, Setaria italica
  Peptide Sequence Number=SeqID_75855
tttttttttttttttgtaagccggatcaattcaaatgctattatgctaagcaatctcagtacacgaacagatgtagcaactgaacaagcaaagatttctcacatcagcatggcgattgccaagaaacatcactagttctctcctcaacaaaatgggattggattacatcgcaggagccgcatcacaacgagacgagatccatcgcccgggaaagatcccgggatgggcctcatatcgaatccaaacgaaatacagagcggcagagaaagaagagatccacggaggacgggagccgatctaggccgatggaccgacggaggggaggatccgggacccgacgaggtaggcgaggaagccggcgaaggcgagcaggaaggcgtagtccaccgccacgaacagcgccgtggacccgtgccttctcttccccgtcgatccggcgctgagcttcttggaagcctccatcttgctcacccccgctctcctttggatccggcgacgtggtgcggcggaggatcggtggctcgcctcgctccggttcttgttccagatgcggtggggtagggtctccgcctctcttgatcgacggcggaaccttgaagcgggcacctaggtccttg

SEQ ID NO: 9882 - DNA, 303 bp, Setaria italica
  Peptide Sequence Number=SeqID_75856
cgcgccgccgccggcaacttccgccacggcaacaaattcaggttcctggacaaggcatgcatccgggtggcgccgcagggtcccaacacgaagccggagagcccgtggcgtctgtgcacggtggcggaggtgcagcaggccaagacgctcctcgccgtgacgcccatcttcgcgtgcaccatcgtcttcaacaccgtgctcgcgcagctgcagacgttctcggtgcagcaggggagcgccatggacaccacgctcccgccgggctgagacacgcaacaggaggcaaggcacacaggggatagg

SEQ ID NO: 9883 - DNA, 730 bp, Setaria italica
  Peptide Sequence Number=SeqID_75857
gttttttttcttacccctttctccttcctcacgagcgccgcagcgttcctcgcatctctccgcacgccaccaatcttcctgccgtgcctcctctctgttggcctcttgtagttctacaaagcaggggagagcaacagctcacgcaggggtgcttgggccggcggaggagctccatccatgcagatgagcttgggcccagcggaggagcaccttccctgcagaagaggtggcctcgcgaaggacctccgtcgcggcggaggagcttgagcccaagcgcctccgatgctcgggacggggaaggcgacggatccaggctacctcggcctcgcgtaggaagccaacgaccttatcgaaacgaagctcgacctgcatcgatttgcccaaccaaagctcgggcgacgtcgaatcgaagagcaggccagtgacctcgccggccgccgcgcgagtccttggctatctacacggtccgtctcctcctcgctcctcaactcgatttgcgccgcggccggatttgccactcgatttgttggaattgaatggatctcgggctcgatttgccgctgcctgggcatggtgcggcggaggggagatgctgcgtgtggaggagttgcggcagaggagcgacaccaccaccaccgaaggggtcggagcgacgcagggacaccggtgcgtggaggcgacgagcaggttgcgcgggaggtgaaacggagaaacggccgagtaggggcct

SEQ ID NO: 9884 - DNA, 453 bp, Setaria italica
  Peptide Sequence Number=SeqID_75858
gtccatgtcgatttgagctgcaaccagttctcaggatccttggcatcgatctctgacaactcatctatggctagcacgcttcagtacttgaatgttagccataatgtgctgtcaggagcattatttgacagtgatccgatgcctttgttagacagtcttgaggtgtttgatgcaagtttcaatatgctcagtggcaatattccgcagtttaactttgtcatctccctcaaggcgttgcgactgcagaacaataatttttcaggctccatcccagaagcactctttcgggagacctctatggtgctgactgaactggaccttagctgcaaccaacttagaggtccaatcagacgtgtaacatcgacgaatttgaagtacctgaacctgtcatacaatagtcttgaggagctttaccaatcacatttggaattgttcaatcgttgatctgagtgg

SEQ ID NO: 9885 - DNA, 289 bp, Setaria italica
  Peptide Sequence Number=SeqID_75859
gtggctgcgccgccggctatgtagtgatctgtgccgtgatctcgacggcggtttgcggctgagcgggcggcggcgatgaacggagtgagcgccagcgccggggccggcgccggcgctggcggggaggggccgctggtgtacgaggcctggaaggggagcaatgtgtttttccttcaggggagatttatatttggacctgatgcgagatccttgtttgtcaccatgttcctcattgtcgcgccagtatcaatcttctgtgcattcgttgcgagggaattgatggataatt

SEQ ID NO: 9886 - DNA, 340 bp, Setaria italica
  Peptide Sequence Number=SeqID_75860
ccgccgcggccgacgcctgcgccagtggcggcggcggcggcgccttgggcagccagagctggtgcgggtcggtgtagccgaacaggaacttgctctcgaggatggagaatatttcgtagctgagcttgtcagtgtcggcgcccccggcgtcggcctcctcgtgtagcctctccacctgcatctcctccgcctcgtccatgtcccccctcctctctgccgccaatactgtcaacctctcggcgaatcgaacggcttcggaaagcagggagcaagggacagaatctctcgcggattcgcaaagattgctgccgccaagacctgcccgccttcttgtcgcgcg

SEQ ID NO: 9887 - DNA, 271 bp, Setaria italica
  Peptide Sequence Number=SeqID_75861
tcagtcgcattgctcgcaccgcaccgcttcgagttcgggtgcgcgggagccagtagcgggtctccacacttcgggttcgctcgctctctaggcccggtctcttcgagaaggaaaaggaaagaaaaaaaggataagcaagcagcacggagacgactcgactcgagcggcgaggaggcggaaaataaaaaagaggataaggcgaggcgcgaccgggcggccaccgcgctcccagatccgttcttctccagcgcagatccagctcgccggcgcg

SEQ ID NO: 9888 - DNA, 1942 bp, Setaria italica
  misc_feature (1)..(53): n is a, c, g, or t
  Peptide Sequence Number=SeqID_75862
nnnnnnnnnnnnnnnnnnnnnnnnnnnnnnnnnnnnnnnnnnnnnnnnnnnnnaattatggtacgctcttaaccagaacgtaaagcttttgcttacagtgttgtgcaatcagcaatagataataagtctagtatacacaacaatgtgattgcctgacgcgaggatgacacaaacctcgcagtgcacacaccacaacacaatgggagggtccaactatttacatcgaatgctataacgggatttcgcaatttcaccttacggcgattgtactccacctcctctcctctgtgcaactgtacgctctatatataaaaacgaagaacaaaatacactgaacattacacctctgagtagtatttgtgcccgtgtttacgctgcgacctccgcatcagccctcatgtacacccatcagtcataaattgcctctcagcctctccagtctctccagatgagacctgagccaggcaaactcgtgcctcatcctctccatgtgcgcctcggctagctgcatctcctcgcttaataagctgaggcgcttctgcacccactctatgctttctttgctgcccgtggagatcccatgaggtgacatttggacctggggggatctagttagtaggactatgatggttacctgcattaggataatgaaagccaccagtgccaccgctagcactggacctagttgcctagatctcatatatgatgttagtgaaccccacaattcttgtgaggtggatgctacagaagaatctcttcctgctctatgctggtgatcttgaataggagtaatgaggcatctcacaccagattcatcctgtgcggaactagccattggcactgcattttccacagcattttccccattttctgtagcccctaactgaagagcagcattggttgagccagaagcgtctttcggtcgattgttctcctgcttcaaaagatcatgaccgagcttaatccagagcccgaaaacttcacggcattcatcttttgttgactgttctatcttccctctaaatatggttttctttgagaaggccacattaagatatatcctgaggaaacaacagttcccatctaggctatcttgttcgatatcccagatcccctctactgtgaaatggtccccatatggtgcatcaccaattgattgagaggtttgaatcactagatgcctgtttttgtaaacacgaagtttctgaacctcttgacaagtcccgaattttgcaccaagataaatttttattggatgcaaaaacgagacatcccttacgagtcctccttgttcatctgaacgccacttggaacaactgaagtctttgtcaccacattttttgtggaaatcatccaaaaagtcaaaagaaccatctgacaataagaaattgaagaggacctccacaggcacctgaaactttgactccgtgatcagagtataagactcaggtacactaggagcagcctcatcaactggctcgaaattgaatgggtttagtgcaatgatgttgtcttcagctccatactcctcaacttttgagaactttctggaaatattgatgttggaatcactaccatcagcactactacttgagacagctgtaccattgacagacctgtcctgttgtgatgaatcttcatcttgtttagattcctttgttccttccaataaaacataaccattttcttcactactacttgctgactttgtctcctgacgttcaaggagtaatcttgcatcactaacatgctgttcccaaccatctactataattcgataggcttcatcacgtgttaagaaagatccaaaaaagtgccttttactaccagcaacaatttcaatggcattaggaaaaatggcagctgtctttgctttacgaaactattcttgttctaccttccttgttcttaaaaggttaattttgttttttctttttcgtta

SEQ ID NO: 9889 - DNA, 675 bp, Setaria italica
  Peptide Sequence Number=SeqID_75863
gaatgcatggcagtcctactagctgttgagaaatggagatcgtaccttcttggatcataccttcttggatagaaatttctcattggaactgattatagaagtctacgatttctgactgaacaaagggccaccactaagttatagaaaaagacacttctcaagcttatggacttgaacttcaaaatacagtacaagaaggggtcttccaatgcagcaactgatgctctctataggtgcccaaatcattctatcttacatgctgtatttgtgagtaacccttcttggatgcataatttgcaggaaggctatttggattatcctgaagacaaacagttgctcactgagcttgctattatgtcacccaatgaaaaagtgttttctcttcaaaatggcttaatcagatgcaagggtagagtctggatcgacaacaataagttgcacagactcacatgctgcagtcccttcatagtagtggtattgggggtcactcagggatttatgccacctaccacaaaattaaatatatgtttgcttggcccaaattgaaagctgcagtttcttcctttgtgcaagcttgccaagtctgtcaacaagctaaagttgagtatgttaagcttccaaggcttctacagcctctgccaattccagacaagcttgggccacagtgagtctata

SEQ ID NO: 9890 - DNA, 273 bp, Setaria italica
  Peptide Sequence Number=SeqID_75864
ctcttaaacctctatttcttcctttttcttcaatagtactcttaagacttgcgtcttccaaaaagttactttcactgttaatctcagggggtgggcaaagcaattgaatataaaccaatgaaaaacagagcataaacaaaaccatttgataagaacaggtttaatctataaaaacagatggcatccatcaaaagccttctgtggtgcaaatatacttattgtactatacagcacagggagagacttccgaattgcacatgggcatccaccagg

SEQ ID NO: 9891 - DNA, 259 bp, Setaria italica
  Peptide Sequence Number=SeqID_75865
tttagcaagttcatctgcattttccctcagacagtaaaggatacaagtccacagtaaagtaaatgtgcataaaaaggtaggtatcctacatgaagtcgctatgaaggtggtaaacttctgtgatctaagagcctctctatgactatgaaacttagcctccattatcagaatgatgaaataccggatgcacaacgcaatttctcgtaggaaacccagaacacaaactgccacgggccaagcctcgccatgtgggcaagaa

SEQ ID NO: 9892 - DNA, 717 bp, Setaria italica
  Peptide Sequence Number=SeqID_75866
cccgcatcttcccgacgatatgcttgcccttctcctccagcttgccccccactcctcctgcccaggtccatcacccgggcacgcctagcaccgcgcttcctcttcacatctccggcctcctcactggcagaggtccctgcagctaccaccatggctctgtcatctctgctgctgcccctcagcagtggcatcctcagctgatcccctgtcgcatcctcacaagattgcaggggagctccacttgctgaaactagctgggactgccagtgccggctcgttgatgcttctgcttgctctgatccatcaaagcatatttttgtcttgggcaattcattctcgcttctcgttgaagaagcaggtggactcgacttgttcttcgcaatggccttcgacactgatgcttccccaggtagctctctggtcgtgcctacagggggccttgcactattctcagtggttggctcacggttgagccatataaaaggcgctatcttgcgaggcacccagtcatccttatctgatatcatccacgagactggaatactttcacagttgggaagcaccaagctctgatgaagcgaagccttaattctgttgccgataagcgaggctatgtggctgttggtgatcttcctgtcctcgactgatgattccaactcccactctatctctggcatggacgtgaacccataccaaattcggtcacctggaggaggt

SEQ ID NO: 9893 - DNA, 1430 bp, Setaria italica
  Peptide Sequence Number=SeqID_75867
ttttttagttaattacaagacattttttaatattattcattcaaacaatccatagttatttcggagtatcacaacagtttccctagaggtcttgactcatgtaaagtatattattacatcccctactagtatttttcttcacccatgtatagttgtcttttgctctatttgtctagtagtaatggtctgacatctgccaagtaataaaatggttaaatcttcttgagcatgagctgcgccccatgatccggctgtagagtagagacagggaacggtgcatgtgtgtaagacggcgaaagcccaaacgagaagtgttgcaggatcatgctcagtgctatcttggcctcaagtagtgcaaagttctggccactacagatccgtggcccccagccaaaggggaagaaagcgggtgcttccttagatgccttggagataccctccgcaaacctctccggcttgaactcatcgacatcttctccccatatatctgggtcgtgatgaatgattactactggcaacaaaagttttactccaggtgggtacttgatccctcccagttccatctccttgtatgtttcccgttctagcaatgtgatcggtggatatagcctaagaacctcatatagtaccatggtcacaactttcagttgatgtgtgccgtcaagatccggttctctcttcccaaaaacacgcaggacctcctccctcgcgcggtcttgccactcaggatacatgctcagcacaactaatgcccatgtgagcagcaccgaagttgtttccatcccagcgaagtagaagagtttcagctcgcccatgatgtcgtccacggtcatcattggtttggagcttccgccatctttgctctctttaatgttggactgcattagcatgactagtaggtcatcgtcattggcatggccgttcttcatggccctctccttctttgtgatgatgccttttaggagcccttcgacctctcgtgcatttgctttaatccttctattgaccttggtaggtaggtaggtgtaacccgggatgtagaggtttgtcatgtgacttgcgagttgagcttgctctgattgtatcctgaagatccttctcccttcacttatgctgctgccgaacgccgcacgtgagatggcgtcgccggtgaggtcctgcaactccggccagacatctatctcccgcaccttgctggaccccatcttaccctcccatctcttgatcagctcactcgtgcaggcagtaaacgccggcaacattctcttcaacttctcgagttggaaagcatggttgattatcttccgatgaacggcccatttctggccctcgtggttcgacagcccgtcgccaatcatcttgataaaattggcgggcagcctttggtttcctgaagtgcccaaacttgttggacagcacttcccggacaa

SEQ ID NO: 9894 - DNA, 438 bp, Setaria italica
  Peptide Sequence Number=SeqID_75868
ggggctgctaagaaataaaagatttcttgtacagtgtacctggatggatgtaagtatggcagctacatcatatattgggctccactgattctgcaggatatctaagcatatactcccatcagcataaactgcacaccgtaaggaaattatgtcagtgtggcatttaagtggagattagaagataacattatccatagaccatagcagatatatcagcatccagcagaagtcaagacaacgaaaggcggagtgccgttggttcagaatcaaaagcaccacatgcactccaatatgctgcatatgcatgctttacagatgcaagcacggttattgtaaaatcataggtattcacagcacaaatacacatctagaaagaggataatgaaaaaagcacataacatttgtcaatataccaagttctgatgtctgagagcttag

SEQ ID NO: 9895 - DNA, 503 bp, Setaria italica
  Peptide Sequence Number=SeqID_75869
tcaagctcaaaaaagaaaaggaaaaggaagatatattatatatatggtttagaaaaatcacaagggtcaaaacagaactaacacggatcagcagacatacagattcataagtaagcaagaaccatgtgcttaaaacaataaatcttagaagagtttagtggctgaaaattcacataacattgaaggggtatcgaatatggagtatgtcccatgtctaaacgttgtaccatgctatgggttgcaatgtttaaatgtcattgtaacaagaaaaggtcacaaacactggaacaaataatctgggctgctaagaaataaaagatttcttgtacagtgtacctggatggatgtaagtatggcagctacatcatatattgggctccactgattctgcaggatatctaagcatatactcccatcagcataaatgttaggatgaaacatccgagaaacaaatcgcacagttggtggcttgtttggatattcttcagtaaactggagagtca

SEQ ID NO: 9896 - DNA, 898 bp, Setaria italica
  Peptide Sequence Number=SeqID_75870
tttttttttctatataaaatgttggcataatgctacattaattgagtttgtattccagatccagcacagggtaaaagtctgggacggagcaatctccaccggtccagccaagattagagagacgcacggcaaagctcatacaggagaacagcagtcacagctgaattcggctgttttttagttacaagcacaagcattttggtatgtaacggacggacacggtgagctgcgagatgcaatattgcaatgcatcagtctgccgtccagctctgctccacaacctcccgcaccttgcggttgtactctcgcttgttctcactgaacatgcgggcagcttccgagttagcaggcgaattcgggtttggatcacacagcaatgactggatggatgtaagtatggcagctacatcatatattgggctccactgattctgcaggatatctaagcatatactcccatcagcataaatgttaggatgaaacatccgagaaacaaatcgcacagttggtggcttgtttggatattcttcagtaaactggagagtcagcttgaacgtacctccatcccatggagtatcgtcagggccaaagatcacagcattccatagcagtatgttgctatcctgcggggcgccacttatgccggccggagggtcctgcatcagccgcttgaaatccctcatcaaccgcttcctcgcgggagtcgacatcctcggatgtctcagggaaagaagaaatcaatccaggtccggcagatggatggatccccagtccacactcgtgagaggaggtaggaggagccccggaacgcgtgagctcgcggagagggcgatgtgccgatgtagatgtccgatgaacggattgtgcagatcgacgaagtggtggagtcagaataaag

SEQ ID NO: 9897 - DNA, 463 bp, Setaria italica
  Peptide Sequence Number=SeqID_75871
caactaaaggttatggtcaatgcagacatcccgcagatgcgctggctggaaggaaaaaatggtgctgaaggcattggattgtgcagaactgaacacatggttggtacaatgcttcatgttgtagttgtggtaataatatattattaatgaccagtgtaatgttgtcactgcatcattcttttctgcttcagttcttttcttctgacgagaggattaaggccatgcgacagatgataatggcagatactgctgaacagaggcaagaagcattaggccttctcctgccatatcagaaaacagactttgaagggattttcgtgcaatggatggccttcctgtaactattcggcttttggatcctccacttcatgagttccttccagagggtaacgttgaggatgttgtccacatgttatcttgtcacactaattctactcacgaggaaatccttgcgagggtagaa

SEQ ID NO: 9898 - DNA, 1204 bp, Setaria italica
  Peptide Sequence Number=SeqID_75872
tctttctatccttctagttttgagaacccatcgtcatataaagacaaagtcattgctgcgggcctacctgcatcaccaggagctgctgtaggtcagatcgtctttgcagcttttgatgctgaaacatggcattcagaaggaaaatcagttattctggtaaggactgagaccagcgcagaggatgttggtggcatgcatgcagccgttggaattctcacagccagaggtggtatgacttctcatgctgcagttgtagcccgtggctggggcaaatgttgtgtggcaggatgctcaagcatccatgtaaatgatgctgagaaggtggtagtcgttggaggcaaggtgctttatgaaggtgattggctgtcactgaacggatcaactggagaggttatcttgggcaagctacctctatccctgccaacacttagtgctgatttgggaacattcatgtcttgggtggatgaagttaaacaactaaaggttatggtcaatgcagacactcccgcagatgcgctggctggaaggaaaaatggtgctgaaggcattggattgtgcagaactgaacacatgttcttttcttctgacgagaggattaaggccatgcgacagatgataatggcagatactgctgaacagaggcaagaagcattaggccttctcctgccatatcagaaaacagactttgaagggattttcgtgcaatggatggccttcctgtaactattcggcttttggatcctccacttcatgagttccttccagagggtaacgttgaggatgttgtccacatgttatcttgtcacactaattctactcacgaggaaatccttgcgagggtagaaaagctttctgaagtgaacccaatgctgggtttccgtgggtgcaggcttggtatatcatacccggaactgacagcaatgcaagcccgtgcggtctttgaagctgctattgctgtgaatgaccaaggtttccaagttttacctgagataatggtgcctcttgttggaacacctcaggaacttggccagcaggtgagcgtgattcgtcaagttgctgacaaggtttttgctcatgcagaaacaactattacatacagaattgggtccatgatcgaggttccgagggcagctcttatagctgatgagatagcagagctggccgagttcttctcctttgggacaaatgacctcacgcagatgac

SEQ ID NO: 9899 - DNA, 881 bp, Setaria italica
  Peptide Sequence Number=SeqID_75873
gtgcaatggatggtatgcggcaacaaacatgcatttgtgtttgatttcacagtcatgcaagtttcattaatgaatttgatagctgcaatactattatcttatgttcaagttgactgatttatgcatctgcaatatgattcacatcataactgaacatcgatatcttttttctgatgggatgaaaattgatctctgtaagtctgtagtgaactcccaagttaattatttccactggtaaaatatttgctgtgtcaacttacccctatgcattaaaatgagtttgaagcgtagagttaaattgcatatccaaccggggactactgcattcgtgcttgttttccaggccttcctgtaactattcggcttttggatcctccacttcatgagttccttccagagggtaacgttgaggatgttgtccacatgttatcttgtcacactaattctactcacgaggaaatccttgcgagggtagaaaagctttctgaagtgaacccaatgctgggtttccgtgggtgcaggcttggtatatcatacccggaactgacagcaatgcaagcccgtgcggtctttgaagctgctattgctgtgaatgaccaaggtttccaagttttacctgagataatggtgcctcttgttggaacacctcaggaacttggccagcaggtgagcgtgattcaagaaacaactattacatacagaattgggtccatgatcgaggttccgagggcagctcttatagctgatgagatagcagagctggccgagttcttctcctttgggacaaatgacctcacgcagatgacatttggttacagcagggatgacattggcaagtttctcccaacctacatgtcccagggtattctccagcacgatcc

SEQ ID NO: 9900 - DNA, 772 bp, Setaria italica
  Peptide Sequence Number=SeqID_75874
atctttattaccaaattatctaattaatgaactgaaaaacgaaatctcctaaacatacaatgctggtcaatgcttaaggaagtatcagctcacaacaaacaatgctggtcaatggctttcagcttattctgttaaatagatgctgtcaaacgtcatttctacaaaagaagtgcaaggcgctgcttgtatctttcaatccggcgaagcctttccttctgcaacccagcacgtatcctttttgcacgttttacatgctgcttcaataagtcacttgtgttatattcaccatcagcattcttctgtggctcttcatctgaacctacatctgcagcatcattattttccttatctgatatcctagaatctacaactgaagcaggcaaaggtcttggaagaattggttcaccatttccaaagcttggctgactttcatgtggaacaccattgcgcacccaggatctacaaagagcgtacaaggatcctgactcactgtccagcaagttaactttgcggtcattaatcaccacagtcgtagtgtcttctctgctcctgtcctttgggttgacctgctcactagatggagcaccaggggggactggattaaccttgggctgcggagctattggaactcctcgcggaggttgttgctcgggacgcgccaccacgcccgccaccagagcccgaggaacggccgcgaatgaacggggctgcgagtgcaccaggggctgcggcggctgcgcgatggggacggcgacggggtgggcgcgggggt

SEQ ID NO: 9901 - DNA, 359 bp, Setaria italica
  Peptide Sequence Number=SeqID_75875
ctgccatggagtacaccgctgggtccaggccattctcgctgaggaactcgaggaaggctggcggcagcggcagggacgcctcctgctgctctcctatgcgctcaggaacggaaccttctggacaatccgtctcctccattctcgccgggccgatttccccaagaaggagctgcgcaactaagctgaaaacctcgagcgtagaggatgggcggcgtccctgtgccaggcccgccaccgcctccgccgccgtagagtaggcccgtggcagccgcttgctctgctgctgccccgcgctgccgggcgctaaagccctgctctgcagctcgccgccaccgccgccgccgctcgggatcgagatg

SEQ ID NO: 9902 - DNA, 476 bp, Setaria italica
  Peptide Sequence Number=SeqID_75876
tattcttactaaggtaggtaggtacttggttcttccctagtcgaagaaacgcgtttaacgtacggacggaaaaccgggcttctgatctgggccatcaccctcgccgggctccttggcggcggtgccctccttgtgtacaacaccagcgccctctccggctaagaagatccatacacaatccatgccgcatgcgcttgcggttcgtgtaagatcagcccgggtgtctgtctgtaatctagcctcctttgatgcccagtataatgcttggttcatgtaacaatgctactacggcggctctccatacttttgggacaattattaattgatgctatatgtttagattaattactggcaatttctctgtgccttgtgagcatttggaattgtgaggaagatgatgatgctaagtgaatcatgtatatgtactaagacatgcttatcgatgtccgtgacgcatgtagtgtatgttatacacg

SEQ ID NO: 9903 - DNA, 851 bp, Setaria italica
  misc_feature (826)..(826): n is a, c, g, or t
  misc_feature (845)..(845): n is a, c, g, or t
  Peptide Sequence Number=SeqID_75877
ccttcgccgtcgtctgcggcaccggcaagaagatcaagaccgacaagcccttcgggattgggggtggcctgaccgtcgacgtcgatgcctccgggaggaaggtcaagggcaagggcgtgtaccagttcgttgacaagtacggcgccaacgtcgacggatacagcccaatctacaaggaggaggactggtctcccagcggtgacgtctacgtcggcggtaagtagtaatttcactcacttgtccagaatattttgctatgagtataccgcagaaattaagcaccagatcttattagctatgcatgctaggttgttagtaatttcagttagcatgcacatcttaaaaatgatggaaattaccagtagcagagggttgaaacaaatgtttatgatggttcaatctccttgttggtctttatattatataggaaaaaccgggcttctgaatctgggccatcccctcgccgggctccttggcggcggtgccctccttgtgtacaacaccagcgccctctccggctaagaagatccatacacaatccatgccgcatgcgcttgcggttcgtgtaagatcagcccgggtgtctgtctgtaatctagcctcctttgatgcccagtataatgcttggttcatgtaacaatgctactacggcggctctccatacttttgggacaattattaattgatgctatatgtttagattaattactggcaatttctctgtgccttgtgagcatttggaattgtgaggaagatgatgatgctaagtgaatacatgtatatgtaaactaaaaaaaaaaaaaaaaaaaaaaaaaaacaaaaaaanaaaaaaaaaaaaacaaaanagacac

SEQ ID NO: 9904 - DNA, 912 bp, Setaria italica
  Peptide Sequence Number=SeqID_75878
tcagaaagatgtatctgacacttctacagtctcataaacgagtaatgttcgtaagtgtaactgaagcatccggacatctcttcctcccaaaaattggattaagacaaaagaatagctgctccaaatttctgttttcaagcctcgtcaacatccatatccacccaagaaaaccctaatatcctttatatgtaccagttctctaacacaattgctctatcccaggccacacctctatggcatcctacaatcagtcatcgccacctccatcatcagcatccatatcagcatcgtcgtcatcccctgcatctgcttggtcggcagcatcaaactcccgccccatcgctgcttcattcattccttccatcacttcagtattctgctcaggaggacgaggatccttctgtggtttcaccgccatggtctccaggttatcctcggcaaagaatgcaccgaatggcttgggaaccttgaagtagcggtttcgctctttggcactctcgacaagattgttccagtgctcatctttctgcagggttgaagcggaacctacaaccagtacagcagacctagctcttgtgatggcaacattcattcgccgaaaatcagaaacaaacccaattttttgctccttgttgcatcttacaaacatatagcatcaattaataattgtaacaatgtactacctctctttcacggccctggaatccatcaacagtgtttagattaattactggcaatttcctctgtgccttgtgagcatttggaattgtgaggaagatgatgatgctaagtgaatacatgtatatgtactaagacatgcttatcgatgtccgtgacgcatgtagtgtatgttatacacgatccatacacaaatagtttgtatttcagtttaataacacgcatgaactattt

SEQ ID NO: 9905 - DNA, 1829 bp, Setaria italica
  Peptide Sequence Number=SeqID_75879
ttaaaggttaaactttaagtaaaactaaaactaaaactaacggttaactaaaaataaatagtggctgctgccgaagcgagggctgcctggcaacgtgctgcaaaccgttgcctggttcaggaggacagaaagagagccccaaaactagcctgctatccatcgtcggctgaacaacaacacggtacaaacaatgggagctgtagacattctgaagatcatcccatctccaatttcatgcctttgagctggaatcccatgaattctaatctgccaccagatgttagatggtgggttcagttacagccaagttttgggatccagaaggatcttgctagtgagcggcaatgttgtttgagcaggaaaattgatgagaagaaagtggaggattcagcaccaaagcctaaacatgaggaaactttactttgcgaagcagctgacactagcactgagaagagtggtgatatttttgagcctccatggatggtttcatcagccttcatgaagtattctcctgaaacaggcttggaagaactgaagactgttggtcgctattctcaagcgtctaagtgcagcgaaactgccagcaattgtttgtacaatgataatgaattccctgattttgaatgtattgacccagcacctttgaagaacccagagaaggctaattttgatatggatgtaccttggaaagaaggtgaaaagactcaaccatggtggcaaatcgctgatgagaatgagctcgctttactggtcgctgaaaaagcaatgcagcacattgagaattgtgatctgccaagacctacccagacagtacctgttcacaggacagaatcatatactcgcaaaaatataggtgattatggggggccatcatctcctgcaggaagagtgtcacatcctgttcctggacaatgtgaccatgtcaagtgtagctatagcacaggaagcacagatgagctggatttgttcaagggtaatggagtttgggaagagcacggaaggaatgatccattcagtgtgtcgcaagatttttctagcagtagcactaccggatcagaaagcaaacaaacactacagaatgtatcggagcgggataagatcttggaggcacttcgccactcacaaacccgtgctagggaagctgagttggctgccaagaaagcggacaacgagaaagatgatatcatcaagcttttgttccgacaggcctcacatctcttcgcatgcaatcagtggctgaagataatgcagctggagaatattgtcctccagctcaagcacaaagagcattcgatagcatccatcatacctgagcttccatggatgtccctgaaggagaagcctgcacagggtcaagagcagaaagattggactaggaggaaaggtagaaggcagaagaagggaggcggcttctttgacgcgatcttatttgcggtcgggttaggtcttgctggcgccgggtttcttcttggttggaccctgggttggctgttgccacagttgtagagttattggttgttctcttccgaggatagctaactagtcgttttgctgtgtagatccatagatggaagctccaggtgcacccttcacgggaatggtgcgaaatgatcaatgtttgttagaccccaggatcggttgatttggaaaccatgctggtgcaaagtcgtaaatgaatctccatactgcacaatgcacagagccctttttttaatttgttttgtttgttttggtgtaaatgtgtcgatttatcatcactgaatattgtaaatatggatcagtgttgaaattggaagttgggactttgttatctgtcgggttcagaccgt

SEQ ID NO: 9906 - DNA, 440 bp, Setaria italica
  Peptide Sequence Number=SeqID_75880
cgcggaacaaagagcaggaacaggagcaagatggggtcgtcgaggctagctcggacgacggtagcgcgtcggaggcggcgagcaccaccaccaccaagctctacttacgggaacctgccgtacaactgcgacagcgcgcagcttgccggcattgtgcaggagtacgccagcccggagatggtcgaggtgttgtacgatcgcaccacgggaagaagccgagggttcgccttcgtgacaatgaccacagttcaagactgcgagctagtcatcaagaacctcgacggcagtctgtacggtggccggacgatgaaggtaaacttcgctgacaggccgaaaccaaagctgccgctgtacccggagacggaccacaagctcttcgtcggcaacctgtcctggactgtcacctcggagatgctcacggaggcgttccagcggtgtgg

SEQ ID NO: 9907 - DNA, 1346 bp, Setaria italica
  Peptide Sequence Number=SeqID_75881
cagaaggaagtctcatagatttgcaactgtctgattttctcgcattcaatctttagatgtcaaatttctgggtcactgacttttagatgcagatcaacctaatctgaaccaacaaatcagatacatgacagaaggctatgccaacacctgcaacgtcactacgtcagcatcaattacaacaaaaattcatgtcatattcccttggtgagagctggcatgataaatacaatgatacaaggcaagaagaagatatcatcattggctcgatgtgccactgtccatggcgtctaaattcaactcttcatctgagtcaatcacctcttcaaaatcatagaaaggatgcgccggaggtcgcggcttgacagcttcaaagctatggaaaacaggggtagcaaaatctggtggattaaggacaatatatgctccacagttgttgtatcgctcctctgaagcctgaaattgcgggtagtctggagcactgaagagagtaatcagtttcccacattcgacatcatggtcgattgtatatcctttatccattcctaagaggtcgtgccgcttgtctcttgcatctggaccttcatgtgacctgatgattaacttcaaattatttgtgcgcagaaactgctgagtgatgtccggaccccaaagcaaaccgatgcctctttctttattcggtgaaagacccatctccaaggaagggtcagaccaaagcacatctcctgggatcaaattttgaccctcccaaggagggtcaagaacagttctccttgccttcaataactcatccagggatccgagcctcatggaagtcggatcaacagtgaaatcggccttgtttttgcgacctttctttcccttttttaatctctttgatggtagcacaaccgtcccacggaagatcccaccatgggcagtgtacacgcatcctgctattattgttgctagcggaaggtcctcaaaacatcttaaaaacttccgataaacctgagggccttgatctttatatttagccattacctcccgttcaaaaccataaactgatgtgcaatacttggattcatgattccctcggagaagaaacacacaatttggaagtaacaccttccaagcgaggaggagaagcagggtctcgagcccccaggcaccgcggtcgacgtagtccccgttgaagacgaagatgcgttcctcggacgggaacccggcgtcgcggagcaggaagatgacgtcgtggagctgtccgtggacgtccccgacgacgacgacggcttggcccgggcgcgggtcgacgcgcacgaggttgggctcgcggtgcaggatggcggccgcggcgagaacgaggcgct

SEQ ID NO: 9908 - DNA, 977 bp, Setaria italica
  Peptide Sequence Number=SeqID_75882
cgcggaggtgaggctggaggagcacggcggcgggcggatcatcgacatcacgcacgcgtaccggccggagctgccggcgcccgggcgggacgggctgggcccggtgacccagctcacggagtccatggccaacgggtccatcaacaacgtgtcggagctgcggatgctggtgcactccgggacccacgtcgatgcgccgggccatatggtgcaggagcacttcgaggccggcttggacgtcgacaagctcgacctcgacgtcctcaacgggcctgcattgctcattgatgttccaagagacacaaatataacagcccaagcaatggaatccctaaatatccccaaaggagttcgtcgggttctcttcaggacactgaacacagacaggaagctgatgtggacgaaggaaattgacacgagttttgttgggtttacagaggatggtgcacagtggctacttgataacactgacatcaagctagtcggggttgactatctatcatttgcagcatttgattacttgattccagcccatttggtctttttaaatagaccggacatgatcccaatagaaggtctgaaactagatcatgtaaaggctggaatatacatgttgcactgcttacctctcagactgatcggatgtgatggctcaccaatcaggtgcatccttatgaagtgatcacgtggtgctactgctgaaagtgatatggtatcatgccagctgatactgcatcattgcgcaaataccacctctgtatgaaagaaatgttgagttccgtgatgatatgtttcatgtttgtgcactcaacaaggaaacatcaataatttactactgacaagtccatgttgtatgaaagacttacaatggttcacctgggaagctatggctgtctgcttattttgaaccgttattgcaatattataatctgtaataatagctatgtctgcaattctccattactagcaatacctaa

SEQ ID NO: 9909 - DNA, 283 bp, Setaria italica
  Peptide Sequence Number=SeqID_75883
cggcgttttagacggcaccagttccggccaacgcgttgctccgacggccgccgcggcgggcggaagcaccgacgagcgccagccgcctgccaccccccttcccacggagggactggaaggaatccccgataaggagttgggatggtctgggcgctgacccccgtcgacacagtgcgcgggacgcagaagtattacatcttcgccgccgggacctacaaggtcggccgcaaagattgtgatgtcattgttcaagctgacacatctatatcccgggtccatgcgg

SEQ ID NO: 9910 - DNA, 903 bp, Setaria italica
  Peptide Sequence Number=SeqID_75884
atgtacaatatggtcttttctgctcttgggaagctgaagcaggtgtctttcataagcaatctctatgttaagatgaaaaccaatggggttgttcctgatgttttcacatacaatatcatgatctcaagttttggtagggttggcttagttgataaggcgcgtgaactttttgaagaaatggaggctagcagttgtaagcctgatgtcattacctacaattcttttataaactgcctagggaaaaatggagatctggatgaagcccacatgcttttcaaagagatgcaagagaaaggatatgatcctgatgtctttacttacagcatattaattgagtgcttcgggaaatccaataaggttgatatggcgtgcagcttatttgatgagatgattgcagagggatgtgttcctaatattgtaacctataacattttactagactgtttggagagacgtgggaagacagcagaagctcataaatttatgaaactctcaagcaacaggggttgactcctgactcgataacttactcaatacttgagcattggaagctagatctcaacaaagagcaagaatacgtaagccaagtcggattacaggttgggttgtaagtccagtgtgatgacctaccctggttcttttggttgcatacctcctgtgaggtggagctgaggatccataatctgtatgcaatgtctccaaatgattgctcaatcatcgtggaacaaactagtagtcctgactcatcagaatgataagttaagtatcaagactattgcatggctgccgatatttcagttctgaacaattcgtgaatgatggacatcttgagaagaggcaagaacatttgtacggctcctatcggaagactattttaaagatggtagaacctatcatgcaaaa

SEQ ID NO: 9911 - DNA, 1478 bp, Setaria italica
  Peptide Sequence Number=SeqID_75885
tttttttttttcgtatcacaaaaactctacataacaaaaagatgtgaatttttctcgtctggggtcgcagttaacaaactgatcgatacaccaggcattcgaattcgaacagggaaagctgaagccagcgtgccatctcaaaagtgctatggttggaataccactctgggcattcaaacatggataattggagccaatgtattatctaaaaaatgctatggttacaagaccattcttaatcttcatccggtaaggtggagattgggtccctatccaccctgtgcttcattcgcttgagcttcggcaatgccattatccaggaaggaacttcacatcctgaagataccagcacgttcgcgatattcctcaagaatggcttgtcctcctctgtgaagaacgtgatggcctccccagatctaccggctcttccgcatcgtcctatcctgtgaatataggcagcagctgactccggaaaatcgtagtttatcacacagtttacacctttgaaatccattccccgagcaatgacttctgttgctatcagtacccaggtctttccagctctcaagttgtcaacagcatcctgacgctgctcctcactgaggtctgcatgaattacatcagccctaacgtcatcaaatgccagttctttgtaaagctcttttgctctgtctttgctttggacaaagatcaatactggtggattgagagactcttgaaagctttgccgaagagctagcaacttccccctctcagttccagcgaaaatcaatttttgcttaatcagtgaggaagctgaattctttcttccaacaatgactcgaatggcatcgtgcattatagtgcgtgcaagagcctcaattgaatcgggcaatgtggcactgaacaaagaccgaattattgaaggattggaacaggcttcaacaactgaatcaatcacttcaacaaatccaagctcaaaaagtttatcagattcatccaagacaaggtattccacactgcaaaaggaggttatctgttatttagattctagattatgctttataatgctgaaagcaacaatcaacagttcatcctcaagtaacaagaaaacacacacgagttggaaaaccagcatagtggtagcttaattgtactatttctaagaaatagaacaataactgtttttttttggaatgaccgatgacatgtgtagtacagtggtcacctacaagttatcatttttagcgtgaaatgctgtgaactacacagctacgcaagttttaagtgtttctataaaaaaattgaaaatggaaccacaagttaacagccatgatcaaacataaatcaaaaccacaacttaccagaagtggccatcaatacattgcttatggaaccaattgcggtggaaaacaaaacaataaaacattcaagatatgatcacagacctacttaaatcaaggtctcttttctttaacaagcaatggtaccaaaacgaa

SEQ ID NO: 9912 - DNA, 1430 bp, Setaria italica
  misc_feature (1379)..(1430): n is a, c, g, or t
  Peptide Sequence Number=SeqID_75886
ttattgctaggagaaaagagcaagagttctttgcttccagtcctgactactcccatctagccagcaggatgggttcagaatatcttgctaaacttctttcgcagcaattagaggctgtgatcagagcacgcattccaagtataacatctttgataaacaaaacaattgatgagcttgaatccgagatggatcaccttggtagacctattgcctctgatgctggggctcaactgtacctcatactggagctttgccgtgcatttgacaaaatatttaaggaacatcttgacggaggacgacctggtggtgatcgaatttatggggtttttgacaatcaactcccttctgctctgcggaagcttccatttgaccgtcacctctccgtgcaaaatgttaagcgggttgtatcacaagcagacggttatcagcctcatttaattgctcctgagcaagggtaccgtcgtctgattgaatctgctctcaattattttagaggaccagcggaagcttctgtagacgctgtgcattttgttttgaaagagttggtgaggatgtccattggggagactcaggagttaaaaagatttccaactctccaagcggagcttgctgctgcatgctatgtggccctcgagagattccgtgaagatggacggaaaactactctgcggctggttgatatggagtcagcatatttgacggtggagttcttccgcaaactcccgcaggaagttgataagactggacctggaaatcccagaaccgcaaaccctcctcctactccttcagatgatcgttacacagatgcacacttcaggaggattgcttccaatgtgtcctcatacattggcatggtgtctgaaacgctgaagaatactatccccaagtctgttgttcactgtcaagtccgtgaagctaagcggtccctgcttaaccatttctatactcaagtgggcaggaaagatgctaagcaacttgcagtactcctcgatgaggatcctgcactcatggagcgcaggctgcaatgcttcaagaggcttgagctgtacaagtctgcacgtgatgagatcgatgccgtggcatggacacgatgaaggtaacatctgacatgcttgttagtcagtctcctttttaattagatgtgttgtgattcagcaaatgcagaattaactgccagctattctgcacttttgttgtgaaatcttggtagactgatcacttgtcttgtatattagcctgttaatatcagttgttatgtgcttgcattatatctatgtctcagctctcagctgctcttatggaacacaaatctaatagtctttcataacccatgtgcagacttgtctgcacgaatgagaatggagtctgttcctgaaatnnnnnnnnnnnnnnnnnnnnnnnnnnnnnnnnnnnnnnnnnnnnnnnnnnnn

SEQ ID NO: 9913 - DNA, 1328 bp, Setaria italica
  misc_feature (1)..(59): n is a, c, g, or t
  Peptide Sequence Number=SeqID_75887
nnnnnnnnnnnnnnnnnnnnnnnnnnnnnnnnnnnnnnnnnnnnnnnnnnnnnnnnnnngtttttttttttgttaatttcaagttgcatcaaggatatggatatcatctttgaatggactaataacacgatcttggtacagcaaaaatgaatggcgcgatggtctgttctcccagctatccggggttcagctccttcaccggttgccaaaatacaaagcatttgccactgaacatcaggtcaaaaacaatcttattgtctatcaatggatcgttctgatgatgcagaataaaagttagaaaagcgttcattgatgaaacacaagaaagcttcagaataaaaataacacatcccttccgctgtttgcagtttgcacaccttacagtgcgagccgacttatttttgtgctcgtaacgcttcaaagcaaacctagcaggcatctagatccctgcatggaggaggtttcggctctccgtgcaatgtggtgttgcctccagcggggccacagtttttccgctctgggtgctgtgtgcctcgagggggaatttctcctcttctcagcatctcaacaatctcaacaactcgttttggagtgaggtcctcataatagttgtatgtgtaaccctctgaacctttcgagtagtcagccacagcaatcatgggagcattcacacagcaacccatgcactccatttctccaacagaaaataaaccatcgctggtcacctcatttcgtttaactccaaggtgctccaacaatgtctcttcgatttcacgtgaaccacgaatcatgcaaggtgtagttccacacaccagaaggtggtacttaccaaccttagttcgattaaacattgtgtaaaatgtagcaacttcatatactctgattggcgcaacttcaacgattttagcaatagcatccatggctgcaactggcacccatccaccatgctgctgctgcgcaagatcaagcagtggaataatacctgattgcttgtagttgcttggatagtgagacagtatctccttgaccttcttcatgttcgcctccgagaactcccatttcatgtccgacttgttctccggcgaatcaatgtggtagttaagagccgtggagaagggcctggagctggagacggagcccctagcggccgcagcgtaggacgaggcggcgatcggggacggagccaggcggcgggcggcggcttccgacgcggaggaggaggcgaggccgaggaggcggcgggccgcgaggcgggcggccggcggcagcatggtggcgtggccggcgggggaggcgacgggagtcgggtggtggtggaggtatcggcg

SEQ ID NO: 9914 - DNA, 751 bp, Setaria italica
  Peptide Sequence Number=SeqID_75888
aaaaattcagaaacagaagcgaaagaatgagaattctcaacccatcagtgaggatcctcagttggatgcatctaaaagttcggaggcacaaggcataaatgccgaactgggactgggtgcaacaatagatatcgcaattgaatcccttgctgaaagggcggaaaaggagattgtttgctgttcttcagaaaagaatcttataggacattgtggaccatttctgtcaaaactctgcaggaatctgactttgctgcaaaagttcccagagttacaagcttctgccatgcttgctctttgcaggctaatgatcattgatccagaattctgcgaagcaaatcttcaaattctgtttactgttgctgaaagtgcaccttctgaaattgtccgatccaattgcactatagctcttggtgatttagcagttcgcttcccaaacctcttggaaccttggacagagtatatatatgcccgattgcgtgacccttcagcatctgtcaggaagaatgcagtgctggttatttctcatcttatactgaatgatatgatgaaggttaaaggttatataaatgaaatggctgtaaggatagaagatgaaaatgagaggatctcaagccttgcaaaactcttctttcatgagttgtcaaagaaaggaagcaatccaatttataatcttcttccggatatcctgggcagactgtgcaatcaacacctcaaagacgaaacatttcgcaacattatgcagttcttaatt

SEQ ID NO: 9915 - DNA, 260 bp, Setaria italica
  Peptide Sequence Number=SeqID_75889
tggcctccagtacaaagaccggggggaagttttcccatgaaagcggttgccagtgaggtcgacctgagctagtccaggtgtcgtgttcaaccccagggcctgtggcagcacgccggtgaagttattgctgaacaaggagatctctcttagcttcctcagttgagtgatctctgtgggcatctcgccgctaaggttattcttgtagagataaagcccctgcagttggcttagcttgccaatctctggtggtattgtcccgg

SEQ ID NO: 9916 - DNA, 574 bp, Setaria italica
  Peptide Sequence Number=SeqID_75890
ccggcgaccctctagtagtcgtaggctagcactagcagcaggaaggatacgctaccgccgccgcggctcccagcgccaccagaaaaaaggcaaggcgaaggcgagaccaactcggcttctcgcttttccgcccgcttgatttgcctccgccaccagacgggcgcggccggatagccgagagcaacctgtaaagtcagaggagaattggtccacggccacggccgagctgcagcaaccagcaggtggtgaggtgaggtgagcggaggccatcaggtgcccgctcgccgcgcgtcatggcccaccatatatacgccaccaccagcgggtgcgcccgccccgcgatcccgccgctctttcccgcgccgacgccgacccttcctctaccctcatcttcgtctcggttgcggcgacgccgggggagtcacagtcccagtcccagtcccactcccatgggcgcgaccgggcacctgggtgcgctggcggtggccgccggcgccgctaagccgcggaacggcggcaggccgtgcgcggccgtgctgggcgacccgctgccggcgctcgacgacgacccggg

SEQ ID NO: 9917 - DNA, 572 bp, Setaria italica
  Peptide Sequence Number=SeqID_75891
agtacttgcctttgttcattccccttgccgttgccgacgtacccgacgatggccatgtcgtgggtgaggttgttgccggagcacgccgggccgacgagctccccattcttgatgcacatgctgttgtacacgccgtgtgtgtagtgttggaagcagtcgtcgttggagtcgaatcccacggcgactggccgcctggccacggccttcatgagctcctcctcgctcttcttcttgacgaactcaaagtccctgacgctgacagcatgtggcaggcgcttcttctcttggcaagcgtccttcctctccttgtaagggtactgtgaatccaaggcgatccccccgtgctttttgacccatttcatggcgctccacggcaagccgctgctgcagccggagtcgtagctgtcgcagtcgatgagctcctgctcggacaacaccggcggctgcactcgcttcgctatcgcgtatgcgctctcgatcactgccacagcagcgaaagcccagcaagacccgcagtgtcgttgattcttgacctctgtgaccttgccttccgctgtccagttgacgcgata

SEQ ID NO: 9918 - DNA, 254 bp, Setaria italica
  Peptide Sequence Number=SeqID_75892
tatatctcccatcatcacggaaggctagccactgttctccagttgctgtctcaaaggcccctaaaagaaactgaatgttgtcacatatgtcactagcatcactctaacctgaagaaaagcatgagtccttagctcattcagtgccatcaaatcagcttcagaagcaccagcacgggctccagggtataccttaaatacagcctgtgttcccctcaatgggccttgaacacaacttccctcgtaaagtctaatcg

SEQ ID NO: 9919 - DNA, 653 bp, Setaria italica
  Peptide Sequence Number=SeqID_75893
tattatgattgctgtaatgttcaaaactaggagaactgaaggagctaaggatctgtttgcttctatccctgcaagtgggctggtgccttgtgtcaagacttaccatttaatgatgacgaattttattaaagaagggttactggaagaggcagatgatgtcttttcatccatggagaatgctggctatgatccggactctagaatgctgaatcatgtggccagggcgttgctagagaaacatgaaatagtcagggctggaacttatctttctaaaattgatgagagaaacttctctcttgaagattcaacaacaatgttgttggtcgatctcttcacaagcagagggacatgtcaggaacagataaaatatctcccagaaaagtatcattttcttgctggagctggctccagttgattgttacaagcttagatgcccagaaaatcctcttgtttgtaagacaggaaattacctggacactaacagtcaattacatgtgctattttctctattggcatgatcgaggtgtgacgagctggttgcatcttaggaaaaaaatggataaggacttctgatgtggagccaagccctagtggaatgatgctatgccacgctagtgagcaacaacaagcgccgccttcatcggacctggcat

SEQ ID NO: 9920 - DNA, 2887 bp, Setaria italica
  misc_feature (70)..(70): n is a, c, g, or t
  Peptide Sequence Number=SeqID_75894
ggctatgattatcttcagtgaaatgaggcagcaaggagcaaaacctgatgtggtaacctattcgacagtnatagctgcacattgcaggatggctaaaatggacgatgctatggaaatatttaatgaaatgattgatcaaggagtagcacccagtatagctacttaccagtgcctgattcagggtttttgtactcatggtggtttgctgaaagctaaggaattggtttttgaaatgatgagtaaaggcatgcgtcctgacattgtgttcttaacttcaataataaacagcctttgcaaagagggaagggtagtggacgcacaggatatatttgacatacttgtaagtatcggtctgcatcctgatgtttttgcgtatagttcgctgatggatggatactgcctagttggcaagatggagaaagcattgagagtatttgatgctatggtgtcagctggcattgaacctaatgttgcagtgtatggcacacttgttaatggctattgtaaaattggaaggattgatgatgggttgagtgttttcagagaaatggtgcataagggaattaagccctcaaccattgcgtacaacattgtactggatgggttattccaggctgggagaacagtttctgcgaaggaaagattccatgaaatgattgagagcgggatctcagtgggcactgacacatacaacaccgttcttcatggactttgcaaaaacaattcctttgatgaagcaattgtgcttttcaagaaattacaagcgatgaatgtaaagattgatattatgactattaatattatgattgctgtaatgttcaaaactaggagaactgaaggagctaaggatctgtttgcttctatccctgcaagtgggctggtgccttctgttgagacttatgatttaatgatgacaaatcttattaaagaagggttaccggaagaggcagatgatgtctttttatccatggagaatgctggctatgatccgaactctcgactgctgaatcatgtggtcagggcgttgctagagaaacatgaaatagtcagggctggaacttatctttctaaaattgatgagagaaacttctctcttgaagattcaacaacaatgttgttggtcgatctcttcacaagcagagggacatgtcaggaacagataaaatatctcccagaaaagtatcattttcttgcaggagctggttctagttgattgttaaatcatattcattcagcagatccagcaatgttgatcagactccccaatgctatacaaggaagatggaagaagcaatggtgctgtgccggcaaggtggctgcagtcagttcgtggggcttgctcttggcaagttcaactcgctgctcatcacctctaccgacctcttctccgagctcacatttgcagtatatgagcctctcccaatctgtggtcaaatatgatgatatacgagagcgacttaatagcagtgcaaaggatgaagatatttctcctttcacagctgttgacaaattgtttggtttcaatggtgggagattaaggatggatgagagaattgattttggcatgagtgatcctgatttagttccccttattatccaggaaaattatatcaattatcgacctaacaccatcgggaaggatgaaagtggagttaaaagaatgaacgctcttgcccgtgctgctgagtctatagcggatggtgatcttgttaatgtacaaataagaagatatcgacagtggcagttgtcgcaagctgcttgttttgcttcatctatagtacctgccgcttttatgcatgggaacagggaaatccttgaagcgggtgagcgaaactttaataggtttggtgggtggttgggtaagtactcaacaactaacaaaaacagaaggcttctggaagatgctcacagtcatattcttgcgtcccaacaggcaaacttggacagggagacattgaggttggattatcttactcttctcttgagacagctgactgacccactgaaaacaatgccaaaggatgaagctgttcaaaaggtggtggagtttatggacacctactctctcagccaggaagactttgacacgattgtggaaatatccaaatttaagggccatccaagtcctatggatgggattcaacctgccgttaaaagtgccttgacaaaggcatacaaacaaggaagtagttctcgtgttgttcgagcagcagatctaataaatattccaggcatgaagaaacctctaaagaaacgagtagcagcaatcttggagccagtagaagagagcctggctgatgaaaatggtgtagcatcagctgaagctgatgaagaggattcttctgatactgaaaataatgatgaacttgtgcctagtgactcaatgccaaaactggacttgcagagtgataagaagaaaggaattcaagtccagcttgacctcaagagcaacggaaacggctccagtgggaagaagacacctgcttccagatcaagagcagctcctgggtccggtgggaagtctgcgggaggctcagctgggaagaggaagaggtaactgacacatccgtcgctggcagttagctggcgactagtttggatggatcccctggtaataaggagcagtgcgaggctgagttttgactgtacatattcccatccgacgccatctgtaggcactaggcaactgtaccttctcgctgttcccttgtttgctccagggccatccatatcttgtttctgaaatttgtatgcacttaggcagttaggctacctcctcgctgacaagctacaacctgatttggtgttggtttgtgttcggttctcttttgtgaatgcttactgcaaagattacgagccattggctttccttgatgtaatgccgttc

SEQ ID NO: 9921 - DNA, 287 bp, Setaria italica
  Peptide Sequence Number=SeqID_75895
tttttttttaaggtaaagaacaatagcaatcctttcatctattaacaagtatcacagcatgtatagctgatgctcaacaaacaagctcagatctttttcttacagtcaggaacaaagagcacaaactacaaaagaaccaaaagaaactgactgtgtggtgtcaagccttattgaatatttgaattcacggtatatgtgcatgaacgattcctgttacccaaaaatatgggcaacatggatggtaatcagtgtcagtcatatcaagctcataggccaccttcagatgg

SEQ ID NO: 9922 - DNA, 312 bp, Setaria italica
  Peptide Sequence Number=SeqID_75896
cccgttcctccaggacggcgaccaggtcagcttcggcgctggcgcggcggcggcggcgctcgaggcctccacggcgtgccagcccctcctcaagacggtggcacccccgccgccgccgcccgagagcagcagcagcaacaagatcttctccgacgggctcacccccgtgctcgactcggattgtgctctctctcttctgtcatcccccgccaactcctccagcgtcgacgtcagccgcatggtccagccgacggagcacatccccgtggcgcagcccctcgtccccaacctgcaccagtctacctagttctt

SEQ ID NO: 9923 - DNA, 437 bp, Setaria italica
  Peptide Sequence Number=SeqID_75897
gacaactgcaaccgcgacgagaagctcatcgtcgtcgtcatgggcgagcgcgcggccgtcgccaacgccacccagccgggcgcggggctggcgccgtcgcccaacagcggaccatactcggcctactccccgccgccgcctttcggcatcgagatctcgccggcggcgtacccgccaccgagcgccgcgtcgtcgaaggtggcgggaattgccggcactgccgcgcttgccattggagcgctgttctacgctcttgtttgacatgtctgtttttgtttaaaaatgcgcgcgcagtggatggagaggatcatacggctgcttcgctagcttacccacgttgtatgtatcgagatatgccgattgatttgagtgaacttgtttttaatgtttaataatgttatcaaatgttgatgtaatgtatgtattgttgatgtaaa

SEQ ID NO: 9924 - DNA, 370 bp, Setaria italica
  Peptide Sequence Number=SeqID_75898
ctatgcccaggtcaagattcatgctggctttgactgcctttgtttcaattttctcttcttaatagataagtctgaaagaccagaattttctgtatcggacgttttaatgaccccatctgaaaaacctttattttcaccatgagaatgtttacctgatgaaggtgaaatatgtctacgcttctgcatgttttttagagtcaaattggcaggaggactacatttgcttatctcatactcaaagggctgatgcttggattctttcttcatttctttgatgctctcaggttatcatgatcaacccctacactgctcctcatttgatgtgactgatcgttttcaacaaattctcctttatctgataattcttcta

SEQ ID NO: 9925 - DNA, 455 bp, Setaria italica
  Peptide Sequence Number=SeqID_75899
cctccgccgcgggattgtacggctcgccgacaccggggtgaggcagcgggaacttcttcggcgccgtgtccgcggcggtggtggcggtggcggaagacgccgcgggtgtcgcaggaggtgaggaggaggatggtagcagcgccgccgcagcgggtgtggcagtgacgacagtggacgtcgggactgctgcgggtgagtccaccgtcggcgccggcgtacctgtagctgctgcggtcggcagcgccgacgacgacgacgacgccggctgcgtggcggtgtcggctgccatggccgccgccggcagaagcgcgaaggacgcccatagcgccgccgctatgaggagggcgacgagggtcgacgacgaccttgcgagctcggcagccattaataccgtacagtggaataatggatcaacaatccggctgcatgcgctggacctacacgtgtggtgacga

SEQ ID NO: 9926 - DNA, 735 bp, Setaria italica
  Peptide Sequence Number=SeqID_75900
tttttttttttttttttaaccacaatgctcacttcatattattattatggttagcataagtgcaaacgtgtacaaggaaaattatatgctcgcgcaaaggcgcggtaaacatgtagagtaaccttaataattcccctgtaaaaattacaagtaatttatatactgcatgcatgctaataagcgagggctgcagagacgcaagccacgacgagcggcaccacgacgttggccgcggccacgctcccccaccctcccgccggcgccgccccccagtagagcgggccggtgtacccgtacgttccggggccgtacccgccgggcccgccgaaccagccgtacccgccgccgccgcagcacacgtcgccgggcccgccgaacccgaggccgtggccgtcgaacccgaggctggacgcgctgggcagctcgtcgggcgtcggcaccggcagcgccgacgccacctccgccgcgggattgtacggctcgccgacaccggggtgaggcagcgggaacttcttcggcgccgtgtccgcggcggtggtggcggtggcggaagacgccgcgggtgtcgcaggaggtgaggaggaggatggtagcagcgccgccgcagcgggtgtggcagtgacgacagtggacgtcgggactgctgcgggtgagtccaccgtcggcgccggcgtacctgcatgcatgtaggcaccacatttcagtcgtcagcgccgacgacgacgacgacgccgg

SEQ ID NO: 9927 - DNA, 469 bp, Setaria italica
  Peptide Sequence Number=SeqID_75901
taagttaaccggtaaaactaaatttaactaaagtacttgtaattaaagtaaggtactaaatttccttaacaacaatgatgatgacgatgaggaaggaacattgtggaattacgtcattcttgatgaggggcatctaataaaaaacaataacacacaaagggccaaaagcttgtttgaaataccctgtgcccatcgcattgtgatcagtgggacacctatccaaaataaacttgaaggaatgtgggctctcttcaatttctgttgcccggatgtcttgggtgataaacagcagtaatttcatacattcaattactctctatcattcctgcattcccgaagttgctttatcgctcaatctaatgtatttatttctgtatattgttacaggttcaaaacgaggtatgagtctgctatccttcgaggaaatgacaagagtgctaccgctcgagagaagcatgtaggctcaaat

SEQ ID NO: 9928 - DNA, 3141 bp, Setaria italica
  Peptide Sequence Number=SeqID_75902
ctccccgcccttcgaaatctgcgacgatctcgacgacgacatcgacgagccggccaccgccgtccccgccgatcgccatcaccctgccgctgcccccacgcccaacggcctcaacgaccgcctcctccgcctcgcccgcagctgtttcccatcaatcaatccactaatcccatctcttctcgcagaagccgccgccgctgaagaagaaggcaggaaggtcaagctcgcgggccgccgccgcctatgcaagctcgccgccaccgccacccaccaacttttgcaggacgaggaggaggaccacgacgactgcgaaagcatccgcgacatcatggacgacctcaccacccgcctcgattcgctctccgtccgcaagcccaaccccaccgccaggcccacacaacagcagctcgcacccctgccctgcgccatcactgcggatccagatgccgaggatggcgcctcctcgcccctacgcatttctagctctgatgatgaagctacggccatcaccagacgggctgagctcaagccacaacctacttcagtcgcctcagcctttactgattatgcctgtggagcggtccgtggcaaggggaagggcaaaggtaccaaggatgcggggaggataaatagggtatcaaaggcctcatcctttgtcgattctgattctgattctgattacgacgatggtgatggaggggaaaagaacagccacagcttatgctgctaaggatgtcgcaaggaagagaaggccacccaaggcatcaacattcaggaacaatgacgacagcagcgatgacggcctgggtcaggagaaggaaaaccgtggagttgtggagaacgatcctgaggatgttggatgggagaagaccgaggacttcaagatggagccaactggaactgctgcaacatccaagccgtacaagctcccaggaaggatattcaagatgctttaccctcatcagcgtgagggcctccggtggctctgggttctgcattgcaggggaactggggggatcctaggggatgacatgggccttggcaagaccatgcaggtttctgcatttctggctggattgtttcattctcacctaatcaagagggtgctcattgttgctccaaagacacttctggctcattggaccaaggagctttcagttgtgggccttaagcagaagatcagagactactctggtcccagcacaaatattcgcagttatgagcttcaatatgctttcaaggagggtggtgtcctcctaacaacctatgacattgtccggaacaattacaagctgataagaggcaattcctacaacaatgatgatgacgatgaggaaggaacattgtggaattacgtcattcttgatgaggggcatctaataaaaaacaataacacacaaagggccaaaagcttgtttgaaataccctgtgcccatcgcattgtgatcagtgggacacctatccaaaataacttgaaggaaatgtgggctctcttcaatttctgttgcccggatgtcttgggtgataaacagcagttcaaaacgaggtatgagtctgctatccttcgaggaaatgacaagagtgctaccgctcgagagaagcatgtaggctcaaatgtagcaaaggaactaagagagcggatcaagccatactttttgcgacgcatgaaaagtgaagttttccttgacagtggggcatcagaggaaaaaacgttagccaagaagaatgaattaattgtctggctgaagctaacgccatgccagaggaagttatatgaagcttttctaaaaagtgagttggtccatttagccatacaaccaaagggatcaccattggctgcaatcacaatactgaagaaatatgcgatcacccactgctattgactaagaaagctgctgaaggtgtcctggaaggaatggatgaaatgttgaatgatcaagacattggaatggtagaaaaaatggctatgaaccttgcagatatggctcatgatgataatgtactggaagttggtcaggatgtctcatgcaaactatcattcatcatgtctttgttgcggaaccttgttaaagaggggcatcatgtcttaatattttcacagacccgtaaaatgctgaaccttattcaggaagcaatattattagagggctacaagtttttgcgcattgatggcacaaccaaggtttctgagcgggaaaggattgtgaaggacttccaagagggtcctggagctccaatatttttactaaccacacaagttggtggacttggacttacactcaccaaggcaacacgcgtcatagtagttgatcctgcttggaacccaagtacagacaatcaaagcgtagatcgcgcttaccgaattggccagaccaaagatgtgattgtataccgcttgatgacatctgcaaccattgaagaaaagatatacaagttacaggttttcaagggggctctgttcaggacagctacggagcaaaaagagcaaacacgttacttcagcaagagtgagattcatgagctttttagtttgccacaacaaggttttgatgtttccctcacgcagaagcagttgcaagaagagcatggtcaacaagttgttatggatgagtccttgaggcagcatatacagtttctggagcaacagggaatagctggcgtgagccatcacagcctgatgttctctaaaacagcaaccctgcccacattgagtgagaatgatgcactggacagcaaacctcgagggatgcccatgatgccccagcattattacaagggatcctcatctgactatgttgccagcgggcggcttttgcattgaagccaaaagatgaaaaattcactgctccaaggtacagtccgagcaacagacatgcagagagtcctgaagagattaaggcaagaatcaaccggctttcgcagaccctctccaacgcagtgctggtgtcgaagctaccggacggtggggagaagataaggaggcagataagtgagctggatgagaagctgacttctgcggagaaggagaagaaagataaggccaccgaagtgatctgcttggatgatctgagcgcggacatggagagcaatgtgttgtcggtttaggctgtgacttaggttttgggggggggggagccaatg

SEQ ID NO: 9929 - DNA, 586 bp, Setaria italica
  Peptide Sequence Number=SeqID_75903
gctgcaggtgcaggacggcgcgttctcgaaccggccggcgaccatcgccatcgcgtacctgacctacgaccaccgcgccgctatctaaaaccccaaacgaaaaggagaaacaaaaaaaggtagtcgccgatcatggcggtggccgtgcccaagatcgccatggagtggctccaggaccctctgagctgggcgttgctggccttggtggccttcgtgctcctgcagctccggcggcgaggcaaggggccgctgccgccgggcccgaagcccctgccgatcatcgggaacatgacgatgatggaccagctgacccaccgcggcctggcggcgctggccgagcagtacggcgggctcctccacctccggctgggccggctgcacgcgttcgccgtgtcgacgccggaatacgcgcgcgaggtgctgcaggtgcaggacggcgcgttctcgaaccggccggcgaccatcgccatcgcgtacctgacctacgaccgcgccgacatggcgttcgcgcactacgggcccttctggcgccagatgcgcaagctgtgcgtgatgaagctcttcagccggcggcgcgccgagacct

SEQ ID NO: 9930 - DNA, 389 bp, Setaria italica
  Peptide Sequence Number=SeqID_75904
tgcgcaacctctcccatctgacccacggggacggggcgccccacggactgaccttggggcccattaacatgagagaccgctgactacctgacctggttccatctgacttacgggacccacatgatggcttgtggggtccggctaacccttggcctttaccttttgacccggtcaatgttgaccgtccgctaatcaacgctggcactaccaggacccacctgacctttgacccattgacttggtcaacattcaccaatcaactgcagccaacttgtggacaaactcaaaacctaacatgtggccctctaacctacttatttaaattcagaaagtatttcaatatttgaaaatcaataataaattggtcctagcttagaaaaatatgaaaa

SEQ ID NO: 9931 - DNA, 508 bp, Setaria italica
  Peptide Sequence Number=SeqID_75905
cgaagagtcagagcctgctccaaaaatttcagcggcagctcttgttgctgcagatccttgccggcggctggccgcgcgggctgcatggccccgtgccggcggcgtcggtgagcatcttaaccacgtccctcatggtcggcctccccgccggcagcttcgcggtgcagagcacggcgatcctgagcaccctgagcatgtcctcccgctcgctcgccgtcgccgcggccgccacgcgcgggtccagcacaccgtcgaggctctccgtggcgagcttgccggagagccaggagacgatgtccctgccctcgccgaaccccgggtcgatcgggctccggccggtgaccagctccagcagcaccacgccgtagctgtacacgtccgtcttctccgtcacttttagcgagtaggccagctcaggggcgaggtagccgtgggttccggcgaagcaggtggacacggcggagtcggaggagtcgtcggcggggccttggcgacggcgatgccgaag

SEQ ID NO: 9932 - DNA, 368 bp, Setaria italica
  Peptide Sequence Number=SeqID_75906
ctcggcctccgcgcgggcctccgccacctcgtccttgctgaggaagctgcgtccccctctcgggaagtcagcttcgtcggacgccgcggcgaggagcgcggcggagcccggctgctggcgctccccgtcgcaatccccctgctcagacgccgcctcctccttgcggtgctttttgaactgcttgcggtcgggccgcaggtcggtcttgccgccgccaccgcccttccccttcttcctatcgccgcgcggcggcgccatggctgcgagggctcaggctccttgcttgcggcgctggttcgctgcggcagcctcggcgcgcacgctcgtagctccccgagcgcggcttgctcgtctgtcgccgctcgccg

SEQ ID NO: 9933 - DNA, 483 bp, Setaria italica
  Peptide Sequence Number=SeqID_75907
gaaagacatgaagcctctgaatgaccgtgttctaatcaaggtagcgtatcttttatttatttgatattaacatctggttgcacagttggtgtatttggtgtttgcttcaatttttcttgagtttagtgtttacttcgattcagtatgcatagccattcagttgggattcaattggcttaccctttgtttaaccatcacctggtttggttcctatttctcttctgataggttgctgaagctgaagataaaactccaggtggtctattgcttaccgaaaccaccaaggagaagccatctattggaacggtcgtagctgttggcccaggtcccctggatgaggaaggcaacaggagccccctgtctgtctctgcaggcagcaccgtcctctactccaagtacgccggcagcgagttcaagggcgccgatggcaccaactacatcgtgctgagggtgtcggatctgatggccgtgctctcctgagct

SEQ ID NO: 9934 - DNA, 1081 bp, Setaria italica
  misc_feature (1041)..(1081): n is a, c, g, or t
  Peptide Sequence Number=SeqID_75908
ccgctctctgcctgcctctctctcttccgctgctcttgctgttctctgtgctatccgctagggtttatctactcgaagaatggcgtcggtgcagctctccggcgcgggggttggcgccgcggccttctctgcgaaggggaaagcctccctagaaaagctccggcttccggcgatggtgaccgtcggcgaggtccgtcccgcgcggcgggcgtttcgcggcctcgtcgtcagggccgccaccgtcgtcgcccccaagtataaaacacttaagcccttggctgatagagtgcttgtaaagattaagtcttctgaggagaagacaaccggtggaattttgctccctacgactgctcagtccagacctcagggtggtgaggtagttgccgttggagaaggaaggaccattggggataagaaagttgatgtcagcattcaggttggagctcaagttgtatattcaaagtatgctggaactgaggttgagttgaatgattacaaccatctagttctaaaagaggatgacattataggtatcttagaaactgatgatgtgaaagacatgaagcctctgaatgaccgtgttctaatcaaggttgctgaagctgaagataaaactccaggtggtctattgcttaccgaaaccaccaaggagaagccatctattggaacggtcgtagctgttggcccaggtcccctggatgaggaaggcaacaggagccccctgtctgtctctgcaggcagcaccgtcctctactccaagtacgccggcagcgagttcaagggcgccgatggcaccaactacatcgtgctgagggtgtcggatctgatggccgtgctctcctgagctgagctgcgggttttcaacagttacctccaaagcttccgttcagctgtagcatcgccattttgtgggaacaggttcccttccctggcaactgtctttggtcgtagtatctgtactctatctgaggaataaacaagctttcaaaattcggtagcataaaaggattttcttagtaaaaaaaaaaaaaaaaaaaaaannnnnnnnnnnnnnnnnnnnnnnnnnnnnnnnnnnnnnnnn

SEQ ID NO: 9935 - DNA, 356 bp, Setaria italica
  Peptide Sequence Number=SeqID_75909
ccccttcaactcgcccggctggctcgcgctcgagctcggcgtcatcgtcgcgcagatggtcctgaccaccgccgtcgtcgccacctcacccagggagcgccccgcgtggccgctccgcctctgggtcgccgcgtacaacgtcggcaacgtgctcagcctcccgctcctctattggcgccaccggcattcctccgccggcggccgcggcgacgcgatgtcggacgacctcgagatgcacgccgccaacgatgctctaaggaacagctcgttcctgatgaacaaggcgcgggcgttcctggagctgttcttcgcgatgtggttcgtgatgggcaacgtgtgggtgttcgacgcgcggc

SEQ ID NO: 9936 - DNA, 974 bp, Setaria italica
  Peptide Sequence Number=SeqID_75910
tttactttttaccttaaccgtacgtacgtaccgtaaggtcttgttacgtcgtcttccggacgacctccacgccgccaacgatgctctaaggaacagctcgttcctgatgaacaggcgcgggcgttcctggagctgttcttcgcgatgtggttcgtgatgggcaacgtgtgggtgttcgacgcgcggctggggtcgttccaccgcgcgccgaggctgtacgcgctctgcatcggcctgctcgcctggaacgccgtcgtctactcgctccccttcctccttttcctcctgctctgctgcttcgtgcccatggtcggctacgcgctcggatacaacatgaactcggcctctgtcggccggggcgcctccgacgagcagctcgccgcgctgccgcggtggcggttcaaggagccggatgtgccgagggatcgagaccacgacgaccaagagtgctgcatctgcctggcgcagtacagggagaaggaggaggtgcggcagctgccgtgcacgcacatgttccacctcaagtgcgtggacaggtggctcaggatcatctcctcttgccctctatgcaagcaagagctcaagtgattgatgccgactccactcctacagatatatacattctctgaccgcgcccgccgatcagcggggcttgcaccctaagacagggagattggccggacgcgccgcgccacccgcatgtactgcgacctccggccgacacggcgatgcgtgcgtcgtacctctctctcaggggtttcgaaggtcctgtactgacctagatgctgacaggcgattgggacacttgcacttgcagcaggtagctgaaaagggcgtgatatatacttggtctaggaaaaggtggaaaatgtgtgaagaaaagaaagaaggctcgtttgtgtgtgtaatttgttgtgcctgcctttgctccacagaaaactggatacaaatatttggcgttagtagcaatcgaa

SEQ ID NO: 9937 - DNA, 240 bp, Setaria italica
  Peptide Sequence Number=SeqID_75911
accacatgtagcaggtgttgtggcattgctaaaggttctacatccccaatggtctcatgctgccctaaaatctgcaattatcacctctgcatcaaccaaggatgaacatggcacgccaattttagcagaagcactacctaggaaggtagctgacccatttgactatggaggggggaacataaatcctaatggagctgctgatcctggcctcatttacgacattgatccaagggagtacaa

SEQ ID NO: 9938 - DNA, 440 bp, Setaria italica
  Peptide Sequence Number=SeqID_75912
atgcgggcagagggggagaagatgaaagctgctgcgcaggagctggacaacctcgagagggtcaggagagcttctgtggcattaaatgtatggcaaccacaagttgttcatggtcgccagaagcagttggttcagcaatgcacggttcctgttgattctcgtcttagtgatctaaacatggagctgaaagtttgtaagcaacaaatagcaacttataagaacagttagcaaggagaagcacaagctgaatgagtatgaggaagcattgaaacgagcaaaatatcatcctctgcaggatagtcatacaagcggaattatcaaggaaccacgtgcaaaaaggaagaagctgaagtaaactttactgtttgccttcaggtcctatactatctcaagatagcaacacctgcgcggcagtgacggcaccaagcgaatgcatccat

SEQ ID NO: 9939 - DNA, 1093 bp, Setaria italica
  Peptide Sequence Number=SeqID_75913
gcggatcgcggaggcgaggcggcgggcggtgttcgaggcggaggcgcgggtgcttgcgtgcaggaggcggctggcagagctggaggagtcgatgcgggcagagggggagaagatgaaagctgctgcgcaggagctggacaacctcgagagggtcaggagagcttctgtggcattaaatgtatggcaaccacaagttgttcatggtcgccagaagcagttggttcagcaatgcacggttcctgttgattctcgtcttagtgatctaaacatggagctgaaagtttgtaagcaacaaatagcaacttataagaacagttatgtatgtgatcacttgtttcacttcatatgagcaagatgaaaaaggctagacttaccatagttgtgctttttctaccactgtcagagcaaggagaagcacaagctgaatgagtatgaggaagcattgaaacgagcaaaatatcatcctctgcaggatagtcatacaagcggaattatcaaggaaccacgtgcaaaaaggaagaagctgaagtaaactttactgtttgccttcagatagcaacacctgcgcggcagtgacggcaccaagcgaatgcatccatctaggaggaaggtgctgatttatcgcagattggacagcacatcaaggtttcatgcgttcggttcggtttgctgtccatgtgcaattgtgcatgatgcaaaaatgtggccgtggcattcttccttgctactttgccaagcacgaggatgctgtgctaggaagcatctatggtgtttccatgttgctgaaagaatctcgttcacctatgttgcacaccgtccaccggctggatgattctgttgtagaaagttgccgactattctatcacagaataatctggcgttgatgcttatccggttatcccttcgcgaagctgtgggctgtggagcagccagatttgactttgaaaagtgtaacttgtaagcaactacgcatcttgtattccatccgtatgtagacgcttatttattttccattacttgaaattgaaaagaaacgtatctgtatgtatctctcgctttatatgctcctgggcttatattagaaaagtgaacg

SEQ ID NO: 9940 - DNA, 639 bp, Setaria italica
  Peptide Sequence Number=SeqID_75914
ggactatgagttccttgaagagatcaatacaggcaagctatctgccacggtgagggtttctataaacctttgtttcgtacaaagcagatgttgaacaagttttcatgcatagcactagctggaatcgcaacagagtatcttctgtatggagttgcagaaggaggattagctgacatcaacaagcttgattggtttgctcaagagtttgggtttcacccagaagaaagctgattcacagctgagatgggctgtgctgaatactgttctcatgctgcggcgccatgaaaaggctagatcgcagcttgcagaagcaatgtcttctgggaagtcagtaggcacttgcatcgaagtcatagaagggaatataaacactgacgatatttaatacggatgtgattaatagtgcatactaatgttcgtggcctctataggccgtccattgtatcaatgggcatctaggtttagaccgtcatcaacaacaatcaaggataataaggagtttattctacatattagtgtttcttggtctgcactcagatgatagtgatagaactcagaggaacgaatttgttttcagcctatagcaaatgggcatcacttgtgcacttttcatctgaaactcaaaaaatattgaaaaaa

SEQ ID NO: 9941 - DNA, 565 bp, Setaria italica
  Peptide Sequence Number=SeqID_75915
gaaactcaaaatattgaaaacaataatataggattcatcaccgagaaattaaaataaaagttaagaatatgcagaaaccgtagtaaaattaatcatttatgaagatatatagcataaaaatcaccaaaacatgatttaccgaaagcaaactatttccgtccatggtttctgagccaaagaagtggaaggtgaacatttgcttttagttattccacctgttttatatcagtcagcaaacacttttaacgggatttcgctacaacatttcacagcattacgattatgtacagagcgtgaaccatatacccacatccaaagttcacccctcgaacaattcctgcaactgtgactccagttgcttaatgctgtacctcgcagtcgcagatttctgctgcttctccgagtagttctccatatgcattcggtactctgggataaccttctgaaatattgcctcccgcagcttttgtcggatcagaggatcagtaattttccaagtcttctgcacacggtaggtcatctcgaaagatgaagtgaacttatcaaacaactgatggggccacaa

SEQ ID NO: 9942 - DNA, 963 bp, Setaria italica
  misc_feature (20)..(20): n is a, c, g, or t
  Peptide Sequence Number=SeqID_75916
acattgggatcaatcgaagngaaatctccaaattgctgcagttctcggagggctttctatatcagctgcattagagatttctcagctccaaatcctgtttcttgtactaggtctattgtctttgtggtctgtggactttctttctaggtatattttgggtggaggggtgagaaacttgattcttgacacaattggacactatcttagccagaagtatcacaacagagttattcaggtgactctacactctgtactgctttgtcaggcatgggtcttgaatacagtcttggaagttgctttgacttgataaacaggtgaagttggtaatttatagattgaaaggaaaatgatctcaacatttacgtgcctcatacatttgtagcaatgcagctaccgttatttattcatttagtaaatgctgtggttaaccactatgagttatgttgcttgatatctaaataggcctatggcatggttaactttcttctttcctacatggccgaagtgacataacggtattatggacttagaatttggaggaacattggagggattttggatgagagttgatagcctttatctgccacctttagggcttgctagccatggaccataacaggtagttgtctaaatttggcaggtgtgcaattgttactggatacatctttaggatggggtactttgtttcgctcagtttgattgttccttctttacagtttctgaaaaaactggtgtccttttccttaggctcagtttggtgattcctgcttttgaggttctgagaaaagatcttttcttacttttaatactgcttgtgtaccaaaatttgagataatatgaactgaaaaagggaacaacgtttaagcaggatgacacaaaaaaaaaacatgatttaaacctggttgttcggttggaattcagaacagacagtaaaatttcaaatcttcactttctcccttttcc

SEQ ID NO: 9943 - DNA, 836 bp, Setaria italica
  Peptide Sequence Number=SeqID_75917
cgaggccgcgctcttcctcgtgcacggctcgcagggggaggacggcgggctccggggctttggcgccgcgaggcagctttctaggtatattttggtggaggggtgagaaacttgattcttgacacaattggacactatcttagccagaagtatcacaacagagttattcagcatgaagctggtcacttcctgatagcatacttgcttggtgtgcttccaaaaggatatacaattacaagcttggatacacttatcaagcaaggatcgcttaacgttcaagctggaacagcttttgtggactatgagttccttgaagagatcaatacaggcaagctatctgccacgatgttgaacaagttttcatgcatagcactagctggaatcgcaacagagtatcttctgtatggagttgcagaaggaggattagctgacatcaacaagcttgatggtttgctcaagagtttgggtttcacccagaagaaagctgattcacaggtgagatgggctgtgctgaatactgttctcatgctgcggcgccatgaaaaggctagatcgcagcttgcagaagcaatgtcttctgggaagtcagtaggcacttgcatcgaagtcatagaagggaatataaacactgacgatatttaatacggatgtgattaatagtgcatactaatgttcgtggcctctataggccgtccattgtatcaatgggcatctaggtttagaccgtcatcaacaacaatcaaggataataaggagtttattctacatattagtgtttcttggtctgcactcagatgatagtgaataagaaactcaagaaggaaacgaaatttaga

SEQ ID NO: 9944 - DNA, 1615 bp, Setaria italica
  Peptide Sequence Number=SeqID_75918
cttccttctcacgcggctcgaggcgcgcggtccaagggatcaagaatgagcacgaggctaggaggagcgccctgcggctgcttcggcttcacccggctgccgctccccgccgctaggctccggttgccgcctgctcgcgccgcggacacctccgcctcccagtcgccggcgcggctgagaggggtgctggagcaggtggacgaggcgctaagcaaggggaacgacgaggccgcgctcttcctcgtgcacggctcgcagggggaggacggcgggctccggggctttggcgccgcgaggcaggtacctcaacgactttataaattggatgaacttaagctaaatgggattgatacttctgctttcctatcgcccgtggatctgacattgggatcaatcgagagaaatctccaaattgctgcagttctcggagggctttctatatcagctgcattagagatttctcagctccaaatcctgtttcttgtactaggtctattgtctttgtggtctgtggactttctttgtatattttggtggaggggtgagaaacttgattcttgacacaattggacactatcttagccagaagtatcacaacagagttattcagcatgaagctggtcacttcctgatagcatacttgcttggtgtgcttccaaaaggatatacaattacaagcttggatacacttatcaagcaaggatcgcttaacgttcaagctggaacagcttttgtggactatgagttccttgaagagatcaatacaggcaagctatctgccacgatgttgaacaagttttcatgcatagcactagctggaatcgcaacagagtatcttctgtatggagttgcagaaggaggattagctgacatcaacaagcttgatggtttgctcaagagtttgggtttcacccagaagaaagctgattcacagcttttgtcggatcagaggatcagtaattttccaagtcttctgcacacggtaggtcatctcgaaagatgaagtgaacttatcaaacaactgatggggccacaagatctctgggactcgggtccgtttctggaaacaagacataacaggtgtccatgaagcatccacatatcctgtaatgaacaagttgagttggtcatggcgctgcaataaccatccttctcctaggataggtcccaaatctttatctttgttcgcttcttggagcatgaagtgtacattgttcagaaggaacatctgttgctgcccttggagctgcaaacctcttgagttcatatccaacataaactccaaagatgagatcagctgctcaaccagttcatggaatgctttcagatcatccttcagcattagacagactgtgttcttttgttgaaccagcattcgcatatgatccatgatatgccttgttgaatgatggacgccagtgtccgagatgaccaaaagttgcgatctcaccagactgttttgctcaacagatagcttgacaaacatgtccgacaatctgtggatgagcccttcgccttctgcaagaatgaactccttactttgacccgtgaacaatgctaagattgttggcatggcataattcagtgcttggtacatcattaccatatttaccat

SEQ ID NO: 9945 - DNA, 859 bp, Setaria italica
  Peptide Sequence Number=SeqID_75919
tcaaaggacctctactttcatccttgcactcacttcccagcatcttaaccttgcgatgcttctcatatgatctgatgcctctagaagatctgcccaatatttttcatatgggtccactagcaatggagtgggtggaggcgatggagaacagtccatatgaaatcttctcttctttataggaacattttccacgggatcactaaagcgcctaccaagaatggatacccctagcttctcagattcagagactggagcatcttcttgtgccatttcttgattcaaagcactgccaaataaatagaaagatccaattccgtccttccttccatcttgcccaaagaaagtccttgctctccttgcagccctttgcctcctgtttacagtcttccatctcacctcaggatttataggtcttgggagctccaagcccatactgttaggcttgctgctacacgaaggtccgcctctatctgttgttgattcacaagtacagcctttacaggtcatcgaaatatctatgttcttaagattacgaggtggtgaagatgatgaccctccactgcaagtgcaaattttgatcataaaatcagatggtcttcctgctattgctgaagaaacaggtgacctattcacatcaatcgcacccttggatccaattgatccctctttggctccagatttccttaacatagcccttgagccccacaccacaaagcttacggtactgattgaagaataatagcatcacagtccacatagcatgcacataagcaagagggttaaaactaaacaatgcctccacagccagccaccgccaccggtcatacatcagcagccactacttgaatcctcccagggc

SEQ ID NO: 9946 - DNA, 734 bp, Setaria italica
  Peptide Sequence Number=SeqID_75920
ccaatcatcccgagggatataattgtagccaccaggtgggccattctccctccaactttcataacctctcctaaatttattcctctctctgttgaaaacactttgcatgtgccttattctttgaactctctcttgttcctcctcatattcctgctgcatacgctgataatatcttttcttagcttcctcactgaaacttccacgacttgagttgttacttgtatacctccaagatgatgtcgtttgcattttatttagctgagtgtagaaccagtccacacttctgcgaacttgagtaatcgcgaaagtggcggtggtggcgccgatgaggccgaagatgagtattccccatgccttagacggtcggcgctcctgctccctcggtgcgccggcacccccgccgccgctagggcggtctgatttatcctcctgcggttgcggggccatcttctatgaggctccccccgcagattcttcttatctcccgattcgagctcgacggcgagaggcgccggcgaccaagttcatgcttccgcgatccaattccttctcctagccgccagctctctccccgctgcgctgcagcgttgggcgcggcgaccacgaggaggacgaattggagttggattggtggcggtgctgcggggaggggacggccggggacggggaggaagaggcggacaacgagtcgcgagtcctcgaccgactcgttgcctctctcgcgtggcgatgcg

SEQ ID NO: 9947 - DNA, 325 bp, Setaria italica
  Peptide Sequence Number=SeqID_75921
ctccgtattccggaaccccagctaaaatcctccgcccgctccctcacacccacatccactggcggcggcgcggcgatacgggcgccacagatcggcgcctgcttcctcccggccaacccaatccacgcctctcccctgagcacgcacgcctccgggcctccttccaccggagctgagcgtgatctcgtggggattcatctgttcgtggagcggagatccatccgggctttggtcgttctctcgttttgccgggtgctgtgagaagtcgtagcattcacatggattcaacagcgcaagacttccatcccaggacattctccatcaa

SEQ ID NO: 9948 - DNA, 690 bp, Setaria italica
  Peptide Sequence Number=SeqID_75922
gacggcgcctaccatgcttccgatgtgcagctcttcgtggaggacgacggcggagagcgcggtggtgaccacggtgcagagcggggtgaacatggccgagtagagggggcccctcaccgagatgcaccacgactgcaggtagaacaccacgcctgacccgaacacgccggcaaagatgtagcatgagagctcgaagagggagtggatcttccacgagctacggttcggtagcaggaagaaggtgaccgccgcggattgcagcgtggacaggaagcaggtccaggccgatagggtcagaggatccatgtacgatctgcagatgggcgcctgcaagatgagccaaagggaccaacaggagctgctgccgatgaggaagagcgctcccatcacccaatcgctgcttgacgggtaagcatgtacgaatcatggagagagagcttcagcagctttgggcctttgaagaatgcaatcgtgatagctcctccgatgcagactgcagtgccgaggaccttcgcaatgctagctacttctttgatgtttactctttcttgcccaacggctactgccatggcgaaggtgatcgccggtatcaagttcgtcatggtcgtggccagcgatgaggtccctaagtgcagcccgtggtagcacagattctggttcaccgttgctccaaacaagctgccatgaaca

SEQ ID NO: 9949 - DNA, 470 bp, Setaria italica
  Peptide Sequence Number=SeqID_75923
ccggccttggcgtcggagctgctggtgcccctcatgtagctgggcaccgacgccggcgccggggacatggccacgccgccgcggttccacgggcgacccggctcgtccaggaagccgcccctgggcttggacggaggcgtcaggagcgggtccttgggcttcttcttgggcgtctctttgctccgcaccatggctgctacttcggcggcggcgacggctgcggcttcttggattccgtcacttctcggatgggctagaggctacttcctctggacttcttcttggcttgcagagatcaacgacagtttcttttccaagctcttgtcttgttgaaactgaaggcttgcttgcacctgttggcttcttgagttgaaggacggcacgaaagcaaagcagcgaagcaaaggtgatgtgtgtacaatgagacgtacgtgtactgtgtattgcaagaaattaaaaaaaaaaaaaaa

SEQ ID NO: 9950 - DNA, 958 bp, Setaria italica
  misc_feature (890)..(958): n is a, c, g, or t
  Peptide Sequence Number=SeqID_75924
ggggccggccgcggaccaccgtgccggccaccaccacttccgacgccgaggaggaggcggcccccgcgggaggcgccggaggagacctcgagggcgtccagccgtacccggaggacggcagcggccggggccggccgccgtggtactacacggccttccgcggcggcaggcagcagcggggctacgggatgagcgacacgcggctgtaccagaacggccgctactactacgacgtggacgccggcaggtacggctacggccgcgagtcgaaccccgtgcggacccggcccgaggaggagtaccccggctccgggtacggccggcccgccggcggcgacaggcgcgggaggtacggcaacaacgcggcggcgggttaccggcggtacggcggcaacgacgacgagttcggcaacggagccatggatcagaactcgaacggcaacggcttccaggaggaggaaggccgccagaacggacgatacattccatgaaaggaaaactgaagcgtttgtaaatgatgagttgtcacgtgtgttgctgctactactggtagtgatcgtatcgtgtgctccatcgcagagtaatctcgcgtgggctagctgcgagtactcgaagagctagctgcgctgctcctttctgtccacgactacacgcagttcgttcctcgttggtgacgcaaccaatgaatgaataagttgtgtgtgtacaatgagacgtacgtgtactgtgtattgcagatcaaaatgctatcagccttattatttcatcagtcggtgcacaggtatctaagggttagtttcatcatcgaaggcatgcagcatgattgatgatatgttgcaaattgttgtgcatgtatgacttttccacggttaaaaaccctattaattttnnnnnnnnnnnnnnnnnnnnnnnnnnnnnnnnnnnnnnnnnnnnnnnnnnnnnnnnnnnnnnnnnnnnn

SEQ ID NO: 9951 - DNA, 410 bp, Setaria italica
  Peptide Sequence Number=SeqID_75925
tcttcccccctccctattgtggcgccgccgctcccgatgccgccgccgccactgacaaccaccgcctcccgccccaacccctccaggaggaccaggtgctacacggtcgcggcgccgcgcgccgcatgcgtcggaggccgggggctgctggagcatcaaccagccgtgatgttgcagaggacgatgcggaggaggaagacgaggaggtcccggacgcccctagatcctccaagaaggagaagaaaaggcaagagcgacaggcgcagcgtgaggctgaagaagctgcacgggattcaaggaggaataaacaagaccggtatgaggaaatgaggaggaggaaggatgaggagcgcgaggcacaagagagacaactggaagaagaagctagagcacggaaagcaaaggaggag

SEQ ID NO: 9952 - DNA, 587 bp, Setaria italica
  Peptide Sequence Number=SeqID_75926
atcaattgcagcaatcgattcgatcggaacccaaatcgagggtttggtgagcgagatcgccggcgaccgggaagatggacgccggcgggggcggcgtcttgggcgccgtgctctgcatgctcctggtcttcggcatcttccccctcctattgtggcgccgccgctccgatgccgccgccgccactgacaaccaccgcctcccgccccaacccctccaggaggaccaggtgctacacggtcgcggcgccgcgcgccgcatgcgtcggaggccgggggctgctggagcatcaaccagccgtgatgttgcagaggacgatgcggaggaggaagacgaggaggtcccggacgcccctagatcctccaagaaggagaagaaaaggcaagagcgacaggcgcagcgtgaggctgaagaagctgcacgggattcaaggagagatactacggcaacccttgagttgcctgaactttatttcaataacaaaaacatgtacacattaaattttacaagacatggttaagatggtaagagacggcgataattagaaaagagagggagaaagaaacaaatcaactacaagaggaaacta

SEQ ID NO: 9953 - DNA, 510 bp, Setaria italica
  misc_feature (451)..(510): n is a, c, g, or t
  Peptide Sequence Number=SeqID_75927
acggactagaacgaacgaaaggggtgaggtcacgaggctgcggcgtcgcggaccacaggggcggcagcggtggatgggaggcggcggctgggaggtgcggatttcgcgagaggaagggaggagaagaccaaactggataagggaataggatcggacggtggtaaaaatgtatttaccgcgggacgaaaccgagcgaaaggaatgacggacgaaaaatagtcgtcgtttcagtatttttagagtagagatgcttgggatatgccttaggactgtcgagaagtttgatgccccttgctatgttagttttgcactactgaacctgcctaaaatttctaaactagctctcactcacatgatgtcagccataagctttatttcacgtttgataagatttgagagtgctcatacacaaaacaagatggaacagtaaggtaatatctttgctataaannnnnnnnnnnnnnnnnnnnnnnnnnnnnnnnnnnnnnnnnnnnnnnnnnnnnnnnnnnn

SEQ ID NO: 9954 - DNA, 959 bp, Setaria italica
  misc_feature (871)..(959): n is a, c, g, or t
  Peptide Sequence Number=SeqID_75928
tggggagaccgccgccgccgaccgaccgagccatcccctcccccgctgacctccgccgtcgccggagcccggaggcgaagcaagcgtaaaggggaccgcagattgtgaaatcacccaaagagtcagggaaccgtccaatagtttcaatggctgctacaaagcttcaggccttttggaaccatcctgctggccccaagaccattcacttctgggcgccgacattcaaatggggtatcagcattgccaacattgctgactttgctaagccacctgagaagatatcttatcctcaacaagttgctgttgcttgcactggactcatttggtcaagatacagcttggtgatcacaccgaaaaactggaatcttttcagtgttaacgttgcaatggctggtacgggcctttatcagctttcacggaagataaggcaagattacttatctgatgagaaggatgctgctccacaaccggaagcataatgacaacaacagacaataataaccgattgaagagcctgaagtcttggagttggtctttattttccggggctgcaaggacctttcaatccaggacatgaatcttcttctagatgttttcttgttctaaagtcatgagcagatcaaagtgaactttctgccaaaaagaaaagtcatgcacatgcatcttcatatgttttgcttttgttcagtcaatcttttgctcgctagtaatttggaaatcatttgctaagcggattggtcataacccagtgttcagaggtgttggtgcccttcaccgtgaagatgctcgttttgttatgatttatgaagctgaattgttgtccatggatagtgagggtactcctcagcgaagaaacatttcttttttactnnnnnnnnnnnnnnnnnnnnnnnnnnnnnnnnnnnnnnnnnnnnnnnnnnnnnnnnnnnnnnnnnnnnnnnnnnnnnnnnnnnnnnnnn

SEQ ID NO: 9955 - DNA, 500 bp, Setaria italica
  Peptide Sequence Number=SeqID_75929
ctcagatcaattagggtcaggtgtccagaaacggcgaatgcaaactgttcccaccttaatcttcctcaccagcatgctcaagaagatagttggcagctagctcctcattcctgtcgcaagcaaagaatgccactatgacacgtgctctctcaaaccccatggattcaagctgaaatatatgcaaacgaagccagaatgtgataatgagatttcagatatccatgcagtaagcaggtagtgagttaaagtatgtcgtatataagtacccgtccaatggcctcctgctcctctggtgtaacactgatagcatgaggcatttcatcctgctcaggttgttctaagaagtccccctcgccaccttcaaagggctcgtttagtaactgaaggaactcagcatgattctcctgaatcaaccttagaatttgaggattctgcttgctcaattcctggataaagaaacttaaagtaaacttaaactaaaaatttaaccttaaggtaaa

SEQ ID NO: 9956 - DNA, 1585 bp, Setaria italica
  misc_feature (1)..(40): n is a, c, g, or t
  Peptide Sequence Number=SeqID_75930
nnnnnnnnnnnnnnnnnnnnnnnnnnnnnnnnnnnnnnnncttatgcagttgtcagcgatgacagactcgacatctcctgcacccatcatccacggatgagggaagtgttttgcaattcgcaatgacattacattcattgtcctccctgttatatccttgggcgattcagcatcgtcctcccaagccgtagttttcttcacccccgaacttgtgttgtacttaaaccaatgttccctatgcatacaggactgaaactgatgcttaccactacagatagacggaaggcaacgatggaaatgcacttcagaagcaatctatttaaattttacatgtatttaaatgtataaggcaacatgtaatataggtctcgcacaagggatcaattcaaagtgtcagctccatctcgactttgcttagtcatttggaacttccgcagtctcagatcaattagggtcaggtgtccagaaacggcgaatgcaaactgttcccacttaatcttcctcaccagcatgctcaagaagatagttggcagctagctcctcattcctgtcgcaggcaaagaatgccactatgacacgtgctctctcaaaccccatggattcaagccgtccaatggcctcctgctcctctggtgtaacactgatagcatgaggcatttcatcctgctcaggttgttctaagaagtccccctcgccaccttcaaagggctcgtttagtaactgaaggaactcagcatgattctcctgaatcaaccttagaatttgaggattctgcttgctcaattcctggagcataggctgcaagatttgtggatttgtgtggaccatttctctaagtgcttgaaactgctggttgtttctaagaaaatcaagtggtccacctccagcaccacctccagcattggaacccccctgtgggaaaagatttagtggagcagtgtttggaattccagagagactggcttcccctgtcggagctcgatcagtcgtgtttgaaccttgaccaccaacaggaacggcaacttcagctgttactggaataccagagtacaggtattcaacagcacgttctgggttgttgtaagcagcacgaagagcctgttggactttatctctgtcccaactgcccccacccatctccattagctggttaatcattgtgtcaagattgcttcctgatagtagatttgatgctgcatatgtgtttgagggggcctgtgcaggaggtccttcaggctgagaaattgtagttgctgccaccgggggttgaggagcttgtcgtggagcatctacaggaggtgcttgactggttgcaggagtgcttgagagctgggcagatgaggctccacttgaaccagacattttgctcttcccactggacatgacaacaaggaagtctttttcgctgactttattctcgtccaaagtactctcatctttcaaaatcttcccagtgaaaattagcagttgttgaccccatggataactatcttttcctagtttctcttcaattttctgctttacagccataatcgtgtcattgggctgcacccggatctcgaagttcgcgcccttgatggtcttc

SEQ ID NO: 9957 - DNA, 278 bp, Setaria italica
  Peptide Sequence Number=SeqID_75931
gggagcaagggcttagtttgaagtacggattcatacgaggcttttctgtaaaagtataggaggtagttacgatttgggctccgcttcgcaatattttgggccgcacttgaatgaccgataagcctagttgttgggtcgcgcggtcgcgcgaagtgtggaccatgcttcttccgagttttccgaggctggctgggaacaatcgtccaaatatgggccggacctccctagccagctaggcctacattcctcgtctcggcccagacgaaggttgctgccag

SEQ ID NO: 9958 - DNA, 717 bp, Setaria italica
  Peptide Sequence Number=SeqID_75932
tttcgcaaagcttggaacgacgagggctgtgacactgaaatatctatcagaggaagcatactggtacttcttcaaaacacatgcgtttggaagcacagatcccacgatgcacccaaggatggcatacgtagccatggagatagccaggatgtcgaatcgatctctccttagtgcaacaatcactgcctgtttgctgagggacaactttgacatccacttttggtgcaagcttttggcttttttgagacgtttcatcaagtggcatgcctccagttttggtgagcatccaggtgatgctctgaaccaaaataaacctgcacatctttggagtatggttagaacttctaaagagatagtggttcatcatcagtatgattgctcttcacaagaggaggtcccaaagatatcattggcgagtgtgatgtatggaggcgttaagcctccttctgggaagtttgaagccatagtatggaggtccccaataccgccctgctacaactatatctatacttgtgaggttcggaatctgaaaactggagctgttaagaggaagcgttcttaattctgtcatttgcatgtaggtgaatatctgttgcatggtttgattgggcctcactactcatcacaagttataattatatagtaaacaataatggtcttgccatctgtttgcaagttacaagtgattgttacctgaataaattatgaaattagcat

SEQ ID NO: 9959 - DNA, 681 bp, Setaria italica
  Peptide Sequence Number=SeqID_75933
gttcagcacgtggtggtgtatgtggccatatcattccatactttgggttcccaccattcatgtcactgaggaggatatgaagcggtaagtctttaacatagtttttactgccctttgcattcttctttgaggtgatgtcgcacacaggacacagaaggatgtatacttttgctgcgtgcttgttttgcctatccacattgttatgtgcaccatggattgtaggtgcatgaattctttcgtggatccttgtggtcaccatgtagtgtgtgtgctattaggccatctgctactgtttttacgtttaggttcttgtcgacatgatttgctagtattctctgttatcatgtaaagaaacctctccagaaaccatgcacgatctttttgttttatttttaaacaattagtaccatgtgaatgaatggaaaccaagtgtcttggaagatggaacatacgtcaattacttaggaaattgagaagatcatttcagaggtataatttctcccagaactgttgaacttggggcaagaagcataatttttgtaaatggattcttgttaaacttagtttttttaaaatattctggcatctgaaatactgcatgcaagaaaaatataatgattttgtggttttatggttttccttcatggataatgtttctagcatctcttgcttcatggtttt

SEQ ID NO: 9960 - DNA, 734 bp, Setaria italica
  Peptide Sequence Number=SeqID_75934
tgaaggaaggattgggatagtcagtctcacttttggtcgagaaataacccagtctctgcgctactccattagacaaaatgagggtgagattgccaataagcatccagtggagactacaatcccgctgcctagtgattatgatgagtattgggttgttgctgcggcagaaggatatattttcctactaggcgcacgatacatctcccaaggaggcacatctactcactgtgtaggaagttcagagtttctcacacttgagatcaagacattgaagattgagagggtctgttcagcacgtggtggtgtatgtggccatatcattccatactttgggttcccaccattcatgtcactgaggaggatatgaagcgttgcagcactaaatttgcatccaaagctgtggcttctttggtgccatgctgcccatgtggaagctaggtggtggtgaactgatgatgatgataatgctgattgtgttgctacgtgggttatcatgtagtctgtcgatattctttagaaggttgatgtagctatcaagctcggtctatgttcttaacctagtttgccccacaactctgattattgctcggtctgatgtagggatcaacttggtctgtgttcttaatctagtttgcccacaacaactatcactcgggctgatgtagcgatcgaacttggttcatgtagttaatctagtttgcagactgcggtaattataactccaaaaaaaaaaa

SEQ ID NO: 9961 - DNA, 824 bp, Setaria italica
  misc_feature (823)..(824): n is a, c, g, or t
  Peptide Sequence Number=SeqID_75935
gcaaatggcttactacatatctgaaatattagacgccggactgcagggacctctatttatggtgactctagaaaactgcccaggtgaagtttttatcaatgtctctcctaccaagtgctggagcttggtccgcgagaggctgaatatggaaatacggaggcaactcagtatgggaagagctaacctgcctacactacagcctccaggatcagttgatggtcttgaaatgtttgggttctcgtcaccggcgatagttcaggcaatcgaggcgcaggatgtagatagcatctgcacagagtactggagatccacggcccatgttgtcgctggtgatcatgacagtcggcatatgccgccaccccagggtccaccgcacattgcgctgagggggctgttccagagagccagccgcgacgagctgcgagccctacggagtctactgacgagcaatagcagcctggacgataggaccaggcaacaggctgcccaaatcctcgacgaggagattgccaagcagtggcgctgacaagcctaaatagaacttctaatctcttgacggcatggaatttttgtgacgggaccaagcagttaggcttgctccttccgttgccctcgtgcccattctttgcattcttgtgtccatgctccctgacatgaggattttgccaccatctgggtgttcttatgcggatcggatgactgacagctcaccaactgaccagcgcacataccgttatgttcctaaatgttcagataaatattgtccgtctccaaactcttgtggtgccctgctgttcttatgtcgcttgaagtcaaatatttnn

SEQ ID NO: 9962 - DNA, 896 bp, Setaria italica
  Peptide Sequence Number=SeqID_75936
tatcatctgttagcaaatttgcagaagtgcttccagttttgatttgcgcggttcaatcatacctgtggtacttgtctcaatcttttcttttgcatattgccaacgatttaaggaactgctcctgctccaccaggggagcaggagccggagctctaccaaaggggccctgacttcagcttatgaaatattaatattttgaccttaaattttgtctctgatcattgagaaatagtagcacaatctggactagccattttatttgtcgcttctcacatttatttcatgtcttttgcttgacggatgcaggaagtttttaatccaccagaaatggaaggggaaacagaagcaaaaaatggtccttgtacttccattagaaatgatgtggttttcgaacaagatttgggttcttcgtatcaattatgtatgtgtcctggtactttccagaaaaccaaattctaaatgagcaaggttacgttggatctgtttttattttccagccaattctgtagggggcaatatgaagtttgaggaacatggccagttgctatctcaggcaaaaagggatttgtcgtgtgtggtacaggctttctcttgataacattcatcctttcgttttttccaacacccttatgatatcttgtttaaccatacaaattataattgataaacaattagtgctttacatgccaaataattcagcaataaaaccgaataaaacatttactaaattagttcgaagtgggttcggacattccaacttgtttgcatgagctcaaaatatcagtttggttttaagaaaaaccataagcagttactttcgcacgtgaaatgtatgttcgcttgttgactatcttgccttaataattgcattttctatgtcaatatgtccagactac

SEQ ID NO: 9963 - DNA, 527 bp, Setaria italica
  Peptide Sequence Number=SeqID_75937
caaggaggatgtacttggtttgagatcacaatggataataggcggttgacactgattgtgaagataatccaaaagcatccatgatatctaccgcaatgtccagtctctgagctaagctgagcgtattgctcagactctgtattttggatgctggatgcagccaaccatttaggttaccattgggcatcgaactccaaaaccagtgccttgaattcttggccttggtgatcaatgcttaagcagcaggtgatgatctttatgagacatcggtggcgcacccttcgcagtgcctcacattcagccacaaaaacttctagtagacccagattgccacacgttgaatacctttacagctgcggtaattcccttgtcttgtaaagtgcacttataaactgcaccatagcttccttgtccgagcagattaacctgcgaaaaatggtcagtcccatttgctaatgcttgatatgaaaccctttcgtgctgttcatcaattgctgtgggaatgagtttgtatttttccttttcct

SEQ ID NO: 9964 - DNA, 553 bp, Setaria italica
  Peptide Sequence Number=SeqID_75938
gtggaatcaaatggataagacaaactactaaacctaagaatagaagtgcgcagattgacgctacggtgaccataagtgatcttgacattcgccctctgttcttccccgcagctgctgtggagcacggagctaaatgaagttgagggtttccgccacaaagctcatcatttccatcaattgacaagtgagttgcatttgcaaaaggacccccttttggcacttcgccttgcagatcattgaaggacaaatccagttttgccaacaatgtcaaattctgtagaactttggggatggaacctgacaagttgttgtgtgcaagatacagttgttgcaggtggccaatgctagcaagggcatcaggaatactaccagatagcttattcattgttaggttcagtaatgcaagaccttttatgttcttcagagattgaggtatgcttccttctaataagttgttatcgagcagcagccgtaccaacgatatacagttcccaacactagctggtatggtacctgacaacttgtttccagacagaatcagttcgttaagatt

SEQ ID NO: 9965 - DNA, 537 bp, Setaria italica
  Peptide Sequence Number=SeqID_75939
cacaatggataataggcggttgacactgattgtgaagataatccaaagcatccatgatatctaccgcaatgtccagtctctgagctaagctgagcgtattgctcagactctgtattttggatgctggatgcagccaaccatttaggttaccattgggcatgaactcaaaaaccagtgccttgaattcttggccttggtgatcaatgcttaagcagcaggtgatgatctttatgagacatcggtggcgcacccttcgcagtgcctcacattcagccacaaaacttctagtagacccagattgccacacgttgaatacctttacagctgcggtaattcccttgtcttgtaaagtgcacttataaactgcaccatagcttgacattcgccttctgttcttccccgcagcagctgtcgagcacggagctaagtgaagttgagggtttccgccacaaagctcatcatttccatcaattgacaagtgagttgcatttgcaaaaggaccccctttggccacttcgccttgcagatcattgaatg

SEQ ID NO: 9966 - DNA, 267 bp, Setaria italica
  Peptide Sequence Number=SeqID_75940
ggagaaggcgagggtcgaggcggggaaggcggcgagcttgacggcgagaggcaaggaggaagacgagaaggccaagcccgtggcggcggcgccgccgcatgcgaccgagaaggcgaggccgggaggtcatcgagacgaccaggacgagaaggcgagggccgagcacagggagaaggtcgcccgcgaggccgcgcgcaggatcgaggcggcgcgggcgagggtggcggaggccaaggccaaggcggagcgggagagacagtgcgagca

SEQ ID NO: 9967 - DNA, 1086 bp, Setaria italica
  Peptide Sequence Number=SeqID_75941
atctcctcccgatccccctccatttctcccccatcccttcccccctccttccttcctcacctgtctgttccgcaaccgccgccgccgcattgggcgcctaggaggggggcgcaatggagcagtacgagaagaaggagaagattggggagggcacgtatggggtggtgtacaaggcgctggacaaggccaccaacgagacgatcgcgctcaagaagatccgcctcgagcaggaggatgagggcgtcccctccaccgccatccgcgagatctctctactcaaggagatgaaccacggcaacatcgtcaggttacatgatgttgtccacagcgagaagcgcatatatcttgtctttgaatacctggatctggacctcaagaagttcatggattcttgtccggagtttgcgaaaaatcccactttgatcaagtcatacctctaccagatactccgtggtgttgcttactgccattctcatagagttcttcatcgagatttgaagcctcagaatttattgatagatcggcgtactaatgctgtgaagcttgcagattttggtttagccagagcatttggaattcctgtccgtacatttactcatgaggtggtgacattatggtacagagccccagaaattcttcttggagcaagacagtattccactccagttgatgtatggtctgtgggttgtatctttgcggaaatggtaaaccaaaagccactattccctggtgattctgagatcgatgagctgtttaagatattcagggtactaggtacaccaaatgaacaaagttggccaggagttagctgtttgcctgacttcaagactgctttccccaggtggccggcccaggacctggcagcaatcgtcccaaatcttgaacctgctggtttggaccttctttctaaaatgcttcggtacgagccaagcaaaagaatcacagctaggcaggctcttgagcatgagtacttcaaggaccttgagatggtacagtgacctgctagtgtggtgtgttggcatttgtatgagctgagtcccttgtttcattccttttatgaacccgtgtactctctctctctctctc

SEQ ID NO: 9968 - DNA, 1513 bp, Setaria italica
  misc_feature (1405)..(1405): n is a, c, g, or t
  misc_feature (1413)..(1413): n is a, c, g, or t
  misc_feature (1435)..(1435): n is a, c, g, or t
  Peptide Sequence Number=SeqID_75942
caacccgccccgccccggctccacgcgagtccacacaccccacccacccacaccactccctcctccgccctccccccttcgccgccgccgccagttcacggccgccctgccgcccgatccgaccgcggacgcacggatcgccccgccatggaccagtacgagaaggtggagaagatcggggagggcacgtacggggtggtgtacaaggccaaggaccgtcacaccaacgagacgatcgcgctcaagaagatccgcctcgagcaggaggacgagggcgtcccctccaccgccatccgcgagatctccctcctcaaggagatgcaccaccgcaacatcgtcaggctgcaggacgtcgtgcacaacgacaagtgcatatacctcgtcttcgagtacctcgacctcgacctcaagaagcacatggactcatccccggacttcaagaaccaccgcatagtcaagtccttcctctaccagattctgcggggcatcgcgtactgccactcgcaccgcgtgctccaccgcgatttgaagccgcagaacctgctgattgatcgccgtaccaacctattgaagcttgctgactttggattggcaagggcgttcggcattcctgttcggacttttactcacgaggtggtgacactttggtatagagcacctgaaattcttcttggtgcgaggcattattctaccccagttgatgtgtggtcagttggttgcatttttgctgaaatggtgaaccagaagccactatttcctggtgattctgagattgatgagctgtttaagattttcagaatactaggcactccaaatgaagaaacttggccaggcgttgcttccttacctgactacaagtcaacttttccaaagtggccatccgtggactttgcaacagtggtcccaacacttgaacctgcgggaattgatcttctatcaaaaatgctgcggctagacccgagcaagagaatcaacgcccgttcagccctcgagcacgagtacttcaaggacctcgaagtagcctagtagatcagccatgcccgctcccgcccccctctctgtatattagattgcattgctcggccggccgagccctcctttttggctgctgcattaatcttaagatggtgtgctccttttgactcttggttgtgtagagaaatgagagcagaaggttatctatcgatgccaatcagtgtaactgtgtaagttgacccaaactgagagatctttgtgccatgggagccctacatcgcaattttgctcggctgtgtcaggcgatatggaccttttccagctggatgctcactctgttccaggcttccagctggtgctatacttgggattccgtttttaaggaaaacctctcgaagaacgtacgtttttggccttgctgcatttaacncttaaagntgggtgtgtccttccgtttttnacgttcgttgggttagtgttaagaagtaaaattcggaagaggacagtaaaaaggtttatactatccggatcgccaatc

SEQ ID NO: 9969 - DNA, 577 bp, Setaria italica
  Peptide Sequence Number=SeqID_75943
ggagcctggaggcatagagcagcttcaggtggcgacagaccaaacagacctgtagttgtagacttgcagcccagcgcggagaaatgtacacagttaagagtgcgattttcatcaaataaaacctgaacatgtggatgccagcttggcaacttcatgacctatatgctcaaatttagcaggtgcaacctcctgttttattgatccaatgtaaaatcaatatgaattggttcttcacaaactcccttaagcatcatatcagctatttcatcgcacgatccacaaacaatgccatcatgctctctattcaatgggcagcaccacagcagcctcagacatatgtcctttcagttatcatttcaagaaagctgcattatttcctaacacactgtacagtgcaacactgacaaacagctgctcgaagataggatgaaacggggtgacaccacagcttcaggcaagttgttaaagcaagatggtgattccacaaacaactaatgtcatggtgtcctcatgccaatccccttctccccatttactaattttttttaacaactgaagaatgtgagatagcggctaa

SEQ ID NO: 9970 - DNA, 418 bp, Setaria italica
  misc_feature (325)..(418): n is a, c, g, or t
  Peptide Sequence Number=SeqID_75944
cttcccgggccgctaccgtagcaattccccaacggtggaaagctggtgcctcttctggcggaggctggagcaattgccagtgccagtgccaaggctactgccactccttctttgtagacaggttctacattgtcattctggtcgcttggtggctatatgcaattgttgcatactaatgtgattgtcgtataataaagatgaataaggggtttcatcgacctcaattgcctcttggctttggtgttgactgtaattgtagcttcaggtggctattaagcctctctgcagatcttcagacacaaataaatcatttctcctgaaactnnnnnnnnnnnnnnnnnnnnnnnnnnnnnnnnnnnnnnnnnnnnnnnnnnnnnnnnnnnnnnnnnnnnnnnnnnnnnnnnnnnnnnnnnnnnnn

SEQ ID NO: 9971 - DNA, 1234 bp, Setaria italica
  misc_feature (1228)..(1228): n is a, c, g, or t
  Peptide Sequence Number=SeqID_75945
cgacagcaacccctccacggtgacgaattgcaagcatgactaccatctccagtgtattcttgaatggtgccagagaagctcccaatgtccaatgtgttggcagcctatcagcatgaaagatcctatgagtcaagagctactggaggctgttgaacaagagaggaacatgcgagctaatcgttcacatagtactgctctttttcggcatccgatgctgggagattttgagattcctgtaggtgcagatgatgcagaacttgaagaacgcattatccagcatctggctgctgcagctgcagtgcgtaggtcacaccggcatcatagaagagatgggcaccacagcagatcgggagcaaatagtcacccacaagttcttgtgctttcaacagatgagcacacaacctcaggtcaagaaggggattatgaacaagcccctgctgtattttctggtcaccgtttaggtactcttgttcaacaggaacgcacaactcgtggtttagagggtgctatcaatccacctctctattgttctactcctgctgatagtaacgagaggattgctgggatgcaatctacacctgttgatcaagatagagcaggaccatccgatttaccatcgttctctgacacactgagatctcgtctgcagtcagcttcaatgaagtacaaggattctataaccaagagtgcaagtgggtggagggaaaggtggttttcgcggagcaacaccatatcggatatcagttctgaagtaaggagggaggtcaacgcagggattgctgcagtctctcgcatgatggaacggatggatacaagggacggaacagggccttctgctacctctgcatcaggatctggttctcattgagggaatgtccttggaataactgacacaactcaaaagacaggtccaaaggaaaacagcatctgttcagagctcctgggatccagcgatgcttcatgatctctgtttggtccttgcttcagaagttcgctgaagctcttgcgtccaggtcacgggaaggaacaacacatgtgcttccactcgagtcttctatacgttttcccctgcgttaacatctgcaaggaatgtaactaatgagatgtctgtaactgtaacaatatgagtgttggtggcgcggttcctgttcatatccatacaaatataccgtgccaagggatcgtttctctttctcatggtaaattctctgtctgacaaaaaaaaaanaaaaac

SEQ ID NO: 9972 - DNA, 1067 bp, Setaria italica
  Peptide Sequence Number=SeqID_75946
cgccagcacccggtagccgatgatcatggcgacgagagccgcaacctcggtggcgccgttgtccatatgtttcgtggtggtcaggatttccggcacgggatcgtactgcaccttcagcaggagcctgtacgtgtggtagttgaaggacaggtagcgcagccaggagatgaatggcggaaccgtctttacaaagaagcctcctgctagcatgaaggtcatgaccgtaactgaagctagagttgttgccttcttgatatccagcagggaagctccaattaccaatcctagtccctgagcagcaattatgctgagaaagacagtcaacatgctaagaaagaaatgtgtggcagttgctttgaggcctgccatgaagtagacgatcaccatgaatacaacagggaggaaaaggtcaagtggtagatcacttgtcgttctggccaagaagtatgcactgagcttgtacatgtcaactgcacgctctttgttcaacattgccctctcttgagggaatgtgaagattgcagtaaacacaggaaagaaaccccaaaacacagcaatgaaaaataataagccagcctgatcttctagaccttttagtgttctgggatcagagcgccaccacagtaaacctaagataaccgacgtagctatgacctgggtgattctcatccagctcaaataatcatgccgtctttccttgatccctctacaaaagaggatggaatattgctgccaccagcttgtgccccactctcgctttgatgatgttatagttgccttcaggtcatcactgattggaagcggtgctagaagcttcttcttctccttaaaagccactcgagtctcataagcatctaccaagtactcatgaacatcttgtgctgatggcctgcagtcattcttggaattattattctccaaattgtgattttccatatgcaccttatcatctaattctgaagggacagaaacatcattagtgttgccattggcgagatccagtagaaactctgctgggttcatcgcgaaaagtggggtgcatccaatggactggaagtagggcatgg

SEQ ID NO: 9973 - DNA, 238 bp, Setaria italica
  Peptide Sequence Number=SeqID_75947
cgctggacctgccgcgggagaactacatgttcgacgccgtggaggagggacgctccatcacctgccttgctatcaacgctggtggtggcagcatgactatagtaggcaactatcagcagcagaacatgcacgtgctctacgacctggccaatggcaagctatccttcgttccggctcagtgtgagaagctttaaggctctctctctcacagctgcatcgtcctggcaccgatgctttg

SEQ ID NO: 9974 - DNA, 625 bp, Setaria italica
  Peptide Sequence Number=SeqID_75948
tataaccatctggagaaatgtgcctatcatcatgcccatccatatgccctgaagagatgagaaaacacaaacattgcttctggtcaaattacgttgtggttaacacaaattggatgcttattttagactatattttaccattgcgccacgttttagcttgaagccaaacaggatacccaacggaatgcccactaagtagtaacaacctacgtttatgaatgccacaggcacttgccaccctgctcctactgccacacctgatagcacaggccagatgctgctcatgaatacggtcacagcaagaaggtaccccaatctggaagctccatgtatcacctcgtggctgtcgctgaagaactttggcaagcttgtcctccaaataaggaagacgcccatgaagattgcgcccatgaagatggatgtcgataccgacacaaccactgcaaactttgtctccttgggcctgttcgcacccagctcgttcgacacccttatgctaaagagtccacaacatttgccaatcaaatgtaatagcatgtcatgcatgtgaacataatctcaatcgaacattgatagcatcggttctttttcctgcatacccgactgccgtgctgaagacccaaga

SEQ ID NO: 9975 - DNA, 405 bp, Setaria italica
  Peptide Sequence Number=SeqID_75949
cttattaaaaaaattaaaggtcaacagttttctatcgactacacgcacaagaaaacaagcccaacactcgtgcaacaggcaaaagaatgaatgagaccgtaaactagatgaagaaattaaacaattgaaatcctgaaagaacctggcaatgtcgacggaaactacaaaccagatcatgacggcggacccgagtgacagcttcacgaaagcaccgaggttgttgaacgcacgggcggtgaaccccttccacgcgtcggggaatcggccgccggccatgtacgcgaactgcgccgccacgacgagccagtgggagacgtccccgacgacggccgccccgcgcaggccgaacccgagccgcctgacggcgacgtaggtgagcgcggcgtgcacgccaaggaccgcgcc

SEQ ID NO: 9976 - DNA, 1275 bp, Setaria italica
  misc_feature (1)..(69): n is a, c, g, or t
  Peptide Sequence Number=SeqID_75950
nnnnnnnnnnnnnnnnnnnnnnnnnnnnnnnnnnnnnnnnnnnnnnnnnnnnnnnnnnnnnnnnnnnnnagtttaacatcctgtgcattttactcattatattatattatgtagagtagatcatgaaattctgtttcatcaataaattcctcgatatatgaagagtaatactatgtgctaatgtatcgaaagaaataaaagaaacacttgcctaaatagtcagactcagtcaccctagcaaacaatgataaataagtattgtatagaactaaaaccaatgtattctgtgatcagtctgtgcgaacgaattctatgttcttctggcttccctgcgccaacatttcgtcatcttctgctggaaccatctgatcatctgctggtggagatttcatcagtggtaggttctcattctttcctccccactgtaacatcctcgcttcggcaagaacagcctgtttctcccactttgttgtgaagataatggcaaaaagtataaccatctggagaaatgtgcctatcatcatgcccatccatatgcccattgcgccacgttttagcttgaagccaaacaggatacccaacggaatgcccactaagtagtaacaacctacgtttatgaatgccacaggcacttgccaccctgctcctactgccacacctgatagcacaggccagatgctgctcatgaatacggtcacagcaagaaggtaccccaatctggaagctccatgtatcacctcgtggctgtcgctgaagaactttggcaagcttgtcctccaaataaggaagacgcccatgaagattgcgcccatgaagatggatgtcgataccgacacaaccactgcaaactttgtctccttgggcctgttcgcacccagctcgttcgacacccttatgccgactgccgtgctgaagcccagcgcaaccattatagtcatgaactcgtagttgaggcagacagacatgatatccagttggagtttggcatgtttaaggaggcctacgagaacgagaagtgtggtgtagtaccaaaactccaagcagatcatgacggcggacccgagtgacagcttcacgaaagcaccgaggttgttgaacgcacgggcggtgaaccccttccacgcgtcggggaatcggccgccggccatgtacgcgaactgcgccgccacgacgagccagtgggagacgtccccgacgacggccgccccgcgcaggccgaacccgagccgcctgacggcgacgtaggtgagcgcggcgtgcacgccaaggaccgcg

SEQ ID NO: 9977 - DNA, 539 bp, Setaria italica
  Peptide Sequence Number=SeqID_75951
tctttcttccccccgacagcgaaactcgggacgcgcaaccgagaagaggaggggaactcggcgagccgaggggagaagaacccgtgagggtcccgaatcagcgatcgaagaaggtgggtacaggagcaagccagcccgccgccaccatgaggcgcgcctcgaagaagtcgacgtcgtccgccgcgaccgccagcgctggccctactaaagcagtttccaaggaagtagaacggattgatcaatttttctatacttatgctgatagctcgtctggcatgattgacccagaaggcattgaaacactctgttctcatcttgaagttccccataccgatgttaggattctaatgttagcatggaaaatgggctgtgagaagcaaggttactttaccttggatgaatggcgaactggcttgaaagctcttcgagctgacagtatcagtaagttaaagaaagcattcccggaactggttcaagaggttacaaggccatccaatttccaggatttctacacgtatgcatttcgtattgcctcacag

SEQ ID NO: 9978 - DNA, 547 bp, Setaria italica
  misc_feature (442)..(442): n is a, c, g, or t
  Peptide Sequence Number=SeqID_75952
tctttcttgtgagttgctgaatctagtattaggcttgcagttcccccccaggttgacaagcttaacaattacctcaagtaccaaaatgactacaaggtgataaacatggaccagtggatgggatttattcgattctgtaatgagataaacttcccatcactcgataattatgatttggaccttgcttggcctttgattctagacaattttgttgagtggctacgagaaaataaaagttagatcttctattgctgcggtggtgaagatgtcacctgaaatgtaatattcaagaatgtaggtgaactattgtttcagtttgtatgacatcaatttttgcccatccacttgtgtactttgacagtagtgcaaatgcactgatatctcccatgccatgaattgagcatgagcagtttttggctgctgcgttccatactgttttaangttcatgagttttattactggtttacatagtatatgtcaactagggaaaacggatttaaattgcaagcatgtgtagtaagcaagaaattcacttttttgtatccc

SEQ ID NO: 9979 - DNA, 1282 bp, Setaria italica
  Peptide Sequence Number=SeqID_75953
cctcctctcttcttccccccgacagcgaaactcgggacgcgcaaccgagaagaggaggggaactcggcgagccgaggggagaagaacccgtgagggtcccgaatcagcgatcgaagaaggtgggtacaggagcaagccagcccgccgccaccatgaggcgcgcctcgaagaagtcgacgtcgtccgccgcgaccgccagcgctggtgcggaacaagtaaatgaaaaacaaaacagaaaaagaaaaggagtcagtacaaacctgaccagcaggaaagcacaacgtggccctactaaagcagtttccaaggaagtagaacggattgatcaatttttctatacttatgctgatagctcgtctggcatgattgacccagaaggcattgaaacactctgttctcatcttgaagttccccataccgatgttaggattctaatgttagcatggaaaatgggctgtgagaagcaaggttactttaccttggatgaatggcgaactggcttgaaagctcttcgagctgacagtatcagtaagttaaagaaagcattcccggaactggttcaagaggttacaaggccatccaatttccaggatttctacacgtatgcatttcgttattgcctcacagaggataagaagaagtgtatagaaataccggttgcttgtgagttgctgaatctagtattaggcttgcagttccgcccccaggttgacaagcttaacaattacctcaagtaccaaaatgactacaaggtgataaacatggaccagtggatgggatttattcgattctgtaatgagataaacttcccatcactcgataattatgatttggaccttgcttggcctttgattctagacaattttgttgagtggctacgagaaaataaaagttagatcttctattgctgcggtggtgaagatgtcacctgaaatgtaatattcaagaatcaccctgaaggctttggaggatgcagattaagcttgtttgtgattgcttcggtggaggctggttccagaaatcaatcatcaatcgctctcgtgtcgccttttgatttttgcgcatttttgaaactggaaagggggtctgcacagatgtctaaagttttgcatcatcattgctctacgtttgttggctatatatatgtcgtgttaaatcggttctggtatagttttaagagcttgcaagttgcaaatatttctgcgatgcgccgaatttctttctgtgaaactgtacactgtcacatcggtgcgttgtcttagttgtttttggttgtaaacta

SEQ ID NO: 9980 - DNA, 818 bp, Setaria italica
  Peptide Sequence Number=SeqID_75954
cctatccctgtgtgccttggcagtctcttttagtacgatagtttttgaagttagtattagacagagttaaattggagcaatatgactgccgaattggctggattacaaatgacagcagcgatgcggtacttgcaatatatcatgccaagcaggaggaaaatattgaaattgatacaatctggattgctttgcttgcacattctacctggcattgcaggtttgcagcacagcacatacacactgtcttcgaaggtgcacatcacacagccagctactttgaagatctttcatatgttttgctgcatgcattcgtcatcatcctcactttagttgggcttcttcagatagcccatgtgatggaactggcagctccaatgctctttgggtgctctgtaaagtaaatgattgtagtctccactgcagttgccaatgagacaccatctcctaaaaatcatcatgaaaggaatagcagtaataaatgacatgagaaatttactaagctttcatgatatattgaaatatgtcagaataataattctctactccaagcaaacccataagtagctagctaactggcactggttgccactgatgctgagcggcagccaatgaaagccatactaatccacttcacatcttggaattatctatgccattttcacagatcggccaatgatgctcttaatctagtatccagccaatgatgctcttaatctagtatccaagcagtggaaatcacatcatcgtatcctattccttctatgccatttaattttgaaaataatttcttaaaatttactataatatgatgtattaag

SEQ ID NO: 9981 - DNA, 242 bp, Setaria italica
  Peptide Sequence Number=SeqID_75955
gcagagcagcagcatggcgcggagcaggctgccgccctcgaaggccacgagcatgaagtaggggaagagcgtggtggagcgcagcagcgcgccgtgcatgtcgcacaccaccgtcccgtctgccgccgcgacagcggcggcgtcatcaaggatggcggcgcccttggcggtggcggcatggccctgctgcggcttggcggtggacggcggcggcttggcggcggcgttgcggtagtagagct

SEQ ID NO: 9982 - DNA, 781 bp, Setaria italica
  Peptide Sequence Number=SeqID_75956
agtgtgcacaagtaactacccaagcgggtactgaatagtgttactgctatgcataccacccgcttgggtagttacttgtgcacactgctgcgcagctgactgggaattggaatttaccatttgatgctgcaagtccaagatcattttctgctgctccatgatcaaaggctgctgaggctgaagagccttcaatagttgattttcatttgatgatcagaaagctgtgtgatcacgtttgtaccattcagtacctgaacaggttgtatctttatttgctgctgttcctgcactgattgctgaacctgttgtggctgctgctgtaaatgtggttcctgttgctgtagaagctgggcttgttgaagatcaccatgtagaactgtgtggttttgaaccaaaggctgctgttgctggatttgagcctggagaatgacttgaggttgctgaggctgagcctggagaatgacttgaggttgctggagttggttctggacaacaaattgaggctgtgcggacaacttaatacaattggttggctgccttgcactggttgagttatagcatgctgcttctgttcgggattgcaatcttgtactaccttctctgatactatgacacttcccgattggttggtgtagctatcacttttgctaactgttcggtctgctggtttgtggaggtagcagcgaagtgttgaactggatgttatttgttgcaggaactggggctggaagctgatttgccttgacatatcagctgcagccagacgtttgtacaggtttcg

SEQ ID NO: 9983 - DNA, 1264 bp, Setaria italica
  Peptide Sequence Number=SeqID_75957
agaaccaatggagtcgacaccgcacttgttgcggacgttggagcccctgcagatcttgtagtatccattctcaccccagttctcaccccaagagttcttgatgatccagtagggcttctccttcaggcggatgggggcaaaacccgccgcaccatagccaacaaggagaacaccgtggtcaaggtgcctgccacagatgtatgggcatgacacaccaccgatgtatgtctgcatgtacgcagcattgataccaactgcatggaacagaggataagcatcagtaatttcattgttcgctactgatgattctatgtatttagatacaagacctattaacgtgagaaatccatgtacttacttgccagtggaccatgtttgataaggttggcagcaatttggtcttcatccacagagacaacactgaagttttgaacagaagcaacaatcttcgacttgtcgaatttgcatttgccattactcccagtgtaaggataatccttctcactctcaaggccaccagctttctggagataactgaaggctgtggtcatcagcccaccattgcatcccgaatcacatgaatcaggctctgatggatcacactgcagaatttacaaaaaggaatggagaggatactgagtagaaaaattgatgaatcacactgcaggatttacaacaggaatgggggatagcaggttgaggattgatgaatccacagagagcagcaaatttaagacagcattatacagattctaccgtgaaaactctacaaacatactccctccgtcccaaattactattcgttttggattttctaaatacatcacttttgctatgcacctacatatatacttatgtctagatacatatcaaaagtgatgtatctagaaaagccaaaacgaatagtaatttgggacggaaggagtacaagaaacagctcagaactttagctatacaattcatcactagtgaacatagcaaaaccattattgtgtatcaaagtgtagcgcaggcatcttgccaaatgaaaattcacatgggaatactcggtataaggcatcttgccaaatgaaaattcacatgggcatactcagtataagctaccaaattaagaataaacttgacaatgaagagtggctgacacatgagacatgaaatgacagaacattaggatttgcgatatctccggctatgctttgggtaaacttaagcccaaaattttcctgatcatcatttagtgaattcttcagtaagcatattatca

SEQ ID NO: 9984 - DNA, 741 bp, Setaria italica
  Peptide Sequence Number=SeqID_75958
aaggtaattagtaagttctaccattatgaaaacgtgagggaggactacagatcagcctactcctccttagaggcgtggatggcggacaccgtggagaccatggagtcgacaccgcacttgttgcggacgttggagcccctgcagatcttgtagtatccattctcaccccagttctcaccccaagagttcttgatgatccagtagggcttctccttcaggcggatgggggcaaaacccgccgcaccatagccaacaaggagaacaccgtggtcaaggtgcctgccacagatgtatgggcatgacacaccaccgatgtatgtctgcatgtacgcagcattgataccaattgccagtggaccatgtttgataaggttggcagcaatttggtcttcatccacagagacaacactgaagttttgaacagaagcaacaatcttcgacttgtcgaatttgcatttgccattactcccagtgtaaggataatccttctcactctcaaggccaccagctttctggagataactgaaggctgtggtcatcagcccaccattgcatcccgaatcacatgaatcaggctctgatggatcacactgcagaatttacaaaaaggaatggagaggatactgagtagaaaaattgatgaatcacactgcaggatttacaacaggaatggggatagcaggttgaggattgatgaatccacagagagcagcaaatttaagacagcattatacagattct

SEQ ID NO: 9985 - DNA, 1137 bp, Setaria italica
  Peptide Sequence Number=SeqID_75959
tttaacacgatttagatgggagcacaccatatatttatgtacacactattcaaaagttctgcagattaaaaagcgtatacagatctggtgataactttgctacatccaaatagcttgtagcatgcatctcataccaaacacaaacctttcagcaagcaacccattgcagcttcacatctttgctgccttatatataacagcacacagatgggagcataaatattagcaggtattgtagttctaccattatgaaaacgtgagggaggactacagatcagcctactcctccttagaggcgtggatggcggacaccgtggagaccatggagtcgacaccgcacttgttgcggacgttggagcccctgcagatcttgtagtatccattctcaccccagttctcaccccaagagttcttgatgatccagtagggcttctccttcaggcggatgggggcaaaacccgccgcaccatagccaacaaggagaacaccgtggtcaaggtgcctgccacagatgtatgggcatgacacaccaccgatgtatgtctgcatgtacgcagcattgataccaattgccagtggaccatgtttgataaggttggcagcaatttggtcttcatccacagagacaacactgaagttttgaacagaagcaacaatcttcgaacttagtacgaaatttgcatttgccattactcccagtgtaaggataatccttctcactctcaaggccaccagctttctgggagataactgaaggctgtggtcatcagcccaccattgcatcccgaatcacatgaatcaggctctgatggatcacactcatggtcgcagtcgacgaattgctgctcggagagcacctccagcttgccggtggcgaggtagtgcgccccctccagcgctcccgacgcgctgaacgaccagcacgacccgcacgaaccctggttcttgacggggccgacggcgccgtggtccctccagtcgaagtcctcgggaaggccgtcagtggggagcacgggcgcctcgtgcgccgagtccccgagctccctgaggagcgcgcgccgggacttgcggaggccgaaggtaaggtaccggacggaaactacggaccgggggtagaaggtacggaagaaacttaga

SEQ ID NO: 9986 - DNA, 4378 bp, Setaria italica
  Peptide Sequence Number=SeqID_75960
cgggagtgggaggcgccggggacgagctccggcggggccgggggcggaggggggcgggcgggggcacgaaggtcaaccaggagctgtggtacgcgtgcgcggggccgctcgtcgcgctgccgccggcggggagcctcgtcgtctacttcccccagggccacagcgagcaggtagcagcatctatgggaaaggatgcagatgccaaaattccgagctatccaaatcttccttctaagcttatatgcatcctcaatagtgttactatgcatgctgatactgacacagatgaggtttatgctcgaatgactctccaaccagttagcaatgtgacacagtgtgacaaggagacactgctggcatcagagcttgcactgaaacaaaccagaccacagacagaattcttctgtaaaacactgactgcaagtgatacaagcactcatggaggtttctctgtgccacggcgcgctgccgagcgaattttcccccatcttgacttctcaatgcagcctcctgctcaggaactgcaggccagggatttgcatgattcaatttggacattccgtcatatatatagaggccagcctaaaaggcatttgctgactaccggctggagcctatttgtcagcggaaagaaacttcttgctggggattccgtcttatttattagggatgcaaggcagcaactcctcttggggataaggcgagcaaataggcaacctgttaacctctcatcatctgttttgtctagtgacagtatgcatattggtattcttgctgctgcagcccatgcagcagccaataacagccaattcacggtattctataacccaagggcaagtccttcagaatttgtgattccttttgccaagtaccagaaggctgtctatagcaaccaactatctcttggcatgcggtttcggatgatgttcgaaacagaagaatctggaacaagaaggtacatgggaacaataacaggtataagtgatctggatcctgtaaggtggaaaaactcccagtggcgcaatattcaggttgcatgggatgaagctgcaccaagtgagaggcgcaccagggtttccctctgggatatcgagcctgtcattgctccattcttcatatatccttcaccattgttcactgcaaaacgtccaagacaaccagggataacagcctaatcatatctgtagatgatgaaaccgctgacatggaaaatctttttaagcggaccatgccgtggtttggtgaggagatttacaagaaagatctgaatactcagaacaacttagttcctggattaagtttagttcagtggatgcaacagaacccctcactcactagcacagttgtgcaaccggaattgctaaactcattagctggcaaacctgtacaaactctggctgcagctgatatgtcaaggcaaatcaggcttccagcccccagttcctgcaacaaaataacatccagttcaacacttcgctgctacctccacaaaaccagcagaccgaacagttagcaaaagtgatagctacaccaaaccaatcgggaagtgtcatagtatcacagaaggtagtacaagattgcaatcccgaacagaagcagcatgctataactcaaccagtgcaaggcagccaaccaatgataagtgccgcacagcctcaatttgttgtccagaaccaactccagcaacctcaagtcattctccaggctcagcctcagcaacctcaagtcattctccaggctcaaatccagcaacagcagcctttggttcaaaaccacacagttctacatggtgatcttcaacaagcccagcttctacagcaacaggaaccacatttacagcagcagccacaacaggttcagcaatcagtgcaggaacagcagcaaataaagatacaacctgttcaggtactgaatggtacaaacgtgatcacacagctttctgatcatcaaatgaaaatacaactattgaaggctcttcagcctcagcagcctttgatcatggagcagcagaaaatgatcttggacttgcagcatcaaatggtaaattccaattcccagtcagctgcgcagcagtgtgcacaagtaactacccaagcgggtggtatgcatagcagtaacactattcagtacccgacacagcaaaagactcaacctcaccaaccaattcaagatttccctcggcatgctgtgtctgttgcaaacccagaaattgctacctccatgggtactcgctctttgcatgtcccaggtggagtgcagttattgaagacagaagatgttccctcttcgtcaacatcaccacccacaaacaataatcctgttcttttgcaatcagttcaatgtagctccaagaaccaaagtttacttactgcagcaaagacacctcaatcatctgctgtagtgggccctacacttggacaaggcatgaaggccttatgagagtgcacagcagatggtgatgattcccaagggggctgaacaaaagccagttaccaggcaagactatgtgaataacactcctcagatggattatttggacacatcctcgtcagctacttcagtttgcctttctcaggctgatggatcattgcatcaaaactttccaccttcgtccttcaatcagcatcagctgttacgagaaacagttccagatagcgagtttgaggttacagatccaggaaataactttctatttggggtaaacattgatggccatttggattcccttaatgcagatgctttgcttgcgaataactttgaaactgagaagtacatggatcatatgccaggacatggcatctctaattacatttcatcaaaggattctcagcaagagttatcatcttcaatgatttcacattcatttggtgttgctgatattgcattcaattctatagattcatcaatcaatgatgccccattcttaaacagaaattcccggcctccagctcctgcgcatcaacggatacgaacctacacaaaggtgcacaagcgtggggctgttggaagatctatcgacatcaatcgatattccggatatgatgaactgaaacatgatgttgcccggatgtttggtatcgaggggcaactcagtgaccaaaatagaggtggctggaagctagtttatgaagatcacgagaaggatgttctattagttggcgatgacccatgggaggactttgtgaactgcgtacggtgcatcaggattctttcttccacaggaagaaatgcagatgagattggctagcgactttggagacagctttctacacaaccaagcatgcagcagttcagatggggggtcacccatggagggtcaccggtgactagatagtcgaaaactcgcctacttaggattcactggtttgcatggctgatagacataaactcacaaatctgatggtgccacaagatcgacatttttgtccatgataacgtgaaggatgatccgctatgctaattttggctccagatttgtgcaagcaaacagcgaaaattaggagaacgagttgcaatgcaggtccaggaagtgtacttcatgttctgtctctgttcttgtagatgtccatatataccctgcctatccctatggctatatatatagccatagggataggcagggtatatatatcgtccttgtatatgattctgtagtaaattatgagtggtgggacctgacaacctcttggttacaataaaatcatatacaaggacgatatatatagccatagggataggcagggtatatatggacatctacaagaacagagacagaacatgaagtacacttcctggacctgcattgcaactcgttctcctaattttcgctgtttgcttgcacaaatctggagccaaaattagcatagcggatcatccttcacgttatcatggacaaaaatgtcgatcttgtggcaccatcagatttgtgagtttatgtctatcagccatgcaaaccagtgaatcctaagtaggcgagtttcgactatctagtcaccggtgaccctccatgggtgacccccatctgaactgctgcatgcttggttgtgtagaaagctgtctccaaagtcgctagccaatctcatctgcatttcttcctgtggagaaagaatcctgatgcaccgtacgcagttcacaaagtccctacaaatgcaaagccgccaatcttcagtaaccaaagtggaaggaagagttggactggaaactaaatgataggcttaatgacaatttgatctctgttactgtgtttagtttctcaatcagataagaccacagtagaaaattttgcagttatttctcattccgatgagaccacagctgaaaatttgcggttacttctcaatcaaatgagaccatggcagaaatttgcagttaaacagtg

SEQ ID NO: 9987 - DNA, 305 bp, Setaria italica
  Peptide Sequence Number=SeqID_75961
ggcgagatgagggatgggtgagacaaggatggggacgggcgcccgatgcctggaggccgggagctattccgcgtggaaaattaggttgagacgggccggactcccccacctagcagacttccaaaggtgccagttaactagcccgtgaaaatttaccgcgtgggcggagggcttcctccgcgggaagaagaggccggaaacccggcggggaaacaggctgcatagggtcggcgccggcgggctggcagctccaacgagcaacagccaaacagaggagattcttccaaaatggatatctctgaata

SEQ ID NO: 9988 - DNA, 1279 bp, Setaria italica
  Peptide Sequence Number=SeqID_75962
gagaggtctgcgtcgatacgctaagaatggataaacaaaacatgggtgattacacaggattactagaatggcaaacacaacagatgtcctgaagggagacctagcctactcacatcacgtgtccattactccattacatagataattgcaataagggaactgtacttagctacacagcttaacctagccgttaagctgttggttcccttacgaatatgcaagatatgcgaggcaatcctgcagagtgctcacatttcttgcttgaaacagctccacgcctacacggaggagcctgacacaggcttggaacatgatcagccattcatggcggacctgtaatggagatcatcgatcgtgttgtaaatgttgccatcgtcaatatgtttttgcatgacctccttgattacttcctctggtagtttaagacgatcaatgatatatgccacagttatcccatcctcccggtctatgatcgctgggtcatgaaaaacactcatgaccaagctagatacatcatttccagcagtatttcctgatgccgagaatgttgtagcctgattattggggagtcgaacttggttagcatgtccagggattccagtactagcatttatttgggacggcaaccgcgaatttgacttggtgagctccaaatgcacataaatgcagtgcagaaagtgatgtgttatatcgttgaagttcgtcacacgccgaacagagtaagcaaccacatgacgctttccttgaaaacctttcaagccaccattgacaatgacatagtttccatcgttgacatcagccatttccttagtgtcagaagactcattttcccagcgattcacatctatcttgccggtgccatcatcaagaatgaacgcaacatctgtgacccgctcaaccttaccaagcatgcgtccaacaagcctaatcgtggacacctcgacgccgttgatggcgaaattggacttgtcatcgctggcctgcgccgcgtccatgatctgcttcacggtgagcggcagcagcgtctgcgcgttccggcccttggagaggctgccgccgccgccgctctccggggccgcggtggactgcgacggcatgaagcccccgccgccgaagagggagttggcgttcgcggcgccaccgccgccatcgtagttcccgccgccgcctccgtacatcgcggcgcctaaagccctaaaccctagggcttgccgaggaaggaagggcgggagggggaaaggggacggtgagagggcgggaggaacggtttggttgggtc

SEQ ID NO: 9989 - DNA, 255 bp, Setaria italica
  Peptide Sequence Number=SeqID_75963
gtgtcgccggccttgacggagaactcgctgggctcgaagacgagcacgcctccgttggcgcccaggagcacctcctgggccgatggcgccgccggcaagcagggcgctggcagccacggccacggcggcggtgccggcggccttgccgagcgaggcgcgcaccaccacagacgaccgtcggctggcaacggcggcgcgggcggcagaggagagggaggccatgctgggtagctagtggtaggtgggtggtgatta

SEQ ID NO: 9990 - DNA, 276 bp, Setaria italica
  Peptide Sequence Number=SeqID_75964
ggttcgttccaccccgctgggcacctcgtcctcgtcgaagaccacgttgtgcgggtagccggcgttgttcttgaaggtgatggtgtcgccggccttgacggagaactcgctgggctcgaagacgagcacgcctccgttggcgcccaggagcacctcctgggccatggcgccgccgttgccagccgacggtcgtctggcaacggcggcgcgggcgggccgggcagcggcgaaggaaggggcggtcacggcggcagaggagagggaggccatgctggg

SEQ ID NO: 9991 - DNA, 272 bp, Setaria italica
  Peptide Sequence Number=SeqID_75965
cgagccgcaccaaggagctgtaggttcccggcacggtgagggtgacggagtaggtctcccccggcgcgttgaggtactcctcctgcgagatcttggcggcgtccaccccgctgggcacctcgtcctcgtcgaagaccacgttgtgcgggtagccggcgttgttcttgaaggtgatggtgtcgccggccttgacggagaactcgctgggctcgaagacgagcacgcctccgttggagcccaggagctcctccataatcaccacccacctacca

SEQ ID NO: 9992 - DNA, 332 bp, Setaria italica
  Peptide Sequence Number=SeqID_75966
tttctgttcaaaagcacagctgaaaggaagacctatgtggttcaggacggggacattatcttcttcaagttcaacgtgtctggtggtgggaagaagtgaagatgcgaggagacgatagcattcgatagtgtgttacaccttaccctggatttctacatttttgaggccactagcgagtaccgattacaagttaagaattgtagaaatccagggtaaggtgtaacacactatcgaatgctatcgtctcctcgcatcttcacttcttcccaccaccagacacgttgaacttgaagaagataatgtccccgtcctgaaccacataggtcttccct

SEQ ID NO: 9993 - DNA, 443 bp, Setaria italica
  Peptide Sequence Number=SeqID_75967
gcctagcttgccatctccaatatgattctcctccatcctcgatgatgaacgaacaatggattgcttagttgacggtgaccttgccgaccatccctgctccttggtgcggctcgcagtagaagctgtaggttcccggcacggtgagggtgacggagtaggtctcccccggcgcgttgaggtactcctcctgcgagatcttggcggcgtccaccccgctgggcacctcgtcctcgtcgaagaccacgttgtgcgggtagccggcgttgttcttgaaggtgatggtgtcgccggccttgacggagaactcgctgggctcgaagacgagcacgcctccgttggcgcccaggagcacctcctgggccatggcgccgccggcaagcagggcgctggcagccacggccacggcggcagaggagagggaggccatgctggtagctagtgga

SEQ ID NO: 9994 - DNA, 1155 bp, Setaria italica
  Peptide Sequence Number=SeqID_75968
tctcctccgagagctccaccgccgcctccgccgcgtccgacaccgtcgaagaagaggcggagcccgctgagacctacgacgaggacgaggatgaggagctggacccgcaggcggaggtgtgctacctggaccccgacgcggacccggaggcgatccgggagtgggagctggacttctgctcgcgtcccatcctcgacgcgcgcggcaagaaggtgtgggagctcgtggtctgcgacgccacgctctcgctccagttcacccgctacttccccaacaacgccatcaacagcgtgacgctccgcgacgcgctggcctccgtgccggaggcgctgggcgtgccgctccccgaccgcgtccgcttcttccggtcgcagatgcagaccatcatcacccgcgcgtgcggcgagctgggcctgaaggccgtgccgagccggcggtgcgtgtcgctgctgctgtggctggacgagcggtacgaggccgtgtacagccgccacccggggttccaggccggaaccaggccgctgctcgcgctcgacaacccgttccccaccacgctcccggagaacctcgtcggggacaagtgggcgttcgtgcagctccccttctccgctgtaagagaggaggtggaatcactggagaggaggtacgcatttggtgcggggctcgatttggacctgctggggtttggtagcttgatgacagcacgttggtccctggtgtagccgtggaatcctctcgcgccaagcctctagctgcgtggatgaacggtctggagatctgcgcgatggaggtggacacgggcagggggagcctgatcctgtcggcgggggtgtcgacgcggtacatctactccgggtacgagaagacccccgcggcgacgcaggaggcggaggcctgggaggcggccaagaaggcctgcggcggcctccacttcctggccatccaggagaacctcaactccgacggctgcgtcgggttctggctcctcctcgacctgccgccgccgcctgtatgatgcatccatcatccttcaggatgctgttaccctgaattttgcaagaaaatggctgtagcatgtgtagtgccggtacaagatttttgggatcggtgtacaagatttcgcttcccatttgctcgtgtgttacgtacaaaaaa

SEQ ID NO: 9995 - DNA, 1621 bp, Setaria italica
  Peptide Sequence Number=SeqID_75969
ccttctcctctctcacttcactccagccgcaaccgcatcgccgcccctgcccccgcttcccaccaaaaaccctagccatcccatcccatcccaggttgcccccggccgcatcgccgccgcccgccgacgatgcctcccaaggcgaagaaggacgccgcgccggcggagcgccccatcctcggccgcttctcctcccacctcaagatcgggatcgttgggttaccaaatgttggcaaatcaactttcttcaacatagtaacaaagctggcaatcccagctgagaacttccctttctgtaccattgaaccaaatgaggcacgtgtgaatgttcccgatgagcgatttgactggctttgccaacttttcaagccaaagagttcggttcctgcatatctggaaataactgacatagctgggcttattagaggtgctcatgcaggggatggtctgggcaatgcgttcctatcccatatacgtgctgttgatggaatctttcatgtcttgagggcatttgacgacgcggatgttactcatgttgatgatacagtagatcctgttagagatttggaaactattactgaagagctcagactgaaggatatagatttcatgagtaagaaaatcgaggaccttgagaagtcaatgaagaggagcaatgataagcagctcaaaattgaacatgaattatgtgagagggtcataaaacatctccaggatgggaaagatatccgtttaggagattggaaagctgcggacattgagatcttgaataccttccagctacttaccgcaaagccagttgtctatttggtaaatatgagtgagaaggacttccagaggaaaaagaacaagtttctacccaagatacatgcttgggtgcaggaacatggtggtgaaaccatacttcctttcagctgtgcttttgaacagaaactagtggatatgccagaagatgaagctgccaaatattgtgctgaaaaccagataacaagcatgattcccaaaattatcaagactggttttgcagcaattcatctgatatacttctttactgctggacctgatgaggtaaagtgttggcagatcagacgtcaaactaaggcacctcaagctgctggtgcaattcacactgatttcgagaggggcttcatttgcgctgaggtaatgaagtttgatgaactgaaagaactgggcagtgaatctgctgtcaaggctgctggaaaatacaggcaggaagggaagacctatgtggttcaggacggggacattatcttcttcaagttcaacgtgtctggtggtgggaagaagtgaagatgcgaggagacgatagcattcgatagtgtgttacaccttaccctggatttctacatttttgaggccactagcgagtaccgattacaagttaagattgtacgatgaggctttaaactgttggaaggcttgtattcgaataacatgtacggttgtatatcttgagctcgctcttaccaaagtcatctgcgttcccgaaacagaggagttgtgtggttgggctttgcattgagtaacctggtatgctacaaatgatttgctattttttgggggaaattatttaaaaaaattacaaaaaaaaaaaaaaact

SEQ ID NO: 9996 - DNA, 1498 bp, Setaria italica
  Peptide Sequence Number=SeqID_75970
tatataaatctctgaaatgacatacacagcacaaacatatgcatacccatatgagaaatacaaatttaattcgctaaagaaaaggagtaaggatgaagtagaaagaagatgatgatatatggtggacgcatgcatgcgatttagtacatggcagcagcaaatgccaagagacgatggatcgaggatggaggagtacctcaacgcgccgggggagacctactccgtcaccctcaccgtgccgggaacctacagcttctactgcgagccgcaccaaggagcagggatggtcggcaaggtcaccgtcaactaagcaatccattgttcgttcatcatccaggatactgtactactgtaccatgagaagcgagagcttgagcctagcttgccatctccaatatgattctcctccatcctcgatccatcgtctcttggcatttgctgctgccatgtactaaatcgcatgcatgcgtccaccatatatcatcatcttctttctacttcatccttactccttttctttagcgaattaaatttgtatttctcatatgggtatgcatatgtttgtgctgtgtatgtcatttctagagattatatacacagcacaaacatatgcatacccatatgagaaatacaaatttaattcgctaaagaaaaggagtaaggatgaagtagaaagaagatgatgatatatggtggacgcatgcatgcgatttagtacatggcagcagcaaatgccaagagacgatggatcgaggatggaggagaatcatattggagatggcaagctaggctcaagctctcgcttctcatggtacagtagtacagtatcctggatgatgaacgaacaatggattgcttagttgacggtgaccttgccgaccatccctgctccttggtgcggctcgcagtagaagctgtaggttcccggcacggtgagggtgacggagtaggtctcccccggcgcgttgaggtactcctcctgcgagatcttggcggcgtcccaccccgcctgggcacctcgtcctcgtcgaagaccacgttgtgcgggtagccggcgttgttcttgaaggtgatggtgtcgccggccttgacggagaactcgctgggctcgaagacgagcacgcctccgttggcgcccaggagcacctcctgggccatggcgccgccggcaagcagggcgctggcagccacggccacggcggcggtgccggcggccttgccgagcgaggcgcgcaccaccacagacgaccgtcggctggcaacggcggcgcgggcgggccgggcagcggcgaaggaaggggcggtcacggcggcagaggagagggaggccatgctggtagctagtggtaggtgggtggtgattatggaggagcaagagaagacccccgcggcgacgcaggaggcggaggcctgggaggcggccaagaaggcctgcggcggcctccacttcctggccatccaggagaacctcaactccgacggctgcgtcgggttctgg

SEQ ID NO: 9997 - DNA, 486 bp, Setaria italica
  Peptide Sequence Number=SeqID_75971
ttgcttctcacttggctaaagagaggttggctaaagaaaagatttgtctgctggcttgtgtctgcaaatgcaaacaatatcagcattaagactaaacaagcaaaaatacatctagagtgaaaacaagaacttgctgataatttaacaagaacttcctaatagtaatccccccactaaaagagaagttgcacgttctatgattgtggttacaaaaagtgtcatgaagttgggccgagtcactaactaactccataaatatgcatctgcagagaaccgaaccaatgcatatttataatgcttacaacaatatcagcatcctattcacaaatataaatttggttaaaggatttgcattcaccttatcaatttgaatcgggcagacactatcggtcaaatttgaagttatggacagaacaagttaaaatagtagattagtcatttgacaccaatagaaagtgttgttctactaacatataggattcaaaa

SEQ ID NO: 9998 - DNA, 2005 bp, Setaria italica
  misc_feature (1)..(48): n is a, c, g, or t
  Peptide Sequence Number=SeqID_75972
nnnnnnnnnnnnnnnnnnnnnnnnnnnnnnnnnnnnnnnnnnnnnnnntttgttttttccggtttaaatgcttcagatcatgtctgattccaaaacaagcagtgagatcaaacatgaatttgcttagaacagaccaggcagccagtagccacaccggtacttattgcaaactggaaaaaggttcaggtagccacaccaatggacccaatatgcctaactcctatgaaacttcagcgccttgcttcaccaaatgcctcctgcctccagttgtgagatgaagcaatgcaaagagcctgtcactgacaaaccaaatcgcagatgatttaagaggatcagtagccaagtgttcaagtatgcagcttcagtgcattcgatcatgcatactcagaggtgagtggatgcctgaatctgcagagttccatcgagcgtggcagggtcgtcatgccagaaccctcccggggacggatccagatgattcgtgacagggttggaaacagcaatagtgccgaggggcggcatcgcaccagtgtgcacatgagaattatgctgctggatgacggttgaacttgaaccccaagaaccgtctgacagaagagagagagcacgcccaagttctggggctccatttgagttggaagcggccgtggaggcttccacaccttgattgaggacctttgtgttggttcccttgactggcatgagcccatcgaaattatgatggcgtgcagtttgagcagcaacactagttgatatctggaggtttgagaaaggcaactcatcaaggcctactgttttcattggatgcatcgacatatgttttgtttccacaaatttgaagcctcccaagttatcccatgaagaaagtgcattgcttctcacttggctaaagagaggttggctaaagaaaagatttgtctgctggcttgtgtcataaaacattgtcgaaagtcgtgatgaattgaatgaaatcgtatctgtctgaggtttcctccttcgtgcgttatgatgagtaagacgcctacgacagcttcttttgttctggtcaaactctgctaaaccatgaaaccggctacactgttggcaaaaacggcgctctagaccagcaacaaccaccttgggagctttagcatgatcttcacagactttgtgcttgcgatggtaagctttagcagaagacagatcaactttgcaaccttcgacctgacagtatgagtttttcacattctgatgagataccttggtcttcttgacaacagtcgatgcagaagtcacagttgaaggtgcagaactcttgttatcctgtcttccacagacattttcaacgtaagccctttttccaagcttcaggctgattgatggctccccatggctgaacgctatcattgatgatggagaagttctcgagtcgtcaactctgccattcttacccatgtccttaacatgcctttcaacagcagcgaaattgaactctatgctgttccctactccaaacggtgaatcaatggatcccgaaatggagctcttggatgaaccatgccctagctctgagctagaagtgagggtaccaccagatgaattcgcagatccatgccttacaatttcattcgggacagatggtgctagattttcgcaatcccacaccatggaattcttctgatcccagttcatcccaaaagaacccattccagaactgaagatctcaatccttccaagaagaagaattaaaaatcgcaactgctgttaccacctgtgtctgtgaaagctggcagcactcaattcccttttctgacgaaacaagaacacagccaaatcctccgtctattcctgtcttgtcgccaatcagcaacaccgcacaagcttgaaatcaaccaactgggcgggcagcgcagaaccagcaactgtggttgtcaaaatgtaagcacctgacaatgtcttccgcccggatcggcccagcagagctaggccttggagccaaaaagagggggcaatgtccccgtcttttctt

SEQ ID NO: 9999 - DNA, 297 bp, Setaria italica
  misc_feature (1)..(42): n is a, c, g, or t
  Peptide Sequence Number=SeqID_75973
nnnnnnnnnnnnnnnnnnnnnnnnnnnnnnnnnnnnnnnnnntttctcactggataaaggataatcgctttcacgagacatttacacacatttacaccacgatgctagactatctcaattctgaagaaaatatatacaggtgaaaaatgaaagactaagagtgaaaaggaacaacaaacagtagcctagcaggcgaaatgcagagactattgagaatcctaactagctcacgttgtaagcctggattctcccaagatcatcacctacactaaaaccagcatcagcagctcttgaact

SEQ ID NO: 10000 - DNA, 540 bp, Setaria italica
  misc_feature (499)..(540): n is a, c, g, or t
  Peptide Sequence Number=SeqID_75974
cttggtgacggcgagctgattcttggtctcgatttgggtgatgagtatttcgatttgggtggctcagacctcaattcctgctgtaggatcttgatttaggcaatgaggacttcgattttggagtttctttatcggctgcgtcgaatcgaagtcaccatcatgggacatcgagctgagaggcatcaaggacctactctcacatcagagtgtggctgcaaagcattttcttcccccaacaagtttaatctgcatgaatgttgaccctggagaaatttggcgaatttgtcgaggatgtggtggcgacgtcagcgggagcagacagcataacgatgcttggtacttgtgcagctactggtgcttccatccccatgtaattggtctggttaaatgtggggagatttggctgagatgccgttcttgtcgttgaggaagatgctaatctgatggttaccttgccgaatgccgataaaaaaccttcagttgtaattggacgaaaccnnnnnnnnnnnnnnnnnnnnnnnnnnnnnnnnnnnnnnnnnn

SEQ ID NO: 10001 - DNA, 570 bp, Setaria italica
  Peptide Sequence Number=SeqID_75975
agccgccggacggcggcgccgccgctaccctcctcctcgccgcgcgccgtgtcgatcacgtacaggttcttgtgccccgtgcggccggaccggaacaccagccaccgcccgcagggggacaccgccgggaacgcgtcgttaccggcctcggggcgggtgagcgccctcaccgtcgccgcgctcacctccttgcggtcgtcggtgagctcgctcgggtcgaactccacccgcgcgatccggaccgtcgctttcggggtctcgaagatggggcccgcggaggtgaacacgaccccgcgctcggtggggctccacgtggtgaagaacaggctgggctccttgctgatcgtccaccgcctggtgccgtcggaccggagcaccatgacgcccggcgtcgcgaagaagtcgccgttcacggcgatgtgcgacgcgtcgggcgagaaggacgggaacgtgccgttcacgcggagcatccggatggacctcacagggctccgcaccggctgcaggtaggggaccaccgagtcgccagtagcgccggcgccgcggaaccggtggtacccgaggcggccg

SEQ ID NO: 10002 - DNA, 369 bp, Setaria italica
  Peptide Sequence Number=SeqID_75976
aggtccctctccgccgagcagcggcaagcggcgacggcccccaatggcggcggactggttgtcggcgcgccgggcgtgggagaagtggaccacgaagcacgtcggcccctccgggaagcaggtccaggccgcgctgctgctcaactacgacccgtccgggccgtctaggctccttccggtcatagcagagcaagagggaacacaacttacagctattgatatgcgaccattccttgactttgttaagaggggtaatctgcagaccgaattcttctctattaggccaaaccaatatttggtcacctcaatccatgataactggtattgcgcccgttgcgttaacagcacaaagtcaggaggcgaaaggag

SEQ ID NO: 10003 - DNA, 276 bp, Setaria italica
  Peptide Sequence Number=SeqID_75977
cggggggccgggtggtggagatactccaggccaccaccgacgtgaggcgctccaggctgtccttgccacgggcgcaacggccgaggaggtcctcgccggcgcagtacaggccctcgccgtacatctggagctgcgacttgggcaggttgaacgtcgccggtagctggaagtgggagaggtcggatcccgggctgacgttgcggaaaaggctgagcacccgccggacgaggttggccgggcggagctccgccgcgaggccgccctccagcgacacgg

SEQ ID NO: 10004 - DNA, 610 bp, Setaria italica
  Peptide Sequence Number=SeqID_75978
ccggatcaagcatcgaccttatccgcctctgaaatgtaggatagtactctccacgagcatagtagcaattcagtgcttccacgttatcaaccttgaggcgctcatgggcttcattaatggtcttcccattcttcttcttttgccattcgaatccatcatttcggaagtaccgaagtactcttcggttgaaaagaaaccaagaaccactcggtggcttctgtgggggcttatgtgagaccatgaacagctcatggttctgtagtatctgcagaacttcttgaggcttcagccagcgggtcttcacttcctgttgtagcttgtgtatgtctaagccttgctgctgcatcgcgctggcccggccgacgagtccgcgccccgccgcccccagcgaatccagcaagaactcaacctgtgtcctctcctccgctcgcaagtcaagtcgggagtcgccgggtggcagtgccgcctgcccagtgccagtgattcgttccccgcgacgcgcaaacttatcgttcgtcccgcgacagcgacgcgcaccactgaccgcgacccgactgacggggaagaagagggattgcgatgggggcggcggcggaggcaagagccaacg

SEQ ID NO: 10005 - DNA, 324 bp, Setaria italica
  Peptide Sequence Number=SeqID_75979
atgtaaataacacaagtgcacatgtcctgcatgcatatatatgtaggtagaactctacatcatcgtatcgattttcatggcagcaatataagtaatagccttattattggcaagcagtgcacaattctcctgcattattgcctacgcgtaggcaacgtttgagtcgtagacggagtcgtcgtggttgggcatgtggtagcggttggtgaaccaggtggtgccggcggtgaccttgttgccgtcgtagttgcggtaccaggcgtagtgggtgtgcgtgtggttcttgatgtccagcacggcgtggccgtagctgtactcccggaa

SEQ ID NO: 10006 - DNA, 1765 bp, Setaria italica
  Peptide Sequence Number=SeqID_75980
aaaagaacaaaggtttaagtaagtaaggtaaggaataaagtaattaacaacgtaaggacaagtagttacgaagtaagaacatgatgaactggtcatgccatcttattctcatttgtatgtaaatacacaagtgcacatctcctccatgcatgtagatggaactctacatgatcatatcgattttcatggctgcaatgtaagtagccttattgttggcaacaagcagtgcacaattctggtgcatgcattcggggaagcaggtttgtgtggtggatagtattacacgtaggcagtgttcgagtagacggagtcgtcgtggttgggcatgtggtagcggttggtgaaccaggtggtgtccgcggtgaccttgttgccgtcgtggttgcggtaccaggcgtagtgtgcgtgcgtgtggttcttgatgtccagcacggcgtggccgtagctgtactcccggaacgccgagtaggccggctgcggccaggtgagctcgtcggcgaggccctcgatgttgccgccgtcgccgatgacgatgtatactggggcgcggcggtcggcgacgggcgtgcacttgccgtcggtgatgttgtacttgatgttggagtaccggtggctgcgctcgtaggcgtggacgtggccggcgaagacgatgtcgacgcgggcgtcgacggccatctgctcgaactgcacgcgcgtcggctcgccctccatgaagtggaagttgttgctgttgtaccagggcacgtgcgcgctgatgaagagccacggcgtggtctcccggtccacgcgcttcagctcctgctccagccacttccactgcggcgtgtacttgccgaaggccgagtaggaggagagcacgatgatgtgcgcgggccccatcttcaccgagtaccagtacggctccgacgagtcgctggcgcggtacggcgtcgggtagcggtgggagaagggcttgaacgcgaccgtctccccgatctccggcgcgtagtcgatctcgtggttgccggcggtccagatccagggctggtacgcgacgctgcgctcggagaagcggccccaggtgtcccagcggttgttgtcgtggagcgggtgcttgtcggcgtaggagaggtcgccgacgaagagcacggcgtcgccggggtgctgctcgtagtgggtgagcgtgctgttggagtcgggcgtctggccgaggtcgccgatgagacccagccggagcggcgcgccagggccgggcgggggcggcgtggtgaaccagaaggtgcgcaccgtgtcgccgaaccccatggcgtagtagtaccgggtgccgtggtccaggccggtgagcgtgcagtggtggatgaagccggaggtgtagttgtagaaggtgtagcgggtggtggtgccctcggcggcgaggtcgagcctgtccgcggcgcggccgtacaggacggtgctgttgccctcggcctccacggtgacccaggacacgagcatggccgtgccggtctggtccccgagcgtgatgtgcacctgttgcggcgcgttgcggcccggcggcaccgcgaacacgtccgcgtccatcggcatgtcgtcggaggcctggtgcttccgccggtacgtgctcgtcacacagcgacgagggtgcgccgcctcgccgacggagaagagcgcggcggcgagtactactactactactactaccagcgccgccgcagcggcgggcttcctttccatggcggccacgcactaactgctactactactactcgctttactttcgttcttt

SEQ ID NO: 10007 - DNA, 480 bp, Setaria italica
  misc_feature (409)..(409): n is a, c, g, or t
  Peptide Sequence Number=SeqID_75981
caaagataggtgttgcaatgttatacatctattctcctacttaaggggcttacaaccgattgatttcaacaggaactaggactagcaaaaatttgaagacccagttattgtgaagagaatgtggagccaatgctgtgacgggtggtagggaagctaacaaacagcatgcttccaataactccaatgacaactggcaatgctgtgagaagttgctttgcatcctcggatggtattggatagaagcaagatacaacattttggtcgaacagtgcgattgcaacaaaaatcatcgctgaaacaatggcatgtacaaagtctaaaaaaccgcatcctgtattctgccgctgcaagtggttcaagaggagccccaccatcaatgacccaaagtcccttgaatgtggcgaacccntatcgtaccttcccttccacatctctgaagctatccgtgaagctgagaacaaagcaggagagtgcacagag

SEQ ID NO: 10008 - DNA, 1458 bp, Setaria italica
  Peptide Sequence Number=SeqID_75982
aaaatcaatgaacataaatcagctatcattttgatccaatgtgggctacacaagatacatctccgaaagtgaacagggcaagggcaacaaaaggaaaataaaaacagaaaaacaagtaatagaaaacaaaattcagttatacataattcaggaacaatcgagactaatcgacgattttacaggtgagcagaggaatatatatcttcttgcagtaagatgctaaatgcatggccttggatattgatgatcgaggaagcgccttcggtgaaccagagctgccacggcagcaattgtattatttcggccaacagtttaggtgaaggtatcaacataaaagccttcgtcatgaattatatcttgaacatttcgccgaaaagtccttctagagggttctggcgctgtatattgtaaaattttgcagctatttcatccagtaactcctgaaacacagggtcacgatctgtacttgtcctatacttctgtcgaagagtcctaaaaagtgggtaagcatctctttcaagcgttggtaacagatacttgatgaactgaatcaaatctgtttttggaaattctgagttagcagattttagttgttccttcatctcatccataagtaaatttgcatctcttaggttcccttgagataggtacattaagaccccgcgtgcaattgcagtatcgtcttcaccagggtaacacttgcccataaagttcaccagcatagaagcgaacttttttggatcatttccgcgcacaaaatgacttgagactttagtcatgtccgtttctggagattcagaatatatgtattctgctaacataacgtgcagctcaggagaaccatttcttgatgtcccaaactcagcagaccacctgatagcagctttcaggaatgatgaacaactctcagcacgcacttttgcggcagatatagcttcagataattgatgcccctcgtcatcatagtcatctccaagaaaatgtggaacagatatcctggggaatgcatcatatatctttctgatacgaccaaaagtttcttcactatatggaagctctcctgcgacaagggtgtcaacaaagaggacagcaagttcaccaccacaagtaacctgcccgtgcttcaattgaaccaaagcgcctgactgaaggatgtccaaggcttctgaatacttctgagcagcaatataccttgcactggttgatttgtacatttgttgagcttcatagaaatttcctccatccaccatagcctcaagcttttcaattgtcttctcgggaggaggcaggtcgcggcgcgacctcatgctccccctcatgctcaaggaccgcgacatggctccccggcgtgctagccccggcgccggcggcagcggaggaggacggcgggcagcggtggtgatcggagtcgccgcgtcgctcgaggaattcgcctccgggacaagagacggcgtggcc

SEQ ID NO: 10009 - DNA, 851 bp, Setaria italica
  Peptide Sequence Number=SeqID_75983
tacagacattaaacaaagactcaccatgaagttgtcaagggtgaagtgaaacttctaagagataaagaagagtgaagctacacatgtcggatttgtcatattcacttaattttaaggccttgcttacatcaaataaacaaaatttcatcgaccttaactaccaacaacaacttatatgtatatccatggtccttggtaagttttttcttatagggaccaggacatgaatgcattagttaagttgttactaattgtttcaaatcaattcaacaagagcaagacatgaatcttaggtgggaagatcacatgagattaggcaatctactcattttgcacttgacatttcaaagctattaatgcaaaactgcaacatttgtcctgcaataacttttcctgtctgaaatagaggacattgtatgctgatagaagatgaataaagaagagtacaaacttacgttggtaacagaaacttgatgaactgaatcaaatctggtttttggaaattctgagttagcagattttagttgttccttcatctcatccataagtaaatttgcatctcttaggttcccttgagataggtaccttaaggaatgaatattatgtcagaaaactgaatatctctacccaacaataatatattgttccatcaatgaaagtctagtctactttagagtattctactcttggcattcgaatacaaccccaagggaattagtcgatcacatgtcaggaaatttaaatgtctatatttaatcaagatcgatcctaggcagtgttgttaatcatgtacacaattatttaactcgatcaatctaggaggaactagacattgttaatattaagaaatt

SEQ ID NO: 10010 - DNA, 481 bp, Setaria italica
  Peptide Sequence Number=SeqID_75984
atgaatatgctagtgcagtcatgaatcatgatattcctccaccgcatcggcccctaaaagttcttcactgaataaccatagcttctttgccagctctgcatctcttgcgactggggtcggtgttgcttcattgcaatccgcaaagtatttgccagatacatctttcagatcagggtgcaatgccaggtagcaagtagttgcagctccctggggtacgcccttcagaacaagttttgccacaggggagacaactgagagtagcgcactgtttcctgcaatgtaccggacgatattggtgaagattactccaggatgcagggaatttgctgtcagattgcatccttcttcctgaaaacgcctagacagctcatttgcatgaagaatattggccaatttggaatgtgaatatgcaatgaatggtttgtacctagccttatcgtttagcttgtccagctcaaagcatgtaccatcacttctttta

SEQ ID NO: 10011 - DNA, 1579 bp, Setaria italica
  misc_feature (1)..(86): n is a, c, g, or t
  Peptide Sequence Number=SeqID_75985
nnnnnnnnnnnnnnnnnnnnnnnnnnnnnnnnnnnnnnnnnnnnnnnnnnnnnnnnnnnnnnnnnnnnnnnnnnnnnnnnnnnnnngtttttttttttttttttttttttttttctttaccccaaatgttggatttgtaataattcattagaattcattctagatcttattttgttgctttaattctgcacaacaccatgagcaagcatccaaggaaagttggccactcaaactcgaccctgtaattcctagagcgcctttacaatgtccagggaccccaaaaaaaactttcttttcagatatctcctaaatgactttattcatgaatatgctagtgcagtcatgaatcatgatattcctccaccgcatcggcccctaaaagttcttcactgaataaccatagcttctttgccagctctgcatctcttgcgactggggtcggtgttgcttcattgcaatccgcaaagtatttgccagatacatctttcagatcagggtgcaatgccaggtagcaagtagttgcagctccctggggtacgcccttcagaacaagttttgccacaggggagacaactgagagtagcgcacctgccaagtattcatttattttagttaactggtgagaggctccaacaaatcagtaaaaaaaatcgtttttgagtcatcgtttaaggggcttgagcttgcaaagttattactgtttcctgcaatgtaccggacgatattggtgaagattactccaggatgcagggaatttgctgtcagattgcatccttcttcctgaaaacgcctagacagctcatttgcatgaagaatattggccaatttggaatgtgaatatgcaatgaatggtttgtacctagccttatcgtttagcttgtccagctcaaagcatgtaccatcacttcttttatgcgcaacagaagctacgtttatgatcctgccttgcacaccagtctgactggcagttgatttcatcttgtcgagtaggagattcgtcagcaagaaatggccgagatgattcgttgcaaactgcagttcaatcccatcctcggacagctggtaagggcatgccataatccctgcattgtttatgaggatgttcaggtgcttatgagacgaattgaaggactgcgcgaagttgcggacggagctgagagagctcaggtccatctccatgacatgcagcttggagcccggaacctgttcagcaaggctctctttcaccttcaggccgctctccagtgtccttgctggtatgatcacttccgctcccctcagcgctagaactctggctgtttcctttccaattccatttgttgctcctgtgacgatggccgtgagatggctggcgtcgacgccggcggtgacctcctcggcggtggaggccgagccgaagcccgaggggccccggcgcccccacggccagccccagagtcccatccccgataccgcctccttcgccaggaaccagtagtcaagcacctgctcaagcatcacacatcgccgcagcctgagcgcgagagctggacctgcctgtctctgcctctccctctccctctctggacacttgtctcgg

SEQ ID NO: 10012 - DNA, 502 bp, Setaria italica
  Peptide Sequence Number=SeqID_75986
atctgagcatatacatgctatatgtatcccaatatttaccaatatatgtatttacgtatgcatgtatgtttctcatcttatgtttagttacagagagggaaagaaaaatgagtacaagaaaaaattggtacaccagaaccaaaaacgggcaaatgcaaaacagagaacaaaaaaagtgtggctaaacaattatacacttcctatcttcctttgctgtatacaaattaattatcggccttaacccccccaacaataatgcctaacaaaaggaattaatctgctagctaagtaaattaagaatcatctgggacgaagaagaagacgaagaaggaggaggaggtttgtgatgatctcatattcatatatcccatcccatgcatcaccagctccaggcaccatgcaaattttctctctctagatagatgctcatctctctctcggtctacctctctctctctcctcccctctggttactgcgctctctcctctctctctctctctc

SEQ ID NO: 10013 - DNA, 1002 bp, Setaria italica
  Peptide Sequence Number=SeqID_75987
accgccaccacccaaagccggcgacccggcggcggccaccgcgcgcggggtccttctcggcgtcatccacggccgcactcaggctcgcggcggggtctcgtctccctccagcttcgccgtccggggaagccggtttcgtcggcaggttgagttagtggtcgattgaagtgaaactgtattgctatcttcaactgccaaggcaatggcctacgagatcagtgagatcaaaaagattggcataggtctggtgggatttggcatcctattctcgttccttggtgttatccttttcttcgataggggcttgttggctctgggtaatatttctttttgactggagtgggcctattacttggatggcaatctatgtggcaacttttcacgaagaaggcaaaccttaagggatccgtacctttcttcattggtctgtttcttctttttgtccgttggcctgttgctggtataatcatggaactatatggatcttttgtgctcttcagtggttatgggcctcccatccaggcgttcctatatcaaatacctatcattggttggattctgcaatacccattccagctgtttgctcagttgaggcgtaagcgtgcttgaaaccttctgcactgccaagatatagcatgcagttgtgatgctgatacaagaaccacctgtacccttcaccttgcctcgaaatgatctttcaagtcttgtgtgcatatgcatactttgtggattctaatattcagtcgttctgagtagtttattattgttcatatttagacaaagtagagcttcgaaaggtgttggatggtggatgctcggtttgttgaaacaggaggacctcattgcctttcatcatcccgacaacaaactgtggggttatagtgatcacacctggtttatttccgattcctgggatctggacgcaatttgccatgttacttgcaagttgccagaaacttgtgtagaagaaactatattcagaaatcttgcaaggagcttggt

SEQ ID NO: 10014 - DNA, 345 bp, Setaria italica
  Peptide Sequence Number=SeqID_75988
atagcaggcgtcatcgtcgtcagatacatagggcatgtttggatgcaaccctgaatgatttgcctcggagcatatgctgatgctgcctgcaagttgcctgcgaacgtgtcccattttgcgtggtcaggcaggtggtagagtgaactgtttggttgaagcctggagtaagcatcgagtaatggcactaattaaaattcaggcagcaacaagcaacgccggcactcgtttttggtggcctggtgaaggaagcagctgcttggtgcacaagaatcgagaaatagcagtaattagagcttaggcagcaggtacaaaggcctggtagaggaagcaactgcctggtacagg

SEQ ID NO: 10015 - DNA, 561 bp, Setaria italica
  Peptide Sequence Number=SeqID_75989
gagcaggccggacgcggacgcggactcggacgggagggagaaaagcagcaggcggcgccggctccccctcccttccccgccgctgatcgacgtcgatcggagccgcctgtccgcgggagacgccgatcggggcccgggcggcgctgtgtgtgtccaatctagggaagaagtttgtagttctctccagttggccgccaccatttccagggccttccaccattggtccaataaattattggtgttgtacttaagaatctagggaagcagtttgtagttttctcctgttgggtgccaccatttccaggggtttctaccatttgtccaataaattattggtgttgcttttaagggaagcaatttgtagttttctccagttggctaccaccatttccaggggtttccaccatttgtccaataaattattggtgttgtacttaagaatctagggaaacagcctgtatttttctccagttggcggccaccatttctgggggttccaccatttgtccaataattattggtgttgttcttaaggtttacattcttcatgttgtaaagcat

SEQ ID NO: 10016 - DNA, 1935 bp, Setaria italica
  misc_feature (1)..(32): n is a, c, g, or t
  Peptide Sequence Number=SeqID_75990
nnnnnnnnnnnnnnnnnnnnnnnnnnnnnnnnggtttttctataactgatccgcatgtgtctgcaattgcacggttagcattctcacatcattgttcatcattagctattaccttgaataaaggcacactcagccctggtgacaaacaaaaaaataagttcaggataacctatgttacatcccatattaccgttacaatataggagcatcccagggagggcctctgcatactgtgtacaatcgcactcattaaaaaggcgctatcttttaccagagaaggtatcactcgaagaggtcgtctaccaatatggccttagaagatacacaggtcccattggaattactttgtctgtttcttacttgtgtcagattcagctttccacactatatccttcaattctgttgagaaattcttgtagaaattgtgaaactccaatgtgtctcctccggttttacgaagctcaaccatgtgaagtgatggagcaacctcaaaaacctctgttgctacagataaatggccttttcttccagtcttatcacctttcaatttcatcttataattttgtttgcgcacattgaaaccaagtggtccacaagcctcctctattttagacatgatctcttgtgctgtacactgagatgtaaaggatgtttcccgctttgccattcccatcatctccttctcaaaaagatttccaaggttgaagccctgtgatcttgaaataagagcaaatgcattcatggattctggtttctcccttttctccgccacaagatgttcctccgaatcgttgaatacagcatcaacatcgtcaaggttaacatcttcaccttgttcaaaacgtggtggcttgtagtcctttttgaaccattcatcttccaaaatttctgcaattgttatcctcgtatcaggattaggatcaataatgcgcttaatgaatttctttgcaccggaagaaaaccatgtcggacaagaaatgtttgcctggcagatcagtttgtacagcctcatcagattggaatcatcgaatggtaaatatccggccataagaacaaataggattatgccacaggaccatacatcagcagccataccattataacctttatcagcaagcacctcaggtgcaacgtagtttggtgttccacaagtagtatgcagaagcccatcctcttttgtttgtggcgcaaaggcactcagtccaaagtctgaaactttaagagatccatgtgaatcaagaagcaaattctctggcttcaggtctctatggtaaactcctcgactatggcaataatcaaccgcatttataagttgatgaaagtatctccttgcttcatcttcacttagcctcccagaattgacaatcttatcaaatagctcgcctccgtcaacaaattcaagaaccatgtatatctttgttttgctggccataacctcatgcaactggaccacattgggatgtttgattagcttcatagtggaaatctcccgtttgatctgctcgaccatcttgtgtcggaggacgtggttgcggtcgagcaccttgatggcgcagacggcgccggtgcgtgagtcgcgggcgagcttgaccttggcgaagcttccctccccgatcgtcttcccgagctcgtacggccccacccgcgtcttcctccccgccgccgccgccgtcgccttgggcgccgcggactccgccatcccttcggcccggcggaacaagcgatcgatcggaggctcggacaggcagggcgcggcgaggcgccgcggttcgctgggtcggttggcgttggcgttggcgttggcgctggcgctgggtcgacgggagcggtggatttgctcttcccgtccgcctccgcgcgcgtccggtttatatgccgcggcgctgcgctgcgctggtgggcccggtccgttccgtttggggtgagatgtacgca

SEQ ID NO: 10017 - DNA, 281 bp, Setaria italica
  misc_feature (246)..(281): n is a, c, g, or t
  Peptide Sequence Number=SeqID_75991
catactcgggtgtttggttgtaaggatttgtcggctccatttatgttcatatataaatgtgctaggattctttgtttggcgattcaaatgtacaaggatgccttagagctatgtaaatagctatcatctgtaaataatggttgcaggtattgaagttaaccatgctccgttgtgaatttgtgagagtaggttgagagttgacatttggatagttatagttgcaaggttatataaaaaaaaaaaaannnnnnnnnnnnnnnnnnnnnnnnnnnnnnnnnnnn

SEQ ID NO: 10018 - DNA, 284 bp, Setaria italica
  misc_feature (16)..(16): n is a, c, g, or t
  Peptide Sequence Number=SeqID_75992
accgcggcgacggctncggctgcatgagcaggccgctgtggtggtgctggtgcggctggtggtgcatgtgcaggaggccgttccgcgggatgtcctcggcttcctccatcggcgacgatctcctgtcaaagaacggcagcttgtccacgaaccgcgacatctcgccgcgctcaccagtcaccgcccctccccctcgccggccggcaagccccgctcccctgtacacccctacctcgctgcccgccgcggcgagtgagagaaagagagatagatagaggtgaggg

SEQ ID NO: 10019 - DNA, 284 bp, Setaria italica
  Peptide Sequence Number=SeqID_75993
cccgtgtacccgccgatggagaacacgaccgccggctcggcgtgcgacgccgtgcaccgcggcgcggcccccgcgccggccgccgtccgcacggtgatctcggtgacgcggcccatgctcgtggcgtcgcccttccgcgggtacggccggaccttgtacgtctgcccgtcggcaccgcccgccgaaccgacgacgacgacgaacgcggaggcactggcgtccatgcggacgtcgccggtgaggtcgcagacgtcagcacgggagtcggaggtgtcgcacagcgg

SEQ ID NO: 10020 - DNA, 433 bp, Setaria italica
  misc_feature (398)..(398): n is a, c, g, or t
  misc_feature (416)..(416): n is a, c, g, or t
  Peptide Sequence Number=SeqID_75994
tgatgattcgccaaatttgagaagtaattcgagttgttatttcattagagttattattccagcaagcataatcggttctgggttactaatcctcacgttgttgttcatgatttggagaaagaaattcaaatggtgtggtgcaccgttgtatgacagtcaaggtggtggtggaattatagcctttagatacactgatttagttcatgccactaaaaatttctcggaaaagcttggagcaggtggttttggttgtgtattcaagggagcgctaagtgactcgactgctatagcggtgaaaaggcttgacggtgccagtcagggagagaagcaattcagggctgaggtgagctcaattggactgatccaacatatcaacctagtcaaattgattggtttcngctgtgaaggtgataagnggctgcttgtgtatgaa

SEQ ID NO: 10021 - DNA, 851 bp, Setaria italica
  misc_feature (4)..(4): n is a, c, g, or t
  misc_feature (19)..(19): n is a, c, g, or t
  misc_feature (37)..(37): n is a, c, g, or t
  Peptide Sequence Number=SeqID_75995
gtcncggaactgaggcaangttgcaagcagcttcacngaagacgcatctttgaacacaccatatcttgacagtcttgtcccttgatccagttgcgaattcataccaaggggttccatgagcagcccatcaattcttttgtgtgcttcatgctttgcaacgagatggtgttccactccttcctctagaattacattagcagaatcgtagtcacagagaaaaacagtgtgactgaaaagacaaatgtaaagcaataatttcaacgaactgcatgattgtaagtttacttactggttttcctgattgaaaagatcgacaaatgacgatcccttgagacactcaagagaaaaacattatcacgagagaactccatttgtgttactgtaagattgtgggattgcaagcggccaacagctttccacgttccaatctcccagagccagatctcagcaactggtgctgattgagccttgcaagatgatgcaacaagcttcccttcataatcacagcatatcgagaagagctcatttccatgaccatatagtttgtgcgattcaggccatagagtattccatgcaagttggtcctccacagggggctcggtaaatacagtaggcactgcatcaggaattgtctccatagaatcgggaccatcagtagaattactgcttagggattccttgactccatgtgtatatatgggtttctgtgaaagcccaagagcagacatatttgctccaacgacttgcacattgtcaaaatcgtcagagacatcaggtttcaacaaagttgcttgttgtagggtcttcaaaaatgataagggagcttcaaagaccctagaaacctttcatca

SEQ ID NO: 10022 - DNA, 2362 bp, Setaria italica
  Peptide Sequence Number=SeqID_75996
attatcacgactagtttacaacacatcttggcagacatcgacaaaaacactgccagaaacataacagtttgatctactaaatctggacgcatttgtctatgtcctgcaatgaacatcaaaaaaccctcacacagtgatcagctccacaggaagccagctcaagcgccgatttctcatcagatgaattgggttcccgccaccgtaaacggtgcacggttgacacgtgacacaacagagggtcaaatcgaagcatgcacgctgcactgagcggagacgagtctggagtactgtctgcagaaactcttccacctgaaacaccccagagttcgatcaatccattgtccatgccaacagcgagaataccggcattggaagcacggtcccggcccatccatgccaatgcggtgacactgtcacggaactgaggcaatgttgcaagcagcttcacagaagacgcatcttgaacacaccatatcttgacagtcttgtcccttgatccagttgcgaattcataaccgaaggggttccatgagcacgcccatacaattcttttgtgtgcttcatgctttgcaacgagatggtgttccactccttccttggttttcctgattgaaaagatcgacaaatgacgatcccttgagacactcaagagaaaaacattatcacgagagaactccatttgtgttactgtaagattgtgggattgcaagcggccaacagctttccacgttccaatctcccagagccagatctcagcaactggtgctgattgagccttgcaagatgatgcaacaagcttcccttcataatcacagcatatcgagaagagctcatttccatgaccatatagtttgtgcgattcaggccatagagtattccatgcaagttggtcctccacagggggctcggtaaatacagtaggcactgcatcaggaattgtctccatagaatcgggaccatcagtagaattactgcttagggattccttgactcgtgatgtgtgagagatgctaaccatgtgtatatatgggtttctgtgaaagcccaagagcagacatatttgctccaacgacttgcacattgtcaaaatcgtcagagacatcaggtttcaacaaagttgcttgttgtagggtcttcaaaaatgataagggagcttcaaagaccctagaaaccttttcatcagcaccactaacaaagcggtggttcccactaccctgaataaatgccacacagttaatatcatggccatgaatttgtggacgtgcgatttcacgccaatagatcatgtctccaggtttaacttgatttctccaaggagcaaatattcgtagttagtctggtcatggctaacggataacaaatattgaccggatcttgcccatgttaagtcagacacaggagcaaaatgaccagatgggactatctgaggctgccaattttcagaatccagtccaacatctctccacatatgaaaggagccaccatagccatgtgcaagaatggattttccatcaggctgccagtgtccaccataaaatccaagtgccgagtgacttaattcaccaactgtcactgaattgatccaaaggccagtatttttctctggcctccatatcatcatcatcttgtccatggatgcggatagtatactcattgcctgatgagcttcatccccaggtaacagtgttggcggttgccactccacggaatacacccaatcttcatggccaacaagaagagactccagtgatacttgatagcttgtattaccagctacaaaaagtggtccctcaatataggaggtcatttcaatgtttgccttcctcaattgtgccgtggagcctgacgaaacagcttctgaatccattttccatatcctaatggttctgtcctgagatgagctaacgaggaaaaggttgtgctttccactgctcatcatcacgggtaaagaaaagtctaaacttctgatccaatcagaatgacctttaagttcacaagctttaatgaacttgcccgacttatccccacaataaatgtggatcttgtgatctagaccacccattgccaaaattagatggcttccctgttctggtaacactgctaaggaaagtgaaaccattggttttgaaccaatggacaaagtatgcaagcaagacactttgcagctgccaccaggggtgggctcaatcaccatttcccaaataaccacaatactatccgacgaagtagaagcaaaaattgcaacagtatcagacaccatccttccagcaagacaggtgatccctttcttatgcatccctgggagctgcaacacatgagaccaatctcctttgccagaaccaatcttccatgccatgatagc

SEQ ID NO: 10023 - DNA, 436 bp, Setaria italica
  Peptide Sequence Number=SeqID_75997
accagttgatcgcggagccgccgccgaccgtcgcgccgtgaacatgatggtcgacgcgttggacgtgcagaagatgcctcccttctcgtagaggcgctccatggacgggccctcgatggagctgtaatcctcggccgtgaagtagtcccccttctcgacgacgacgaccttgtgccccgctgcggcgagcacggcggcggccacgccgcctccgcagccggagccgacgatgacgacgtcgcactgcacagtgtggtgcgggcctgacacgtccgctttcaccgccagtcctttgtccatgagtgacctcagcagcgcggcatcgtccagggatctggtctccacgacgccgctgtccagtggtcgcggcgacggcgacggtgctgcttccgataggtcttcctgtggcctgtcgacgtccggcacgctgtatcca

SEQ ID NO: 10024 - DNA, 388 bp, Setaria italica
  Peptide Sequence Number=SeqID_75998
acttttgcagcatttatccctgtttaggtatttgcacagattgccgcaggagcactatcccatacttcgacagacctctgatcagctctggtcaataccatcctactgcctccaaatgcccagctgacaatcttggccttctccttaatcgcctcttcgccagcccccacctccatggatggtccgctgccgacccaattcctcttcatcaccttctttccaccggcctctggtgccaactcgacctgactccacacctccacatctgctccgcgtgccacaaacacccaattgcagcagcactcaatcttacagccattcccctctttccttctagatgatgccgcagcagccgccctctgtccgttgccgatgcacaacccaacga

SEQ ID NO: 10025 - DNA, 277 bp, Setaria italica
  Peptide Sequence Number=SeqID_75999
aaagcgttaagatgttgctcattgatttgtcttaggccttgggccatagtaacaatgagcaacatcttaacgctttcagtgcttgaatttctcacgtccttcactgagttctctcattatacaaaatttgtctactcattaaaaggcggcaagccccattcgctgggtttaaagtccaacaatgaactaagaacttggtcagctcctttgtggtatgaaacatcaagcctcggatctggaaccatcaccgcagacattccagcattttcgctgctgc

SEQ ID NO: 10026 - DNA, 319 bp, Setaria italica
  Peptide Sequence Number=SeqID_76000
accgagtacgggcccgacaatcttcgtcgacgagtgcggcctcgacgggctgctgacacccgagcagttcctcgaggagcgcgagagcatgctccaggcgctcttcccatcctgcacaaagctgcgcgccgactcggcggccttcttgcccatcatcttcgccttgagggaccagtcgaagaccttgccgtacctggcgaggatcttctcctgcacctccgtgtagaagccctccgtgtcgaggaggaggccgtccatatcgaagatgacgtgcgtgatggcggccctgggctgcgccgccgcagaggcctcatcggcg

SEQ ID NO: 10027 - DNA, 437 bp, Setaria italica
  Peptide Sequence Number=SeqID_76001
ttttttttttactataagacatacatgaacacatctgtattacctgtcatacgatcttcattgaataagaggcaacaagaatcctcaaattgttactatggcccaaggcctaagacaaatcaatgagcaacatcttaacgctttcagtgcttgaatttctcacgtccttcactgagttctctcattatacaaaatttgtctactcattaaaaggcggcaagccccattcgctgggtttaaagtccaacaatgaactaagaacttggtcagctcctttgtggtatgaaacatcaagcctcggatctggaaccatcaccgcagacctgcataagaagcagagtttgccgtcagagagcaaagtttgcggaaacgtgtacctagaacaaccacttacattccagcattttcgctgctgctacaccggatggcgcatcttc

SEQ ID NO: 10028 - DNA, 1121 bp, Setaria italica
  misc_feature (1)..(4): n is a, c, g, or t
  Peptide Sequence Number=SeqID_76002
nnnnaacatgcttatttcattgattgtttacaagtttgactgtaaatacttgatttgctagatgcaagcgacataacatcttgcgcacttgcaaagaactaagacatacatgaacacatctgtattactgtcatacgatcttcattgaataagaggcaacaagaatcctcaaattgttactatggcccaaggcctaagacaaatcaatgagcaacatcttaacgctttcagtgcttgaatttctcacgtccttcactgagttctctcattatacaaaatttgtctactcattaaaaggcggcaagccccattcgctgggtttaaagtccaacaatgaactaagaacttggtcagctcctttgtggtatgaaacatcaagcctcggatctggaaccatcaccgcagacattccagcatttttcgctgctgctacaccggatggcgcatcttcaaaaaccaagcatttactgggttctacattgccctcaaacctcctcatagcagtgaggaaaatatcaggagatggcttgccagccttcacctccggatcatcccccatgacaacatgatgcatcagggagaacatttcctggtggttctgtgtcttcagtgcaaaatgacgtttatgggatcctgttgcaacagccattggtattccattcgcatgaagatgatggatcaaacgtagtacccctggcagctttgtgcaggatgggaagagcgcctggagcatgctctcgcgctcctcgaggaactgctcgggtgtcagcagcccgtcgaggccgcactcgtcgacgaagatgcgcgccgactcggcggccttcttgcccatcatcttcgccttgagggaccagtcgaagaccttgccgtacctggcgaggatcttctcctgcacctccgtgtagaagccctccgtgtcgaggaggaggccgtccatatcgaagatgacgtgcgtgatggcggccctgggctgcgccgccgcagaggcctcatcggcgccggcggatgccattggcgcggcccggtgagcgagcgagagagatctgggtctagatgactggctagtttccgtgtgaatctcggtggtggcagattggcgtgcgcgtctccgaactcctcag

SEQ ID NO: 10029 - DNA, 555 bp, Setaria italica
  Peptide Sequence Number=SeqID_76003
tttttttttaacttcacatctacatttaataaatgataatcaagtttacttgttcagaaaggattaaatttgcattgttgatactcaaattcctcgcttccccgcataatggtaatgccagagaactcaacctccatctgtctcttgcttgggagtcatgatgcgcttgagaaatatgaactggagacaaatttatttgttggtgcatatttacatggagattcaagccagaaagtgacaaaatgtgaagctgcaattaactaagaaagcccttatttggatggtacaagccgagggtgaacaattcaaaattatgtggaagaaaactgaacagaactaggtgtaggttacaattttgatgagcagtaacttgctggtttacattcaactcatcttgcagtatatattcgaagggaacatttggaggtatccagtgaactggtcatcgtttaacttctaattttctgtcagaaaaaactggcgacgaattttccttaatgacataatcatccaaaaattgtccataaatcctttagacgagggaagggattttac

SEQ ID NO: 10030 - DNA, 582 bp, Setaria italica
  Peptide Sequence Number=SeqID_76004
cttcgagtaacaccatcgatcgagtacattctacaatggcctccggcggcaagggcctgctggctggttcgttcctgcgagcggcggcgctgggtctggtggttctggcgtcggcggcgccggtggctcggtcgtggagcaaggaggggcacatgatgacatgccagatcgcgcagggtctgctggagcctgacgcggcgcacgccgtgaggaacctgctgccggaggacgtgggcggcgacctgtcggcgctgtgcgtgtggccggaccaggtcaggcactggtacaagtacaggtggaccggcccgctccacttcatcgacacccctgacaaggcctgcaccttcgactactcgagtaagttcttccaatttccaagcagttcgcatgcagttgaagggccgtcgtgtcgtgtctctctggtgatgaaatgcaatgcaatggtgatggatcggtgagcaggggactgccacggccccgatggcgccaaggacatgtgcgtcgccggcgccatcgccaacttcacgtcccagctcctgcactacaagcacggcagcgccgatcgcaagtacaacttgaccg

SEQ ID NO: 10031 - DNA, 255 bp, Setaria italica
  Peptide Sequence Number=SeqID_76005
tgggaacacagctaggtagcgatggcatccaacaagtcctccatagcttcccctgctctcatgtcctagccgtggcagcactcatattggccacttctgtgcgggcccagacacccgctcctacgccggcaccgactccagctccagcgccggtaccggcccctacacctacgcctactccagcaccaaccccgactccgacgcctgcaccgacgccagcacccactccagctcctacgccggcaccgactccag

SEQ ID NO: 10032 - DNA, 1021 bp, Setaria italica
  Peptide Sequence Number=SeqID_76006
gtatgggtttctggtggatccaaacaacaaggacaaggtggagtgcaatttctgtggtcaccggagccaaggtggagtgcatcggttgaaggaacatgtggccaatgtttgaacaaatgcgaagaaatgcaagaagagtacacaggaggctaaagacaagtgcaagaagtcactggaagattcaaaaaggaagaggaaggaggtagttgctcgtgaactagagcttagagaagaagtgaatgtttctcgggttggcggagaggatgaagaagtaacttgtgttggaagttcagagcctcacaaattaggacccatggataagtgaacacgtgctattgatcctaaagcaacaaaatctgaatctttgcagcaacagaagctgaacaaggaagtttggaaagaaagaacacatgaggtgcataaatatattgcaagatgggtctatacacatgccataccattcaatgcttgtgacaatgatgagttcaagcaaatgtgtgaagcaattggacagtttggccctggacttcaacctccacctctgcgtgatctgcgagagagtttgctaggagaagaatatgcaagaaccaagagtttgctgggagaacgtgaggctgagaaggtgaagaatgggtgctctgttatgactgatgcttggttagataggaagaggagaagcataatgaacctgtgcactaaatgtgctgatggatccagttttgtcagctcaaaagagatgtcagatgtgtcacacacaagtgaagtcatatttgaactagtggacaaggcaattgaagacattggtctggatgatgtggtgcaagtagtgacagacaatgcttctaacaacatgggagcaaagaagctacttttggagaagagaccaaacatcttttggagctcttgtgcaactcacacaatcaatttgatgctccaaggaattggcaacatgccacggttcaagaaggtgattgaccaagcaaaggcattcaccatatttgtatatgggcatacaagaaca

SEQ ID NO: 10033 - DNA, 456 bp, Setaria italica
  Peptide Sequence Number=SeqID_76007
aatgcaataatatgaggtttttctgccagagggctaccagaagccacatccagattctagccaggaagagagagaaaagttcatcaggtcaaaatatgagctgcaggaatttctgaagccaagcctgcggattgtctctcatcatactagtgatgactgtggaaagcatgcaggcagtgcctcccattctgatggttccaagagtgaagtaagctgtcacagaacctaacatttattacaagacgttcactttcttattcagtatttagcgtgttctgtaattctttttttaaaaaaaattgacagatcggcatgattgaattcatcggaatattgaatgtcaaggtgataggaggcaccaacctagccatcagggacatgtcaagtagtgacccatatgtggtcctgacgcttgggcatcaggtaattttggtccgtttgtcatatttctaacag

SEQ ID NO: 10034 - DNA, 1319 bp, Setaria italica
  Peptide Sequence Number=SeqID_76008
atctcagcgctgcagccccaacccctcgacctcaaggccaggaggcggaaggtcggaaggaatcggactatcggagctgatccggcctctctctcagggatcactacagtttgacgcatttggagctggcctttctgacaggtgacagcaagaagatgagtgcaggacatggcgacacaggggcctcagctatgatggcaaagctgaaggagttattgcacagaagtgaaaatcgcatttgtgctgattgcagcgtgcctgatcccaaatgggcatcagccaatattggggtattcatttgtgtaaaatgttctggcgtccacagaagtcttggtacacatatttcaaaggttctgtcagtaacactagataagtggactgacaatgaagttgagtcaatgatagaagttggtgggaattcaaatgccaatgcaatatatgaggtttttctgccagagggctaccagaagccacatccagattctagccaggaagagagagaaaagttcatcaggtcaaaatatgagctgcaggaatttctgaagccaagcctgcggattgtctctcatcatactagtgatgactgtggaaagcatgcaggcagtgcctcccattctgatggttccaagagtgaaatcggcatgattgaattcatcggaatattgaatgtcaaggtgataggaggcaccaacctagccatcagggacatgtcaagtagtgacccatatgtggtcctgacgcttgggcatcagaaagtacaatcttctgtaatcaaaggcaacctgaatcctgtctggaatgaagaactgaagctctctgttcctcgggaatatggacctctgaagctgcaagtgttcgatcacgacatgatgtccaaggatgatctcatgggtgaggccgagattgacctgcagacgatgatcaacgccgctgctgcgttcggtaatccggagctgctgggcgacatgcagatcggccggtggctcaagtctgaggacaacgcgctcgtcagggacagcgccgtggtggtcgccggtggcaaggtgaagcaaggggtatcgctgaaactgcagcacacggagtccggggaactagagctggaaatggagtggatgccgctcaacatgtagaaaaagctgtgaagttgcaaactttgttttcctgtcaaattgcaaactttattttctgaaatcaaaactatctgcgtattggcagaacataaatggtgttgtgctcagaggatttcattttgcttttgttgcaatcagaaatgttcagtgggagttccaagagttcttgcagattctttgtctaaaaaa

SEQ ID NO: 10035 - DNA, 399 bp, Setaria italica
  Peptide Sequence Number=SeqID_76009
gctcagctcctccagttcccatcggagttgccgtagccgccggtgcgggcgccttctcctcctccttcgcctcggccgcggcggcgggggcctcctcctggtcggggtcgccggcggggtcggtgttgcgggagacggcgccgcggaggcggtcgaggaagggcttgaaggcggtctccacggtgacccacgcgagcgcgatcccacccgcgacgatcaccgccgtcttcagggcgccgccctcgcgcgctcctcctcccttcgccatgggtgctcgcgggccgcgggtgacggatgcctggatggggtgggcgggcggtggcgtgacgcacgcgctccgtgctgcgctgtgtgatgggtgtttgcggccgcgcgcgttgggggggtttgggggttttg

SEQ ID NO: 10036 - DNA, 589 bp, Setaria italica
  Peptide Sequence Number=SeqID_76010
gatccgcctcccgctgatgatctcgagaataagaactccgaagctgtagacgtcggccttcttggtcagctgcccatgcacaaaatattcaggcgccaagtacccacatgttccgaccacgcctgtgctgatgtgagtaacattgtccggaaatagctttgccagcccaaaatctccgatctttggcctgtagtctctgtcaagaagaacgttgctggccttgatgtctctgtgcacaatgttcggctcgtgctcctcgtgcaggtagctcagccccttggcagtgcccacgcagatagccgacctcgtggtccaagacagacacgtcactccgttcgctgaacctaaagcctgcaatgcatgatcaaggctgttgttctcgaggtactcgtagatgaggatcctgtttttcctctggatgcagcagcccagcagcctgacgaggttcgcgtgcttgactttcggtaaattgtcttctcgatttcagctaggaattccttgatcccctgctcggattcagaggacaaaacctttgcagcaaatgtggtgccatctccccatactcccttgtacacagttccaaaaccac

SEQ ID NO: 10037 - DNA, 611 bp, Setaria italica
  Peptide Sequence Number=SeqID_76011
tcattttctgcttatctttctggtattggaaagaataaggtgaacggtgctcttgtgaagaaagtacttgatttcagttttcgtgatgtcaagggattgctgcaactaattcgtcattcattggagtctatcaaccatgaatgaaagtgttaaatagtaggacgagcatacttcctgtgagtaaagatctattatggcaatgttgctttagcatttgtgctacattggtacctcctccaatatgaatgtagagataaaacaagattagagagtaaatgtctgtgaatgtacaggattcacgcttccttctcttgtgggtgatcatttggaccagcgcaagctgccaaaatatttttaccaagtctacttttgttgcttggaagtatttcttgctgatgatcatttgactagtgaattggcaaagggtataccaagaattagtttgcagatgttaattgctgctacatccaatattctcggttttcatgtcctgtgagtgaccaaatccaagttttgaatgtgaatctaatctccatctgttgcaatggtaagaaatatttattttgttcttcggaatcttgctcttgtacagtaatagtaggcgaagaaag

SEQ ID NO: 10038 - DNA, 329 bp, Setaria italica
  Peptide Sequence Number=SeqID_76012
caggcgccgcaaaacaaacctccgcgcggcgccgcccccgacctccgagagagaagcgatggtgatggacgagcccctcgacttcgagaaggaggaggatcccctcctcccctccccgcgccccgccaagaggaagaaggttatcggcttggatgatcttttactggattactttgaaaatggtaaggatttgcgcaaagttagggctgccaagtctaagcatggccccagggggggatatgtttcagatgaggaagacaaggaggtcagggaggatgagatttgcaaaatatttgaggattgtgaggaaaaggccaaagggttggatg

SEQ ID NO: 10039 - DNA, 456 bp, Setaria italica
  Peptide Sequence Number=SeqID_76013
ggtggatgacaaccttgcatatgctcaagcattttggtgttcctctggagggtttggagctaaggattgatagccgaggatctcctcctcttggtggtggtgaagtgtttctccgggttcccaatataaatggcacattgacggcagcaaactgggttgatgaaggtatggtgaagaggataaggggtgtttcattctctaccagagtatctccacagattgaaaaccgcattatttatgctgcgcgtggaatcttcaatcgcttcattcctgatgttcatatattcactgatcatagatctggttctgctggtgggaggtcaccaggctatggtgtatcattagttgctgagaccaccacaggctgcctgctctctgtagatgccactgtgagttatcctagtgttaacgaaatgaatgaagaatctgagaagccagagctaatgtctccggagg

SEQ ID NO: 10040 - DNA, 1026 bp, Setaria italica
  misc_feature (988)..(1026): n is a, c, g, or t
  Peptide Sequence Number=SeqID_76014
cgggtggcggatgacggcgtccgagccgccgccgccgccgcgcgcgcgcgtggtgcggatcctcgtgcacgatgctgacgctaccgattcgtcctccagcgaggatgaggcgccgccgcctccgcggagggcgagggttggcagcagcagcgtgggcgcgaggcgccgcgtgatggaagcggccggggctaatccgcccgtacgcttccgtggcgtccgccggagggcgtgggggcgctgggcggcggagatccgcgacccgcacggcagccgccgtatctggctgggcaccttcaacagcgcggaggaggccgccgctgcctacgacgttgcaaacattcgcttccgcggtgccagcgcccataccaactttccccccgctcgctacttgctgccactagagccagccaagcctatcatctcgctgactcctgggccaggaaaggtgatcaccttgccaccagtacctgtgaaatcgaccgtccctctgcaggtgaaggtgaaggaggagggtgggagctgtgacggccagggggaggaaggtagttcggaggtcaaggcctttgcaccaaggccgatgtgggagatgatccctgggaagcgcaagaagcgtccgggctgtggcagtggcactcgcctgcgtgccattcatgctgcctctgtctgcgtggaggaggttggcggagcctgagggcccaagtacccttataattactatcgctagaaccttgattgtctatctccatagcatcattagaacttggtattgtataattttggttagtgttaaactgttgatgcgaaaatctatgactctggttgtgatatgattgggtgatgatcttatgtatatatggtgttctgttacatttggtaatatgttatccgtgtgatgcaatgtgcgtgcttgaatgtggaattgaacttatgcaatctaatgatgtgtgcaccaattatcttgtatttaattgctaataagttaaaagtnnnnnnnnnnnnnnnnnnnnnnnnnnnnnnnnnnnnnnn

SEQ ID NO: 10041 - DNA, 507 bp, Setaria italica
  misc_feature (18)..(18): n is a, c, g, or t
  Peptide Sequence Number=SeqID_76015
acctcggtccccggccancggggccggccaggggtacgcgctgctcgagttcggggccatcctcgtctgcccgcgcaggctcgtcgaggtcgcctcctacgccacgctcatccgccccgccgacccggcctccgccgtctccgcggcctccgtgcgctgcaacggcatcacgcgggacgccgtatccggggcgccgccctttcgcgacgtcgccgacgcagtctacgacctcctcaacgggagggtatgggcagggcacaacattgtgaggtttgattccgcaagaataagggaggcatttgctgaggttggtcgaccacctccggagccaaagggactgatagacaccttacctctacttacccagcggtttgggaggagagcaggggacatgaagatggcaagcttggcaaattactttggtctagggaagcaaaggcacaggagtcttgatgatgttagaatgaaccttgaagttctgaagtactgtgctacagttgttgttcc

SEQ ID NO: 10042 - DNA, 248 bp, Setaria italica
  Peptide Sequence Number=SeqID_76016
cagttgtgcaggggcgcaggcggctagcgggctggtgcagtggaggccttgcgggcccactcttaggcacggcgcgctcggctatggcggcggtgtttggccatggcacgaccggtgcaacagactattcctagtgcgagctatggtctcagcattgcagttggtggatctctgtaggtggctataggagatggcggagcagcggctcgcggcgcgggcgacaacgagggtcagtgccagcggaggtg

SEQ ID NO: 10043 - DNA, 967 bp, Setaria italica
  Peptide Sequence Number=SeqID_76017
ggactctacagaaatctccacgtggagtctacacgccagcaacagcattctggttacaccatcgctgagagcggcaacgctcagtcacaattcagtattcagtactattgcaccccggattcagttcaagtatggccacgcagacaaagcgtacgaaatgaatcgagtaaaccacgtcagctgggtgtattatactattatttaacctgctgttgtagcctatctacccggcgcaaccctacacctaacagcctcctctcaggcaatctttgtatctactctcccggtgaatgaaatacaccgtcatacaacatctagttctacagagcatgaaccagagcgctcctgatggtgtttcagacgtgcacccgagccggcagggctcagaacttcttctttacagataccttctgaactttttatgttgttcagagctctcttggcgtagaccgtgaaggcgactgtgaggacgatggcgatgatgaaggagatgacgttgtatgttatctccaccggcgtcattttgtagttgccatacttcatgtcagccaatgtacggattaaccgtccgctgtatatgtagatgaatgcctctggtaccattccagcaattgaaccacatagataagggttgaacttaatttctgtcacagtgacagcataattaaaaattgtatatgggaatggtgagatcctgaatagcgcaacaactcgaaactgctggaaccaattcccttcaccagcaagttttattagtgctatctgctgaggccatttcgttaaccatacatgtagacgttcgcggaacaatgagccaatccaatacggtaccaccatgccaatagtagtcccgaccattataatcaagaaaccccaaccataaccaaagatcattcctgctaaccacatagaaggaccagaaggaactaaaataactggaaagagagccaaagatgcaacaagaaca

SEQ ID NO: 10044 - DNA, 894 bp, Setaria italica
  Peptide Sequence Number=SeqID_76018
ttttttttattatcaagcacaaacgcacaatccgcgtaccaaattcacaagcagttcaatccaaaccacaacaataccggccgaataacacgccatcgtagtgtagagtagcgaacgagatccacaagaacagctatatatggatgctgcacaaggtgtatatgtaggtgcaggtacgcgcgagcactggcatggccatggcgctcaggcggatccacccttgagcctcttggcgatgccggcgaagtacttgccttggtggaaggcgtgctccagctccacctccgtcggccaccgcgagccgtccccggcgaacgtgcccgcgccgtacgggctgccgccctgcacgctctccatgccgaacatcttggcgccgaacgtgtaccccaccggcacgaacaccatcccgtggtgcgtcagctgcgtcaccgccgtcagcggcgtggtctcctgcccgccgccctgggtgccggtgctgaagaagatgccagcgggcttgccggccaggctctgctcccgccacaggccgccggtggcgtcgaagaaggccttcatctgcgcggccatcatgccgaagcgcgtggggaacccgaagaggatcccgtcggcctccgcgagctcctgcggcgtgatgatcggtgcgtccgtcttcgggggcgcgcccatcttgccgagcacctcctcggacagagtctcagagacctgccatatcttcacctccacaccttcgacagaggcggcgcctttcttgatctcctcagctagcttggaaacatgcccgtacatggagtaaaacacgacgtagaccttgaccgccattggagctcttcggatctgagatctggaggcaggggaaggaaggatcgaggacgctggcgttttctttgtttaatg

SEQ ID NO: 10045 - DNA, 1329 bp, Setaria italica
  misc_feature (25)..(25): n is a, c, g, or t
  Peptide Sequence Number=SeqID_76019
agttctctttttagttttttttttntttttttttttttccttagattcagatcctcgtgttaaaccattatcgtggatctatcaatagtaaaggtcaaactaaacgacaggacacgaaacaacatgcatgtttaggagctccatttaccaccacaggctttacatttccagctgatgccaacatgtaattcaataacaccatgatgacagtggaatgcagcattacacacgatggtctaagatcaaataacttcggagctcatcaggagatacaagtcgtggatcccagtgtattccatttcatcctaggctgattcgattgggaactacacctccagaatatagcacaggtggatcagaagacgagaggaacggcatcatcgctggtagcttcgtgcgaatctggcaaatcaggcaggtctgcgctgatggagaaccttagccaccgccgtttctccacgtacaccaggcatggctgcagcacgaacccgatgatcattgccatgatgcttactgccatcaccttgaaggatgcgagggccatcaccaccacgatcaggagagcaggagggatgatcatcaggacagcaccaatggtgcctagagggatcttgtagggccgagaggtgtctggatgtgtcatcctcagcttgatgaaggcaatgaactctaggatcatgccgaagcagtagaggtagttctcagcggcaacgatctcctgaaagctcatccaggacagcaggatcacaccaaaggccgagaacaggatgccaatcagtggggttccatagcgagatctcttggcaaagaattcagggagcattccgcgctcggccatcccaagaagctggtaagaatcgctgctcatttccgtaaggaagttgcccatgttggacaatgcagcagctccttgaatccatgagtgcaaccagacaccaccgagaatccttgcaatgtctgaaaaatacccatctgaccagtgctcccgaacaactggaattgctgctgtacaagtgatcagagggtacaggtatccccccaccactagaactagagcataagaaagagctctcgggagggtcctctttggattctcgacttctccagccaatgtactgattgaatcccagtagttgaggttccaaaacagtgtgttcagatacaatccccaattcacactccccaagtccatctcaagccaccttgaaggttcaatccggggaatagctatcaatcccatcacaaagaatgggaggaggagaacaccccaagaaagactgccacccagccaaactatggtcagacctctgtagttcatgtatgtaagtg

SEQ ID NO: 10046 - DNA, 1084 bp, Setaria italica
  misc_feature (981)..(981): n is a, c, g, or t
  Peptide Sequence Number=SeqID_76020
cggtagaaactactgggtgcaagcatatcggagagtgagtttggattcgatcatagggaaagagaaattggaagtgcattattgatcattttcaccaaaatatagtgaaagcctctaaccgatcaattaattaactcaatcaccaacgaagttcaattgaagagcattggaaccgttgggacggttgtgttgatcgagaatattgatcgtgcccagcgaaatggagtgacaattcaagatcgaatcaacactcgggagctctatgtacaagcagagggattcgaatccaacttaatgcactattgtttgttgctccaagcctcctgcacaatgagagtggataaatagaaatagttatggctatccacttaaaaaaggccaaggatgtcaccaagtttataattaggaagatctcattgtcgtacatacatctatgggcccaccagaaggtttggacaatcctaaatatggggctggacatcaagacgtaggtgcagtacagtgtagtctacatggcaagacaggaactagtcgaggattaggaaaagtactcgtggcaataagagtagaactcgtctagtcgaatccgactggtatttttgtaaccatctgacctgtaaccctacccccggcaatataaggcgaggcaggtaccccctccaaagcaattcaatccaaccaacacacaggacgtagggtattatgtaatctagcagtccgaacctgtctaaatcgtgtgtctgcgtttaccttcgagttcctgatctcgacgagccctaccgaccaaaacatgtagaatatttttcaagtagaaattttgggtatgagcaggaattacagaatgaccaacgtgactaattcccatacctacccgcaggtcgtatgaatctgctcgccacccttgtacttatcccatatggctagcttctccagatcactggtaacatgatcagttgctcctatgtcgacgtaccactttgngtccacattgtaggagcccattgccgcagcaaccaaacactcattgggctcataattttcatcaaacgatgccaacagctaggagcaagatgtcccctttgaa

SEQ ID NO: 10047 - DNA, 331 bp, Setaria italica
  Peptide Sequence Number=SeqID_76021
gtccatacctgcgaaggctggagctgtgtggtctccgggagcaacgcaagaagcaccgagaagaagatgagcaggagatggtccggcctcgccattggagatgggaggatttctcgatcaagaaacactgtagtcactgctccactctgttctttatcaagcaacacgaaccagcggagtgcaaaagcttatcaacgaagctaggcctgtctttgcctgatcttggatcggtttctcctgaccaagaacagtaacagcatcaatagaatgaatagccagacgtgggtaaataggaggagacgagctcgttagttttgcttcttgatgatgt

SEQ ID NO: 10048 - DNA, 241 bp, Setaria italica
  Peptide Sequence Number=SeqID_76022
attgaagaacgagaatgatattattttagcatgctacatattgggcagtgcttcatttgtgtttgcatgattcattcgctatttcttctttatactgttgtttcttaatatccattcacagtgccatggcacattctactttttgacaggaacaacaccagaaatattccctgccagaaaaacaattgttgaaagaacagaaggaaatagatgaattgctaaatgtctgtgaagtgcttcg

SEQ ID NO: 10049 - DNA, 457 bp, Setaria italica
  Peptide Sequence Number=SeqID_76023
gatcacgtcgcagatgccggcgcccgggcggcccacggaagaagtcgcgcccaccgatccagcccgtcggccatcgccgccgccgccggtccccgccgggccgccgtgaccggacctcccctcctcgccaagatcggcctcccccgactgcgattcccgcaaccaccaccaagaagcggtgctcccctggcagtcccctccctgcttggattttcttttcgttcttcttatcaaattgcgccgcgcgcacccgcaccaagaccaagaatccaatccctcccgcccgagggtcgaatcagattcccccgaatccgcggcgcgggggtagaaccagccaaccaatcaaccaaccggagaaacagctgggggggcaagaacagggcgaatcgggagccggaaggaatcgatcgacgaagaaaccagcaccaagcgccaccttccttcgccccaagtcccg

SEQ ID NO: 10050 - DNA, 240 bp, Setaria italica
  Peptide Sequence Number=SeqID_76024
ctgcatgtagtaccattgctgacgaagcttcaagatctactagtaacagcagcaagagtgttactgatgctaaggctgacactgtcaagaagaagagttctagaggaagcaaaaaggaagttgatggagatatgaaagaaaagaaagtacataccaagaaaaagaggatatttgctagaactcgtaacgctgcaacaaagacgactgagagtaatagtgtgaagcaagaagacaagaagg

SEQ ID NO: 10051 - DNA, 1441 bp, Setaria italica
  Peptide Sequence Number=SeqID_76025
ttttttttgttttttttttccgtgaaattctcgagaacatgaagtatttgagtatcacttcttacttgcttgttagattacacaccggatcatgttcactcccctttgatgaaaatcataatcctgttagaggcatagatgggtgatgctttggctgttactgatagcgagcaagaaccatgactacactgagaaacaggtcagagatggatcctaccctatcacatgtacattaatgacttccaaaatgtatagaaaaggaggcacattcaactgttaacaaaatggtattttgactccacgtaactctcagcttcccagaggaaggatccgaaagcaactgcctccaagacgagatgattcaactctataaatgtgattgttatcatctgaccatcccttgcattaacagaaccatcgtccaacactttgatgtccggtcgtccaaacaaagactgagtttgcttctcaatcagtgagacagcttcctttgacctgatagttgcatatctttgcaatgtatcagcgtccagttgtgaaacataagatctcaacttgtttggatttgattcttcatcatccaaactgatctcctccccgtcaggcgtaatctgtactaaggactccatatcccagaatggatttggtttcaagttttcaaatactatctgctgcttggggtttggcgggagagtcttcatagttttctcgagctggaaccgctcatctaccctcttaaggaagtaaccatacatgatcgatgctgcataaagctttccaagattcaagttgctgatttcaacaacagtgtccagtggtgctgctatcttttctcccatgataaggttaagatggttttgtatcatctcaaaggcatctggggagtgtatgctttgcagtttatcctcttggttaggcagcgaagatatgtcgcgcacagggccaccacctggtgctaatgcaggtgtcatagatatgtcattgtccataaacttgtagataatccagcagtagatgatctcttctaaagtgttctgcctttccttctctttaacttctgcaattctcttgtagaggaggtcctgaggaacttttgaagcttcttccttttgggcatctttctctgattgcaaattttcaagttgctgatcaactgttgcaggcagcaggtgagggtgtgattgtagtatttggaccagaagttgaccgcttggagattcaaatctgagtggcgcaagacgtgtgtagccatcaccagattccgcttttgctttaatcttgaaggtccttgtacggtaaccattaatctggaatccagctttggaacgcatgctacaaggaaaccccttgcagaagagcctgccggcctccacggcggcggcgcgcggcctgatgacgccgcatgacgaggaggacgaggaggcggtggcgggggacggcg

SEQ ID NO: 10052 - DNA, 462 bp, Setaria italica
  misc_feature (416)..(462): n is a, c, g, or t
  Peptide Sequence Number=SeqID_76026
cgcgtgccgccggacggggcgcggcgggcgcgcgtcgcgccgtacccgcagcagcagcgcaggtgaccggcgcgccggtgtacgagatgtacacgcgagccgaccagagggaaagatcagccagcgaagcaacgggaagctctggaaaagaagaaaggaagaataaaaatggagcgcgaagtcggtgccatctgatgaggattgacggtagcagtcgattgtgtgggattgggcctgctgggggtcgggcgccgctcgattccggccgcgccgccgccgcaagaagaagctggcggacgcgtggccggggactccgattgttatctcgtccacatttcgtgccccaattgtcactggaattctttgactcttcttttactacgctttccgcgtcgcgttccattaaccaaaaaaannnnnnnnnnnnnnnnnnnnnnnnnnnnnnnnnnnnnnnnnnnnnnn

SEQ ID NO: 10053 - DNA, 263 bp, Setaria italica
  Peptide Sequence Number=SeqID_76027
tcgcttcacgggcgcgagggacgggataatggcggcagcggcagcgagctcgctctcagttctgcccctcgcgccgcggaggccgctcccgctgaggcgcgctgctaggaatgcggagggtggaggggcttcgaggcctctgcgcctcgcgaggttgcggctgcggcgcgggcgcccagctgctgcggccgtggccggcgacgcggagttgcccctggaggaggcggaggccgcgatgagggtggcggccgacgacgacagcg

SEQ ID NO: 10054 - DNA, 1219 bp, Setaria italica
  Peptide Sequence Number=SeqID_76028
tacaaagtaaggaacaagaaagaaataggacttagactagacaacttgggcaggagcaacactcgaaaattgtgcaataccaggaactgattcctcagacaccagttctgttggctgagttaaagatgttagtgaacccatttgaacagttgaaaattttactggaggttgtcgacattgaatttggactgtaagctcgaggtacaccaagagtgcttgacacagtagcagcaccagatggaccagaacttgtagcaccaacattttgaccatggccatgccacacgtgaacaaagtacctcatacactctctgttgggtagcagatagatgtccaggcttaggacgtagtgcttcagggatccgatcaaatagcccttgagcataagtatcataatatgcaggaccagttgcctctctttgtttcttttgttgagaaaatgactgcgctatttctccatcaatcacttcaacagcctgacgtgttgccacagactcaataatggcacagccgagatccagattgtcgttgactagcatgtgaataagttgctcaatagtttcactgccactcataaggttctgaatgagatttcgaagatgggaatatagggcgacacgaagaggttccttgcaagtaacatgtgccagccttccagctaaagtcccgaccatcaaatgcgcagaacgagttatcgtattgttatcagactccagtgcataatccttcacaataagttcttttgtagttcggcttgctattgtcacacttctttgaatcacaggctgtattatctccctgttagccttatccaaagctaaatccataattgctatactgcaattgtggaccaagcgagccaagctttggatttattttgaagcgtatctcatcacgtggaatcaccgccataagctgattaacagagaacagagatggtgatggtgattgtgtttgtgctggcgaaacctgggccagtgaagattgctcaagcatcatcagagcaacgttttcatcttccactgtgctggttggaggcacacgtacaggggcagcatactgattcagcacatttggaagacttatagcacgggatgtgatattgatctcaggctgcagttccacatgagttagtgaagagatggtccccgaagagacttctgaaaccagtaactttacgtagttaaaaccttaacttaaggggttttagttaagttta

SEQ ID NO: 10055 - DNA, 501 bp, Setaria italica
  Peptide Sequence Number=SeqID_76029
tagcaccggtcttccaagcaccccaaatctttgctgccagtgccagcgcgctagagaccgatcaagagctgcgcggtgaccggtggcaggctgttgagtcatgtcacaacccgcggatcacgtgcggcgtagccactgctgggcgatgcatggctggtcccggcgccgtgcagtgtcgtgtgctggccagccagtcatcgatctccggccggccgcccagtcggcaaggccaggctgagccatgaagagcggtgaccaccggccggccgggacacccccccggatccggcacggtccttgttcctcctcgcggggaagtcggaggaaacaaacagcacgttttccacagccgggcccaactgcctccttttccctgcaggccgtgtcagctggctgacagaagggcccgccctacaaaatctgattcgcgcctttatggcgctgtgcgcgcgctgtctgaaaatgcacgggcgtgcgtgcccaccatcaatcaatccatca

SEQ ID NO: 10056 - DNA, 1331 bp, Setaria italica
  Peptide Sequence Number=SeqID_76030
cgccgacggcggcgacggcgccgacgcgctggggcttgcgggggcgccgcgtccgcgcgccgtgctctcgcacctcctcaaggccatgctgaacgccgtgctcaagccctttgcgcactgcgacgccaagtccggcgcgcacggcggcaagcactcgcagcagcagcagcaccactcgccggcgcaggtgctcaagaacttcagcagcatccggaacctccgcatggagctccccgtctccgatgtcggcaccgacgacggcgtcatcctcaagtggaaggccgtgttcggcagcacgctccagagctgcgtcatcctcggcggcaccaaggtggaacgcgctgccgccggcacccacgcccctatggccgccgccgccgccgccaccgattccgatggcgctggcgacgaaagcggcagcatcccggagtccttctacaccaacggcggcctcaagctgcgcgtggtctggaccatcagctccctcatcgccgcggccaccaggcactacctcctccgcgagatcgtcaaggagcaccccaccctggagcaggtcgcactcacggacgcgcacggccagggcaccctcagcatggggcgcgaccagctcaaggagttcagggacaagccgctcgccgcggccgccgccgccaaccgcacgcaggtgcccgcctgcaacatgaagctccgctacgcgccgctgctggagctctctgacggcacgaggatccacggagccacgctcgtggtcatcaagcccgtcggcgagtccggcggcatcggcggcggcaggaaggagctcgacgacttcgtcgccgacaccttcaacgggcccttcagggaggccgtcggcgtcctcagcaagcgccgcacctacctgctcgagatgaacggcttctagtctaagctaggctccacctctggatctccttcctcctcctgtgcgcgcgcgcctgcaacggccagagcaacacctccatggcaatgggcaatggcaactaggttgctctgctcgcctcagctcggcctagctcagagatcggtggcataccgaggtgttcctccttgtaacaatcaacgctgatgcctcctcgatctctcgttactgccttggtatccttgtcacacaataatcgaatggagcccggcagcaccagcagccagcttcactacattttggtgctatgatgaatggatgaatcaatggatggatcatggaatgaagcaatcacatttccaatcaagtgttgtccaaagtgtactgtaaaagttctgagatgaaatcatgatttcaatcaatgaattggatggagcaatcccattttcaatca

SEQ ID NO: 10057 - DNA, 275 bp, Setaria italica
  Peptide Sequence Number=SeqID_76031
cctctactcttagtgttcggaaaatgccgtgtattgtgtatagctcattagcgaaactggaagcccagttgcccactgcctcgtggactggggttcaggttctcccgttttgcagagattgccgatggactcccgtttcggaatttctgacttttgaagactgaatgctccaagcacgcctagttagcaataatatgggcataataataagtacactcgtatgcccaaagaaagggggcctgtgaggccattaagttactgtgcacaagtgaaaa

SEQ ID NO: 10058 - DNA, 369 bp, Setaria italica
  Peptide Sequence Number=SeqID_76032
ggaggaaggagatcatgatgggggagcggtgccagccgctggacttctccggggtcatctactacgacgccgagggccaccggctcgcgcagccgccgccgccgcgctcgccgctgcgcagcccgctcccggcgtccgtcaagctcgccgccaacgccggaggatactaggaacaacgcagccgtctgtagtgcctcgctacttgtagtcagtgtacattttcttcttgcctctgctctgttttgctctgcttctcctcttcctctcctcctataataataggcctctcgtttttctctatcgtttgagactaagcaacagtgtaaaatttttatcgaaaccttagcttgctcctccagaaaaaaaaaa

SEQ ID NO: 10059 - DNA, 1237 bp, Setaria italica
  misc_feature (1214)..(1237): n is a, c, g, or t
  Peptide Sequence Number=SeqID_76033
taacaaaacaaaactaacgtaagaacgaaataacaaaacgaaccttaaaactaaaaaaacaagaagacaataacaacgcaatggttgcccggttgccccgacgaacggttgttgagcgagtgaagttgttggcaactacgagcagatctccacggtgcactccatggccgtgctcgtcggcgtcggacccgccgtcgtcgggcgcgttccacccggacctcgccggcagcctggacccggtgctggacttcctccaccagaacggcgcgcccttcatgatcaacccgtacccctacttcgcctacgcctccgacacgcggccggagacgctggcgttctgcctgttccagcccaacgccggccgcgtcgacgccgcgtccgggctcacctacaccaacatgttcgacgcgcagctggacgccatccgcgccgcgctggacgccaaggggtacaccgacgtggacatcgtcatcgccgagaccgggtggccgtacaagggggacgccgacgaggctggcgcgacggtggacaacgccagggcctacaacggcaacctcgtggcgcacctcaagtcccaggccggcacgccaaggacgccggggaagtcggtggacacgtacatcttcgcgctctacgacgaggacctcaagggcgggccggagtcggagcgctccttcgggctgtacaagacggacctgacggcgaactacgacgccgggctcgccaagagcggcagcacggcggctcccaccattctgactccatctccgccgcagcagggcatgctgcagccgagcaggggggcgacgccgacgccaacggggttctgccagacgacggccgccgtgccgggcagcacgcaaggccagcaggtgacgcagaccagctcgtgctacatccctgccgaagccgtgtcgcggcgagctgacgccgggacacggcagcttgtttggtttggtgttttgctgtgcctggccatggtcgccggcaagtagctacagcaatacagcgtttgtatgtgtcggaactagtacagtatacagtataggcttttgcagcccactcgctaccaccgtatatatattagatttcacgaaaacagctacacacagtcgaacgttgagccggttcttttttccttgcatttgcggatttgccctaacggttgcaccctttttgaagtacaaatacaaatacaaaggatataaaaggtnnnnnnnnnnnnnnnnnnnnnnnn

SEQ ID NO: 10060 - DNA, 867 bp, Setaria italica
  Peptide Sequence Number=SeqID_76034
gcctctcttcccgtgttcccctcctctcttccgcccctcttcgcccaccagattggctcggctcggctccgcccgcctcggccggtcagacttggatctcggcggcgcttgattcgtctgcacttagccgagccatggcggccgcggactccgaccccaccgtcaccgcctccacctgcgcgaactgtcagcgggaaattccatcttcaaatattgcactgcacagcgtgcattgtgctcggaaccttcagaagtgcgagcattgcggagatatggttccaagaaagcttatggatgaacactacaatgagaaccatgctccaatgaattgctcactttgcaaatgcacagtagagcgtgggctatgggatcttcatacaggcatacaatgcccgcaaaggatgctcgcgtgccagtactgtgagtttgaactgcctgtgattgatcttcttgagcatcaggatgaatgtgaaaatcgaacagaatattgtgaaacttgcaggaagtacatcagacttcgtgaatggattggacatgaactccagttccatacgggatcaaattcaagtgacggagcttcggcagcagcagagccaaagccagcgcgaccagctgctcatggttcacatcgcaaacaactgctcttgacaatagcaatagctggatttgcagttttgattggatcaatactgtaccaaaggaagggacagtagtgtcagggacagtcatttgacgccccttgatgtataaattccctcataatcagtaatctagtttagaccccagttgagggaaccaaaaggaaacaaaacgaaaaaggtgtaacagctgaagtcattgtgaaaggaccagatcagactttgtttg

SEQ ID NO: 10061 - DNA, 908 bp, Setaria italica
  misc_feature (1)..(63): n is a, c, g, or t
  Peptide Sequence Number=SeqID_76035
nnnnnnnnnnnnnnnnnnnnnnnnnnnnnnnnnnnnnnnnnnnnnnnnnnnnnnnnnnnnnnntttttttttttttttttttatcctgcaactccagtgcagcctggcaagattttgaaacttattggtgcagagttctgaatcttaaagactacatttgaacaagtgtccgaccaaatgagaagatacaaagcacatctgagattattatgataaattcatacattggtggtcactgtaagatacaacaacaggaaaaacatgtactgactgtatgtgtaaatgttcctttacttgacacgagctgtgtttgctcagtttgtatcagctttattttcggcagcctcacccttcaggaagcgtgagaaccacagggccgatgctttagggtgcctggagagcccattcttgtaatccacataaacaatgccgaacctcttggtgtagcccatagcccactcaaagttgtccaagaatgaccacgcgaaatatccacggacatcagctccgtccctgtgtcaaaacccaaacaattagttgcatcggtcattttgttggctgaacgtttgtagtagtgcgatggactgcagaatcagcttacttgattgcttgtgcaactgaagcgaggcatcctttgaagtaaccgactctcgttgtgtcatttaaaacctgatccagtgtcgcagactgatcatcttcctcatccatgccattctcagtaacataaattgttggattattatatttcttcgctatataattaagtattttacgaaggcccccaaggaactatgaaagccattcagatgcagccctttcaccaattttttcaccactattccatttttctattctctccacttgctgtacttgatagaataaatatcttctggattctgatgatgagc

SEQ ID NO: 10062 - DNA, 691 bp, Setaria italica
  Peptide Sequence Number=SeqID_76036
taccatccaagttgaaagtcaaccctccgttgtgcagcaatttggtcttcgactttctcagaaaatggctctgcccattcacaatcgacaaccagccctacttcaccaccttgtgcaaccttgaattttcttctgtaaacatcaacagcagcagcatgagccaagatttggtgatgggcggccaagtaacacctagcagtttcaccttcgcatcctccaggagcaaaaactccaatcccataaccattaaatgcagtttggagaggctcattgattgttatccaacgctttactctgtctccaaaatttgcaaagcaagcttctgcatacaatgcaaagtaatccacaatcttgtcagaaagccagccccccagagtcttttgaagatggtttggaagatcccagtgatacagagttgcataaggctcaattccttttgcaatcataaagttgataaggttgttatagaaggcaactccttgctcattgacctttccccccaagccatcaggaaatatgcgtgcccaagatatagaaaatcggtatgcggcaaaacctaaacttgccatgagctcaatgtcttccttgtatcgatggtaatgatctacagcaacatctccattgcttctatctaagacacgttctgaaaggagaagcatttgaacacagtagttaaatatatgtatttcaa

SEQ ID NO: 10063 - DNA, 582 bp, Setaria italica
  Peptide Sequence Number=SeqID_76037
catacaacctacaagcttgcatcttgggtttgcatattcagcaatacattaggtgttgcattcacaatttaagcttgctaatttagtactccagtctccactaaaatattaaacgagtcattcacatgcaactacagtctacaggaaattgaaatcataaagaattaaataagggcatacaagattatatcttcaaccctgattcatgaaaaggaatgacaaaaaaacagtaatggaattggcttcagcaattaaagatttgagccactacacatttgtagaatttcctgtcacaatttattatgtaccatgtcaccagtattagatgtctcacattgttttactttcatttcggaagtatggaagccttaccattctcagtaacataaattgttggattattatatttcttcgctatataattaagtattttacgaaggccccaaggaactatgaaaagccattcagatgcagcctgcataaatattgagattttgtgttagaataggcacatataatttacatatatggagaaagaactttagttctgagttcggacccttttcaccaattttttcacca

SEQ ID NO: 10064 - DNA, 1843 bp, Setaria italica
  Peptide Sequence Number=SeqID_76038
tttttttttttttttgagaagatacaaagcacatctgagattattatgataaattcatacattggtggtcactgtaagatacaacaacaggaaaaacatgtactgactgtatgtgtaaatgttcctttacttgacacgagctgtgtttgctcagtttgtatcagctttattttcggcagcctcacccttcaggaagcgtgagaaccacagggccgatgctttagggtgcctggagagcccattcttgtaatccacataaacaatgccgaacctcttggtgtagcccatagcccactcaaagttgtccaagaatgaccacgcgaaatatccacggacatcagctccgtccttgattgcttgtgcaactgaagcgaggtatcctttgaagtaaccgactctcgttgtgtcatttaaaacctgatccagtgtcgcagactgatcatcttcctcatccatgccattctcagtaacataaattgttggattattatatttcttcgctatataattaagtattttacgaaggccccaaggaactatgaaaagccattcagatgcagccctttcaccaattttttcaccactattccatttttctattctctccacttgctgtacttgatagaaataaatatcttctggattctgatgatgagcaatgaatcttgaagtataatggttcagcccaacaaaatcaattttgttcctgatgaattctttatctttctctgagaaggtcggaagatcactgcccagtcgctgacgcatgctttctgggtaatcaccaaaatatattgggtctaagtaccatccaagttgaaagtcaaccctccgttgtgcagcaatttggtcttcgactttctcagaaaatggctctgcccattcacaatcgacaaccagccctacttcaccaccttgtgcaaccttgaattttcttctgtaaacatcaacagcagcagcatgagccaagatttggtgatgggcggccaagtaacacctagcagtttcaccttcgcatcctccaggagcaaaaactccaatcccataaccattaaatgcagtttggagaggctcattgattgttatccaacgctttactctgtctccaaaatttgcaaagcaagcttctgcatacaatgcaaagtaatccctgggatattttgatggtgagaaactcataaaatacagcaaatcaagctgcaatcactcttgaaaaaaatgtcttgaaaagaatctcctatgcaatcatccatttaagagttaagaaaactttgtaaatcatactgcatacttacatgcctgtcagaagccagccccccagagtcttttgaagatggtttggaagatcccagtgatacagagttgcataaggctcaattccttttgcaatcataaagttgataaggttgttatagaaggcaactccttgctcattgacctttccccccaagccatcaggaaatatgcgtgcccaagatatagaaaatcggtatgcggcaaaacctaaacttgccatgagctcaatgtcttccttgtatcgatggtaatgatctacagcaacatctccattgcttctatctaagacacgttctttgtcctctgtgaagacatcccatatgctgtctcctttgcctccctcccttctcgctccctcaatctggtatgcggaggtggcgacgccgaagacgaagccgtcggggaagtcggcgcgggccacctccgcctcgccccccgtgctccccattgctccggcgggttgggggctgggtggtggggttgcttgaactggaaggcgtgagcgatctcggcaaagcgtgggggcgtgggcgaacttggaagctgt

SEQ ID NO: 10065 - DNA, 603 bp, Setaria italica
  Peptide Sequence Number=SeqID_76039
ttacccgggacctaccaacaagacaagaacggtacaagaagcgtcctcttcaaacccaaaatttggccggcgatttcaccatctccattacgggctgaagaaatcggcgtaaccgatctcgacgtcaaggtgcttggaacggatcttgtctagggactcctgcaacattgagttgtgataggtggacagctcgttcatccctttcaggcagcctgtccggggctcgtagcttgctgggtcggcactggggaagaaggtgagaatcggcgggtcgcatcccgccggaaccatcccggagaccagcaaacttgtggccccgtgcttgatcaacctctgctaacaattatttaccacgatttaatttcccttccaggtcaattactggctacatggagccccgtgcttgatcaacctctcaatggccatggagatggtcctgatgacgtgtggcaccaaggatctgagctgttgaacattcttccccttgttcatcgagaagctgtagtcgttgaacccgagctctccaaggaagaagagcgatctgccgaagaatccttgcactcttgggttgtgggcgcaggagggaggcttgagtgactcgaa

SEQ ID NO: 10066 - DNA, 1034 bp, Setaria italica
  Peptide Sequence Number=SeqID_76040
agccattctggtcccaaattgatcgaacccggcttcagcatgaacccgagactaaagtcgacaaaatcctaaggtctcgcatacaattagttttttggaaatacgcaggagagctgtcgtacctttgtatcctttgtattaagaaggaactcacacacacgattagttggtagcagttgcaggcgagctgatgctgcggagccagccgtcggcgatgtagcggttggccgcctccgtcaagtgggcgccatcccagaacagacgagcagatgggtccttgcatgtggtcgagcctggatcgccgcagacgaccactccactgaagtggtaccttcccgggcctccacagcagacggtcagagcgtcctcttcaaacccaaatttggccggcgatttcaccatctccattacggggctgaagaaatcggcgtaaccgatctcgacgtcaaggtgcttggaacggatcttgtctagggactcctgcaacattgagttgtgataggtggacagctcgttcatccctttcaggcagcctgtccggggctcgtagcttgctgggtcggcactggggaagaaggtgagaatcggcgggtcgcatcccgccggaaccatcccggagaccagcaaacttgtggccccgtgcttgatcaacctctcaatggccatggagatggtcctgatgacgtgtggcaccaaggatctgagctgttgaacattcttccccttgttcatcgagaagctgtagtcgttgaacccgagctctccaaggaagaagagcgatctgccgaagaaatccttgcactcttgggttgtggcgcagagggagggcttgagtgactcgaaccactgcagctgcacgcctaagctggtgttgaaagggaacttgttgtcggtgcccgggggctcgccgtcgtggaagaaggcagcgtcgatggcggtggcggccccgaccgcgaagttggcgccgcggcggaagctcccgtcgtgcgccaggaatggcggcacgagaggtctaggtccctaggtcccttcct

SEQ ID NO: 10067 - DNA, 1032 bp, Setaria italica
  Peptide Sequence Number=SeqID_76041
tgttccctaacttgctgacagtgaatataatggttgataggttctgcaaggcaaagaagcgttgaggaggcctataagatttttgaaactgcaagtcaaagaggttgcaatcctgattctgtgacgtattgttctcttattgacggattaggaaagaagggaatggttgatgacgcttataggttatatgagaatatgttagatgcaggccacaatgctaatcctgtcgtatatacatccttgataaggaatttcttcatgcatgggaggaaagaagatggacacaaaatcttcaaagagatgaaccgtcgaggatgccatcctgatcttaccctactcaatacatacatggattgtattttcaaagctggtgatattgaaaggggaagagcaatatttgatgacatcaagggttatggcttccttcctgatgtccgaagttattccattttgattcatggtctcactaaagctggccatgctagagaaacttccaacatttttcatgccatgaagcagcagggttttattcttgatgcccgggcttataatgctgtcgttgatgggttctgtaaatctggtaaggtggacaaggcatatgaagttcttgaggagatgaaggtaaagcgggtacctcctacagttgctacatatggatcgattattgatggtttggctaagattgacaggttagatgaagcttatatgctttttgaggaagcaaaatcaaaaggaatagaattgaatgttattgtgtatagctccctcattgatgggtttggaaaggttggtaggatagatgaagcttatttaatattagaagagatgatgaagaagggtttgactccgaatgtttacacatggaacagccttctggatgctttagtgaaagctgaagaaatcaacgaagcccttatttgtttccagtcaatgaaggaaatgaaatgttcaccgaacacttatacatacagtattcttataaatggcctttgccgcgtacagaagtacaataaggcttttgtgttctggcaa

SEQ ID NO: 10068 - DNA, 459 bp, Setaria italica
  Peptide Sequence Number=SeqID_76042
aacatgcttctgctttttgttgcaacgaattcctctgttatttcagaacagcctgttgggtcatgccaatataggtcttttggtggcaaaaacttcccaggaataacctcgcttgaccgaggacgttgtagtggtgtaaatatagagggggatgacaggaactcccgtttaatgtcaatcttcgagtctgccacaccttctgacaagaaggtatagaatttgcacatctggctcatacttgcactaaagggaacctgtgatgttatccaagacttcaggaccatcaaagcatcacagtaggatgcctctgttttgaatccaatgtccttcctaagtgaactgctagatacctgtggtacagcatatggtgccacactaccaaaagagagcggacattttcaaaatcataaataatctgttgcataatgaagatcctcatccatgcttgatgctacccat

SEQ ID NO: 10069 - DNA, 2841 bp, Setaria italica
  misc_feature (3)..(3): n is a, c, g, or t
  misc_feature (22)..(22): n is a, c, g, or t
  Peptide Sequence Number=SeqID_76043
ctnctactccctgtgcgtgtcnctagtttttttttttgcctgaattccgtttcacatatattcatcagcgaatagcatataagcatgtcttgaattattggacaatcaatcagtcaaactgttccaaaggtgaaaacaatggcaggaaactactttctgtacacaaatcaatcaggatcggagaaccacatctgcaaacaggacgtttgcaatgagcaatacttcttggtcacttggtgtgccaatgttggctctggcgccaacaagttctcgttagtacagcgagaccgagggatcagtcctcagaccaaatccgagccgtccgtgggcctgggcgcgtcttccacgtgcaggggcttcttgtagagctggaggagcagcgaggagcagacgacgctcaccgacgatgcggccatgcaggcaccagcgagccaggggggaagccggatgcccgtgaacgggaacaggacgccggccgcgacgggcatgcccaggacgttgtagcccagggcccagacgtagttcagccggatcctggagagggtcttgcgcgagagatcgatggcggtaatcacgtcctcgaggctgctcttcatgaggacgatgtcggcagcctcgatggccacatccgtgccagcgccgatcgccatgcccacatctgctgccgccagggctggcgagtcgtttatcccgtcaccaaccattgccaccgtcaacccttgcatctgcaagtccttgatcttttctgcttttccaactggatcgatctcagcaaacacctggctgatcccgacttcctttgctatggatttagctgtagcccaattatcacctgtcaccatgatactggatatgcccatagaattaaggtacgaaatgacatggcctgcctcaggtttcagaggatctgacacggcaagagccccgcaaataatcttgtcgatagcaacaagaacacaggtcctagcaagctcttccgtttcagacatgtatgcctccacctcagggctcagtggaatttcaaattcttgcatgagccttttgttgccaaccaaaaccagcttgccttcgacattggcactgacccctgcacctggatgcacctcaaagtcccttgattccatcatgtgatcactgtgagatccatattgttccctgagcttctttgtgtgctcaacaatagcttttgataaaggatgctcactgtttgcctcagcaccagcagccaaatcacatagttctagaagcggtatcttcgagaagatcttagtttgaacgacagaaggtttgccaacagtcagtgttccagttttgtcaaatatgatagctttaatcttatgagctttctctagtgcatttccacccttaatgagaacaccttgagaagcacctttcccagtggcaaccataacagcagttggtgtagcgagtcccaaagcgcatgggcatgcaacaactaggacagaaattccaaactgcagagcaagctcaaaactatccatgccctttggaatccattgtgcagggtagaggtgaaattgtccaggtatgaaccagccgagccatgtaagaaatgcaaccaccaccacagttggaacaaaaaaccgtgaaatcttgtctgctaacttctgcactggagctcttgcaagttgagcagcttcaaccaactgcactatttgcgacaaagctgtttctgacccgacatgggtggccttaacaattatgcaaccgttatcgtttacagtaccaccaataaccctgtctccaggtttctttgcaataggccttgcttccccagttatcatactttcattgacatggctttgacctttgatgacaacaccatcaacagggacttttgtgccaggcacaatcttgatgacatcatttctttgaagtagctgagtgctgatctctgtttctgaaatgacatttccgtccttgtcaaaagaaagaagacaagctgtttctggtgcaagctctgtcaattttgacaatgcatctgatgtctttccttttgccaccacctccagatattttcccagcaatataaaagataccaacatagcacttgtttcaaaaaagtcctgtccttcaaatgaggctgatgttagtgctttcagaacaatatacacagaatagaagtaggcagcattggttcccaaagcaaccagcacatccatgtttgagtatcctcgtttcagtgcatgataggctccaatgtaaaatctccaaccaacaataaactgaactggggaacatagcaaccaccgtagtagcatgcctatcgtcatgttgttgcagatcctataagacaaccaatccccataaggagaaatcataggaagaaccatggagaacaggaacacaggaaccgaaaacaggcagctccagagaaattggttcctgtaattcctaatttcgtgattgcgctctgcttctctttgcttcggtggtgagtgcaaggtagcattaaagcatttagggggctgtgcagcattctgaatgcactgaataagtaaccttggaccagtgatatcagggtcatatgcgacttttatcgtctgctgtactgtgtcccattcaacatggttcgccccttctgcagtttccagtgctgtttgaatgagtttggtgtcttctggagaactcaaaccctcaagctttagatgcaccttgttcacatcgtcaccagaactaatgagatcagccccaaatccagcatcttcaacagcctcaattataagatcacgactagtgacatttggatcatagtggactttagcttcctctagagcaagacccactgcagccttttaactccaggtaccatttgaagtg

SEQ ID NO: 10070 - DNA, 755 bp, Setaria italica
  Peptide Sequence Number=SeqID_76044
cgtgccggtgagccggttgtgcgcgatgttgaccctcgtgatgttccggcactcgaacatgctgtcagggatggtgccggagagcgagttgttgtacagcatgaactgctgcagcgaccggagcttgccgaacgtctcggggatcggcccggacagagcattgtcggccaagtcaaggacctgaagctgccggcactcgccgagctccggcgggatcgagccggacagctcgttctgcctgaagtcgatgaaggccagctgcgacaggttccccatggacgccggaatgctcccgttgaaccggttgccgaagatgtcgatcatctgcaagctcgtgcagtccccgatggactccggtatctcgccggcgaactggttctcgtacaggtacagcacctcgaggttcacgaggcggccgatggcgtccggcagccggccggtgagcttgttgtggtacaatgccagggtctggagctcagtgaggttgaagagctccggcggcagctcgccggataggctgttgttgttgagcatcaggtccgtcaggttgccgagctcgccgagcgcggcggggatggcgccggagaggctgttgttcgctaggtcgagctgcgtcagcgcctggcatcgcgagagcccctccggtatctccccggtgaagttgttggtcgagagcataagatgctcgaggctactggactctgcttcatcgctggcgccagcgccgccgcacaggtcccccggggacgctgccg

SEQ ID NO: 10071 - DNA, 255 bp, Setaria italica
  Peptide Sequence Number=SeqID_76045
gtgcaaccggtagggttccaaggtcgcaggagaccttctcgggcaaccggtagggttccaaggtcgcaggagaaggtctcgtgctggttcaggtgggccaaatgcgtcggcatctaacggctctgtgcatagtattgctgatgcgaggaggcgcggcggtgaagattctatttattccattgctaccactattgtaggattcactatatggaacatgtatatatacgggtgatacatagttaggggcctctctag

SEQ ID NO: 10072 - DNA, 451 bp, Setaria italica
  misc_feature (360)..(451): n is a, c, g, or t
  Peptide Sequence Number=SeqID_76046
ggcgcgctcgcggacgccgaggcgcggagaaggcggaggaagcggaggcgaagcggaaggcggaggaggccgaggctaggaggaagaaggaggaggaggagagggacgccgagctggccgcgtactaccaggagcagtgggcgaacgaggaggaggagggagccgcggacgctgccgcggccgagacggcgccgctctatggggcgtcgggactccggtgtggcatcaccgagaaccccggatggggtgagttcgctggtcccaactttgtattgctccgtattccatacagatgtagcactcactttaacatatagtgacaattgcgacctgcattttgcacagcggatttattaaaannnnnnnnnnnnnnnnnnnnnnnnnnnnnnnnnnnnnnnnnnnnnnnnnnnnnnnnnnnnnnnnnnnnnnnnnnnnnnnnnnnnnnnnnnnn

SEQ ID NO: 10073 - DNA, 2249 bp, Setaria italica
  misc_feature (2188)..(2249): n is a, c, g, or t
  Peptide Sequence Number=SeqID_76047
gggaggagaggaggaggtggtggtggtgggcgcggggacgcgatgaggaggaacggcggcgtcgagagggatcaggcggcgcccaatgccggccggaacgggaacggcgcgctcgcggacgccgaggcgcggaagaaggcggaggaagcggaggcgaagcggaaggcggaggaggccgaggctaggaggaagaaggaggaggaggagagggacgccgagctggccgcgtactaccaggagcagtgggcgaacgaggaggaggagggagccgcggacgctgccgcggccgagacggcgccgctctatggggcgtcgggactccggtgtggcatcaccgagaaccccggatgggcgccccttatattttatggcatacaacattatctgtcaatagccggttcacttgtttttgttcctttgatactggtaccaacaatgggcggatctgatgaggacactgcaacagtcatttccaccatgttgctagtgtctggacttactacaatacttcatacttttttgggttctcggcttccactggttcaaggaagctcttttgtatatttggctccagccttggtcattgcgaactcggaggagttcagaaatcttagtgacaataaattcaagcatgtaatgagagaattacagggggctatacttattggttcagtattccagatactattaggatatactggtcttatgtcactgtttctgaggttaataaatccagtagtcgtggcaccaactattgctgcagtgggtttggcatttttcagttatggtttccctcaggctggcagctgcgtagaaatcagcctgcccctcattctgttggttcttctgtgcactctgtacatgagaaaaatatccctgtttggcaaccgtatcttccttgtctatgcggtgcccctcagtgttgcaattgtatgggcatatgcattctttctaactgctggtggagcatataacttcaaaggctgcagctcaaatatacccagttcaaacatactgctggattcttgcagaaggcatttagaaaccatgaagcgctgtcgcactgatgtttctactgcatggaaaactgctgcctgggtgagggttccctatccgttccaatggggccctcctacatttcatttcaagacgggtatcatcatgataatagtctcgctagttgcttcagttgattcgctttcgtcataccatgctgcgtcactgctggtaaatttaagtccgccaacacggggagttgtcagcagagggattggacttgaagggatttcaacttttattgctggagtgtggggtacaggtactgggtcaacaacgttaacggagaacatacacaccctagaaacaactaaaatggccagcagaagggctttgcagcttggggctgccttgttggttgtcttctcattctttggaaaaatcggagccctccttgcttctataccagtggctttggcagcatctgttctgtgcttcacctgggcgctaattgtcgcacttggcttgtccacattgagatatacccaagcagcaagctccaggaacatgataatagtcggatttaccctgttcatatccttgtcaatcccggcatatttccagcagtatgaacccagctccactctcatcctgccaagctatcttcttccatacgctgcagcatcaagcggaccagtgcgcacagccagcagtgggctgaactatgcggtgaatgcgctcctatccatcaacgttgtggtggctctccttgttgctgtactcctcgacaacacggtgcctggcagcaggcaagaacgaggggtgtacatctggtcagacccgaagtccctggaggtggatcctgcgaccttggaaccctaccggttgcccgagaaggtctcgtgctggttcaggtgggccaaatgcgtcggcatctaacggctctgtgcatagtattgctgatgcgaggaggcgcggcggtgaagattctatttattccattgctaccactattgtaggattcactatatggaacatgtatatatacgggtgatacatagttaggggcctctctagctgctgttagcttcaaggccctgttttccatggttaggttaggacaacccttgtaaagtttatcagttctgttaagagaggacatgttcttgcgaccctaaaaaaaaaaaaaaannnnnnnnnnnnnnnnnnnnnnnnnnnnnnnnnnnnnnnnnnnnnnnnnnnnnnnnnnnnnn

SEQ ID NO: 10074 - DNA, 711 bp, Setaria italica
  Peptide Sequence Number=SeqID_76048
atgctggcaatgtaatagatatcccatcaaacaaacagtattgagagcatgcgatgatgggatatctattacattatgtcctcacatatggagatgctggcaatgttatgattgctgctggtttatctttagctttcttgtttgttatgctaattggcattgcaaggatatatttgggtatgcacagcttgatcgatgttattgctggaatttgttttggcattgtcatcctagcattctggttggttgtccatgaccatgttgatgcctttgttgtgtctgggcaaaacgttgcatccttctgggcaggcctttctctattgatgtgctttgcatacccgaagccagaattcccgactcctagctttgaataccatacagcattcaacggagtcgctttcggaattgtctacggcatccagcaaacctacttccatttccacacccctgacgccccccctcatcttcagctcgcgactgcccctgcttgcattcgcagggcgtgtcctcgtcgggatcccgaccatcctggttgtgaagttctgcagcaaggcgctgtccaagtggctgctgcctgtcatgtgcagcaccctgggcatccccattgtatcatcttgctatgttcctgccctgaaagtacgaacaaacaagacaagacaaagaaacaaagacctagaatagacgaaagacaagggtagaccgggtaaccta

SEQ ID NO: 10075 - DNA, 1858 bp, Setaria italica
  misc_feature (1853)..(1858): n is a, c, g, or t
  Peptide Sequence Number=SeqID_76049
cgcgtggtcgtccggtccagggcggggggcgggccggcaacgacgaaaccagccaacgccaccacctcctcctcctcctccctcctcccccgtccgccgtcccgtccagttccgcgatccacacgaccccgtccgcctcggcctgcgcccgccagccctcctctcgctacaagaatccgcccgccagctcgcgctgcgctccagcgagtccctccctgcggtgcggagatcctgcgtgaggagtccgtccaagaaccaggcggcggttgcggggagatcgattggatatggaggcggcggtcgcgggtgcgggcggcgcggggctgaccaggtggcaggcggcggcgctgtcggcggtggccgggtgggtctgggcggcctcgttctacgacctcacgcgccgggcgcgcgcgctggtccagccatgggtcacgcgccgtgtgcacgccgagacgccggcaatcctcaggtttcagaggttgcaacacaagttgctggacaatttcttctctgtgctgtcatgcgttgtctctgttcccttctacacgggattcctccctctcctcttctggagtggacacaacaagctggctaggcagatgaccctcctcatggctttatgtgattacctcgggaactctgtcaaggacatgatatcagctcctcgtccatgctctcctcctgttagaagagtaacagccactgaagatgagaaggaaaatgccatggaatatgggcttccatcatcgcatgctctcaatactgtttgtttgatgggatatctattacattatgtcctcacatatggagatgctggcaatgttatgattgctgctggtttatctttagctttcttgtttgttatgctaattggcattgcaaggatatatttgggtatgcacagcttgatcgatgttattgctggaatttgttttggcattgtcatcctagcattctggttggttgtccatgaccatgttgatgcctttgttgtgtctgggcaaaacgttgcatccttctgggcaggcctttctctattgatgtgctttgcatacccgaagccagaattcccgactcctagctttgaataccatacagcattcaacggagtcgctttcggaattgtctacggcatccagcaaacctacttccatttccacacccctgacgcccccctcatcttcagctcgcgactgcccctgcttgcattcgcagggcgtgtcctcgtcgggatcccgaccatcctggttgtgaagttctgcagcaaggcgctgtccaagtggctgctgcctgtcatgtgcagcaccctgggcatccccattgtatcatcttgctatgttcctgccctgaaagtcgacaacagcagcaagaacaagcctgatgcgaagcagggtgccgggtacctccagagggtgttttccctcttccctcagaaggcctacgacgtggacacaggcatcaggttcgtgcaatacgccagcctcgcgtggtccgtggtcgacctggtgccagccatattcacccatctaaatttgtagccagctactcaataattcagggtgcaagtttaatttttactctttctggagctcccaatgcaggggctcctactcgtaagacatggatcatcttatgaggctgtaaatccaatgatctctccctcgttttttgtattgtatgattgcctaggtgatcgcaccacgtggtgatgtttctgtagaggtgtcaagtaagtagtaagcactaagcaggaagtattgatgtgttactatcactattattccatgacagaagtggccactatggtgccacgcctaacctgcacgggattctgattcttaatcgcaaaaaannnnnn

SEQ ID NO: 10076 - DNA, 715 bp, Setaria italica
  Peptide Sequence Number=SeqID_76050
tcctgttcgtccttgattgttgaaccgacatgccagaagaccatgccaaatgtgattgagacaccaaatgtgcaaaacaagcgggcgacgtttaattcagggtttttccagaaagagcaatgttgcttccataaacatgctatgcactgtgctttaaagtttggccaatatctgggaggaaaatgcaaatatttcttgcctgctcttggcttgcttaattctgcaactagagccatgttctccctatgcagtgatgagtttcggtaaatttcagaatagtccactccaattgcatattccatggcatgtgaactgatgtctagtgcccatgcagctgggttctgaccttccttgattctgggcactcctcgaatggcctcaaagtagtttatcatagtgctagacagtgggcctagtgacccactataaattagctgaccccctctattcataagaagcagctcatcgaaagattcaaaaatctcaatgcttggctgatgaattgtgcaaactacagtgcgccctgtgttaaccgtctttcgtactgtgcgcatgacaattgcggcagcacgggcatccaaaccagttgttggctcatccatgaaaattatggaagggctagcaactagctccaccgctatagtaagtctttttcgttgctcagctgatagtccagttacgccaggaatgcccaccatagcactcctcaagtcag

SEQ ID NO: 10077 - DNA, 2627 bp, Setaria italica
  misc_feature (1)..(50): n is a, c, g, or t
  Peptide Sequence Number=SeqID_76051
nnnnnnnnnnnnnnnnnnnnnnnnnnnnnnnnnnnnnnnnnnnnnnnnnncttatcaatcccaaattccccaatgcacagccacaatgtaaatgtacagcctttcgagccaccagtcctaactcaaaaaccactcgcaattcacagccacacccgtatctacacacactcttcgcattcgcaccccactacttcactagttacactttgtaagttgtcacacgcacgacgcaggtgtccaaatggaacaaagaccaacagcaacagcagcagctgtggcgcctactagtcgtcagccaggtccctatgtacaacgtatctgaacgaggacttgtacggcatccactcgacgcacctgtcggccctcctcctcaggcactgctgcagctgctgggccgcatcccgctgggcgtccgacatgctctcgcacaccagctccaccaggtgccgcagctccagcccggcgtccctggcgtagtagtgcaggaccttgggcagcagcagcgcctgcttcctcaccgccacgctcccctggatgaactccgtccgcgccgcctccagctgctcgtgtatcttcttcgccgtgtacagccggacgggcgggtctgaaaatgcgccggttgacagcgcgaagtgcgcgatcggctccggttgctggagggcgtaggggtgcctggccgtccctgccgtggatcttttcgccggcgtgaacagcgcacgtacccacaaggatggacgatgggattggcatccaagaattgagttctgaatggtctgtgcgttcactgattgcccgcccacattatacgcagccttcagaatcatgtccgtgctcttcatgcgtttatcatgtagaccataggccagaaaagcatgcatcactagagcattgtggatattaatccaaaagcagagctgctcctcatgtgtcatcttcagtgggtcaactttttcaaggcgctgtatcagggacctgatagtctccaacatttttgaggcataatcaaacttgtcagcatcaatgcgtatcctcggaatgacaatcatgcctatgttttgttcattcctctctttctgtaatccatactggcgtgggctatcgaagttgtaccgagggctccaactgtcattacggcgcctcggagaaaaggtacttgaagatgaaacagaaggacttggtgaagtcttgctttctgcatcttgcggttgcgtgcttgaaagtttgcagtagacagcagcaatgcagcttaaaatgtcctcggataatttgcatgagatcttaggcacatattcggaaatagaagcactcaagaagttcacaaggctggaatgccttgcacctgatttgattacctcagattttgagacggttggcaagttgaaggctgcagagtgctttatatccctcaaacgaagtgctccctcgtcaattgttttcagtgtttcttgatccacctgctcgcttgtgaagctgcaggattcagatacatactgatcgaatgctcttctatatagggcaagcagatgcagttccttgcgtataacttcctgctcgagagctgcaatctccccaactaaatctgcaacagactttgaggtagccctttgggttcgttctgtcacttttctggagtaatggcccggcaattgctctggcaagttaagtgagtgccttctgtcgaacatcttctctctatgtgtggtaggcttgcaataggagaatcgtggtgacatgtccagtgcaccttcgtgcgtcttcagaatgctccgtgaagagtaccggtgctggagactgcaagacgattgaaccgacctcggcgtgccggcgcaggaccccgtctccgacagcacccctgacctcgattcccttgccatcgccgaccaagccttctctcccctcacctccgagaaccttgagctgttgccggaaacagtgagctgtccatgtacaaagcgagaaaggaggcctccgtggctcagctttgtccggggagctagagctcagctgctccgattctcgaaagagctgagcttattcgctcctgcagaggaaaaggccaaggctttcttgaatacaagcgatagaattagcagccaagaacaatggggcggaagacgagcaggcttctcgttgcctgccaatggcgctggtataagaacgaggtggagaggctggaggggagagcaggagaatagcccgggaggcggaaggggcacaggaaagctggcgcagcagcagcagccgtaaatgattagaacgatactttccattttgatgtattggcacaaattaaggcttccaggcattgtttaaactaaggaaattgtttagggataatttttgccttaaaactatttttacagctatgcgcggtaaaaataaatttaagagtaggttaatccatactgataccattgtcaaacattttcttctagaagatgaattctagacggtggactacactacagtggtatcgtacttgtggtctaaaggaattcaatgtgatctggagaggacggtcgaactgtacagcaagaagttaataggctactgagctgaaataatgcaagattgctgtgtatacccgatacggatgatgaactgaacagcgcttaaacacggttaaa

SEQ ID NO: 10078 - DNA, 507 bp, Setaria italica
  Peptide Sequence Number=SeqID_76052
catctctgcctagcaatgcagccaagcttcttgagtttcctcctcttcctcttgctcttccacctgcatctgagcctgcacctgctcctctcccttccccttccagttcaccttccccttctagttcttgttgcacttgcacttcatatgacaagagtaaaagtgtgttattaaacaagttggtggtacagaaatgaataaataagcaaataaattgaaatgagtatcaatccatgactttgatgcttgtgctacatttgggtcattgctccctcatgatccattttgtgaaatgagtatcaatccatgactcacattgatgcttgtgctacatttgggtcattgctcccttatgatccattttgtgaggatggtagctttctctttgactacgatccattttgtgaagatgatagctttctcttttgactagtagtaggacctccttggcaatgcttggctgtatgatctagatcatgacattaagaacatggtctctttctctta

SEQ ID NO: 10079 - DNA, 274 bp, Setaria italica
  Peptide Sequence Number=SeqID_76053
ttcaggttacaacccaacaagttcacgtgccatcccaactagtacagaatgtacatagcaaatggaaaacatgacactcaagcatctctgcctagcaatgcagccaagcttcttgagtttcctcctcttcctcttgctcttccacctgcatctgagcctgcacctgctcctctcccttccccttccagttcaccttccccttctagttcttgttgcacttgcactagcctcttccatggtcttggtgttgcgctctccctcgctgtccttgtgc

SEQ ID NO: 10080 - DNA, 2096 bp, Setaria italica
  Peptide Sequence Number=SeqID_76054
agaacaactacaaagacaatctctgcctagcaatgcagccaagcttcttgagtttcctcctcttcctcttgctcttccacctgcatctgagcctgcacctgctcctctcccttccccttccagttcaccttccccttctagttcttgttgcacttgcaattgatgcttgtgctacatttgggcgattgctcccttatgatccattttgtgaggatggtagctttctctttgactacgatccattttgtgaagatgatagctttctcttttgactagtagtaggacctccttggcaatgcttggctgtatgatctagatcatgacattaagaacatggtctctttctcttactagtgctagcctcatcatatactttgatcctagattttcttggtctcccaggtttccttcttaacttgggcttcttaattttgtagcccaaatcaacacgtggccagctgtccttggatgtcattggattgaaagtacttgcatatgcctttctgaacctctcaacagagaagtattcatggacaaaggcatccatttgcacatgcctacttagttttgcaatgaaagctaaagtatggctatatggctttccagtaacttgccaagccctacaactacatgtcttttgctccaagtttacaacatgcctaaatctgttcacagttactacaactgtcccaaccccacatattagtacctcatgatccttgatagtcttggatttagcatttagagcattagtaatagaagggatgattattccagacatttttctagcaattttatctctcaaaacaaatttctcaatgatcatctgtcttatcctatcatgcatgtctacaatttgaaaatacttgcatttagacacccaactattgaaattcagagaggttgttgttgatgtaatctatattgcatccttgctgaatttgcttctactccacacatatggatgattttcatccaaccatgcaactgcattgggatctttctcctctatctttgacatgaagtagttgaacttgtcagttgtgaagctctttgctgctgcccacatattcttaccataaagacaccatggaatccattcttcttcatattcttccacaaatgcctcatgtactatctatgttccagtcctaggtatacatcttctacaaccccctctatctctttgccggcatctgtactaatgatcaaacccgtaggatgaccaattgcattcttcaagttgttgataaaccaagtccaattatccttggactcggtctcaatcactccatatgccactagaaatagccagttatgaccatccaccgccacagctgctgctaactgacctcttgaccttcctgtaagatgagtggcatccatggcaatgtagggcctgcatccttgcaaaaatccatcaatgcatggcttaagagcaacaaagaaccttgtgaaacacacatcaccattgtggtcttcagtgtctagctcaacaatactactaggaacaaatctcaaccgctcatcttgatatgtgggtagcaaatcatagctgtcatcccactttccatatatcatgtccaacgctctcatcttgcctctaacaactctataatatggaacttcaatggagtacttcttctttaacctatactgcaactccctttgtcccatttcaggttcttcccgtaacaagtcgaccactctatcagctacccatttctttgaggccattgtatcaccatagttgttgactgaaccacaagtatgctttggtccacttgtcttaaccttgcatccaatgtaattcttgcttgttgaagcataaaacttccaattgcagccctgttcagctctcttgcagattgctctaaatctgctcttatcctttttcacgatctcaaaagcatgatcattcaagatagcatgatgggtaaccactgatttgcattggtgtccacatctagcctcttccatggtcttggtgttgcgctctccctcgctgtccttgtgctcatgtgggagcagtggaggtgttgggggtcttggaaaccccgttagtacctaaccttagtacgtttaggggtaactaa

SEQ ID NO: 10081 - DNA, 503 bp, Setaria italica
  Peptide Sequence Number=SeqID_76055
tcgctctaaagaccacaactacagacccatttcaattgaaatctatggcgcacagggatattcaagatcagggattacccctttagttcttgttgcacttgcactagcctcttccatggtcttggtgttgcgctctccctcgctgtccttgtgctcatgtgggagcagtggaggtgttggggctggaacccgtgccacctgcgttggggccgcgcctggcatcgggtctggaacccgcgccccctacgctgggctcgtgcccggcattggggcttcaacgcgcgcgcccggggccgcgcaccctcgcgctcgggccaggctgcctcctcccgctaccgtcggtgccggacggggcaacacaggtgcgcctcttgccggtccgccgcctggatggcctcccgcagtccgccgccgccgccagtagccggctgccgcccgcccctaggttttcgtgggagaggagccaggcgacactctatgggttcgagcagccacgagcgagg

SEQ ID NO: 10082 - DNA, 485 bp, Setaria italica
  Peptide Sequence Number=SeqID_76056
tctagttctctttagtttttttttttttttgttacacatatgtccaacataaagcaccagatcacatgtattggacaacaaaaccactggatgttcacatttcatcccatcatgtccataccacaacctaagttcacatgtcatcccatcatgttcaggttacaacccaacaagttcacgtgccatcccaactagtacagaatgtacatagcaaatggaaaacatgacactcaagcatctctgcctagcaatgcagccaagcttcttgagtttcctcctcttcctcttgctcttccacctgcatctgagcctgcacctgctcctctcccttccccttccagttcaccttccccttctagttcttgttgcacttgcacttcatatgacaagagtaaaagtagcctcttccatggtcttggtgttgcgctctccctcgctgtccttgtgctcatgtgggtagtctagttggtaggttgttgggtctt

SEQ ID NO: 10083 - DNA, 678 bp, Setaria italica
  Peptide Sequence Number=SeqID_76057
atgaacttggtagtggcagggcgacaaaggcgtcggctttcgaggaatccctgctcatcgggcgtgcagaggagaaagctgaagttatcaaaatgattagcacggctgaacagcgttccgtgatctcggtgtgggggatgggagggatcgggaagactactcttgtcaagggcgtctaccaaagccctgagcttgctggcctctttcggaagcatgcttgggtcactgtgaagcatccgttcagcctcgaggtgttcctcagggggctggcagagagattacaggaaaatgaacagtcagtttcttctggggagaagaaaaggcctgacatcaccaggatggcagggagatatggtaaaaatgtagcaaccatggcatacgaggatctgaagcgcgagctagctgggcttcttcaggagccagagtgcctcatcgttctcgatgatgtatcgtccactttagagtgggatgccatcaaaaggtacatgggacagactagacgcatcatagtcaccacaagggaaagaagtgttgcgaaacattgttcttccctagaatccgacatctaccagcttcacgccatgggagaggaagatgacttcaaactcttcaaaaaagaaggttcgcacttttttttttaaaagcagaaggttcgcacttttttaaaaaagcagaagg

SEQ ID NO: 10084 - DNA, 261 bp, Setaria italica
  Peptide Sequence Number=SeqID_76058
cgggtctcggcctttcttcctagcggcgagtcggcgacgccgacgacggggctagcggccgcccttggcctggtcttcgtcgggcgcttcgccgccgacaaccatcaaacagggactgactggttgtgcaaatacctacttatagattattgaaagtgggagcatgaaaggacgatcattgattttggacaaacaagatcttccatggaaccatcctcctcacagccacagcctgtgacgggtgttgggtcacaagcttat

SEQ ID NO: 10085 - DNA, 1319 bp, Setaria italica
  misc_feature (1268)..(1319): n is a, c, g, or t
  Peptide Sequence Number=SeqID_76059
cccctctcgggtctcggcctttcttcctagcggcgagtcggcgacgccgacgacggggctagcggccgcccttggcctggtcttcgtcgggcgcttcgccgccgacaaccatcaaacagggtcaggacgatcattgattttggacaaacaagatcttccatggaaccatcctcctcacagccacagcctgtgacgggtgttgggtcacaagcttatcctgctgcctatgtgcctccagcaatggtacctggagctccttctgttgttcctcctggctcacagccagcagcaccattccccaatccagctcaactcagtgctcagcaccagatggtctaccaacaagctcagcaatttcaccaacaactacagcaacagcaacagcagcagctcagggagttctggactacccagatggatgagatcgatcagacaactgacttcaagaaccacaccttgccacttgcaaggataaagaagataatgaaggctgatgaggatgtgcggatgatctctgcagaagctcccgtagtctttgcgaaggcatgtgaggtattcatattagagctgacattgaggtcatggatgcacacagaagagaacaagcgccggaccttacagaagaacgacattgcagctgccatcaccaggactgacatatatgacttcctggtggacataattcctagggatgaaatgaaagaggagggacttgggcttccaagggttggcttgccgcctgctatgggggcgtcagctgatagctatccaccgtattactatatgccagcacaacagatgccaccaggaggtggaatgatgtatggtggtcagcagggtcaccaggtgacgtatatgtggcagcagcctcaggggcaagaggaagagcctcctgaagagcagcagcagcagcaacggtcagcctgaaagtagctaagagatgatacggctaagccattgcatggtggtccctgaacttaggcctctaaacaaacgatttggttatgttattgtgcatttgtgcccatgattgctggccgagacagttatttgtccttaattaggtcgtagtttcctaatggtagtttcgactcccgatgctgccatggcagctgtagaaaaggattgtgatttggtaggcaatttgcaactaatgtagtaagattatcattttctgtccaatctaatatttgaactgctgggccaatgaaggacccttaaaaaaaaaaaaaaaaaaaccaaaaaaaaactaaagagaactacgaccnnnnnnnnnnnnnnnnnnnnnnnnnnnnnnnnnnnnnnnnnnnnnnnnnnnn

SEQ ID NO: 10086 - DNA, 1783 bp, Setaria italica
  Peptide Sequence Number=SeqID_76060
aatgaattgctatacacagctccttcatcatcccctttgcctcttatatcaaaaaatttcggggatgatgtctccagatgtctccatgagatagctgcctctgacgagagctgggttctttcagggcacgtatctggaccttcagatgtgtttcatacgaaggatttccaatacttgtacatcaactcaagattcgtgaatagaaacccaattcataatatgctcaataatctggcatctagttttcactcttccgttacaaggaggaacgaagaaattgatgttcagagcaggaagaggcagaagaccgatatctaccctgcttttctactgaatttttgctgttctagatctagctacgatctacattttgagcctacaaaaaccattgtggaattcaaggattggcaaactgtcttgcttttctttgaacaaactgtcacaaactactataagaatgttgtgcctaggaaaaatgatgtgaaattgaataagggactcctaaggcatcataatgtgcagaacaatgaagagtatgctgacttccaaaacactaagcagaagaatgcagtcagagatacaaacagtgatgatatgagtgccacaagagcaccaaaggactcacgctgcttttcttttgatacagagccatccatacaacatgtctccttttctggaaggatcactaattcaccctggcccaatgacaatgttgtcagtattgattacaagttagggtataaggtaatgcattctcctgaaagactcaattattggtggttagaggatggtccgtcccagttagatgatgatgtttcaagtgttaacccaactggttccaaaaggcaaaggacagaaggtatattccatgagtgtgcatattctggtaatttggaatgttggaagatgtaccaactgaagggttttttagctcacaacaaaaatctgagttgattggttcagaagttgaaatgcaagaaccttgcttcgggtctctcaataggccaaataaaatgagctccgagttggtgcaaaatcaaaccaacataaaggcacacacatctggctgggatggattatatgttgagtttgataaatcaaatggagattgcctagtcaatgaagctacagatacaatcacagatatttcttaccctgagatgtggaagttgaatgatggattttatcatgatgatggtaacacctccagaggcttctgtagagttttgagaaagtgcagcaccaataagaagttagggactgcagctggatgtattgaaggacttgagactgatactgttagccagataaacttccctgatattcatgctgtgtggaacagtgacttgatggataggtcttccattgaggatactttccgtcattttcctcatctatcctcgttggctgatacaccttgcagttatgcaaggactggcttgacacttgacaagaaatcagataaaaactttggttcttggagctgtgaaaatattgacagcagtattagaattgctctggacaggtttagcaatgtgtcatcaataacatgtgaaggagctaaacatttggataactttgactatgaaatacagccacttaattacttcaataatgattgcagttcaaccgaccagtttgtttctgaagatgacctgataatgtggaaaccaaaatttgacacgagattttcagctgatatttctcctgagagaagtgataatggttgccatttgaatgtcccttcttccaatatggcaaatgacagcacacttactcaaga

SEQ ID NO: 10087 - DNA, 998 bp, Setaria italica
  misc_feature (2)..(2): n is a, c, g, or t
  Peptide Sequence Number=SeqID_76061
gngttgctgcagaggaaatggaatagatcagcatcataactgtgacattactgagaggattcgatgtctctacacattccatattcaacaacctcatctaacggttccatagtgacagtagttataattcaagactactgaaatactagcaatatgaacggcaagtctgatagaaatgagtgactgatttccaggctcactgcaaatggtattttacatgtgtggccgtgtttggctgaacagcagaacatcaattgtttccacctttctgcttgatggaaacagttgatctgaaagagatattgattatgactattgcatatatgtaattctggggattgaaggagttcttgctcctccttttcgtctccaagatgacaagttatgaaagattgctactagtttcattccatgttgacccgggtgattgcttacatattcgggtgatttgtggcaagcataatggctttctcatcggttttcaggagagtgaatgtcaaagagctgatctccaatgcttcagtgtatgcttgcgcagcagaatcttctggagcaatgagcttggtgtttagacgctgggccaccaagaagactgctggatcaacaaaaaatggccgtgattccaatcccaagtatttgggtgtcaaagaaagtggaaccaggaaacataattgttcgccaaagaggaacgcgtttccaccctgggaactatgtcagcatgggcaaagatcacactctcttctgcctgaaggaaggccatgtgcggttcgagcacaacaagctcactggcaggaaatgggttcatgctgaccttatggctggtcatctgctccaccctgtctacgccagaggctcaactactgcagctgaccttgatgcacagttgaccatgcagttgcttatgctcttcccacggactgtgccgtcctgtgcttatcatcaccatcaccaagtgcctcttattacacaatgcaacttgttccagtaaagatgcttgc

SEQ ID NO: 10088 - DNA, 917 bp, Setaria italica
  Peptide Sequence Number=SeqID_76062
aggcttgataaaacactcaacgcaccaaaatgactgcagttgatgaagttggaaatctggtgatgcctagctgtacgtagatttcttatctgatacaaacatattagtgtacagaccagcagcaccgaatcattcattcctacaggtgacttgtggcaagcaaaatggctttctcatcggttttcaggagagtgaatgtcaaagagctggtctcaaatgcttcagtgtatgctagcgcagcagaatcttctggagcaatgagcttggtgtttagacgctgggccaccaagaagactgctggatcaacaaaaaatggccgtgactccaatcccaagtatttgggtgtcaagaagtttggtggagagaaagtggaaccaggaaacatcattgttcgccaacgaggaacgcgtttccaccctgggaactacgtcggcatgggcaaggatcacactctcttctgcctgaaggaaggccacgtacgattcgagcgcaacaagctcactggcaggaaatgggttcatgttgagcctgtggctggtcatgtgctccaccctgtctacgtcaatggctcgactactgcagctgacctggatgcacagttgtagcggccatgcagttgcttatgcttgtcatcatcaccaccaagtgcctattattacacattgcaacttgttccagtaaagatgcttgcgagtaagaaatgctgctatacgtagtttcagtgaggactgaggagcagagaatttcagcttgcttaatgttcctttttatttttatttttagggcagtgttccttttcaatatcaattactttgggaagcaatgttggttttgtagttccatgtctgttgaaataatgttgatgacttatggactgaaattttaacatctggtgcatgtttggaaaccaaaaaaaa

SEQ ID NO: 10089 - DNA, 1043 bp, Setaria italica
  Peptide Sequence Number=SeqID_76063
tgttgtttgttggttgccctcgtagtaccacccgttgaggaaccctcgaagatgcccgccgcggccatcacgtacaccagcatcgcgttcatcccgatccaccgcaggggcgcgaacgcgtagccatggttcaggatgtcaaccaggaagtagaatatggagaacacgactccagcagcgccggcagtgacgcagatgtaactgaatgtgtagagttgtttattaagtggaattgcatgtgagaaatgtagaatgattccaagaacaagaagagctatgcccatggtaaaccactgcctcagcctctctgtatgactcttcatatggacaagcacatgcccgtagtgcacaccaatgatcgtactcaataccgcagaaaatgagcttagtatcccttcaggttcgaatggcgcaacacaccatgctggggcatcgttcttaaaaggcccctcatgtggggaactatcagtacaggcctggtgccttctccatgccggtctctggtacaagtgattgatgccaagaattttgcggtcaatgtaaccaacagcattgcaaggagggcttaatatcccccttgtaccacaagtcactgttaaaactttgccgtagtttgggctgtcaacattttgcactctgaattcccagtcaggaacataaattccataaacaagagataggtagaccactagaatgcagcatgcaacaatccattgggaaaggtacattctgaagatagagaagcctgaacttgactgatcctgaatctttgcatcttttgtaacaatctctagaactgcagctaccaagtatgcaagagcaatcctctggagaattccaccccatcttacgtgcttcatgtcaactccatatgtcagtttatccggagcatgcgagtaaccgccttgcaacaggatcccccaaaagagcagcttcagtgtcctgatgactactctcctgatggcttgaccacggtcaggaattctcttgagggagaggggaatggccatgccgacgatgaagaggaagaagggcatgacgaa

SEQ ID NO: 10090 - DNA, 2066 bp, Setaria italica
  misc_feature (2018)..(2066): n is a, c, g, or t
  Peptide Sequence Number=SeqID_76064
cggccggacgggccggcgggtggcggggcgacggtgatgaggatgacgaggaggacgacgacgacgacgggaggcgcagcggcggcgaggactcggacagcgcgccgtccgtggggagcgacctgtacaaggacgaggaggacaaggagaagctggagaagatgtcggagcttgacagggagttgatactggccgagcggagttcccgcatcgacgactacaagctcaagcagatggcgcgttccaagacgggcaaggccggtgcccggaaggacagcagcccgcccccaccgcccagccggatgcggtcgtcgacccgggccgacaagtcaggatccgccaccaagagcgccctcaacgagctgagggccaagcggatgaggcagcaggatccagaggcataccgcaacaggttcaaggacctgctccctcagagcggctctccgactaggcatagggctgggagccccccaagtgatgggagcaacgatggggataacagggggaggctgaaggaccatgggaggattgctgatgatggcagggatgatgagtttgatgagtcgcccagtaggattgacccgctcaagtttgatgatgtgaagagtattaccctcaggaggtcaaagctggtgaaatggttcatggagccattctttgaggagaccgtatctgggtgctttgtgcggcttggcattggcaagacaaagtctgggaccccaagatacaggctttgcatagtgaggaatgtggatgcaagtgatccggatcggaagtacaaactggaaagctacacaacatgcaagtatctcaatgttgtgtgggatagtgaggctaatgctgctcggtggcagatgactcaggtatcggactccccacccaatgaagaagagttcaaggaatggctgcaagaggctgagaagaatggtgtccgtataccaactcgtcaggaagtgctggagaaaaaagatgccatccagaaagcctacaactatgtgtattcagctgatgctgtgaagaatatgctgcgagagaaatcagctgtgaggcgtactatcaatgttgctgctgagaaggatcggttgaggaatgagttggagatagctctgagccggaggaacgaagctgaagcagagaggatccgcgtgaagctgaataatctgcagaacatgccgcagccaatgaaaaaaaaatgacaaggctgccaggttggaggctatgaacaggaagaaccgtgctgagaacttcaagaacgcttcggaaatgaaacctattaatacaagtttgaaggctggagaggctgggtatgaccctttttcgaggaggtggacaagatcgagaaactattatacagctaagccaggaggagataatgctgaagaagcagccaacgggtccagtggtaatgcagtggctggcaatgaagatggcaagaacaaagctcacactggtacagcagccacagcggcagctcaagtggcagcggctgatgctgggaagctgattgataccaatgcaccagtggatctgggaacagaatcaaatgtgctgcacacatttgagctccctatatcattgtctgctctgcaagaatttggcggagccaagggcctgtttgatggttacatggctagaaagcagaagatagaagctacaatggggtacaaagtgcctgacaatgatggaaggaggcatgctttgaccctgagtgtgagtgactacaaaaggcgacggggtctcctctgaagggtatctgtgcttctgcaggctgctcagcggattcaactgtctgcctggcttcagtgcctctataattgtccagatcgtccgctttcccttattttcttagaaacaatacacgaaacatgcagtctatacagtttcttcataaatattacctactgtatgactgattaagttactgacatcatgtttatacatgtggagtgtgttgtcatcttatcgttgttatttgacaatatgcaagttgcaacagctttaatccataattagtcggnnnnnnnnnnnnnnnnnnnnnnnnnnnnnnnnnnnnnnnnnnnnnnnnn

SEQ ID NO: 10091 - DNA, 1220 bp, Setaria italica
  Peptide Sequence Number=SeqID_76065
ctcgcgccaccactttagcctcccactgcccacatgcgcgcacagtcctcctagcttatccagcgagctgctgagcagagccgcgagagctctgccatcagtctcggtttcccttcagaccagcactgagctgagctgaacccagtcgatcggcactccgcagcaggtcgccatgagcaaggagaagcaccaccgcgactggatcctccgtcgctgctgcggctccatctgcgcctgcttcctcacgctcgccgccgtcgtcggcttcatcgtcctcgtcatctacctcgcgctccacccttccaagccctccttctacctccaggacgtgcagctccgctccatcgacctcagcgacccggccatctccctcaacctccaggtgacgatcgcgtcgcggaacccgaacgagcgcgtgggcgtgtactacaagaccctggacgcgttcacgacgtaccgggacgagccggtgacggtgcccgtgtcgctgccgtcgatctaccagggccacaaggacgcgtcggtgtggtcccccgtcatgtccggggacgccgtccccgtgtcgcagtacgtggcggacgccatgaggcaggacatctcggccgggtacgtgctcctccacgtcaagctggaaggccgcgtcaagtggaaggtcgggagctgggtctccggcgggtaccacctcttcgtcaactgccccgccctgctcgccacctcgggcgccgccgtgggaggggcgttcgccgtcagcggcgccgccgtccccgccggcgtcaacaccaccgtctccctcaagttcacccaccccgccgactgcaccgtcgacgtctgaatcttctgacgggccgggcgtcgggcgtacgaggagccatctatcccacgcgtctcgctagctagcgcgtagctatcgagcaatcttgtagcatgcagttgaagaaatgttcttattattattcccccttccgaacctgtgcagaataaattaattaaagctactactccatatataaagtgtctcgtagattttctattatacaatttccaccagaatagaattttatcatttccatcacattgtaaaattattgagcctagttacttcatatcatgcatctttgaggtttttgttttcccgttacggtctcttcgagtgtccagtgtccactgatcgagctgtgcttagcttgcctataacatcaataacatgggcatgtccccgt

SEQ ID NO: 10092 - DNA, 1370 bp, Setaria italica
  Peptide Sequence Number=SeqID_76066
attatcacatctacatgagcaaccagatcaagtgcacaagttttaccaagaatcaagtatgcttggtcgaccagagtccaatggaaccatggtgtatgtaaccactcttggtaacatcaatgaaaaaattatgtctatggacttcaggaattgcttaacagagatagagacggctgatgcgcagttatctcacgaggatggtgtgctcattgttgttactggatccttgacttcagatgaaggcgtttgccgtaggtttacccagtcattcttcctagctccacaagaaagtggtggctatttcgttctcaacgatgtgtttaggtttatatcagaaaggaaaccggctgaaattaatcaagttgttactcaagaaaatgaaagtagtcagaatggtagatctgcatctgaatcatgttcagcattaccagaacctactccagctgacaggagtgtgatctcggaccatgtgacaactgagaatattgtcacggagaggcaaattagcaacccccctgttaatggaactgctgttgaaaataatgttcatgccgagccacctgtgcaagtggccaaagaggatcctaaaaaggccccagtcgctgctcctccccctcctgctccaactccgacagatgttactaagaaatcttatgcatccattgtgaaggacatgaaggagggcccaccgactccacaagttgccaaaacaactccatcagttgccaaacaaaagccagctcctaagccagtgtccaaggctgtcgaaggcccggaaaaatcatctgcgaaacctacccaagctaatgaaaccagtgatgggattgttgcccaaaacaactcttctcgcaatgagccaggctattcaattttcatcaaaaatttgcctttcagtgcaaatattgaaattgtcgaggaggagttcaagagatttggcactataaagccaggaggcgtccaagtccggcacaacaaggatgatcgttttgtctttggctttgtccagtacgagtcccagcagtctatgcaagcagcaattgaggcatctccgattcatatggaggagaaagaagtccatattgaggcgaaaagagccaattcacgaggtggtcgtttccaatctggcaggggggtgtaccatggtgataacttcaggggacgtggtggcagctatgtggacaatgcaaactatagaggcagcgacaacttcaatcgcaggaatgaaggcgagggctacaaccgcaggaacgatggagacttctacaaccgcaggaacgatggagagatctaccgcaggaacgatggagagatctacaaccgcaggaacgatggagagaactaccaccgcaggtaattgattggtcgtatta

SEQ ID NO: 10093 - DNA, 697 bp, Setaria italica
  Peptide Sequence Number=SeqID_76067
attacctgctcaaccttgttattagtgattattggttggtattattttgaagtgaatattctaaatagcattatttcattacttattttgctgagcatttttaaacactttgatgctattgtttgatttatgcaaatgtctatgggtactcagactctgtacaatgttgtaggtggtcgtttccaatctggcaggggggtgtaccatggtgataacttcagtagacgtggtggcagctatgtggacaatgcaaactatagaggcagcgacaacttcaatcgcaggaatgaaggcgagggctacaaccgcaggaacgatggagacttctacaaccgcaggaacgatggagagatctaccgcaggaacgatggagagatctacaaccgcaggaacgatggagagaactaccaccgcaggaatgatggcgataactacaacatcaggaacgagcggagtgatggtgataactacaaccgcaggaacgagaggagtgatggtgagaacttcaaccgcaggaatgacggtgagaacttcaaccgcaggaatgatggtgataactacaacagaaggaacgatggtggcgagaacttcaaccgcaggaacgatggtggcgagaacttaaaccgcaggaacaacttcagaaatcacaatgagttctctggtcgtggacgggggccacctccaccagggaatggtt

SEQ ID NO: 10094 - DNA, 794 bp, Setaria italica
  Peptide Sequence Number=SeqID_76068
tttaggtttaacgtttattttggttttggtttcgtttagtttaactttttaaaccgttcttaggttaacttaacttttcttagttaaatttcttacttaattgttagtttcttcttggttcgtttatttaacacgataactacaacatcaggaacgagcggagtgatggtgataactacaaccgcaggaacgagaggagtgatggtgagaacttcaaccgcaggaatgacggtgagaacttcaaccgcaggaatgatggtgataactacaacagaaggaacgatggtggcgagaacttcaaccgcaggaacgatggtggcgagaacttaaaccgcaggaacaacttcagaaatcacaatgagttctctggtcgtggacgggggccacctccaccagggaatggttaccaccagaatgggaatggtctccacccagctcgacccttccagaatgggaacgggaggttcggccgtgtcaacagtggccctaagcaatcgccagttgctgtgtagaggcatcaggcgtcaaagtaggatgcttaaggctacattcaagtgagtgtaaggattatttctagtaggagcattgctgatcagacagcttccaggggcatctcaaattcttttgtactgtgttggggtcgctacaagtttagtagtggcagtcgtccattgatggtaggtgaattttgttgccgttgataagcttatcaactggttgttggactggtggtccgtaacttgtgtcatctgccgatcaggattgggagattggacacttatcttatgaagtgg

SEQ ID NO: 10095 - DNA, 1142 bp, Setaria italica
  misc_feature (1051)..(1142): n is a, c, g, or t
  Peptide Sequence Number=SeqID_76069
acttacccttacgtcccttcgtcaagagagattttggtgcgaaagagaaagcgctagctcgagcggctccctccccgacgagcgcgccaccgcccctccgatccgagcagccgcctacagtaaacccatgcaacctcaatgttccttgtgagatatcatgtctgaacagcaggaacgtgttagcaaaagctcttcctcaagtattagcagcagtactcaggagagtgaggaggaactgaccatcggtacccttataactgaagcagcaaacacaacaaacagtgcaaagagtcttggaaggcgcctgtcacacttagattcgatcccgcacactcctcgagtgaatgggaaaattccggattttaataatgcgacaatagatcatgaatcgttgctggaaagactgggcacttacggcttagctgaataccaaatagaaggagatgggaactgtcagttccgagctctggcagaccagatattccgcaatcctgactatcacaaacacgtgaggaaggcagtagtgaagcagctaaaggaattcaagaagcactatgaaggctatgtaccgatggaatataaggtttatctgaagaaaatgaaaagatctggggaatggggagatcatgtgaccttacaggcggctgcagataggtttgctgctaaaatatgtctgttgacatcgtttagagacacatgcctagtcgagatagtccccagagatgccactcccacaagagagctttggctaagtttctggtgcgaagtacattacaattcattgtatgcaattgaagatctgccgtcacgcaaaactaaaaagaagcactggctgttttagctcggtaggctccagcaatttcttggatctgcttttggtcttcgctacgtagtccagcagcatctgtaaccttagcttcgccttttgttaatgttgtaaactgcaatgtgacctggaaacaaatccatgtaagctcatgtacagtgaattgccaaattttattagtgcagttttgggctgtttgcctgttcctagttaaaaaaaaaaaannnnnnnnnnnnnnnnnnnnnnnnnnnnnnnnnnnnnnnnnnnnnnnnnnnnnnnnnnnnnnnnnnnnnnnnnnnnnnnnnnnnnnnnnnnn

SEQ ID NO: 10096 - DNA, 451 bp, Setaria italica
  misc_feature (43)..(43): n is a, c, g, or t
  Peptide Sequence Number=SeqID_76070
gcaacaatagaggaaatagttaaccaaaattagtataataaanattttgctttgctacacattggtaaatagtacatcggagattagtgattgaaggatcatgaacattttggtgaggtatgaccatgtttatgtccagaacatcacttatttgtatctggaggtagtaatacatcacgtgcttatctgtattgtataattctttaatccttgcttccaactgtttccgtagagtgctcaaattgttaacttattagtaggcatcatatgtattttttttctaacagcaagtttttctgttgaatcagtttgctgctaaaatatgtctgttgacatcgtttagagacacatgcctagtcgagatagtccccagagatattgccactcccacaagaggttagagtttgctcctgttactatattatgtatcaactttctatcaaactccaac

SEQ ID NO: 10097 - DNA, 329 bp, Setaria italica
  misc_feature (12)..(12): n is a, c, g, or t
  Peptide Sequence Number=SeqID_76071
aattcttcagcngaacaaaaagagaaggtgctgggggtgcagtctttgctactgagattgattgacattcaattatagaattatgtttaacctgcgtttcaaatcactggatctcggtagatccaattttcagtaaaagaccttatgtggcttttgaaatttgaacactaaattgttcatatataaacaaaatactcaagacaagtttttgaaggcataagcatacatatgcaaagttgattttatcaacttggatactggtccttgtttgataattaaataaccaccactaattgtgattcatgatcagcaaatatttgcagttgcag

SEQ ID NO: 10098 - DNA, 974 bp, Setaria italica
  Peptide Sequence Number=SeqID_76072
ctggaaaagggaatagtaagggaagcagaaaggctcagggaagcaatctgctctacgaagatcaatggtatcaaggaattttcttacaaacccctcctccttcagaggacattttttgctgtatttgaagaactcaagcaaagggaagatactgctgagaaggtcattgtgcaatgtaatggaaattggcccaagagttgtgcatcaaaagcccatacagatagtcctgaaactgacattttcttggagaaacaagcaaacagatattgcaatcaacctcgcacccataacgaggaggcagaagatgatagtggatgggaaacagtaagccaagttgaggagaatggctctagcaattcaccagggggaagtgaaccgtctgtaaatggcttctgtggagaaaatgatgcttcagtgagtgggactgattgggatgaaaattgcgacaatgaccaggcacatagtgagatcagtgaagtttgttcagcaacagcagggaggtcttggagtaaaagatcattcgtcggactctggagatcatcaaacagtgttgaccaaaagaaaatgggatccaatatactcaatggtagattatcaaatgccaggatgtcaaatgtcgccgaatctccagacctgaagaacggtgaagtgtgtgatagtccgcaaagtgcagggcaatggaggccagagctgctgaacccggacattgttcgagccataaaaggatgcatcgaatggcccagaggagtgcagaagcacagcttgaagtccaagcttctagaggcaaagcttgatggcagtaaggtccagctgcgtcaagcattgaagcagaagatatagcatggtcagtcacattctagatggaaacaggatatcatgatgcctctgctcgtggggctgcttcagctggaacaggcagcgccccgcgagaggaattgtagctgcactagtcaggctaggggtcttatcgggtg

SEQ ID NO: 10099 - DNA, 795 bp, Setaria italica
  Peptide Sequence Number=SeqID_76073
cacataacttaaaaattttatgcagctgttccacctctgttcgtcccggcataattggcctcccagccagcaactcagccaggatacaccctgcgctccacaggtccacacccaccccataatccgtcgcacctagaagcagctccggcggccggtaccatagggtcaccacccggctcgtcatcggctgcttacggtctgggtcgaagaacgatgccaaaccaaaatcggcaatcttcagcatgccattgttgtccaaaagcaggttcgaacccttgatatcgcggtgtagcacccctcggtcgtggcagtgctccagacccgacagcaactgatgcatgtagcacttaacctgtggctcggtgaacttgatgtccgggctggcagcgaggccggcgaggtcgtgctccatgtactcgaagacgaggtagaggctgcaggacatgcgggaggtgacgaggccgtcgagcttgacgacgttggggtggtcgaggcggcggaggatgaggatctcgcgcgccatgaagcggacgctctcgggctcgaggttgtcgaagcgcaccttcttgagcgccacgatcttgccgctcaccgtgtcgcgcgccttgtacacgttgctgtacgtgccctggccgatcttgtcgatcttctcgaaggagtcggcgcggcgcggggtccagccgtcgatggcctccccggcgacggcggagagccaggcgggccagcctgcggcgacttgctcgccgcgcgccttgttggcgaagctcccgcccaggcgcacctccgcgtgcgccg

SEQ ID NO: 10100 - DNA, 1567 bp, Setaria italica
  Peptide Sequence Number=SeqID_76074
cgtcctcgtcctcacggtctcgaccgcgaaatcgaaatccccaaaaaccctagctacccagcgcggcttcccccttcccgcctccccgcagcgcagcttcccccttcccgcctccccgcagcgcggctcgagtgacgcgcggcccctgctagcagctgccggaggaaggtgtagcctagcgggtggcggatggcgtccacggtgctggaggctacgcgggcggcgcacgaagacctggagaggctggagcggctcgcggtgcgcgagctgcagcgggaccccgccaacgcccgcgaccgcctcttccagtcgcaccgcgtccgccacatgctcgatctcgtcgtctccacctccgacaagctcgtggaaatctacgaggacaacgacaatgcaagaaaggatgagatcaacacacatcttactgcacccacgcaaagtctactgtttagcaagtactatgaaaggctcaaagagatccgcgactatcataggcggaacccttcagcccgcttcgtcagtacaactgatgattacgaagagcttctgaaggaggaaccagttattgaattcaccggcgaggattgtttgattcctcttgtaggatcttggtggtgtcaatggaagcttttggccgttacctagatttgcatgagctttataatgagttcataaattccaagttcggagcaccaatggaatactcggcttatgttggcagtttctcccagatggagaagatctcgcagagtcataaagctacaaggcaatacagagaatacttggaacacattctggaatatctgacatcatttctttatcgcacagagccattgcaggacattgagaagatttttgcaaagttggaaagtgaatttgaggaacgatgggccaacgaagaagtacctggatggggaaataaaagcacggaagagtctgaaatagaccttgattattacagcacagttgaagaactcgttgagcttggtccagaaaagttgaaacatgtttgacccttcaacatcatactgttactgagcaatcctttgctgtctgtttttgtagattatttcatcaatcacttggtcttcctgagttctattgatccatttacatttttttatcaggctttagccgctcgtggtttgaagagcggcggtactgttcaacagcgtgcagaacgtcttttcttgttgaagcatacacctttggagcaactggaccggaagcattttgctaaagttccacgtactaaagatgtctcagacgcatcttccaatggcaaccatttcaaggatgatttgaagaaggaaattgcgctgatggaagtaaagatgaggcgcctttgtgagctgctagatgaggtctttgtgcgaacaaaggaaaatgctgagaagaaactcactttgacatatgaagagatggaagcagaacgggaagaggaggaggtacaggctgacactgagagtgatgatgatgaacaacaaatctacaaccctctcaaattgccgatgggataggcttgcatcgcaaaccatgttgatgacgccattccttgaaatgacgctca

SEQ ID NO: 10101 - DNA, 254 bp, Setaria italica
  Peptide Sequence Number=SeqID_76075
ccccatccgtcttaatttacgtccctcccgaattttctattcgatcggacatgtatgcaaatgcaatgcatgacgaccataaacatcatcacatcacgtatgactgatgagttactactagtggcagacgacaaggatccagaagccatggatcgggcagggggcgcgcgcggtggcagccgcctgcatgcgtggccttgcttctcgacctgaatgtgcagtgtgacctcgccgccggccggggccggccatga

SEQ ID NO: 10102 - DNA, 934 bp, Setaria italica
  Peptide Sequence Number=SeqID_76076
tttttttttttttttctttagtcttgtctcgtggttagaaaatataatagatatcttttttctagcttgtctcgtgggaactaatgcagagtctccaatggaacaaaataagactacattgctacaaaactattaccataagctacctctcgtttgttaaatattcaaacataatacttatgtagatatatacttaatatcttcatctaattatgatagattttagttagtaattactctataatattttcatccacatttataatctttaacttttcactttgcatcgcaggtatgcgcttgaatttgtttaatgaaccctaagtttgagatacaattttagcatagaaatctatattcacatcactttagatccttataaatggtgacacacatcatacgtatagatcttaattattatatcgtataccaatagtgcaagatatatatgatttagaatcatatattgttgtatatttttagttaaggttattgattaaaatgtaggattacctcatgttatttttaataatggcatgtgtgggtaatatagatgcaaatttaaggggttactttaataatagtggtagtcaattcagttgcaaattatgaggttattttaaatactgtttataatggcataagtgggtaattttgatgaagattaaggggttactttagtttattttatataatggcagaggtgggtaatttatatatagatttaggggattactttaggctattttcataatggcataggtgggtaattttttagaaaatataatagatccaatggctatgatgatttgaaatctatcgattgatggtcggatgttttgttttttgtgagaatttctaggatttctctctttttctaggtggacacactctagaaaaaagagagaaatcctagaaattctcacaaaaaaac

SEQ ID NO: 10103 - DNA, 1077 bp, Setaria italica
  Peptide Sequence Number=SeqID_76077
tatacatacatacatacatacatacatacatacatattgtgctgtgactgtgagttgtatatatatgtacacggatgaacagatgcgatgcctctgtcaattgagaggctctacgaagtcatctcaagagcttagcaactcgctcccgcacgggctaatatttttagaaacaattttaatttgaaaattatttagaaattaaactcttagctaataatctaaattgtttacctactactctcttattttccaatacttcaacataatacttatatacctatctttgtccagttgtgattgatttttaattaataattactctatgcactttttcatccatattcatacttttttcattttgtatcacacctccaatcctccatacattatgtttagcatacaaatcaatgtttttcatcgatttcacatgtatatgcataaatggtctaaatggtggcactcatcctatgtatatattttaacttagtatttttatattaacaatgacataaataggtaatttagaatcatatatttgtttattttttgtacatttctgtatgatgcacatgaagataattagattaagatttagatgtttactttaggttatttttaataacgacatacattggtaacatagataaaaatttagaatgacattttaagttatgttttataatgatgtgtattagtaaattggatgaagattatgaggttactttagattatgttttataatagctgagctcggtaatttagatataggtttagagctcattttttaatattttcacaatgacagtggtgggtaactttttagaaaatataatagatcaatggctatgattattagagtttaaaggattggtgtttgatggtttttaatttttatgagaatttctctcttttttctagtttgtctcgtgggaactaatgcagagtctccaatgaaaaaagaaatgagactacattgctaacaaaaactattaccataagctacctctcgtttgttaaatattcgaacatcaatacttatatagatatatacttgatatcttcatccaattgtaatag

SEQ ID NO: 10104 - DNA, 246 bp, Setaria italica
  Peptide Sequence Number=SeqID_76078
cctccatgaaggcatgaaaacggccaccacaatggtaccacaaccgaagacgcttcaggtacaaaaatatattgggttggagctagcagactgtcatcttgcttcagttcaacttcaagacggcaacttgtaatagctcgggttgtccttgtcttctgccagcgagctataggatggatgacagtacttttgatgcattggaagagatagaaattagttttctcactggttcatctgaagaggagt

SEQ ID NO: 10105 - DNA, 408 bp, Setaria italica
  misc_feature (386)..(408): n is a, c, g, or t
  Peptide Sequence Number=SeqID_76079
taggaacgaagaaacaaaaccaagaaagtagaaagacaaataagattagctttagttctgaagtattgatgtcgcatccatttgctacatagatttggtacaaaaatatattgggttggagctagcagactgtcatcttgcttcagttcaacttcaaggtgaacttcagttgacctttagtttacttcctcggagttagtatacaaggagttatatataatttaaagcaatagtatgaagctctcgttagatctggaaggatgtatatttagtggagttctcatttattcatcttatttcaatagcttattggatgccaatctgatatgtatgtacaaataattattgtggacatgtatatggaagtaccagactttgacaaaggnnnnnnnnnnnnnnnnnnnnnnn

SEQ ID NO: 10106 - DNA, 334 bp, Setaria italica
  Peptide Sequence Number=SeqID_76080
cagcgccaaagtacccgcggctgtagatggcctcgtagaagacgtaggccccgacgagcgaccgcggctcggcggtgcggaggtaccgcgcgtagtagagctgcccgatccgcgaggcgacctcgccgatctcccagcggcggagcccgccggcgacgagctcccggcggcgctcctgctgcaggcgccacaggcgcgtgtacgccttgaaggccttgcggctgtggtggtccccgccgccgtagagcggcaggtcccgcgcgcgcgcgaacttgcggtctgccgcctccgccagcgccttgaactctcggtacgcgccggcctcgccgtcggc

SEQ ID NO: 10107 - DNA, 335 bp, Setaria italica
  Peptide Sequence Number=SeqID_76081
tttccagaacaatgggaaggtggaggagtgcgaacggcaccaagccaagctccagcacaacctcatgtacctggcggccatcgcagacagccagccaccacagacggcaccgctgtcacagtacccgtccaacctgatgatgcagccgggccctcggtacatgccgccgcagtcggggcagatgatgagcccgcagtcgctgatggcggcgcggtcctccatgatgtacgggcacccggccctgtcgccgctccagcagcagcaggcggcgcacggccagctgggcatggcctcggggtggcggcggcggcggcggcacgaccagcgggttcaac

SEQ ID NO: 10108 - DNA, 347 bp, Setaria italica
  Peptide Sequence Number=SeqID_76082
tcttgggaccggtacagctcctggaacgccgcgttgaagctcttcgccgacgggcccaccggcgccctgtgcccggccggcggcctcgccgccgcgccgtcgtccctcctcaagtgcgtggacagcacggccatccacgacgcccggaggtagccggtctcgtactgccggatctggccgcggtgccggcggagccagtcgtcgccaaggagctcccggagcggcggcgactccctcaccttctgcaccacgtagtggaggttgttcattaggaagatgttccgcagcccggcgtggtcgtacagccgggacttgtcgtccatcttctgcaggaggagcgtgagcag

SEQ ID NO: 10109 - DNA, 317 bp, Setaria italica
  Peptide Sequence Number=SeqID_76083
aatcctccccccgaattctttctccatcgccatggctctctcctccaccttcctccccctcccccaagctcctctcctcctccagatcccaccacttgctgcccgtccgggcgtcctctgccgcgcccgccgcctccgcctctttcgatctgcgccgctactggacctccctgatcgccgacgtggagtccgagctcgacgcggcgatgcccatgcgccccccggagagcatccactccgccatgcgctacgctgtcctcccgggcgccggcaaggaggggggcgccaagcgggcgccccctgtgctctgcgtcgct

SEQ ID NO: 10110 - DNA, 704 bp, Setaria italica
  misc_feature (692)..(692): n is a, c, g, or t
  Peptide Sequence Number=SeqID_76084
gtggaaccattcgacgcatctgtctgaactctgaaggtctccaccaggcgtccaggccaccgccgccgtccgccgagtgctatcgggccgccccacggcgcccgaacacgcctggaggcttcctttccttcggtcggaatataccatggaggtcagaccgatggtagctctacgtgctgccctagttggtgggatagcagcatttgcaaagatcggtggggtgatgaaagccgcaggaggtgtcaagattggtgcagctgctgcggctgtgacagcggcagcatcggctgccatttccggaaaagacacaagcaaagatactccgaaggcagaaacaaaatgatccagaggtccagaagagaaaggacgccgtagtcaataaactaccggagcagtttttgatgctccatgtttttttaatcttgggaataagaatgacagtgttgagttttccccaaattatggtttacttccatgcaatagttttggttgctcaatgtgatgagctacctgttactcacactgtatgcctaacctgatttcttctgccatactgtgagccatgatctgtttgccctgtgcatgtagatcctgaagctcttctgcagtttcatgtgtagaatcctagttatttacagttagaccagcatatgtacaactgagatatctgtagatgtagaatatttttaaangtaacaatgcct

SEQ ID NO: 10111 - DNA, 1241 bp, Setaria italica
  Peptide Sequence Number=SeqID_76085
gccaaagccacactcgagttcgactccatctggctgcacgcacttggtagctagcaagtgttgtaatggcaaggaggggtaatgccctggccatggggaccctgctgctcgccgccgccgtggtctgcgcggcagctgcagcagaagcagatgatctgttggtggagctccagctgcagcaagacccgtgcccgcaggtggaagacatcgtgcgctctgccgtgcagaaggcggtccgccggaatatccagctcaccgccggcctcctccgcatcttcttccacgactgcttcccgcagggctgcgacgcgtcggtcctccttgccggcgagcgtgacgttcctccgaacgccgggtcgctgcagccggaggcgctgaagctgatcgaggacatccgccgggaggtgcacggcaagtgcggcgggcccaaggtgtcgtgcgccgacatcctcgcgctcgccacgcgggacgccgtcgtcgccgccggcctgcccttcttccccataacccggggccgcatggacacccgcacgcccgctcccgacgtgctcgggaacctcccgtcgccatccgactcggtgggcaatctcctcgacatgttccgccgcaagggcctcggcgacgacccgcgcgtcctggtggccctctccggcgggcacaccgtcggcaagaccagctgcggcctgatcagggggaacgacgatttctccagggccctggcggccaactgctccgccagccggagcaggaagcagagcctggacgtgatcacgccggacgccttcgacaacaggtacttcgtggcgctgaggaacggcaagggggtgctcgggtccgaccaggggctggccgaccaccccagcaccagggacattgttagggatttcgccaacgaccagcagctcttcttcacacagttccgcgcctccatgaccaagctcagccagctgaaagcgcccgcgggtggaagcaggttcgagatccgcctcgactgctccaagcccaacgcccgtgtcggagacgaagacgatgccgccgccggccaacttgcagccgcggcctgatagacatgcatgcatgagaatgcgatgcgatagttcttgttactcctcgatcggttaggtttccttcatgcgtgcactgtaataatgtccgtgggcgtcgttggcgcggatcactctgctcgttatctttctttcaaaatgtctctaccaattgcattaaagtaaaaaaaaaaaaac

SEQ ID NO: 10112 - DNA, 274 bp, Setaria italica
  Peptide Sequence Number=SeqID_76086
ccggccaagaagacttccagctctgtcctcagctgcaggagcgtggatctcttcacggtgaagagcaagtcgctcgcgttcgagctgtcccctctgaacacctcccatctgttgtgcatgctgagtaccttctcgtgcatggagaggatgggttgtccggcggcgtcgacgagcacgcggcggttgcggacactccagacgctgcccttgaactgcagcacgacggcgtcgctggggtcggtgacggtgaagtcgccgccggtgaggctcttga

SEQ ID NO: 10113 - DNA, 821 bp, Setaria italica
  Peptide Sequence Number=SeqID_76087
taagaacgaagtgacgaggcgacgacgcggaagcgaagcggcgaggaaggcgccgttgggcgttggccctgccgggtgccggccgtgcgtgtgtcgtcgcccgcacggaagcaaagcaatcccttcccacgaataaacgatttgcttcgctcggcaaaaagtctcgtcttcccctccttcttcctgttcggttccccttggcggcaggcgcccgcgtgaggctcgagtctttccatattccaatccaccgcagcaacaaaagcggcgcatccgataggtggggtgttgtcaggtactacccggtggcgcgcctgtctcccacgggaccggttggattcggttggattttcgaatcaatcaagccggaggagaggttttcttcgcgcggccacggcggcggcggaccgaggcggcggcggagatgcacaagaccaaggggaagctctccggcgtcctgcacaagggcttcaagcccgacaagtgcaagacgtcgctgcggatggcggtggcgcggatcaagctgctgcggaaccgcaaggaggtgcaggtgcgccagatgcgccgcgaggtcgcgcagctgctcgaggccaaccaggacatgaccgcgcgcatcagggttgaacatgtcataagggaagagaagttcatgcaagcatatgacttgattgaagtatactgtgaacttatagtggcacgcctgtccattatcgactcacagaaggcttgccccattgatctgaaggaggcaatagccagtgttatatttgcgtcgatgaggtgttcagatgtcacggaactagcagatgtccggaagcatttca

SEQ ID NO: 10114 - DNA, 607 bp, Setaria italica
  Peptide Sequence Number=SeqID_76088
ttaagtttaactttaaactttaatttattttctttacttaagttaacaaaaaccaataaggtctctgacaatcatcacgatagttgatagggacacctaataaacaaccctgacaaagaaaaaaaatctctttcctcctgaattacagagagctcgcagagacagacacaggacgccagttcttattactgctgaagcttacagtaatatgacacgcacacatccaaggacaccaaaattgcaagcagttgtatgaaaaactcaacatgttaccttaccttcccgctttgcctctcgatctacagcaagaaccctctacaattgtaccctactgtaacgcatctacgactctgagcacacggttctgaacaaaaggccagagccacatcacctcgccggattcagtcgaggaacccggtttgccggagcacggcgtcgcgcacccgccgcaggtctcggcccttgagcgtgcgcccggcgccctcgagcatggagaaaggcgcggtgggcccggccccaccagcggacgcgcgggcgaccatctcgtgcgggggctgcatggtggcgtcgccgcgccggaagtcgtcgtcgtcgtcgtcgaattcgt

SEQ ID NO: 10115 - DNA, 596 bp, Setaria italica
  misc_feature (58)..(58): n is a, c, g, or t
  misc_feature (134)..(134): n is a, c, g, or t
  Peptide Sequence Number=SeqID_76089
agcatgcagtcagtccagtgccacaaaacacttctccttttctccacggcaactaganaggattaaaagaacactccagcgggtgtacgaaccacaatcaccaatggacttgcaaaacataatcaataacatcncttccctgctacctaaaaaaatggacagcttcctcaactatgctgtcagccaggaagcttgtagttcgattcaagcttcactcacatctgtaggatagctcccaagaactcttaggaaagtggcgaattccttcaagtttccaagagcattttgagcatttggatcagccatcgaagcctcaatatcaacatagaagaggtagtcaaagtgcttcagcggtgcagagcaattgtcatcagctacacgtagaggccttttcttgtgtggacggctttccatctttgtgagattgattttccgcaaagcaaacaccgcaagcgctttgaagagttgcccaggtccttcttccaaagagaagacaatgctagtctggagatcaccaatttgtatcattaaactaccaaagagtggatcatgaacacgtcaaagatttccttcatctcgtaccttgaatggcttgt

SEQ ID NO: 10116 - DNA, 1575 bp, Setaria italica
  misc_feature (462)..(462): n is a, c, g, or t
  Peptide Sequence Number=SeqID_76090
aatttgatcgattcattctccagctatcttattgtatcaaagctaggtggctccagtcatcacacattcattttttttccttttctgttaggtttcacagatcaagacacttggttcttgacatgaaatacaagaattggaggtgaccttccccatagagagatacttcaaccacttccttttgtgctgttcgcagcatgcagtcagtccagtgccacaaaacacttctccttttctccacggcaactagagaggattaaaaagaacactccagcgggtgtacgaaccacaatcaccaatggacttgcaaaacataatcaataacatctcttccctgctacctaaaaaataggacagcttcctcaactatgctgtcagccaggaagcttgtagttcgattcaagcttcactcacatctgtaggatagctcccaagaactgcaaggaaagtggccgaattccngaggaacaaaatgaaccgagtcaccaactcaccacttgcttaccacagtgccataactaaaaactgatagagcaataccttcaagtttccaagagcattttgagcatttggatcagccatcgaagcctcaatatcaacatagaagaggtagtcaaagtgcttcagcggtgcagagcaattgtcatcagctacacgtagaggccttttcttgtgtggacggctttccatctttgtgagattgattttccgcaaagcaaacaccgcaagcgctttgaagagttgcccaggtccttcttccaaagagaagacaatgctagtcttgaatggcttgtccgtgcgaggaataatgggttctcgagccagcatcataaaacgggtgacattgtctggatgttttctgcaagaatattgagtccataaagctcagcagctaatgaactagcaactgcaccagtgtcttggagcttctgttccgcaataagctttgcggcgcctgccgtatcatcaacagcttccctatgctcaattcctaacttggtgagtgtttgttcgcattgtgcaagagcttggggatggctcatagcgcttcgcaagttttgaatcttgactcctggatttgccagcaagcaatggtgaactgcaaggcgtacctcaccaacgatgtgcaacctatgtcgaagtagaaggtcatagttgcgatgtatgctaccacctaaggagttctcaagaggtaatactgcccgatcagcaacgcatccttcgacggcctggaaggcggtctcgaagtactcacagggcacggtgtgacagctcgggtaggccttcctggcggccgcctcgctgtaggctccggggcaaccctggtaggcgaccttcaacccgtccccagtcggctccatgagatccgcggtggtgagaggccgtggcagcgagatcgggtcgcgggcggccggaacgggcagatcgccggtggcggaggcggagatggagcggcggctggcgcgcaggggcatagagagggtgcggggaggctggcggcgggctcctccttcccatcccggtgggggggatcgggggtgaggacgccgtggccaccatcctgtactcctgtcc

SEQ ID NO: 10117 - DNA, 250 bp, Setaria italica
  Peptide Sequence Number=SeqID_76091
atggaggcggggcgaggagggaggaggtgtagaggcgagtgtgcacggcagggaggataagcttggaatgcgctgctagctcgagggtgcaactgcaaccgggtgtccatggtggagagggagagggacgagagagaacccattgccctgaccggcggcggcgggcagttgcagcaaggaggagcatcaggccccggcacggaggaggacgatgacagggacggcgaagaaagagatagagacgcgggag

SEQ ID NO: 10118 - DNA, 1606 bp, Setaria italica
  misc_feature (1)..(30): n is a, c, g, or t
  Peptide Sequence Number=SeqID_76092
nnnnnnnnnnnnnnnnnnnnnnnnnnnnnngtaaaccactagtattaaaagatatatattgatacaaaagccatgacactcagtccattatctaaatttcaagtttagaacagcattggaaaataattaaacaaacataacaaaagagacagctacaaaagccaagctacatgtagatgtaagctaaagcacatctttcaccgatgttttgctttccatgcatcccacatcttacttgctacaccctctctaaattctgtccactccgttgatgattcagtacggtcaatcacacctgcggtgctgccttcatgttccaagaaggcatccacttgtgcctcaaatggatcagaactcatttgttgtcgtatgagattgtgcaggtagcagcaagcaaggattataccattttgggtatctatagggtaataggatccatttctaattataccccaaacgtagttttagtaacccaaaggttctttctatcacatttcttgctgacgagtgcctcatgttaaacaattcctccttttttgtaggtgggttactccattctttgaggtggtagtgttgtcctctatatggagcaagaaatccatcgcaattcttgtacccagcatccacgagatagtagcagccacgaggaaccttgagaccatttggccttgccaaggcatctcggagcacccttgcatcggcagctgacccttcccaaccagctagtgcatatgcgaattgcatgtcaggagcacaacatgcagtgccctcaaaagctttattctacgtcgttccatttcttggcataagactaggatgtctctctttcttggacgacaggccatttctcatcagtgttgtcttgttggacggcatcaccaacagttggatagccactaacatcatgttcgttacgctgaatgtaaacctctaaaaacttggccccatttgcatacttcatcatttcagaaatagaagtgtcatctttcagatggtctataccaccttcatcaagactacgaccaggaatggcatagtagagattgtcgccatccttgaagcctacagttttggccagctgtactaaatgatagtatgataattcgtccttgtcaattttttgaaaaagagtgatatcacctccatcgtaagttagttcatcttgtttcgaaaaagcacccccatggtgcatcaagatattgacacaccctagagccatcatctcttatcgaagaacagcacacctgagacctctggacacagaggaaagccacatcaaagattaggcggaaggaaattcctttccttttgctgccgtccttccagtcgtaaccaaggggtggggtaggtagctcgacacatagcactggcaaaagaggcaggaatgattgaaggagccccacacgggctgcacaggagagctggatctatttcttcccgtccttactccaacaagataaagatggcagccaataaccactggttcctctacccaatctttctttcattcctctcaattccgttgctctccagtgcatccccatggctggctaggggcacaggcacatccctgcgagtagaccacggtgaggatcttcctcgtctc

SEQ ID NO: 10119 - DNA, 1307 bp, Setaria italica
  misc_feature (1286)..(1286): n is a, c, g, or t
  Peptide Sequence Number=SeqID_76093
ttttttgtttattttgacgacaatatgatctggtgagcccaaaagagtgaaataattttatacaagactatgttacggtagagaaccacctcgtctatgatgccagccagctacactcatgaatgacaattctctgatatacatggaccagctatcgcccaattagcttgaccatccatgcaccacccaagtacaaaccaagcagaggacctgccaggagcatctgtgtcaatggatccgtcgaaggtgtaagcaccgcagcagcaacaacagcaccaacaacaacatatctccagattgaaagcatttggtctccagaaaccaatccaacttgtcccaacaatagctggataacaggaacctgaaaggataaacctgtgctgaacataagcacaagtacgaattcaaagtactggtctattgaccataacgattccactgccccgtctgcatagttcacgaagaagttcaatgcagcagggctaagaactgtgtaggagaagaaaatgccaaggtagaatagaacagaagaacccaaaacaataggccctaggaatttccgctcatcccttgttaaacctgggagaacaaatgcaatgatctcatacaaaatgataggacttccaagtaaaaggccacaataaccagagacctttaatgttgtaaagaaaaattccccaggggagagctgcaaaaaccgaacaccctgaacagtcacaggcgcttctagaagcagaatcaaatcttttgaaaaagcaaaacagccaagtatcgcagctccaacagccaaaactgagatgaatatcctctcacggagctcttctagatgatcaaatatactcatctccttatcatcaggaagtaactctttgcttggataaagaaaattatacagagcactctggtcttcttcttgtgacaggcctccaaacgaaccattttccacaggaggtcctgaagccgggtcctcgagtgcggcgccgaggccgctggacggatactcctccctaggcggcggtgggccctcctcccggggcctgccgtccccgttgacagcagcgcagcggaggcaccggcggcggccgcgctggggcccgggcgccgcggcagggagagataatagtggcaggttgcgcgcgcgcgggagggtccggctctggctgatgtagacgccgccggagtgcagatgcggccgcgggtgcgagagcggcgttccagcgcttcccatcccgttccagtctgctgctcgccgctcagatgatgctctgctcggagaaggagggganggccggactgagacacgacaa

SEQ ID NO: 10120 - DNA, 412 bp, Setaria italica
  Peptide Sequence Number=SeqID_76094
aagtacaatcggtacattggcaacttccaaacctttgtatgaatctctctggtggcagtaagaggatgaaaaacaagaggtgctcagctcatttgcatagcttgagcttcttgaagaatgaagaaatctgggactttgggcagggggcgtgtggctatgcatgttgggatgttctcaggttgttctatccacagcttatgccggacaccagctgcttgcagcttctcagccaagttcttcagctgtgtctctcctttcacctccaatgttaccttgtgcatccggtcgaggttgtcgggcgcgcagtaggcggcggtgtccgggtggtcgcggtgcgcccacacggcggccactgcggcgtggcacccctgcgccaccacgctccccatcggccacgcgtccgtcctaggtt

SEQ ID NO: 10121 - DNA, 404 bp, Setaria italica
  Peptide Sequence Number=SeqID_76095
atcgcaagactttttggtacacttggttataagcgcaaggcagcctttttttctaagacaagttgcacaattgtaccttcagcaggacaatgcatatgctgctatgagtgctatgcaggtcctaaccatgactacaaatgcataccatgtccaaagccgaaaggctagcaaaataaatcacgattcatccaaggaacctcatgctagcagtactgattctggaaaagtgcaccctcagtctatagtgtcattgtttgagtcgcaatggagtaccattcaaatggtcgttctaagagagatattgatgtcatcaatccgtgctgcggatccactctcatcatggagtgctgcagctcgtcttcttagatcattttacccactcatcacaccagctggtcagagtg

SEQ ID NO: 10122 - DNA, 935 bp, Setaria italica
  misc_feature (906)..(935): n is a, c, g, or t
  Peptide Sequence Number=SeqID_76096
taagtaccttacttaccccccgacttttccccatctacagtagccagcgggcggaaaaggcgactcggaggcggatctccttgccggcgcgattccgccggcccctttcctctccggcggccggataggcgccggagagggaggagggccggggaatcgtcgtgtggctttgtatagggtaggtaggtttatatctatgcctagggtttgctcgccgactgtgacgacggcggagctaggttttccgggagcggcggctatggcggagctgctccggcggcaaataaggatcctccccgacgtcgacggtggtccttccgtcttccttggtgaggattttgtgaggtcagtgagcctcccctttgccggagattggttgtcgactcttccgtccgtttttggtccttagttggagtcgacgatgaatcttgtgcggcttctcttccttctgctggcggctgttgttggtggcgcggtggagtggatttgttggggcttccgagggctcggatgtcctccttcttcttcttcgttctcggagttctggttgttggtttccttttctggattgctggagctgcgtctccgagttcctgggcgcgtgaaggcgagtggaagtcctgaatcgacgagtccgacggctgatgtgtggttaccgagtatgtgctgcagctttcctttgtttggagtccgatcttcgatttggacgggtgcggggggaggtttggagctctgggccacagcttggggatcggatgggagtcctcagctcgatctgaggaggaagaagagcagtagggtcctgtttgtaattttctggttcctcagggtccgttgtgtaagagaagggtgtactgtgctgtcttttatcttttaatatatgttacatcccttttcgcagaaaannnnnnnnnnnnnnnnnnnnnnnnnnnnnn

SEQ ID NO: 10123 - DNA, 289 bp, Setaria italica
  Peptide Sequence Number=SeqID_76097
ggtcatcatctcacgagtgcaggcatgaagaatgagctctgaactatgtggggatggaaatctgtctggttgcttggttgggtaattatgtcatggccttgggggagcatgaggaaaaaaaggggggttagtataaggtcacgataattaatttgtgtttaccatagtagttgtttgataatgcctctttttttgttattgtattttaattttgttactcgtgcttccatttggatccataggatgatgaaagagaagaaagaaacaaaagagttggtttcttgtaaaa

SEQ ID NO: 10124 - DNA, 365 bp, Setaria italica
  Peptide Sequence Number=SeqID_76098
gtcatcatctcacgagtgcaggcatgaagaatgagctctgaactatgtggggatggaaatctgtctggttgcttggttgggtaattatgtcatggccttgggggagcatgaggaaaaaaggggggttagtataaggtcacgataattaatttgtgtttaccatagtagttgtttgataatgcctctttttttgtttattgtattttaattttgttactcgtgcttccatttggatccataggatgatgaaagagaagaaagaaacaaagagttggtttcttgtaagtggttaaactgaaatatgaatggatgttaagatgaaatgaaagttaagctcgattcccagcttatgatttcaattcgac

SEQ ID NO: 10125 - DNA, 414 bp, Setaria italica
  Peptide Sequence Number=SeqID_76099
tgctgcacgctgcagagcctccaggggtccgccggcgcggcgccaccgggcgcacctcctccgtcgatgccacgatggccgccttgtccaggcaccggaactggtccgtgtgcgcgagcttggtgacgatggcgctggtgtgcggcgggttgaacaggtcctgcttcgggtccttgggctgcttcagcgaccgcttcttgaaggcggccgccagcacctgcacgacgctggtgaaggggctcccctccggcgtcacccggacgtagagcttggtgcccatgaagaagaggacgcaggcgaggaacatgaggcccgtggggatgccgagcccgatgggccagctcaggttgctctgcacgtagatgatgacggtggccgagatcatcatggcggcatcaacagcttcttcaactg

SEQ ID NO: 10126 - DNA, 520 bp, Setaria italica
  Peptide Sequence Number=SeqID_76100
aaaaagtaaaacggaaaactaaaggaaactaaacaaagaacgaacgaaataggacgacgaccgacctgtcctcgacgatggccgagatgaccatggccacggtggagagcgcgatgccgatgccctggcgctggagcagcgtgaacccctcctccttgccggtcatcttccggagcttaggcagcaggatgcggtcgtacagcgggatccagagcgtctgcgcgagcatggcgaagacggtgaaggacgcggcggggatctcgaagctgccgcggccgaggtggcggtcggactgcagcgccgagagcaccacgtacgtggactgctgcaccacggccacgtagtagatgatccccgtcgaccacaccggcgcgatgcggatgaggcacttcacctcctccacctgctgcacgctgcagagcctccaggggtccgccggcgcggcgccaccggggcgcacctcctccgtcgatgccaacgaataggaccgaccttagtaccaaggacaaccggaaaacta

SEQ ID NO: 10127 - DNA, 2092 bp, Setaria italica
  Peptide Sequence Number=SeqID_76101
gtaacaaaattaaaatacaataaacaaaaaaagaaggcattatcaaacaactactatggtaaacacaaattaattatcgtgacccttatactaaccccccctttttttcctcatgctcccccaaggccatgacataattacccaaccaagcaaccagacagatttccatccccacatagttcagagctcattcttcatgcctgcactcgtgagatgatgaccacctcggccgggcgctcagttgctggcccccttgaacctgtaccacctggcgcagatgaggaagtagatgaggttgaagacgccgatgccggcgatggtccagtagaagagatcgaggcggcccttgttgaggtcctgcgccagccagttgcggccggaccccgtcgtccggtgcacgatggtcaccaggaacccgctgaggtagttgccgagcgccaggttgcagaaggccagcgcccccgccacgctccgcatgtgctcggggatctccttgtagtagaactcgatctggctgatgaggttgaacgcctccgacaggcccaggatcatgagctgcggcaccatccacaggctggacatggccgagatgtcgccgcccatcatggtcttgcccagcgtcggctggctcagcgcgatggcgcgccgcctgtcctcgacgatggccgagatgaccatggccacggtggagagcgcgatgccgatgccctggcgctggagcagcgtgaacccctcctccttgccggtcatcttccggagcttaggcagcaggatgcggtcgtacagcgggatccagagcgtctgcgcgagcatggcgaagacggtgaaggacgcggcggggatctcgaagctgccgcggccgaggtggcggtcggactgcagcgccgagagcaccacgtacgtggactgctgcaccacggccacgtagtagatgatccccgtcgaccacaccggcgcgatgcggatgaggcacttcacctcctccacctgctgcacgctgcagagcctccaggggtccgccggcgcggcgccaccggggcgcacctcctccgtcgatgccacgatggccgccttgtccaggcaccggaactggtccgtgtgcgcgagcttggtgacgatggcgctggtgtgcggcgggttgaacaggtcctgcttcgggtccttgggctgcttcagcgaccgcttcttgaaggcggccgccagcacctgcacgacgctggtgaaggggctcccctccggcgtcacccggacgtagagcttggtgcccatgaagaagaggacgcaggcgaggaacatgaggcccgtggggatgccgagcccgatgggccagctcaggttgctctgcacgtagatgatgacggtggccgagatcatcatggcggcggtgaaggtgaagtagtaccagttgaagaagctgttgatgccgcgcttgccggactcggtgttggggtcgaactggtcggcgccgaagggcatgctgcaggggcggatccccgccgagcccagcaccaggaacgcgaaggcaatgaagagcaccgcgaactggtacgaggtggccttctcgcaggtctcgcccacgccgcactccggcgggtgcaggctgtccgcggcggccgtcagcgtcagaaagaacattccgatgagggaggcgatggaggcgatggcgagcgcgaggtagcggccgaggtaggcgtcggagaggaaggcgccgatgatgggggccaggctggtggtgccgttgagcccgttgaggagggtggcggcgtccacgctccgcatgtggaacacctgcgtcaggtacaccagcaggttcgccgacgtgcccagcgtccccagcttctcgaacgtctcgttgccgatgatgaagggcatggccttccagccgtagtacttgacggcgggccgcgggctgtcctcgccgtcgccgtcccccatcttgtccacctccatgctcttgagcttccgcgacacctcgtcgtcctcccgtccgccgccgccgccgcgcattctcgctcgccggctgctctcccctgcttcctcttcttcttccccgggggggggcgcttacaagcgcgccccctcttctgctttc

SEQ ID NO: 10128 - DNA, 658 bp, Setaria italica
  Peptide Sequence Number=SeqID_76102
ggatgaaatccatcacgattttcttcggctggaccatgttgaagggtaccacaagctgtctgcaaagaccaagatattcttctccactgctgtggcattatgggatgcagacttctatgtcaaggtggatgatgatgttcacctaaacataggaatgctcgtcgcaacccttggtcgacataaactaaaaccacgggtctacattggctgtatgaagtcaggaccagtcctttccgacaaaaatgcaaaataccacgaacctgaattctggaagtttggggaagacgggaacaagtacttccgccatgccaccggacagatatatgccatctccaaggatcttgccacatacatctcaatcaaccagcctatattgcacaaatatgcaaatgaagatgtatcactcggtgcatggtttatcgggctagatgtggagcacatcgatgacagggacatgtgttgtggcacaccaccagattgcgagtggaaggcgcaagcaggaagcgtttgtgtcgcatcattcgattggaaatgcagtggggtctgcaatccggtcgagaggctaaaatacgtacactcgagatgcagtgaaggtgaggacgccatttggagcacctcattctgaccgggtgctgaactgctgataaggttcgcaggc

SEQ ID NO: 10129 - DNA, 1564 bp, Setaria italica
  Peptide Sequence Number=SeqID_76103
tttttttaatccgtttggaaattttaagcatcttatatatattaacttatcagtaaaaaaactgcatatatcagtacatagtttgctctcgagttcttgacttccctcgtcaactgttacattttccagctctccaggattatataccagacagaggtgagtataagaactcgactacatagcagcacaaactgcataagttaaatttgaacttgcagaacaacattcaccagtctccactacaaaccttcgagaaactcgaattacctcgggctgagtgcacacgaagtctgaaagtctatttccactgttagcaagcagcactacatgatttaggcctgtctagccgctgaagaaccacggtgctgcactgacccacccccacggtttagttcacaaggtgagggctggcactcttgaaaggaagtgtgcaagagtaagtcacatatctgacaccgtcaaggagaacgacaacaaatatcctggagagaggtttcggcgatactcttggatcaccatctccattgccagcctccctgggatcagctagcacagagacaacaactgatgatgctggcttgctatcaggtaccttgctgctttcagaagtactgttaaaagtccgaggctctgtgctgttcaccgtttttccagtgagtggaatcgcctcattatacatgatcctcctgtttttcaacttgccaccagattttggaattttctgggtagcattgacgctcgaggagttcacagttggagaagcaggtataataccaccagatttggcagaagctgcagaaatgtcgaactggaatacctcactgcacattcccgagttcaaaattggtccttccattccttcccgaaaccactgtggcagtgctgcatctggcgggaaggttccctttgaattttcatcctttccagatggtgacagataccgagctatagcaacgctagtctccttgtgatctttaacagactggccatttgaggccctatgtgccactgctttctcacttgcaagcacggaatgaataatcaaattgccgttgatcttaacatgttttccattcctcggcacatataacaaagctggcaaaatctcactggagttatgtgcaggccgatgcttcggcccagctccatcagaattcccagtcatcattccaggatcagtatcggtcatgtcactactgtttagaccacctttaggtcctttgccatggttagtgacactaaacaccctagcatcagaatggccaaaatttccaaacatcacatcgtcgcgcctgccactcattccgaaattatgattgaaccccggaacaaaagcaccaaaaataagcgcaacgaacagcaaaccaagaagactaacactcgcaaccttcttggtcttggtcttactcttgttctccacagtcttcttgacctctggttttttggataccttcgctgcagccgctgcttgctgtggcttcaaccgcgggataggcacaagtgggacatgggagccatgaggccgcattgcatacccaggaacccatgggaaatgaatgcccgg

SEQ ID NO: 10130 - DNA, 525 bp, Setaria italica
  Peptide Sequence Number=SeqID_76104
attactggacactgactgcaaattgttttatgaatgaaatatgaaatcataaatggtgggaaatacacaacgtgtttcatatctgagcaagcattaaaagccttctgtgccacaaaagtaaggaggatgacaaaagtttgccagtttacaagagccaagatttctactctccagtaagcctcacgggaatagggcaaatagccggaattcttgaaaacagcccagtgccccctcaaagttatatagcaattagaggccaatgaaattctagcacaagcaaatattgcaatatcactcgttcactacacaatttgtctagaaatattccaggttcatcaatttcatattgctataacaagatacaaaattgcatccctatatatagtgaagcattactgatcaaataaaaaaaataagagaagacaatatactgttcggttgcaattataccatgagttcatcttaaaaatagcctatagtatcaagaaatgattgacaggaaaaacacaaaaaggtcatcttcct

SEQ ID NO: 10131 - DNA, 377 bp, Setaria italica
  Peptide Sequence Number=SeqID_76105
accagatgagggtgctctccttctggatattgtaatccgcaagggtgcggccatcctccagctgcttgccggcaaagataagacgctgctggtccggggggatgccctccttgtcctggatcttggccttgacgttgtcgtgttgttcggagcacaccacccgccccaaatcgttcttcccgcaagcctcggcgatccttcacccgcttcaagatgcagatctttgtcaagaccctcaccggcaagaccatcaccctcgaggtggagtcttctgacaccattgacaacgtcaaggccaagatccaggacaaggaaggcattcccccggatcagcagcggctcatcttgccggaacaaagacaagcttgaggatcggc

SEQ ID NO: 10132 - DNA, 300 bp, Setaria italica
  Peptide Sequence Number=SeqID_76106
cgctctcgctgccatcgcagctcgcagcgcagcgcggcttcggtggcaggttcgcgctgtgcctcccagccttcgccgcgttcggcgacacgccggtgtacctggggacggagtcgcggggcctcgtcgagtacacgggctccatcccgtacgcgttgctcctcgcgaacccgaggaaccccagcggctactacatccccgtcaagggcatctccgtgtcctggcacggcgtggacgtggcggcctccctgcccaacggtgcgctggacctcgacggccgcactggccgaggcggcgtcg

SEQ ID NO: 10133 - DNA, 265 bp, Setaria italica
  Peptide Sequence Number=SeqID_76107
cttcccccgccgccgcacggcaatgaaatcttgcctcctcctcgattagccactccaccaactcgagctgcaaagattgcgccttttgtgtgcgtgtgcgtctgcgcgcgccgcggcggcggtggcggcggttgtcgccgtcaaggatcaacgatacgaaatagattagttcgtgatttgatttgacccaggcggtctgtgctggacatccaaagatggaggtggcgaaggagactgtgacgaagccacggctgccgccggggtt

SEQ ID NO: 10134 - DNA, 261 bp, Setaria italica
  Peptide Sequence Number=SeqID_76108
gcaagcccaaatcgatctcaaacgtcgtaacgaacagattgaaccaaggaagcgcacgagatccacaaggaatacaacaaaaccgccaaaaaaaatccaacgcacagggacaaaaccgcaaagaaaaaaggcagatcgatcgagcaccgcaaagctcacgagctgtgaaacccagcagatcaatcgcagctccaacaaatccctgaaaactacagatcaatcgcagctccagaataaccgatcagaggccggccgcaaaaa

SEQ ID NO: 10135 - DNA, 485 bp, Setaria italica
  Peptide Sequence Number=SeqID_76109
tttctacttacactcacattattgaaacactatattgcactaatgactggaaacatgaagttttagcctttttggaagacttgattgtagttctggtgtggataggtctgtcatcaaacatggcagcttgctttgcctctcagaaacacttacaaaccgagaaaataggcccaattttatttcaaaatgatttcagctcaaacttctagtaatttaaaccagttaccagtaaataaatccctgaccaaagcagcagagaggccgttaccgcgccaatctactttgatttagttgtttaaacgatgttcggctctgttttagaaactaaaatgacatggcacttcagccttgttcgctagttaaaatataattagtaccagtgcttgtgtaataatacagaaacatagccgataaagttgccgcaacaggatactacgttgtggtgcctgatttcttccacggcgatccttacaacgacagaacaa

SEQ ID NO: 10136 - DNA, 446 bp, Setaria italica
  Peptide Sequence Number=SeqID_76110
ccggcggcgtcgtgctcccgctccacaccctccaggcggccgcccccgatggcaacgttgctgccgctgaaggcgacgccgagggcgccgaggccaacgccaaggatgcggacttcaaggacgcggcggactcctctgaggtcccggtgccagaggcgggagcggaaggggaggaggccgcgcagccgctcgcggagtccggcatcgcgccgacgccggacctcccggcggtcacgttcaagtggaaggacatcttcaaggcgggcggcggcgaggccaaggaccgcaagaaggtggagcgccgcgtgagcagcgtcagcgggaacgccgagctcatcaacatcaacatctggcccttctccaggagccgctccgccggccactccgccggcggcgcggcagcagcaggctccttgagcagggccaagccaaatcaaaatgccaac

SEQ ID NO: 10137 - DNA, 342 bp, Setaria italica
  misc_feature (330)..(330): n is a, c, g, or t
  Peptide Sequence Number=SeqID_76111
ttgttttttggtagtaagtttcttcttgtatgctcagagaagattctgttgtgtttgacaagactggaactttaacaattggtagacctgtggtaactaaagtaataacttccagaggcaggggagatgcaaatacaaaggattttggggacaaccaatggactgaggctgagattctgagttttgctgctggagtagagtcaaatacaaatcacccgcttggaaaagccatcatggaagctgcaggggctgctaattgcatcagtatgaaggcaaatgatggatccttcatggaagaaccaggatctggtgctgtggctaccatcggtnagaacaggtttc

SEQ ID NO: 10138 - DNA, 1027 bp, Setaria italica
  Peptide Sequence Number=SeqID_76112
cttcatctatatctgggatagatgaagccatggatggagaggctgtcaggtgtctaccatcactatatgatcctgcactaccaggccaagatgtgaatggagccattggagatgcagaaggggtactagccgctctgtgggttgatctctcggataaaacaggggatccaacattattcatagaaacagagttgggtgaatcagttacttggtgggattcagcaatgccatttgcactgggtgctgtgatccgtccttgatcatgagcattattaaacatttggtttgcttgaccatttaaaaccttagtactgagctcctgctcccgattcgaagaatcatctgcttttacttcagcggtttcaaaagcgttcggcacgccggtactttctgaactggtaactttttggctcctgaggaaaacttgttacactcattgtattggcagattgctcctgatcatgtggtaaacttgaaaaggtgtcctttgaacttccattgtcattgtcatggacattcttctcatcagttgcagcagttgtaagatcttttgccatcctcagagcacaatcagaccttacacaagaaaaatataaatcaacacagctttccaggaaatcatgccgcctgcaaacagcagagaatggtgcgcacatctttgccagatcaaccatgaacctcaatattgaagtagcaacagcaggtgctgctgcttcaccacccattaaccttgctgcatatgtcttatgcatcagagcttcaccttgaagatcacctcccatgtccgaggtcgcctcatcaagatcagcaaccaaggtgccactaagatgtgaaagattgctattctggtgtgcaagcatagatttcataatcaaggaatcaaatgtagcttttgccattgcaattatagtgtccaatagatccacaaacttcaattctccatagtttccatcgctaggcatgagagcatagtcgtcaagcattcggacctctggtactcgaggataaacaggcttcccaaacacca

SEQ ID NO: 10139 - DNA, 773 bp, Setaria italica
  Peptide Sequence Number=SeqID_76113
cgttacttgcctttgcaaatccgctccaatccagcttgatatgtgaggagaagaggagggaggaggagctcaggccttgacgacggtcatcatgcgcttgaactcctcgaagctgaccatgccatcaccgtcgctgtcgacgagtcgtatcatgtcgcggcactcggcgacggcgggcctgccggcgccggcgccggcgcggcgcaggccgagggagcccagcacggtgccgagctcctcggcggagatgagcccgtccttgttgccgtcgaagacgtcgaacgcctcccgcaggtccctctcctcctcctcctcctcctcctcggcctcttcctcctcgtcctccacaggcacctccctcgcctcggcggcggcggggtgctggtgcttccgcttcttgggtatggagtcgtagagctcccggaactcgtggatgtcgatgagcccgtcgctgttggcgtcgacgcgcgccaccatggcggcgccctcgtcggcggacacggcgatgccgagccggcgcagcgactcctccagctcgaccgccgtgatgaagccgtcgccgtcgtggtcgaacgtggagaacacgatgcccaggtccgcctccgggtcgggcccgcgcgcctgcttcctcctcctcgccgcctcctcctcctctccctcgctggcgctccccttgccggcgtctccgcacttgacgtcgccgacgcacttcttggcggcggtggagcgcgaggaggtggtgagggagaagagggcgcagaggccgccgagga

SEQ ID NO: 10140 - DNA, 1785 bp, Setaria italica
  misc_feature (1702)..(1785): n is a, c, g, or t
  Peptide Sequence Number=SeqID_76114
gcttgaaaccaaacacagttgtccaagtgtttttggtttcaagcctgttgaaccttccaagaataaaaaaatcaagtcggtaaatctcttgattatcaatggcaccggtctactagagaaaaggttactgccaactggtaaagttgatggacagaccactgccaagccagctaatgctgttggctctgacaaaacagatgctaaagtgtttggtgaagcaagtggatctgcgacacctgttcatgtttcgcgtgaatttgatgttgctaatgatcttgaaattaagtgtcacgagagtcctcgctccttaaatgggaattcagcatgtttgacatctgaccagcctcctgctgctgaagaaaatgacgtaaagagaactctagaaaggacatccccagtgtctgtaggtgatgatgagttgcatacacttccaggagttaattgtggagataacatgcagttgaaggctgaagcagacaacactcaagaagagaaatgcagagaaataaatgggaaattaattactgaaaacactgttgcagaacagaagtgtgaagataaaccaaattcctgtcattcaaattcacgtgaggttgggaccatggatccatgttcttgtttatctaatgaggttgggaaaattgaaaatcgtccatctagtgaactttttgttggagctgctcccatagcaggcaaaactgaatctaatctgacatccgattctccatctattcactgtgccaatcaagagcatgagaaatctggtgcggctcctgttgacactaacacacctctagtcattatggatgaaaagcctgatagtcacgagctgaagactgtggttgctgatggttctattcaaagctcaatggaagctaaaagtttggaagatagaactaatatagtaaatggaacatcaaaagattcctatatagataaagatactagtgaggatcacagagcttctgcagttgacagtggagtatctgtgaagggatctattaagcaaacagagattatcaaggacaaagttggttcacttttaccaggtttgaaacatcctagttgtaaagatatcttggagaagttgactgagtcaaagtcatttacaagtgatatggttgaaacgggtggcgtggctatgaaagtgggaatgacagttgagagttgcaatgaagctggaaaatcagctcccatgcttgacatttcaaatgctgtttgtaaggttgtggttaagcctactcaaacttgtggggagggtcaactttgtggagaggatgccatatgcagtaacagggaaagtgacctagcttctagagaacctgtcaatgcatgatgttttgttttctgctgtgaaagctgtggctcgtcgatgtttcaggacttttggtggttcttctgaggctgtagatcatgaagccttttggagtagatgttagactgcgccgtagaatatggacaagggagacctgcaagctgggtcatttttttgctgtacatacatacatactcctaggtgggagttctctgttatcctggtccacctgaactctctgaagatggtatatggatgtttagaatgtagacatgccgacatggggcatatgatccttcgcaacatatcctgtacagaactttgaaaaggtatcctttctatatgatcctttgcaattgttctgcaaaaaaaaaaaaaaaaaaaaannnnnnnnnnnnnnnnnnnnnnnnnnnnnnnnnnnnnnnnnnnnnnnnnnnnnnnnnnnnnnnnnnnnnnnnnnnnnnnnnnnn

SEQ ID NO: 10141 - DNA, 428 bp, Setaria italica
  Peptide Sequence Number=SeqID_76115
atacgtttaaataatataacaataataataatatcataaatccataacaataataataatactctcagagccagtgagcactaggtacacaagacgcgactaaataataggaatagactcacaccaaccacgctaatcaaatccaccctcaaaaacctctcaaaatccccacacgaaaccctcagatccatccgcccggcgaaccaccaaaacaaatgcctctccctccatggcactatcacaaccactacaatactgctactaccactaataagactctcactaccactgtactactagatccgacgaagacacgcgcacgcgggcgaggcggccgccgccggctcagtggcggaggaaggcggcgaggagcccggccaggcagacagcggagagcggcgccgtagtagggtcgtccggtcgtccgt

SEQ ID NO: 10142 - DNA, 234 bp, Setaria italica
  Peptide Sequence Number=SeqID_76116
ttgtagggtagaagttctcccttcaggatagagttgaaatgttaggagctgtacctcatgctcaagttcttccagatgacatgatagtacttgcagaatcaacaccagaagatatggtcagagctgttaagaaagctattgacatgctacctggcataaatcctcaatttatgcatcttcagatgaaaaaactttatagttgggatgattggccaaaagaacagagattgctta

SEQ ID NO: 10143 - DNA, 222 bp, Setaria italica
  Peptide Sequence Number=SeqID_76117
taccatggaggccattcctcatgcagaatacactgcctacattatttttgtacattgccaattgtaaggaccattattattcgagagaagatttctgttgtgcatggacatcaggccttctcaaccctgtgtcatgaagcattgatgcatgctagaacaatgggtttactcttgcagatattgatcaggctatatgtgtttctcatacaagcaaagagaata

SEQ ID NO: 10144 - DNA, 236 bp, Setaria italica
  Peptide Sequence Number=SeqID_76118
gaagcagcaagctgtggactgttgacagtaagcaccagagttggaggtgtcccagagaaccagctccagaagatatggtaagagcagtcaagaaagctatcgacatgctacctggcatagatccccaagttatgcatcttcggatgaaaaaaactttatagttgggatgatgtggccaaaagaacagagattgtttatgatcgtgcaatgcagtcatcaacaacaaatttgctacg

SEQ ID NO: 10145 - DNA, 232 bp, Setaria italica
  Peptide Sequence Number=SeqID_76119
tgccctggatatcatcattgaaaacaagatgactcttgctatatttttcaagcagatcaaaagcagaagatatggtcagagctgttaagaaagctattgacatgctacctggcataaatcctcaatttatgcatcttcagatgaaaaaactttatagttgggatgatttggccaaaagaacagagattgcttatgatcgtgcagtgcaatccttgacagtttgtgtttactc

SEQ ID NO: 10146 - DNA, 481 bp, Setaria italica
  Peptide Sequence Number=SeqID_76120
tcaggctatatgttgtttctcatacaagcaaagagaatactgtcttgaggtctgggatatctcccgagaaggttttcatggttcctaatgctgttgatacagcaatgtttactccctcgcccaagcgcttaagttgtgatgaaatagttattgttgtgatcagtagactatataggaaaggtgcagaccttcttgtggaagtcattccagatgtgtgtcgtctatttccaaaggttcgctttattattgggggtgatggaccaaaacgtgtgcgacttgaagagatgagggagaagttttcccttcaggatagagttgagatgttaggagctgtgcctcatgctcagttcccttacagaggcattttgcatagccattctggaagcagcaagctgtggactgttgacagtaagcaccagagttggaggtgtcccagaggttcttcctgatgacatgatagtacttgcagaaccagctccag

SEQ ID NO: 10147 - DNA, 564 bp, Setaria italica
  Peptide Sequence Number=SeqID_76121
ctgttaagcctggtattgctgcgagtgacgacgccgcgtggccgcaacgccgatgcgtgcgagcttcgccgtagctctccagctgccgcgcttcgctcggcccgccattggatttgtgcaggagccgcgctcgcagcggtgccaccaccgttgctcagccacactgctacgctcgctggattggagaagccgagagagaaagatgagaagatcagaagaagagaaggggaagagaagctgcctcctttccctctcaacgtcatgctcaagctcaccggcggagctcgggagtgttgactggtgacccgagccaccacctcctagcaggaagcgcatactttgctagctccgggatatgagggaaaaataagcaatggtgaaaagaggaagaaacgagtaggatgagagaaacgaggagaggaggtggtctgtgcgagataagctctagcactccgcaacgtcagttggaaagaaatgggcaagcgctttgaactcgctcagaacataatctctatctctacctaatattaaagcaagtaagacttttgaccaaaaaaaaaaaaa

SEQ ID NO: 10148 - DNA, 336 bp, Setaria italica
  Peptide Sequence Number=SeqID_76122
ttaatgaaacttcacaagcgcgacaggatttggcagaaggtagtcattgtgtttcaaaaggaagttctcaccagtggatgaaatgagaagccattgttggacttgttgcttgtgaggttcgctttattgtcggaggtgatggtccaaaacgtgtgcgacttggagagatgagggagaagttctcccttcaggatagagttgaaatgttaggagctgtacctcatgctcaattcacttacggaggcattttgcatcgccattttagaagcagctagctgtggactgttgacagtaagcgctagcgtcgaggtgtcccagaggttcttccagatgaca

SEQ ID NO: 10149 - DNA, 666 bp, Setaria italica
  Peptide Sequence Number=SeqID_76123
atggagaccattcctgatgcagaatacactgcctacgttattcttgacatttccagttgtaagaaccattattatacgtgagaggatttctgtcatgcacggacatcaggctttttcaacattgtgtcatgaagcgttgatgaatgctcggatgatgggatattgaccaggcaatatgtgtttctcatacaagcaaagagaatactgtcttgaggtctgggatatctccggagaaagttttttatggttcctaatgccgtggatactgcaatgtttactccctccccagagcgcctaggctgtgatgaaatagttattgttgtgatcagtaggttagtgtaccgaaaaggtgcagaccttcttgtggaagtaattccagaagtgtgtcgtctatttccaaaggttcgctttattgtcggaggtgatggtccaaaacgtgtgcgacttggagagatgagggagaagttctcccttcaggatagagttgaaatgttaggagctgtacctcatgctcaagtacgttcacttacggaggcattttgcatcgccattttagaagcagctagctgtggactgttgacagtaagcgctagcgtcgaggtgtcccagaggttcttccagatgacatgatagtacttgcagaatcaacaccagaagatatggggt

SEQ ID NO: 10150 - DNA, 1179 bp, Setaria italica
  Peptide Sequence Number=SeqID_76124
tgctagaacaatgggtttactcttgcagatattgatcaggctatatgtgtttctcatacaagcaaagagaatactgtcttgaggtctgggatatctcccgagaaggttttcatggttcctaatgctgttgatacagcaatgtttactccctcgcccaagcgcttaagttgtgatgaaatagttattgttgtgatcagtagactagtatataggaaaggtgcagaccttcttgtggaagtcattccagatgtgtgtcgtctatttccaaaggttcgctttattattgggggtgatggaccaaaacgtgtgcgacttgaagagatgagggagaagttttcccttcaggatagagttgagatgttaggagctgtgcctcatgctcaggtgcgatcagttctgatatctggtcatatttttttaaacagttcccttacagaggcattttgcatagccattctggaagcagcaagctgtggactgttgacagtaagcaccagagttggaggtgtcccagaggttcttcctgatgacatgatagtacttgcagaaccagctccagaagatatggtaagagcagtcaagaaagctatcgacatgctacctggcatagatccccaagttatgcatcttcggatgaaaaaactttatagttgggatgatgtggccaaaagaacagagattgtttatgatcgtgcaatgcagtcatcaacaacaaatttgctagaccgccttccccgatatcttacctgtggatcttgggctgggaaactgttttgcatagttatgatcatcaattacctactatggcgccttctagaattcctacagcctgctgaaggtatcgaagaagtcccagatatacgtccactgcactctcagttggattcaagagatgattcatgtgaagctcaagaaaagcagatttagatttttgccagatttacagacagttggtggttactgacatggtttcctctccgtgtcagcattcattgtggatttcgggtccatgtacaggtcctccttttctttcgaagttagtggatggtccaggtccttatctcttgctgatcaactcacaaagtgctcaccgtcactgaaacaagggtctcactcttttggcatcagattgccgtgtttttgccatctctcagtttcgatggtgactggttccaagcg

SEQ ID NO: 10151 - DNA, 911 bp, Setaria italica
  Peptide Sequence Number=SeqID_76125
cttatttgttccttggtgctggggaggctggaactggcatagcagaactcattgctcttcagatttcaaaacaggtgaaggtaaaaaatttatggtagatgtcaggtccatcaacagccttgatacatgtccaagtcatgagctttctcaagacaataatcttaatgaaacttcacaagcgcgacaggatttggcagaaggtagtcattgtctttcaaaaggaagttctcaccagtggtgaaatgagaagccattgttggacttgttgcttgtgagactgttcgccgcccgctcccactgaattgtgctaggcaggccggccgctcgaccggccgtgctctgttaagcctggtattgctgcgagtgacgacgccgcgtggccgcaacgccgacgcgtgcgagcttcgccgtagctctccagctgccgcgcttcgctcggcccgccattggatttgtgtaggagccgcgctcgcagcggtgccaccaccgttgctcagccacactgctacgctcgctggattggagaagccgagagagaaagatgagaagatcagaagaagagaaggggaagagaagctgcctcctttccctctcaacgtcatgctcaagctcaccggcggagctcgggagctcgggagtgttgactggtgacccgagccaccacctcctagcaggaagcgcatgctttgctagctccgggatatgagggaaaaataagcaatggtgaaaagaggaagaaacgagtaggatgagagaaacgaggagaggaggtggtctgtgcgagataagctctagcactacgcaacgtcagttggaaagaaatgggcaagcgctttgaactcgctcagaacataatctctatctctacctaatattaaagcaagtaagacttttgaccaaaaaaaaaaaaa

SEQ ID NO: 10152 - DNA, 2787 bp, Setaria italica
  Peptide Sequence Number=SeqID_76126
ggggaccggagggaggaggagaggaggcctgtgggcgtgccgcccgcccgcccgcccgcgctcgagttcctccgcgccttcgagcagcaccgccgcagggcctcctcatcgatcccgtgcgaagcgtggagctcctcctgtgattctatcgatctcccgcgtggtgcaagctttcccgccaggctccccgccaatctccaatccatatctcgcctcacttctcccttccaatctcatcgcgagtggccggtggctatggtaggtctctgcggcgttgccggcgtaggccgcacagcagcgccgttcgatggcggggcctagagaagaatggccggcggcccctgcaaacggacggcttcttcaccgagaggtctaactcacgcgtcaccacatcagggattcgtgaacctgaaatcttcaccatgacagcctccgccaagtgcagcatgttggcagccacggaggtcaatcctcttccacaaatcctaggaggcaaggtgccagtaaaagggatgatggaaggcttcagaagatggaaggcgctatgtaggaaataagaagatgaaaatttgagtggcagtggattttttaagtttgtcaggttgcatattttggtcatttatcgctttaatttgggtgagaaactgcttaatgatgagttctacattggactgcggcaaaaacgtgcaactggcaaggaatatcatgagcttatagaagaattcatgagcgctgtggtgcaaatctacggtgagaaagtcctcattcagtttgaggactttgccaatcataatgattttgatctgcttgaaaaatatagcaagagccatcttgttttcaatgatgatatccagggcacagcatcagtggtccttgcaagtttgttagcatcactcaaggtggttggtgggaccctagcagagcacacgtatttgttccttggtgctggggaggctggaactggcatagcagaactcattgctcttcagatttcaaaacaggtgaaggtaaaaaattttatggtagatgtcaggtccatcaacagccttgatacatgtccaagtcatgagctttctcaagacaataatcttaatgaaacttcacaagcgcgacaggatttggcagaaggtagtcattgtgtttcaaaaggaagttctcaccagtggatgaaatgagaagccattgttggacttgttgcttgtgaggttgttgtcatgacacacgcatatggaaccgatctggagtacgttatgtcacaaatggtttgaaggtttattatgtaccatggagaccattcctgatgcagaatacactgcctacgttattcttgacatttccagttgtaagaaccattattatacgtgagaggatttctgtcatgcacggacatcaggctttttcaacattgtgtcatgaagcgttgatgaatgctcggatgatggggtacaaagttgtcttcacagatcactcactttatggttttgctgatgctggaagcattcacatccagtttactcttccagatattgaccaggcaatatgtgtttctcatacaagcaaagagaatactgtcttgaggtctgggatatctccggagaaagtttttatggttcctaatgccgtggatactgcaatgtttactccctccccagagcgcctaggctgtgatgaaatagttattgttgtgatcagtaggttagtgtaccgaaaaggtgcagaccttcttgtggaagtaattccagaagtgtgtcgtctatttccaaaggttcgctttattgtcggaggtgatggtccaaaacgtgtgcgacttggagagatgagggagaagttctcccttcaggatagagttgaaatgttaggagctgtacctcatgctcaattcacttacggaggcattttgcatcgccattttagaagcagctagctgtggactgttgacagtaagcgctagcgtcgaggtgtcccagaggttcttccagatgacatgatagtacttgcagaatcaacaccagaagatatggtcagagctgttaagaaagctattgacatgctacctggcataaatcctcaatttatgcatcttcagatgaaaaactttatagttgggatgatttggccaaaagaacagagattgcttatgatcgtgcagtgcaatccttgacaacaaatttgctagaccgccttccccggttgcagtcatggtatgttctgcacttacaggacccttatgatgtgatcctactcagaaatttctttcaatgtttctgaaatagatggacacccctcattttgggtatttttttttccatgttagagccttagaggcaggcatatctaaatgtatagtttggttggcgtctttgacttttagttaactacttaactctatcagcaaagcatgagcacgagttggaactgtgtctgaagttcaatgcagcattgtcaaatcagttcaccagttgtgcattgcagagtgttgaaatgaccaacatcatgtaggggtgcaatttctcatttacaggtaagtcctatccaccaattgcaacagggaactaatgctaaactagctatcggcggatatgatctttgcctgtaattgtctagcaagctttccatatttttggccactgaagttaaatagaaagccaaggattttaattgctgatatcttcaatgacaagatattgcagtgctattaagtattatcgtatatgtagaatcctatgttgtcacctaatagaagacccgacaaaaaaaaaagacagaaattcagtcgtgtaaacatgc

SEQ ID NO: 10153 - DNA, 1695 bp, Setaria italica
  Peptide Sequence Number=SeqID_76127
tgccacgctacccgctcccccggaactcgccgccaccatgctgtccgcgcgcaccgccgtcgcctccgccgcttccccggcttcccccgtggaaggcggtaggtggaagcaagggcgggagctgcgacggatgcaggacctacagggagtcggtgcggaggcgggccgcgacggtgcgggtgcacgccgcggagcagaggcgggtgcaggccgtcgcggtaggcaccgccgcggagacgcaggaaggggtgggcggcggccgatggcggcgtcgtggacccctacgccgaggacgaggagctgcccgtcatgccctgggcatattccgtcgcgagtggttacacccttttgaggggatccacatcacaacaagggtcttgctttcacggagaaggaggcgggatgcacactacttgcgtggtcttcttcctccggctgttgtgtctcaggaagtccaaattaagaagttcatgcacaacctgcgacagtaccagcttcctttgcagcgctatatggccatgatggaccttcaggagagaaatgagaggcttttctacaggcttttaattgataatgtggaggagctgctcccttttgtttacacaccgactgttggcgaggcctgccagaagtatgggtccatctttagacaaccgcagggtctgtatgtcagcctgagagacaaggggagggtcctagaggttctaaggaactggcctcagagggatattcaagttatttgtgtcactgatggtgggcgaatcttgggacttggagatttgggtgctcagggaatgggaattcctgtaggcaaacttgctctctacactgcccttggaggagttcgcccatcagcttgtttgcccattacaattgatgttggcacgaacaatgagaaactgcttaatgatgagttctacattggactgcggcaaaaacgtgcaactggcaaggaatatcatgagcttatagaagaattcatgagcgctgtggtgcaaatctacggtgagaaagtcctcattcagtttgaggactttgccaatcataatgattttgatctgcttgaaaaatatagcaagagccatcttgttttcaatgatgatatccagggcacagcaccagtggtccttgcaggtttgttagcatcactcaaggtggttggtgggaccctagcagagcacacttatttgttccttggtgctggggaggctggaactggcatagcagaactcattgctcttcagatttcaaaacaggtgaaggtaaaaaaatttatggtagatgtcaggtccatcaacagccttgatacatgtccaagtcatgagctttctcaagacaataatcttaatgaaacttcacaagcgcgacaggatttggcagaaggtagtcattgtctttcaaaaggaagttctcaccagtggtgaaatgagaagccattgttggacttgttgcttgtgaggtatgccagccattctggatgtcgcaattcatattgtatttaggctacgaaagaatctaaagctgtttgatggtgtagttgtttttccttttcaaaaactcacgttgtgtcaattcctctccattttcagtgcattatttttcatgtgttattttggacaaagttagactcttcaaattctgagtaccataactgaatatccattacaaattggtctttctattagacaaaaaaaa

SEQ ID NO: 10154 - DNA, 482 bp, Setaria italica
  Peptide Sequence Number=SeqID_76128
ctcgtctgcgcatagctagggtttgcgattgcagggctcgtggcctctctcaagcgcagccatcatgccgaagcaaatccatgagatcaaggatttccttctgacagcaaggaggaaggatgcccgctccgtgaggatcaagaggagcaaggatgccgtcaagttcaaggttcgctgctccaagtacctctacacactgtgtgtgttcgacactgagaaggccaacaagctgaagcagtctctccctcctggcttgagcgtgcaggaggtttaagccttggaaatcgtgactatggttccgacgctggttgcttcaaagatttgccaatctaccttcgatttagcttctgtaggtgacttctgagtgttttaaatgaaatgctgtgatcgagacaaatgttatgtgaaagtaatatgatggctggtgagcctccatttgatgttccaaaggattctcatgttattcgacaaaaaaaaaaaaa

SEQ ID NO: 10155 - DNA, 856 bp, Setaria italica
  Peptide Sequence Number=SeqID_76129
gtggtggatgggggagaaagtgaggtctagcttgcttgcagaaacatttacagagtattcaagaacaaaggaggcactatttgttgccagagctgtttgggaggaattgaagttatctaaaagggtcagattggcggctgtgacaccgaaataggcatttgcaggagcatggtttccataagtgctaggatataagtagagacggacaaacatgcgaccaggaccaacgggaaaggaatatgtgtaattagaagtgaagatgcgagcagtcatgtaaggcgtagtcgagggtagtgcaggatcttggtatgatgcagtggctgcagttcctttcagtaaaggagcaaatttggaaccagtgtcactgtcccaagtccgttcattagcatcaggggccgttggacttgatgctccacaatctagccttatctggccagagccgatggtggtgttgtcagccgccacagcaagtgacaagatgcatagcagtgtgaggcatctgattaggtgtgccattgtagatttatagatgttgtgtctcaaggaaagatgttcatggatccctttacacctgtttgctataagctggctctaggaacagctcgatcatagcagaacattggacctttctctttgagattttgggcaagaaaaaatcaggaaaattggaggtggttgggacagcactcttgctgtcgttgtttactgaacaaggcagatagagatggctacaagctggacctggccaggatgcaggaggggagattttcttgcgagcttgcgcggggaggagccaggagcggcggccgctgcgcgtttggtgggggaggcgaagaggaattgagcgtgcgtttcg

SEQ ID NO: 10156 - DNA, 557 bp, Setaria italica
  Peptide Sequence Number=SeqID_76130
aaatcatgcttacagtcgtaaaggaattcctgtcatatccacgggatccttcacgttggacacagctttaggaattggtggaacttccaaagggaaggttgttgaaatttatggaccagaggcttcaggaaaacaactttagcacttcatgtcatagctgaagctcagaagactggaggaaactgtgcttttattgatgctgagcatgctctggatccagccttagcagaatctataggtgtgaaggcagagcacatgctactgtctcaacctgactgtggtgaacaggctcttggcctcgctgacatcctaattcgaagtggctctattgatgttgtggttgtggacagtgtagcagctcttgtccccaaaactgagctggatggtgagatgggagatgcacatgttgcacttcaagcaaggcttatgagtcaagcgcttcgcaagttgagccattctctgtctcgctccaggacaatcctgttatttattaatcaggtaagatcaaagctaagcacatttagtgggtttggagtaccagcagaagtaacttgtgg

SEQ ID NO: 10157 - DNA, 274 bp, Setaria italica
  Peptide Sequence Number=SeqID_76131
gcaccgtagaggaccaggcgacgacatgcgccgccacgcagccatcctcggcaccggcggcgtaaagacccgctccggtggggacaccggaggcccattctcgccggattcacgctgctccacggcaccccctcggcctccgttaataggccggacgccgaggccgccgcagtccgccatcgcgagctcagcactccaagaatcggacttgtgcgcgacgggcactcccataaaagcaccagaaccgctaaaaaaggctactggaaacccagaa

SEQ ID NO: 10158 - DNA, 893 bp, Setaria italica
  Peptide Sequence Number=SeqID_76132
tttttttttttttgttttattgaaaaagtacatgaaatgtattcatttaatattagagcaatagagtcagcaacaaaattaatcatccccatacatctagatattacatattcccttaaaacttacactctgcgttctaattctgtttaaaaaactttgcgcaagcagacagacacttctcttcaattctcaatctttgctcttcgcctatgtttattgacatgtttctatgatcctgcaaaataaataaattaattaactcaataaaagttctagaaaatacaacaccacgcatatttctgtgatgaatttagctagcgatagaagtgaaggttattttaatgagattgcaatattatactcagaagtccttacttattctacacgcttattctacgcacatccacacaagcttagaagttgcaatattataccacaacacaaatataaccaattgtttttctaccacattcacaaatagccaagttcggataaaatcacctatccaaatgacaaagtggcagattccaaggatcaatccacttagcgcaaacagaggcaaaagagaataagttttaatgctagttagcacatatgcagataccaacctcatcgaatagcttttcaaactgtagattgacactttcagcatgtgcacacacatcagtacatcacaggaacctatatgcaagtcgcagttactttcacatccatgtcattgtagcaatggatcagacagttagaacaaaattatattttctcaaattatcataatgagagaaaagtttgacagggtaatgcagacttcataggaagtagtttagaccaataggaccacaaggacaaacccaaatttgttggtctccttagccattttcatttcttacttgtta

SEQ ID NO: 10159 - DNA, 660 bp, Setaria italica
  Peptide Sequence Number=SeqID_76133
tagccaattttcatttcttacttgttataccaattctcaataacgtaagctacctgctaagtctgtagaacatgactttgcaaaagctacctttcacctcaatagtttctttcgctgccattggaccctatcttggaatgtaaaagatttcacatttgatgttctaataaaccacagtagctcagagctagcagtaatatagctagtaattgtgtatatgcagatctcacacccctagagaacaagtgaattgtcaaacaaagatgcagcatgctgtaacaaaaaaaaaggattggtaacatgaggtagtaaacaagatctatggcaactactttgaagatcataatcagtaaattggaactaaattattgatcacatcatagtatttaacatgtaacataaaactagaaacacaagacttgtgggcagctgtagttgtatctatatcatctttttcaaggatatacatataggtgcatatatgatttgtataattgacataagcctttataaccaggtagcaggcgtggccttgacctggttaagttttcgacattcctatagtggttagcttgctagatgaaacatccaaaacacgaaggttctgcaaggtagaaaaatcttccatctttggcattccattccattatggctaaggtg

SEQ ID NO: 10160 - DNA, 521 bp, Setaria italica
  Peptide Sequence Number=SeqID_76134
ctagttctctttttagttttttttttttatttggacagacacctcccttgagcacagccaaacttcccgtacaaaataagttctgacatgattctaaacaacaccgatcaactctcggttcttgcttccctaatcgataatagcatggtaaccagactactaagatcgaagaaactgcttgaagatttacacagacggctagagcaaaagctgcagcatgttcagaggcaccagagttcagcactcagctgctgctctcttcctgctcgctgctcgtagcgaggacgggctcaggtcggagctcctcagcacgcgcagacgcctcgcggtgccgatgaacatctccccacggcacgtctccgactagcatctggtcgccctcctcgtcctcgtagaccagtgtgtactcgccgctgccgttcaagacccctgtgatcacctcctgctccctcctgatgtttgagcggcgaggaggccgcggaagaggtggtcgacggcggcggagagcgtgtcgtagccgg

SEQ ID NO: 10161 - DNA, 306 bp, Setaria italica
  misc_feature (220)..(306): n is a, c, g, or t
  Peptide Sequence Number=SeqID_76135
ttaccgtaacttactaagttagttgtaagttaagttcctaattcttccagcatgcatgtgtgtgttttgctactataccttgtgctcatgtatgtgtgtatgtgtgtgtgttgatcgttaacaaatgaaatcatgtatgcatctctgtatgtgctcatgtgtctttgtaatggtcagtccagagtgatgaatacaataaaaactggtttagacttttttnnnnnnnnnnnnnnnnnnnnnnnnnnnnnnnnnnnnnnnnnnnnnnnnnnnnnnnnnnnnnnnnnnnnnnnnnnnnnnnnnnnnnnn

SEQ ID NO: 10162 - DNA, 1360 bp, Setaria italica
  misc_feature (1)..(88): n is a, c, g, or t
  Peptide Sequence Number=SeqID_76136
nnnnnnnnnnnnnnnnnnnnnnnnnnnnnnnnnnnnnnnnnnnnnnnnnnnnnnnnnnnnnnnnnnnnnnnnnnnnnnnnnnnnnnnnccttagcaacaagaaaatgcacatcaatttgagggcaaggagctcatgacgattatgaagggatagttacaggagcctacacttaacacggaaacaaacagattaacaagcttgcagccattggtaccattttacacttgcgacagaaaactgggtgtcaacgcacagataaatcctgttatttcaggctagcttggcaaactacaaagaaagaatcataggttaaaagccactgatgtcccctaaaccaagtcatgccacttctcttattcacatcctttgatgattggtgaaggctatcaactaacatagagcttttctggtccagatatgtttttcatcagcatttatctgccagtactccatgtgacctctgttgcatcataaacccttagctaacagcctcaccaatcatccatgaagcaagcattattcccttaaccaattatctccttaagttaatcagcaggtggcacatattacacatccccccaactaatttgggataatctagactacggattcgtaaaaagtactgatccagatgctaaagagatcgccagctagctgaaccaaggtagacaactacggaacatggaataaatataagaaatagttgcaatgacagcaagggcagcactgaaggatcagactatgtaggaatttcttcagctgcgcgatatacaccacctctatggaatacctacactgagcacattgataactaaaacatccttctggtattgtcatactccctcaagaatggcaggtgctgtaaatttcccaatatggcgtccgttgcatcaacatccaaatcaaacccaatgtcctcatccccaccaaaattcagcactgtggcgccatcagttggcttcgccacctcatttatgttgatctctctagtacccactgtctgcccgctactgctacctgcatttccattccatgaatccgacccaagcatagatggctcaatgccactttccaccccactggaagcgtgcttcttgagcacggcaccaaccttcttgcgggctgttgtcttcttcatcctacctctagatggccctgctgcactgccacggacaccactcttatttgccagctgcacatttgctggtgttgaattggcattaataggcctgccattattctcaacaatttgtacatcaacgttggcagtccctgcagatgctggcttcggaggagattgaaaattcccgcgattaacatgggaagtccctgcagctgctggtaggactagtctagaca

SEQ ID NO: 10163 - DNA, 270 bp, Setaria italica
  Peptide Sequence Number=SeqID_76137
atccttttccaaatcatacgtaccatccaatgcatgattaattgaattatagtccataaatgtccttgatgccctattttgggatggctgcatcaaaataatggtgtgtctcccagcctgtatagagcaatcaatcagatccacatcaacatgtgccagtacttccagagtgcaaagcattggatatacatggatgctaagaaattaccgacatactcatgccccatgcccactagccttagacagtttcctaatagagaaattattttc

SEQ ID NO: 10164 - DNA, 354 bp, Setaria italica
  Peptide Sequence Number=SeqID_76138
gtcgctgatatcataggttatgtttgggaccattgggttgatatccctaattttcctttcataaagcccacagattccatccaatgcatgattaattgaattatagtccataaatgtccttgatgccctattttgggatggctgcatcaaaataatggtgtgtctcccagccatggaggtcgcgggcgggcgggagggagctgggggaagcgggcgagagtcgaggaaggaggcggcgattgggcgaagccggcggcgaggtcgcgggcgggatgggggaagcggcgagagccgaggaggaggcggcgattggggtagggaggtaggagtcgaattaggtttgcgcgttcctgc

SEQ ID NO: 10165 - DNA, 1645 bp, Setaria italica
  Peptide Sequence Number=SeqID_76139
gaacgaagaggttcagccgagcacgaattcgaccactaagttcagtgatgtcaagggagttgacgaggctaaagctgaacttgaggaaattgttcactacctacgagatcccaagcgttttacacgccttggtggaaagcttcctaaaggtgttttgctggtagggccacctggaacgggaaaaaccatgttggcgagggctatagctggggaagctggtgttcctttcttctcatgcagtggtagtgaattcgaggagatgtttgtgggtgttggggctcgaagagtgagggacctgttcaatgcagctaagaagcgatctccatgtataattttcattgatgaaatcgacgcgattggtgggagcagaaatcccaaggatcaacagtatatgaagatgacattgaatcagctgcttgttgagctggatggctttaagcagaatgacgggataattgtaattgcagcaactaacttccctcagtcactagataaagcacttgtcaggcctgggcgctttgaccgtcatattgtggttcctaatccagatgttgagggccggcggcagatcctggaaactcatatgtcaaaggtcttaaaagcagatgatgtggatctgatgatcattgcaaggggaacacctggattctcaggtgcagaccttgcgaacttggtcaatgtagctgctctgaaggctgctatggatggggcaaaagctgtcacaatgcaggaccttgaatttgccaaggacaggatcatgatgggcagcgagcgcaaatcagcagtgatatctcaagagtgcaggaaaatgactgcgtatcatgagggtgggcatgcccttgttgctattcacacagatggtgctaaccctgttcacaaggctacaatagttccaaggggaatggctcttggcatggttacacagctgccggagaaggatcagcatagtgtttcgagaaagcagatgctggcaagattggatgtgtgcatgggaggaagggtggccgaggagcttatatttggggaaagcgaggtaacctctggtgcctcatctgacctaaggcaagcgactcggctggcaagagccatggtcacgaagtatggtatgagtgagcgggtgggtcttgtttcctacagtgatgacaatggtagtatgagtgcccaaacaagaggcatgattgatagggaggtgaaggatattctggagagggcatacaacaatgcaaagacgattttgacagaacatgataaggagcttcatgcgctagcaaacgcccttcttgagcatgaaacgctctctggagcccagataaagaaactattagcacaggtaaagaatagtgacaataagcagaagaaggttgctaaggtgccgaagaagacgcctgtggccccaccttccccccagtcaccggccgcagctgctgctgctgcagcagcggcggcagcacaagaagcagctgccaaagccaagggagttgcgggtacagcggctgcagcacaagaagctgcagtgaacgcggagggagttgcgggtattgggtcatagtggtactgagaggagagcacggctggcattttgtagactgaccaaatcagcaggttgtctggcataatgtgatgggtgattagcatgaggaaggca

SEQ ID NO: 10166 - DNA, 427 bp, Setaria italica
  Peptide Sequence Number=SeqID_76140
gcagcgcgcgagagagacagcgagaggatggcgatgccgtatgcctctctttccccggcaggcgccgaccaccgctcgcccaccgccaccgcttccctcctccccttctgccgctccaccccgctctcggtctcggcggctagcggcggcggcggtctggcagagggcgcgcagatgagcgcgaggtgggcggcgaggccggtgccgtttacgccggcgcagtacgaggagctcgagcagcaggcgctcatatacaagtacctggtcgccggcgtgcccgtcccgccggatctcgtgctccccatccgccgcggcctcgactccctcgccacccgcttctacggccacccccacacttgggtacggatcgtacttcggcaagaagctggatccggagccgggccgttgccggcgtacagacggcaag

SEQ ID NO: 10167 - DNA, 244 bp, Setaria italica
  Peptide Sequence Number=SeqID_76141
aataggcattgtatatccatgtccattctcaggttgtactagtacattttcttgatgtcggtgcctccttggccttgttctttctaggtatcaactatgatgctttttattttgcagatgattcctgttgctgcaaatgatgttgctttttcactacatgcggttgcattgacatccttcaccgttttccaagtatttatatatgagcgaggaatccagaaagtttccaaagtttgcatatcaa

SEQ ID NO: 10168 - DNA, 469 bp, Setaria italica
  Peptide Sequence Number=SeqID_76142
ggtatgacagcaatcagtacatctcaggccatcatgaacttcaggcggaagagcacaattggttggagcattggcaacattttacttgacctcacgggaggggtgctgaatttttggtcagatgggtgtgcaatctatagatcaacatacgatggtaaatttctacggaaatattgggaaaaccctgctttcattggagacggttttcttcgatgttctattcataattcagcactatgtgctgtaccctgccaaaaaggatgagaatgcacacgatttccctgtgcttcctatcgatgtaaaacatgttgcggcccaatagaagcgccaagtggaggagattttcttgggccgaaaggacacactacggtgggccacgtaatctgctattaatcagtcagtgatgaagatgtgcaatgtgtatgaaggatcctcctcatagaaagaagacacttgtttcaagaagaaa

SEQ ID NO: 10169 - DNA, 1255 bp, Setaria italica
  Peptide Sequence Number=SeqID_76143
tcgtctattaacttttctaagtaattaggtctatttgttattattcctattgttcctatttcttctaggtttgttacttagttactatttttctttgtattgttcggttagcgagagggaaacgaggcgcaaccggcagagatcggccgtcgcagggcacgacttgaccaaggggaagccaagaaccggccttggctgggttgggaggggattgtgcaccggcggcgcggccatgtcgtcgtcgtggaactcggtggggctggaggtgctgtaccaggtgctgggctgggtcgccttcttcgcctggtccttcagcttctacccgcaggccctccttaactacaagcgcaagagtgttgtgggtctgaattttgattttctggtgttgaacttgacaaagcactcgtcttacctcatatacaatgcggctatgttcttcagcccgttcatccagagacagtaccatgacaaatatagtgataaagagatgattcctgttgctgcaaatgatgttgctttttcactacatgcggttgcattgacatccttcaccgttttccaagtatttatatatgagcgaggaatccagaaagtttccaaagtttgcatatcaattactgctattgtctggactgctgctattgtttgcctcattattgcttggccaaaaagtgactggctttggcttattgacgtgttcaattctatacaagttggtatgacagcaatcaagtacattcctcaggccatcatgaacttcaggcggaagagcacaattggttggagcattggcaacattttacttgacctcacgggaggggtgctgaattttggtcagatgggtgtgcaatctatagatcaacatacgatggtaaatttctacggaaatattgggaaaaccctgctttcattggagacggttttcttcgatgttctattcataattcagcactatgtgctgtaccctgccaaaaaggatgagaatggtaaggcaatcatttctgaaagggtagcccctcttatcaggccgtctgacaagcctgaagaagataatgtatgatttagcaatatatctattgcgtcgcatcatatgctgttcaaacggaagataactgatgcatttttattgtatatcgcaaactaacttttgtatatatttgcttacacacatggtgcctgtaaaagttttacagactttctctccatacttttgtgtaaatggttggttgtttgaacaaaaaaaaaaaaaaaaaaa

SEQ ID NO: 10170 - DNA, 1120 bp, Setaria italica
  Peptide Sequence Number=SeqID_76144
gaagccccgcctgacgtttgcggtcccgggccggcccctgtccttcgccggcgaggtggccgccgccatccgccacctgcgcgacgccgaccccgccctcgccgccgtcatcgacgcccacgagccccccgtgttccagtgcccgcaccgcccgttccactccctcgtccgatccatcctctaccagcagctcgccttcaaggccgccgcctccgtctactcccggttcctctcgctcctcggcggcgaggccagcgtgacccccgacgccgtcctcgcgctcaccccgcagcagctccgccagatcggggtctccccgcgcaaggcgtcctacctacacgacctcgcccgcaagtatgtctccgggatcctctccgattccgccatcatcaacatggacgaccgctccctcgccgccatgctcaccatggtcaagggcatcggcgcctggagcgtccacatgttcatgatcttctccctcgcgcgacccgatgtgctcccatccgccgacctcggcgtgcgcaagggcgtgcagatgctccacgggctcgaagacgtgcctcggccgtcgcagatggacaagctgtgcgagcggtggcgcccctaccgctccgtcggggcgtggtatatgtggcggctcatcgagtccaaggtgccgcagccggcgccggccatccctgtgggaccacttgcactcccttcgcctgacggccagattatgctgcagcagcagcaacaacagcaacagagtgtcatccaaatgatcgatccccttcagatgctcccaggaatggggtaaattcggtatcacttctgcctattagttctgcatcttagatggatggttgctgtgccagtcagttggttgctctgcgcattattgttctgtaatggccagagtgtagcattggaaatgagtaccctggtctgaacttgttaaattatcggtgttgtctgtgttgtttatcctcgtcaagagtctgtgaagatcgtggttggccattcttcacattgtaaaattcgttagcggtgttttagaaccccctggaattgtgccatccttgtagtttacctgtgatgaaatgaaatgattaagagcatgctaagcacacaaaaaaaa

SEQ ID NO: 10171 - DNA, 645 bp, Setaria italica
  Peptide Sequence Number=SeqID_76145
aggggggcaactgctatcgacagcatcctcaagaaggcatagaagccggtgagcaggatctcgccgaggaagcacttgcccaagacgagggcgaggctgttgctgcccacgctccggcggctcctggccttgtcgttgacgtggcggctccaggcctcggcgaacttctgcgaggcgtgctctgctgtgtcatcgccggcgatgagcgggatgtcgtcgaggtccagcgccttggagcggccgaggcggagcagagggttcagccacgagaaggcaagctggcggaacaggccggcacggtacagctccgaggtgggcacggccttgccatccttgcctatgagcggctccgacaagctgccgttgccatcatcggaggcgtcacggcactgcccgtggctccggcgcagcaccgagccgagcgcgcagagcagcaagagaaggttcacaggccacgcgatcacctccatggcgtcgagcgcgccgccgctgatgagcatctccgcattgtatgcagtgacgagcagcgagaagagcacccaccagagcacggccacagccctgacggcctgtcgggctggacgtgcagcgacgccgccagcgcgacccagaccaagctcctgacgaggtaaggagccgccgccg

SEQ ID NO: 10172 - DNA, 1927 bp, Setaria italica
  misc_feature (1)..(73): n is a, c, g, or t
  misc_feature (1877)..(1877): n is a, c, g, or t
  Peptide Sequence Number=SeqID_76146
nnnnnnnnnnnnnnnnnnnnnnnnnnnnnnnnnnnnnnnnnnnnnnnnnnnnnnnnnnnnnnnnnnnnnnnnngtgataacaatctaccaatgtaatcaaacgaccggagtaacacaaacaagcaggttacagatcgacaaggacagtgcagagagggaacaagtcaattcccgaaccaagacccttcttccctgacagcccgggatccaatccaagggtcacaactggtttggttcgctcttgactcctcctctcacacatttttctcctctctcctacacaatagtcttcaatctctaacagagacgacgaaaccattacgcgcaaactatttaggtaatctttcatcgtattattacaaaaataagaagcataccgatcttagctaaccttcacagttctggtttctgagaaagggaacagaccgagagcagcgacaactgcatgaccaaaatgcccgggttgctatctgtgtgattgattcagccggtgcaagtgagagcttgacaagaccctttctagtagttgtagacagcactagcttcccaaaatgatcaaaatgcccccacactgtttgcctggtcgggggtatttttgtcattttgagaggcacttggcgggaaagagaggaattttgaattttgatgtgttagtttcgggctcttgtcaaatcctcccttgcactggcactaatagaaaacctgatgttagcaaaaacaacccgacttggaaggcattttggtctgtgtccatccgctctcctcggttccccacccagccattcttgcaactagtcggagccccccacagctgccagctcagcccggctggctccagtgccctttagcgcggttgtgatctggtggatggcattgcagacatggctgttgattgcggtgatgcttgagaggttcagcttggctgagggcacagcgctggctagcacctgcatgccaacggtgaggaggcagccgctggcaggctcatctgtgttacctgggctgctttctccattgccagagcttgtgctggttgctgcaggagaagggttggttgctgggaagatggcaaagcccaggggtaggagaggaatgtaggaagggtcctcgccgctcatcgtcacttggatggcgtccacatcaacggttgcaaacaccacgagactcccgccatcagggtgggtgctgctctcctgcagcaggagctccacattctgtgatgagttgcttgcagcgttaattcgaagaagagagatgcaatttctagggtgtgatccatttgcaatgtgtgccacttcatgaagtgagcccccgtttgacaaaatctcaagctgacagcgttgttgttcatcggcaagaagctcaaagacctgctgatggctgaaagaaagccaacttgtggagacagcagtcaggatgacaccgctgggctgccctggatctgtgttcttccgagtagtgaccctgatcgtgtcctctgtagactccgagagtgccgtccaagactggctcccagaagcactgatgttggcacagaaagtggtgatcatccgttgcgacagcttcatcatatttgttcttgcctctggggtgcgaatcacggtctggtcggcaatgttgccggcgagctcactggcgaggcgctcacactggcgctggagcagggagacccaacgtgtggcaccaaaggcagtaccattggctacatagtccttgaaaacctggtgcagcggcttctcctccccaaccatctccatgtgctcgacccacaccacccttgagtagccattgggcatgtcctggatgatgcagccagaggggcgacgctggcacttgaccactgatgaggtctgtagtgcctccagctggaacccctntgcgggaatcaacacagaccaggtgccctcatcaccattatgcacgcagt

SEQ ID NO: 10173 - DNA, 1001 bp, Setaria italica
  Peptide Sequence Number=SeqID_76147
cgcctcacttcacttgccgggctgtctccacgccaccgatcccccaccatccccctttttggccttttccctcctctcctctcgccgccacctgctcttgttctatcggtctatccctccgcgtcgtcgggcatctcacgaccgccacgccaagtcaaaaaagaatcgagtagccagtaggtggtagttgtgcacgacagcacgagggatggtggccgtgcctaccgcggcgatggcgagctcgcttctcctgcggccgcgcgcctccttccggcggacgctcccgccgccacctccttccagccgccgggcattgccggccacgctgctccaagccgcgagcacccagcagaagcagccgggcctttcggcgagaagctacgagggcgagcggcggcagccggccgggacgcggctctactcgctggcgccctaccctctcctgctcgccgcgctgctgcctggagccgagccggtgacggccgtgttcgcgccgttcgtggagctggtgaagacgttggacctccccggctggctcgtgcactggggccacccaggcaacatggctgtggtgctatttgcaatgggtggctacgggacatacctcggcttcaggatcaaactatcagatgatccagaagagaaggccaaggccaaagatctccatccgaagctcctggccggcatgttcttcttcttcgccctcggcgctacaggcggtgtcaccgctcttcttacctcagacaaaccaatctttgaaagtcctcatgcagtaactggagtcatcggccttgcactcttgaccattcagtctattcttccaaaattattcgaggggaacccagggcttaggactacacatggtctactcggcagtggcatcatgactctgtttctaatccatgcagcattcggcctgcagcttgggctcagtttctaacttttggctagaatatcttggggtttgcttctttctgtattgtttttggagtatttaaccg

SEQ ID NO: 10174 - DNA, 438 bp, Setaria italica
  Peptide Sequence Number=SeqID_76148
acgacgccgaggacaattttaatgtcagaggtggaggaatacacggcattggctgtgtaaaacgcgataagagtgggaagataatagactgccattgcaccatactggacgaaccagtgcccggagcgacgacgcatggggcccaagacactctgaagctggcgtaggataacccatatcactgatgcgacaatcaccttgcaggctacgagatcccgcgtcatcaccatccggagcagggctttgagggaggcagcaaccactgaggctttcggccccaccgccatcaccatcgccggcgccagcgccggcgcctccatcagttctcgtggcatctcggtttgtcacagagagaggcgtgcgtgtgaaggagactaatgaagaagatggatggaatcagaaattgagatggcagtggtattaaaacaacgaagggta

SEQ ID NO: 10175 - DNA, 395 bp, Setaria italica
  Peptide Sequence Number=SeqID_76149
cctatcgcctgccaattactaggaattgaatggatgtggttatatcaagatggtggtagatcagatgtatcaccatccaagctcaaagtccattgctcgtgctgctgcctgtgtgtcctcatcgacatctgtccatggttcataccattttgaatcaagcgcgattccaatgagacctccttgttcattcttcaatacatacgagtacgtatgaagagctttagcatgtgctaagaggatgttgtgagctacaatgtatggttcagttgatgatttaccatccctgcagaacatgtgagacagaatggaacatctcccaggtgcttgaataccaaggtcatagccttcaatcgcaaaattatggggctcgttaaaagtgatccagtgtttcactc

SEQ ID NO: 10176 - DNA, 369 bp, Setaria italica
  Peptide Sequence Number=SeqID_76150
aacatcctctaatctcgaaaatgggaggtttgcgtcatccatgcctgacatataaacacctgttatgttacggaatttctccgaggcagaaactcttatcagctgttggtataatcttttcagctacttaccgttttcagtgacgatcacaggtggatttccatacttttctttgatgtgcttcatcagtttgaacataccccagggaactatgtgcagccatcttgatgctgcctggaagttgataaacatagttgccaatcaaacatttgatgattagaagatgaaaaactagaagcataacaagtctgaagaaactgctgaggaaatcctaccgtttctcctattctctttccatgcctgtacgct

SEQ ID NO: 10177 - DNA, 565 bp, Setaria italica
  Peptide Sequence Number=SeqID_76151
acaggccagggtgacagagagttcactgcagagatggaaaccattggcaacaatacgacatcgcaaccttgtggaccgttgctaggctactgcaaaattggtgatgagcgtctccttgtgtatgagtatatgaagaatggcagcttggatgtcatgctccatgaaaaagccaaaattgatgtgaatcttgattggaaagcaaggaaaaagattgcaatcagttcggcaagaggactagccttccttcaccacagttgtgtcccacacatcatacaccgggacatgaagtcgagcaacgtgctgcttgatgataaccttgatgcctatgtatcggattttgggatggcaagacttgtgaatgcacttgattcgcatctgactgtgagcaagctcttaggaacacctggatatgtggcacctgagtacttccagtctattatctgcacaacgaagggtgacgtctacagctatggtgttgtgctcttggagcttctctcagggaagaaaccaatcgatccgacagaatttggtgacagtaaccttgttgactggacaaagcagatgg

SEQ ID NO: 10178 - DNA, 646 bp, Setaria italica
  Peptide Sequence Number=SeqID_76152
ctttgatgtgcttcatcagtttgaacataccccagggaactatgtgcagccatcttgatgctgccgtttctcctattctctttccatgcctgtacgcagttggtatggtcgcagaatcagttgaagcatcattcattacaagttttctgatttgcattctgtcgttcctaacatacaatgtggtatagtggtttatgcccacaaaatctagcgaacccgatactaacttcgaagcctgagttgaaaactgaggcagcctatcgcctgcaagtttctgcatagaaggaggatagtggccaaacattaagggatccaggaaccatccaagctcaaagtccattgctcgtgctgctgcctgtgtgtcctcatcgacatctgtccatggttcataccattttgaatcaagcgcgattccaatgagacctccttgttcattcttgaaatgctgcttgtaagtatgaaaagcaccagcatgtgctaagaggatgttgtgagctacaatgtatggttcagttgatgatttaccatccctgcagaacatgtgagacagaatggaacatctcccaggtgcttgaataccaaggtcatagccttcaatcgcaaaattatggggctcgttaaaagtgatccagtgttcactctatct

SEQ ID NO: 10179 - DNA, 2240 bp, Setaria italica
  misc_feature (2225)..(2225): n is a, c, g, or t
  Peptide Sequence Number=SeqID_76153
ccgatggtcatgtagacaggacagtgtgttggctgttacagtcagatgtaagcgttttttttagtaggatgcagtgtttgggcactgcaattcacattcttgttgatctgtgtagtacatattaatgcagaacaagcagagcggtacattcaacagcgttcgttgaaggtcgcgcaaatggtagttacatacatcgagaaataatcacaacctacacctaaggcatgtatgtacgcatgtacaaatggcagttgtgctatgtacacctaactaatggcaatcgtagaatctcactgttagtcaggcttcagcttactccagattatctaaattatagccgtctcctgggctaagaaccggctgaaccactcgacagatgccttgggaatcctcgtcaggttgttgttgtagtcgatgtagtagagaccaaacctcaccgtgtacccagagttccactcccagttatcgagcagcgaccatacgaagtagccatggacgttgcagccttccttccttatagcatctaggaggttcgacatgtagtcgttgtggtaccgtatccttttatcatcctgcagaacatcctctaatctcgaaaatgggaggtttgcgtcatccatgccgttttcagtgacgatcacaggtggatttccatacttttctttgatgtgcttcatcagtttgaacataccccagggaactatgtgcagccatcttgatgctgccgtttctcctattctctttccatgcctgtacgcagttggtatggtcgcagaatcagttgaagcatcattcattacaagttttctgatttgcattctgtcgttcctaacatacaatgtggtatagtggtttatgcccacaaaatctagcgaacccgatactaacttcgaagcctgagttgaaaactgaggcagcctatcgcctgcaagtttccatagaagaatccaagctcaaagtccattgctcgtgctgctgcctgtgtgtccttatcgacatctgtccatggttcataccattttgaatcaagcgcgattccaatgagacctccttgttcattcttgaaatgctgcttgtaagtatgaaaagcaccagcatgtgctaagaggatgttgtgagctacaatgtatggttcagttgatgatttaccatccctgcagaacatgtgagacagaatggaacatctcccaggtgcttgaataccaaggtcatagccttcaatcgcaaaattatggggctcgttaaaagtgatccagtgtttcactctatctccaaattccttgaagcaagtagaggcatagtgaacaaaatcatccacgatttgggagtttaaccatccaccatatctgtcttctagtgcttgcggaaggtcccagtgaaagagtgttacatatggttgcatacctttgtctaatacagcatctatgaggctgttatagtaattcaatccttcttcattaggttcaccagtcccatttggaaagatacgtgaccatgagatagagaaccggtacgcatccatgccaatgtccttcatcaagtccacatcttccttgtaacgatggtagtgatcaacagcaacatctgcattgctgaaatctatcacccgtccaggtcgtcttgtgagagtatcccatattgtaggtccacgttgaccctcgttgacagcgccttcatactggtaagctgaagaagcagtgccaaagacaaaacctggagggaagtctgctctccgtagagcttcagcacaagtagtgaagctgataaggatatgaaccagtgtcacaactgaaagctgagttcccccagtattatctgcacaactaagggtgacgtctacagctatggtgttgtgctcttggagcttctctcagggaagaaaccaatcgatccgacagaatttggtgacagtaaccttgttgactggacaaagcagatggttaaggaggacaaatgcaacgagatatttgatcctatattgaccgatacaaaatcctgtgaattggaattgtatcagtatctgaagattgcttgccaatgcttggatgatcaacctaaccgcagacctacgatgattcaggttatggcaatgttcaaagagttacaaattgactcagacaacagcttcttggatggcttctcaatcgattcagcaaatatagaggaatcatctgagaaatcagtgtaaatattattgattcctacagattttgattccgattganatattagcttagcca

SEQ ID NO: 10180 - DNA, 307 bp, Setaria italica
  Peptide Sequence Number=SeqID_76154
tgcccaggcgcagccagcggcgccggccgacgacgcggctccggcggcgcacaagcactcgtcgaccgcggcctcggggggcccggcgaactcgtaccggatggtgctgctggacccggtggaggggcggtgggcgccgctgccggcgctgcccgggccgacggagagcctgcccctgttctgccaggtggccgccttggacggcgggcaggggaggaagcggctggtggtcgtcggcggctgggatccggagacgtgggcgccgatggacgcggtgttcgtgtacgacttcctcaccggtgcgtgg

SEQ ID NO: 10181 - DNA, 279 bp, Setaria italica
  Peptide Sequence Number=SeqID_76155
ctttatgttataacactatatttgatatttgctgaagtcatcgtatgtgtgaaacttgatcctgacacacatatgatagaccgggtgtgacaccatggtgccagactactttttataaccgtaggtaaatatatagaaacaaattagttgtttttttattcaggaagctatataatttcaaaatcctaagttatcaatgtttttaagttaactaagagattccttggactctaagtagaaaaaaaattcatgcggagtacatacttatgttgtttaagg

SEQ ID NO: 10182 - DNA, 649 bp, Setaria italica
  Peptide Sequence Number=SeqID_76156
atgtgctttaatctgctccttagtttcttgaaaatttccattatctgtgacggcttaattttgctttcttgcaatattcttgagaagattctctcttcctcggacatgtacttgtggctaataaaaaacgtggacagtgaaggcgagctcataagtggatggttatgttcattgacaactgttttaatctcccatctcccttcaacaagtttcacaagcaccttcatgcggcatcctgtcttctcaatagcattgcttctccttttcttctgtcctgtttcagttactttcatcttgctacttttattgcacacaaatgttatcttcttgtgtttgtaattgcatcctttcttgactacgaatccagtaagtagcccatacacattgagaaaacgatgagcatcttgtagcgtgggaaaaaccatgccgacctctgggggcctagccttttcaacatcttctacacttgggaaaaagtagtcttcatcaccatcaacttctgcttcagttctatctttttggcaccctttaaagtcatcattctcttcatcatttgatacatggtccccgccatcttgctccggatcctgagcagatgtcacagcagcttcaggaccctcctctgctaccattgccacattctttctgt

SEQ ID NO: 10183 - DNA, 324 bp, Setaria italica
  misc_feature (292)..(292): n is a, c, g, or t
  misc_feature (296)..(324): n is a, c, g, or t
  Peptide Sequence Number=SeqID_76157
gcccggggttttgattgcctgccggtgccgcctcgcgcgctcgctcccggtcccggcccgcgctcaccgccaacgacgacgacggcgcgcgcctgcggccgccgggaagaaagtggagggctgtcgagcgaagggtgtcatcagaggtttttctctagtgtaagctaggagatggatgctgcacgggtgtatgtgtgcggtgtgcgtgtgctgcaaattgcaatgtgtacgtagagagagtgcccggagcttggattgcgatgtgatgctactgtcggtagtggcgtttacngatnnnnnnnnnnnnnnnnnnnnnnnnnnnnn

SEQ ID NO: 10184 - DNA, 640 bp, Setaria italica
  Peptide Sequence Number=SeqID_76158
gggagacggactgtgtgaacggagattatatataggttgttagttagggcaggatagtttttgagcgaaatgcatacttcggtccgtgggtcatccgcggcggatctataaatccgccccgtgtgtcgggtcctcgaactcgagacccgcggaggaaattccggacctgctaccgctcccgtcgggtctgaaatctatgggtctcgggtctagatctgcccgattgccatccctagtagcggcggagcgcgacggcggcgagcacagccccgacggcggctgccaccacgacggcgctagtagacggcggcgtgaggtgcacggggaatggcattactatcgccgtcgtttttaggacctatttgaagatccgttccaaattacaggtcattccaattttcttggagagtcaaagcatctcaatttaactaggtttgatcaaatttatacaatgaagtactaaccttcatgataccaaataaatactaatatattttccattaaatatattttcatagtatatctattcggtgccatagacctttgtaatcctctctataatttgatcaaacataaaatgatttgactcttcaagaaagtcaagaaatagaaacaaaactaagaaataaggaaactaaaa

SEQ ID NO: 10185 - DNA, 237 bp, Setaria italica
  Peptide Sequence Number=SeqID_76159
ggctcaacctttatccagtctcccttgtaggcgacgtcgaggccgtagaccttgccggggaggaggagggtgatgaggttgcggtcgcagtgcggcggcaggcccagcgtcttgctcgggttggggcatgtagggtagtggttgatgttgaggataacgtcgccgccgctgatgtcgccctcgaagtagtcagctgagacacgcaacaggcgataggcaaggcacacaggggatagg

SEQ ID NO: 10186 - DNA, 1328 bp, Setaria italica
  misc_feature (1)..(34): n is a, c, g, or t
  Peptide Sequence Number=SeqID_76160
nnnnnnnnnnnnnnnnnnnnnnnnnnnnnnnnnntttttctgcctcgtatcatcaggatttgcgtttttattgcgtcgtatcgtcgaaagaacacaggtacagtattacaaccaggaacaaaaagaacacgggtacggtattacaaccaggagctgacgaccctgtgtaacatgctggtggggatggcaaattaaagggatgaaatctttgttgacctcagctggttcttggttcatatctccttctggacattcttgagatctgtggtgaggttgatggacgaccccaatttgacgacattgtagatgcgcatgaagtcgcggaacttgacggtgcggtagcacggtggtttgtcctcggtgatgaactcctttgcagggccgatgaggcagtccggtgtgggcatgatgaaagttgccaccgccgtccgcggcagcgtggagctggtcaccacgcggtgctcgatgctcttgagcaatccattggtcaccacctcgagttgctggccgaagttgacgatgaaggcgccaggcacgggctcaacctttatccagtctcccttgtaggcgacgtcgaggccgtagaccttgccggggaggaggagggtgatgaggttgcggtcgcagtgcggcggcaggcccagcgtcttgctcgggttggggcatgtagggtagtggttgatgttgaggataacgtcgccgccgctgatgtcgccctcgaagtagtcaggccggagccccatggcctcgcacagcagctgcagcagctccatcccgactcccctcgtcagtgtggtgaagttctcgataaccccacggagcctctggggcgtgtggggccagtcctttgtgccgtcgccgatggggaaggggcaggcaaggcggaggcagtcccgccagtacttctcgccgccggtctcgtaggtggtgccggagaagatccggttgggcttgtgcctatcctccgagtacatgtacgccttgtccgccgccggcagctggaagaactcctcgcacacgtcctccatgtcccgggtcacctcctcagggataccgtggttcaccaccatgaagaagccgaactccatgccggcatcgaggatggcgcggcggacctcgctgcggccacgggacatgtcgatgacgggcagggacgcggtggcggagatggcctgcggcagctgaagctcggacgagaagatgcagcggtccaagggcaacgcctgggacggcgcgaggtggagcatgttctccatggatgatgaatgccggatctctggcgagtttgggaggcactgcaagcttgtgtggtgtgctcttgttttgtt

SEQ ID NO: 10187 - DNA, 578 bp, Setaria italica
  misc_feature (1)..(35): n is a, c, g, or t
  Peptide Sequence Number=SeqID_76161
nnnnnnnnnnnnnnnnnnnnnnnnnnnnnnnnnnngttagtgaaatgggcatggactttatacactgatgaaaatgtacatgaatgcatccattcctaaaagcctaaaaccttattcaattctgctcaaaagaaatagcagaagaagaagaagcagcatgcaagccattacattagagaagtaattaactgccccgagagggcattgtcttgggcgcacggcgattacacggctaatctcgagataatcaccacaaacaccccaaggttaactaaatctccacatgtcttactcctcgccctcgcaacctggcgtatattacaactctacccctaaccttaagaaataaataaccagattacccaaattacccctcgactccggcgagctcggcctcggcgccgccgcgcgcggccggcattcctccgtgagcagctaggcggtcagcacgcgtagtactcgacgagctcgtcgagcgattccggctgcgggtcggcgttctcgagcatccagaggaggtgctcgaacagcacgacctcgcagcccacgacggtgcagccggcgtagtactcgacgag

SEQ ID NO: 10188 - DNA, 679 bp, Setaria italica
  Peptide Sequence Number=SeqID_76162
acgggtagggacaacaaatagaatcgccaaggagagcgtgaagaagcggctcgcgtcagaggacggaatgagctacaccgagttcacctaccagctcctccagggctacgacttcctgcacatgttcaagaacatgggtgtcaatgtgcagatcgggggcagtgatcagtgggggaacatcacggcgggaactgagttgatccgaaagatcttgcaggttgagggggcgcatggcctcacattcccgctcttgctgaagagtgatgggaccaagtttgggaagacggaggatggggcaatctggctctcgtcgaagatgctctcgccttacaagttctatcagtacttcttcgcggtgccagatgttgatgtcatcaggtttatgaaaatcctgacgttcctgagcttggatgagattcaggagctggaagagtcgatgaagaagcctggctacgtgccaaacactgttcagaagaggcttgcagaagaggtgactcggttcgtccatggcgaggagggattggtggaggcattgaaggcaaccgaggccttgagacctggggctcagacacaattggacgcacaaacaattgagggtatagcagacgatgtgccgtcatgctctttggcctatgatcaagtattgaagtctcccctggttgatcttgctgtttccaca

SEQ ID NO: 10189 - DNA, 386 bp, Setaria italica
  Peptide Sequence Number=SeqID_76163
ccggcgctccaacctgcaggaggaggatgccgaggaggcaccagcagctgcagcttcttccaacaagaagcagccggcggcagaagaacaaccacaggccgcagcaacaactaagatgcatggttttggtggccattaacgtaaccaccaagatcatgcatcttaatttcatttcgtttcattatcaacgacatccttgttcggttaagtatatccatttaatttactaccatctgtaagcatgcatgcacgtcatccggatatttcctttttttaatatatagtataaatgttccaaggatgtaacaataccatgtgtataatttttagatctagcacaactaggtatctattggcatgtattactacaaatatatatgtatact

SEQ ID NO: 10190 - DNA, 423 bp, Setaria italica
  Peptide Sequence Number=SeqID_76164
aaacctctgcccctcctcctccccggcgtcggccaagtacctggcgccgcagaagacagacacgacgatgaagctgtgcgccagcgccgtgcggagcttgccaaggtcaaccggctcgatggcggaggccggcgtcgccggcgagaggcgtagggcacaggagtgggcgcaggcgagcatgagggactgaaggtgggtcgggtcgacgagggccgggtccatggagatggaaatgggcggcggggcgcgggctctggggttgatgggtttcgggccggagggggtcggggtcggggagaagagggcgagggtggtgaggcgcgcgaccttggcagaggcggccatggcgggcaggtggttcgccgggcgaatgggggcgcggctgggctgacgataacgaggaagcggtcttctgttggcgaa

SEQ ID NO: 10191 - DNA, 276 bp, Setaria italica
  Peptide Sequence Number=SeqID_76165
attctagattctggactcatttgctaaaggctttctaggtaaaatgttagcgggtgcgggtttaacattggcgtcaactgcggttatgacaacgctagttaatcaatatatttcaactcttaaaaatcaaactgcgggtatatctgctgatatgttagcgattttgcatttatccggtttagattttgcgttgtctgtcatcttgtctgctattgttgcccgtatgacaatgaacgccactaatttaaccctcaaaaaagcgacgacataaaagcg

SEQ ID NO: 10192 - DNA, 276 bp, Setaria italica
  Peptide Sequence Number=SeqID_76166
gcggcggcggacagacacggaaacagggatggcccctagaggcggccgcgcggcggcggcagccagctccggctccgaggacgaggaagaggaggcggggttctccaggagttacttcctagccaaggagaaggagccctcctccggcaagaagcgcgcccgcgccgccgcggggaagctctccgacctcaacctcgtcgatgagcaggtgttgcgtgcatccctttccgagatccccccgaagcacgaggaagaggtggaggctctcacgagaag

SEQ ID NO: 10193 - DNA, 407 bp, Setaria italica
  Peptide Sequence Number=SeqID_76167
tgtttctacctactactcatctgttcgatcgattccgcagcttatgcttattcctctctatccatttattatgccggattcctttctgatttaatttatgtaatctgctaccctgtctcggttcataagctgcaaccacagtttgtctaggactcgacgattccttggagcaagccggatttctttctcaattcggttgcgatttctaggactattatcacagttgcttaccagcaattcgtgcccaccaaagtttcggtcgtctcctttgacccttaaacaaatttcccagtcatgggtacttgcatagcaataacccaaatctactaaattacaagtgacacctaacctagccacagttgagaattatcacgctcacaaggattacagagaaacatagtggtgat

SEQ ID NO: 10194 - DNA, 1931 bp, Setaria italica
  Peptide Sequence Number=SeqID_76168
tggttaccgttgttgtttttactattattattagttctacccttgtattcctactaaaatttgttacaagagaccctgcacgtattgctagcattacgcacatcggacagggcggtctggtattattccagctacaaaatctcaaacaacgatctatgtgttgcgattggaattctaagcaaccaactatatctttgcccccatgaatttcagcctttcaggcagcagcctattctacctccgacgtaagatcagctaaggcgctaatgaagtgtggatggcaactaaaattcgctatcctgatgcactggctgcctttgcatccttctcgtcttcgccttgctcttccttggcaaattcctcgatcagctcccgctgtttcggcgtcaaattcacagggatgtttagaacaattgaaatggacgtattgatcaccgtagtatgatgagtttcttgtcttgataccttttcctctcagaactaccttctgaccaggttgagtaccaggcttgacctttagaacaacatctccactgagagttgggacttgaactgtccctcccaatattgcctatgtagtatataagagtaatcaaaatcaatatgctattaaaatatactaagagaacagttgtgcaagaatatttatgtatataggcatatagcctagcctatacccgactgattgagttagtagtagacacctgtttaatatagaagatgcacgcaaggttctatgtcccttgttggtgctaacacaaggactccatcaagagccagtctgaccaaaattaggagatattgttctctgtccgactgagagttaacaaatattttctatttttctgtttttggtaggagtacataaacaagctgagatactgccttcaatgaacacaatctatatatagtaaattgttacacaatcttagcactgtggaaagagggctagcaccatatgaacatttaatcatatccgtagggtgcacatgaacaaattgtaggaacatgcaataaattacctgagtcacattcaggacagcatcaacatgaatatcacctctctctcttcgaaatacaggatcctcatgaaccttgagggtcacataaagatcacccggacggccatctggatctgctccacctgatctcatcacctttatagtatcctcgtcgtccgaaccaggcagtatatcaaggcgaactgatttcgttccggtcacaaccttgtttcctttgcatgtcttgcagaaatccttcacagtcttcccagaaccaccacattttgtgcatgttgattgcatcctgaagggtccagtttgcatgaacataaatcctgttcccctgcaagttacacatgtttcaggtttggttccaggaggcacaccagctccactgcaggtttcacatattacagaagtttggaagttgatcgttttggtgcacccttgaactgcttccataaatgtcaattcaagctcaaccttaacatcacgtcctccaaattccctatccctgaaaatgttcctaaagaaatcattcattccaccgccgccgccaccaccaccaccactaaaaatatcctcaaatggatttccaaaaccaccctcaaacgggttgccagttccgcctccagcagcagaagctttctcatattgatcagcaccaacctgatcatagaatgatcttttttgctcatccttcaaagtctcataagctcgttgaacctcttgaaacttccgttccgcatccgcatcacctttattcgtgtctggatgaagcttctttgcaagcccataataggccttttttatctcggcctggctcgcattcttgctgacaccgagcacatcgtagtagtcccttgcagccaccggcctggtcccgtggaagaacctgtgggcagagctcggcgacgagaaggggggaac

SEQ ID NO: 10195 - DNA, 1001 bp, Setaria italica
  Peptide Sequence Number=SeqID_76169
cctaggcactgcagtagctcatcttatatctccttgaaacagaaacctcaacaggagacatgagcttggtgggtaccgtgtgttttacatatatagtcaccctgatccacaaaattgtacaagagaccctgcacgtcttgctagcattacgcacatcggacagggcggtctggtattattccagctacaaaatctcaaacaacgatctatgtgttgcgattggaattctaagcaaccaactatatctttgcccccatgaatttcagcctttcaggcagcagcctattctacctccgacgtaagatcagctaaggcgctaatgaagtgtggatggcaactaaaattcgctatcctgatgcactggctgcctttgcatccttctcgtcttcgccttgctcttccttggcaaattcctcgatcagctcccgctgtttcggcgtcaaattcacagggatgttgacattgaaatggacgtattgatcaccgtagtatgatgagtttcttgtcttgataccttttcctctcagaactaccttctgaccaggttgagtaccaggcttgacctttagaacaacatctccactgagagttgggacttgaactgtccctcccaatattgcctgagtcacattcaggacagcatcaacatgaatatcacctctctctcttcgaaatacaggatcctcatgaaccttgagggtcacataaagatcacccggacggccatctggatctgctccacctgatctcatcacctttatagtatcctcgtcgtccgaaccaggcagtatatcaaggcgaactgatttcgttccggtcacaaccttgtttcctttgcatgtcttgcagaaatccttcacagtcttcccagaaccaccacattttgtgcatgttgattgcatcctgaagggtccagtttgcatgaacataaatcctgttcccctgcaagttacttaacaacaatagtttacaaggtttaggttaccaaggaaggacaacaa

SEQ ID NO: 10196 - DNA, 374 bp, Setaria italica
  Peptide Sequence Number=SeqID_76170
aacgcgccctcgagatacctgtctaccccaaaggcgtctcggttctgatgccagggcaagacgtgccaacgttcatcgcgcatcctgccccagcaccctgtcccccggagaggatccaatggccatcgcaccagccccctccttttgccggttcctcatcaaaccctagctagcgccacggtattattacactcccccattcagagcgcgaactgttgttggaatcagccgtgtgctctgtggacgtattgccgatccattccttctctggtgaatcaagagcatgcccgtcaagtcaagaggctctctctttctctcgctctctatgtatctgtacagttttaggtcttgttctgaggcaagctttgccgctg

SEQ ID NO: 10197 - DNA, 272 bp, Setaria italica
  Peptide Sequence Number=SeqID_76171
cccgaattggaataatattccttcacttctggccttattgaatccatatcccctttaattacatctggcttgtacctggagcgaacctcggcggggtcctcgcccggcagcagctccggcatgccgtcgaagacgcggttggcgcccccgtccgcgcacacgcgcacgcgcgcgcgggcccagatgagcggcgcgaagcgggggaggcgctggttgaggacgacgagcgcgtaggtcgtcgtggcggcgtcgttggacgggggagtcgaggg

SEQ ID NO: 10198 - DNA, 335 bp, Setaria italica
  Peptide Sequence Number=SeqID_76172
tggacctattccagagtttctcttataaggagttaaggactagggttgctacactgtatagttacatcatttgtcgctgtcctaaataaaagctctgctttccatctgaaaatggattcaggaaactagtttaattatctttgacaagttgtaaatgagacatttgatttagttatttgtaaattatcttaatggttttcctttgttactaaccagaatgcttggactggtgcatatgctgtataacttctagtgtagttgcctacacaaatgtgatatatgatcatttgcttacaaaattttctagtctcttaataaaatgttttcatgcaggg

SEQ ID NO: 10199 - DNA, 938 bp, Setaria italica
  Peptide Sequence Number=SeqID_76173
ttccatccatctctaccctgacacctggctgcagaagcagcacgccacggtgaacgagaagctccagttcgtgaagcggtgggtgtcctcccacatcgaggacggggacaaggagctgaacaagccggtgctcaccaccgagttcgggctgtcgcaccgcgcccagggcttcgacccctcccaccgcgacgtcttctacaaggccatctacgacatcgtctacgcgtcggcgtcccggggaggcgcgggcgccgccgccttagtgtggcagctcgccccggagggcatggaggagttccacgacgactactcggtcgtgcccagcgagcacccgtcgctgcgcaggctcatcaagaagcagtcgtgcaggctcgccaagctgaggcccggggtcggggaagaggccaagcgggtgctggcggcgtgcgccgccggctcgtcgtaggaagaacggccggtgcggaggaggagccgtttgctttacacgtccttcgagctttgttgcgcccaggtcgagctttttgtcgtttgttttgtcctccgaatcgagcgagcggtgaagtgtgtcagagaaagatcaccggaaaatgaatagaaagcacaaaaaagggtgtgtgttgcctcgtgaggctttggcgatgctgctggttagattcgtttaattgtcgccagcgccgacacctgcggaattgcagatcggcatagataagctacagttttccttcctgtgcaacgggttatggtagatgcccttggcctttgatatatgtaaagtcatcgtcgagtggcatccaatggtaatagccgtcctatatataatgtatttctggacatgagctttttatatatatagctgtgagcataagaggacaagcatagaaatggagcacaaacaggtcttctctttagtaagttaaaaaaaaaaaaaaaaaaaaact

SEQ ID NO: 10200 - DNA, 878 bp, Setaria italica
  Peptide Sequence Number=SeqID_76174
atcgaggcgctcaagaaggagcgcgacgcgcggccggccccgcacgccgccgggctcggcggccacgacgccgggccgcggtgccacgccgtggagatcgacgccaagatcctggggctggaggccatgatccgcgtgcagtgccacaagcgcaaccacccgtcggcgcggctcatgacggcgctgcgcgagctggacctcgacgtctaccacgccagcgtctccgtcgtcaaggacctcatgatccagcaggtcgccgtcaagatggccagccgcgtgtactcgcaggagcagctcaacgccgccctctacagccgcctcgccgagcccggcaccgccatgggcaggtaatcggggcttgctcggcgcacctgtgtccggcctgccagatagggacgatactgttaccgttaccaccaccggatcgtgagccgtcgtcacctccattgttacagcaagatagccagagagattcaggaggaggaagacgattactccggtgttgctgtaaactttagaaggggaggatggatgatgatacttagctcctgctgttttgttcatcgtcgtctctgttttttgctagtagcgtgttaattagcagtattgagcaatcagcaggcgtccatccagtcttgttaattactaccctatacctatattgtttatgagctgtgaatgtgatgatggatcgatcgacgctagcgttggttggatcgaaaactgtatataggatgggttgatcgtcgttgtgccctgatgtatgtattttgcagcaggatctcgcctgaaatggagtctgttttttgatcgcacagcaatccatagtctctggttgctttaccgttgaattctttgactgatcgattgatcttaaa

SEQ ID NO: 10201 - DNA, 389 bp, Setaria italica
  Peptide Sequence Number=SeqID_76175
ccaaccacagcaagacgtcggagaaagaactccatcatctgggagcatttcactactgaaactgattctgatggatgcacacgagcatgctgtaattattgcaagagaatctttgcctgctccaaaacagcaggcactagccatctaaaaaggcacattaccctgggttcgtgtcctgtgatgaaaggtcaagtgcttcctttatcaggaaggacaggaaatcatggcagcggtgctgtggagaaaccttccaagaggctatgcttatatgctggccctggaaacgatgcatttaatcaaaacagtaatacatcgtatctggggaacatagacattctgactgagcctctaactacaaaacaaggaaatgaatactcaatatcaaaatg

SEQ ID NO: 10202 - DNA, 443 bp, Setaria italica
  Peptide Sequence Number=SeqID_76176
ttgtctttccttttattctaggtaaggtactaggtaaattctattggcagcggtgctgtggagaaaccttccaagaggctatgcttatatgctggccctggaaacgatgcatttaatcaaaacagtaatacatcgtatctggggaacatagacattctgactgagcctctaactacaaaacaaggaaatgaatactcaatatcaaaatgcttaaaagttttacatgacatggatgatatgtcagatgagatcaagcatcttgcctatcatgttctcaaggatgcaacaaatcgagagatatttatgagctatgaatcaagacttcgtggtttgtggttgaagaaggaagttaacaaacttggaatatgactgacttcatgtaagtcttgctgtatctgccctctaccctctttgttgtttgcgtttgttctaaggttgaatac

SEQ ID NO: 10203 - DNA, 431 bp, Setaria italica
  Peptide Sequence Number=SeqID_76177
caggaggttgctgccgggccgagtggggcccgttggcgtcgctgcagattgaggcggcccggcatattcactcgggaccatatcaggatggcgccaggcccagcaacccgttcccgtccttgcagcctcaggatcgggagatattgcagcagctggagcaaatccgcctcaacggcgatgtcgatgagcaatcatcccctgaatggacgcggcagcctgcagacatcttccaggaaaggcacatcgctatggatcattcaagcagtgggtcgccaaggaaaataccattccatttattacaagaaattacggattgcttctccgatgaacgcaagcttggtagtggtgggtttggaaaagtctatatgggagtgcataacgatggggagaagattgctgtcaagatgcttcattacatgctaggatttgag

SEQ ID NO: 10204 - DNA, 843 bp, Setaria italica
  Peptide Sequence Number=SeqID_76178
tcggtatttgtctttcttccgtattgtaacgtctaattctttggtgtcgatgagcaatcatcccctggaatggacgcggcagcctgcagacatcttccaggaaaggcacatcgctatggatcattcaagcagtgggtcgccaaggaaaataccattccatttattacaagaaattacggattgcttctccgatgaacgcaagcttggtagtggtgggtttggaaaagtctatatgggagtgcataacgatggggagaagattgctgtcaagatgcttcattacatgctaggatttgaggaggagcaatttctaaaagagtttaacaaccttgcaaggctccagcacccaaatattgtgcgacttgttggttattgctatgacgttcagaaaaatatagtggagtacgaaggaagactagtttttgctgaaagaatttatagggcgctctgcttcgagtatatgcatcatggaagccttgacaaatatgtttcagatgaatatcctggacttgattggaacacacgctacacactaatcaaagggatttgcaagggtttggagtaccttcatgaggaattgaaacctcctatgtatcatttggacttaaaaccagctaacatattgctgggtaagaacatgctgcctaaaattgcagatttcggcttatcaaggttctttggggaagaacaaacacacatcacaaaaagttctataggaacacggcacacaagaactggaggactagactgcaggcaacaccaatgcacttgttcgagtcatattcaaaacaagtgaagagatgcatggaaatagctttaagttgtgtggaggtcaaccggcac

SEQ ID NO: 10205 - DNA, 900 bp, Setaria italica
  misc_feature (889)..(889): n is a, c, g, or t
  Peptide Sequence Number=SeqID_76179
gttcagcagctgcctcctcggaagcctagcagctcttcctcgcccccaacagccgtttcccgagatctttttcagcgccggctgagcacagcgacggatcctactactctgcattttcttcgcctgatcctgacaagggtggcgaaaccaccagactgcgagaagcttcctgatatttcagaggggggataaggcagggaatgagtacaaccaaggtgaagagatgcgtggggaagtatgagctcggccggaccataggcgaaggtacattcgcaaaggtcaggttcgcgaagaacatccagactggtgaatttgtagccatcaagatcctagataaagagaaggtccttaagcacaagatggttgagcaggtcactttcaattattgttgcattttttttagtatttggtgatatttcatatctcattaagcggggaattttggcaatgaagttgattgagcatcctaatgttgttcgcatatacgaggtgatgggaagtaaaacaaagatctacattgtgttagaatgtgttccctatggtgatctcttagacaccattgttaatagcggtcgaatgagggaatgtgaggcaaggaggtacttccaacaattgatcaatgcggttgattattgtcatagcagagatgtgtatcaccgagatttaaaacctgaaaaatttactgctcgattcacatggaaacctgaaggtctctgactttgggctgagcgcgctatctcagcaaatcaaggatgatggattgctgcacacaacttgtggaactccaaactatgttgcaccagaggtgatgccaggaaacttcacaaactgaaccaatgatggatgctatggcaattatcatttcattaggaatgcaatggtttaaatntttctacctaa

SEQ ID NO: 10206 - DNA, 765 bp, Setaria italica
  Peptide Sequence Number=SeqID_76180
tggttccttctaagtctactaaaattggtttgtagtctagtatttaagtcgggtaaattttcgtacgattattaatgaagttgattaagcatcccaacgttgttcgcatgtatgaggtgatgggaagtaaaacaaagatctacattgtgttagaatatgctaccggtggtgagctctttgacaaaattgttaaccatggtagaatgagggaagatgaggcaaggaggtacttccaacaattaatcaatgcggttgattattgtcatagtaggggtgtgtaccaccgagatttaaaagtctctgactttgggctcagtgcgctatctcagcaaatcaaggatgatggattgctgcacacaacttgtggaacttccaaactatgttgcaccagaggtccttgaagatcaaggctacgatggtgcaatggctgatttgtggtcatgtggagttatcctgtttgttctgctagcaggatatcgaatgcagaatttacatttccaccgtggacatcttttcctgccaagaggttgttaacaagaatccttgatccaaatccaatgacgagaataacaatccctgaaatattagaggatgagtggttcaaaaagggctacaagcgtccggagtttgacgaaaaatatgacaccacattggatgatgtggatgctgtcttcaatgattcagaagagcaccatgtgacagaaaagaagaagaacgagccagtagctctgaatgcatttgaacttattcaatgtcagcaggcct

SEQ ID NO: 10207 - DNA, 388 bp, Setaria italica
  Peptide Sequence Number=SeqID_76181
aaaaaccagctaacatattgctgggtaagaacatgctgcctaaaattgcagatttcggcttatcaaggttctttggggaagaacaaacacacatcacaaaaagttctataggaacacgtggatacttacctccagaatacatagagagaaacatagtctcaagaaagtttgatatatttagcttgggtgttattatcataaagataatgacaggacctacaggctacagagaaagtgctgaaatgtctccccaagaatttattgattttgcacacaagaactggaggactagactgcaggcaacaccaatgcacttgttcgagtcatattcaaaacaagtgaagagatgcatggaaatagctttaagttgtgtggaggtgggaaggta

SEQ ID NO: 10208 - DNA, 457 bp, Setaria italica
  Peptide Sequence Number=SeqID_76182
atcgctgataagcatcaactaaatgatattcccatcgatccagggattgtcatgtaactcagattgacataagttttagaagttcccaatgtgattactagtacgcatgtggccactgtgagatgcagttgaggacaaaagcttagctcattattcctttaggaaaaggtataggcaattcatatttccaaatgaaaccctttgtgtgagtaaagaattgcaacttccagacaaaaaggaagaggtgaaactggattgtggttcatcttcatcatgagcatgtgctgagtctagtttcaaattgaatggcccttcataattttctcttggctccataacattaggcttatgttttggtaaaccctggcagagaataacaatccccgaaatattaagaggatgagtggttcaaaaagggctacaagcgtccggagttaagaaaacgaaaaaaataaaa

SEQ ID NO: 10209 - DNA, 829 bp, Setaria italica
  Peptide Sequence Number=SeqID_76183
aatgagacagagattatgatcacaaacaactgaatgagaaagagattatgatttacagaacccgacttcgtgacctgtcaagttatgaccaagggtcatcgatggatcaggaaagtgaaaccattggactgtgcagagaagcttcttgcaattccagaggggtgataaggcagggaatgagtacaaccaaggtgggatgtgttgggaattatgagctgggccggaccataggtaaaggcacatttgccaagttcaagtttgcacggaacatccatactggcgaatttgtagccatcaagatcctagataaagagaaggtccttaagcacaagatggttgagcagattaagcggggaattttggcaatgaagttgattgagcatcctaatgttgttcgcatatacgaggtgatgggaagtaaaacaaagatctacattgtgttagaatgtgttccctatggtgatctcttagacaccattgttaatagcggtcgaatgagggaatgtgaggcaaggaggtacttccaacaattgatcaatgcggttgattattgtcatagcagagatgtgtatcaccgagatttaaaacctgaaaatttactgctcgattcacatggaaacctgaaggtctctgactttgggctgagcgcgctatctcagcaaatcaaggtaatgactacttgcctatatgcatctaagttaccaatatacttgagtatgagagggtaattcttttaatctacaattaatcatagccgtttatgtttgaaaattttgagatccctcaacatgttttatgcatgtttcttctcttctatcttgttcaggat

SEQ ID NO: 10210 - DNA, 1369 bp, Setaria italica
  misc_feature (7)..(7): n is a, c, g, or t
  Peptide Sequence Number=SeqID_76184
cttgccnggttgcctcctcagttcagcagctgcctcctcgcatcgcaggcctagcctagcagctcttcctcgcccccaacagccgtttcccgggatctttttcagcgccagcagagcacaggcgacggcgcctactctgcatttctacgtctgatccgatccaaccaagagactgacaaggcggcgaaaccaccagactgcgaggagaagcttcctgatatttcagaggggggataaggcagggaatgagtacaaccaaggtgaagagacgtgtggggaagtatgagctcggccggaccataggcgaaggtacattcgcaaaggtcaggttcgcgaagaacacggagactggtgaaccggtggccatcaagatcctagataaggagaaggtcctcaagcacaaaatggttgagcagattaagcgggaaatttcgacgatgaagttgattaagcatcccaacgttgttcgcatatatgaggtgatgggaagtaaagcaaagatctacattgtgttagaatatgctaccggtggtgagctctttgacaaaattgttaaccatggtagaatgagggaagatgaggcaaggaggtacttccaacaattgatcaatgcggttgattattgtcatagcagagatgtgtaccaccgagatttaaacctgaaatttactgcttgattcacatggaaaacctaaaagaaaaaggtaaactaactaagaactttagggactcagtgcgctatctcagcaaatcaaggatgatggattgctgcacacaacttgtggaactccaaactatgttgcaccagaggtccttgaagatcaaggctatgatggtgcaatggctgatttgtggtcatgtggagttatcctgtttgttctgctagcagggtatttgcctttttgaggactctaatcttatgacattgtataagaaaatatcgaatgcagaatttacatttccaccgtggacatcttttcctgccaagagagaataacaatccccgaaatattagaggatgagtggttcaaaaagggctacaagcgtccggagtttgacgaaaaatatgacacaacattggatgatgtggatgctgtcttcaatgattcagaagagcaccatgtgacagaaaagaaagaagaagagccagtagctctgaatgcatttgaacttatttcaatgtcagcaggcctaaatcttggaaacttatttgactcagagcaggaattcaaaagagaaacaaggttcacctcaaaatgtccacccaaggaaattgtccgcaagattgaggaagctgcaatacctctgggattcgatgttcagaagaaaaattacaagttgaggctcgaaaagttgaaagcagggaggt

SEQ ID NO: 10211 - DNA, 2527 bp, Setaria italica
  misc_feature (2491)..(2527): n is a, c, g, or t
  Peptide Sequence Number=SeqID_76185
gtttcagatgaatatcctggacttgattggaacacacgctacacactaaatcaaaggggattttgcaagggtttggagtaccttcatgaggaattgaaacctcctatgtatcatttggacttaaaaccagctaacatattgctgggtaagaacatgctgcctaaaattgcagatttcggcttatcaaggttctttggggaagaacaaacacacatcacaaaaagttctataggaacacggcacacaagaactggaggactagactgcaggcaacaccaatgcacttgttcgagtcatattcaaaacaagtgaagagatgcatggaaatagctttaagttgtgtggaggtcaaccggcacaaaaggccaagtataagggaaattgtcaaacaactgaatgagacagagattatgattcacaaacaactgaatgagaaagagattatgatttacagaacccgacttcgtgacctgtcaagttatgaccaagggtcatcgatggatcaggaaagtgaaaccattggactgtgcagagaagcttcttgcaattccagaggggtgataaggcagggaatgagtacaaccaaggtgggatgtgttgggaattatgagctgggccggaccataggtaaaggcacatttgccaagttcaagtttgcacggaacatccatactggcgaatttgtagccatcaagatcctagataaagagaaggtccttaagcacaagatggttgagcaggtcactttcaattattgttgcattttttttagatttggtgatatttcatatctcgtaagttctggtcccttccttccgattctgtcccccattagtaccttcacttttgaatataatggtccttgaggttgggcaactttgttcagcatcgaattaacagctcctggtgggagtaatttgttgttgatgaaaaaactacatggtcgaatatgcagattaagcggggaattttggcaatgaagttgattgagcatcctaatgttgttcgcatatatgaggtgatgggaagtaaagcaaagatctacattgtgttagaatatgctaccggtggtgagctctttgacaaaattgttaaccgcggtcgaatgagggaatgtgaggcaaggaggtacttccaacaattgatcaatgcggttgattattgtcatagcagagatgtgtatcacctggatttaaaacctgaaaatttactgcttgattcacgtggaaacctgaaggtatctgagtttgggctgggcgcactatctcagcaaatcaagactgatggagtgctgcacacaacttatggaactccaaactatgttgcaccagaggtccttgaagatcaaggctatgatggtgcaatggctgatttgtggtcatgtggagttatcctgtttgttctgctagcagggtatttgccttttgaggactctaatcttatgacattgtataagaaaatatcgaatgcagaatttacatttccaccgtggacatcttttcctgccaagaggttgttaacaagaatccttgatccaaatccaatgacgagaataacaatccccgaaatattagaggatgagtggttcaaaaagggctacaagcgtccggagtttgacgaaaaatatgacacaacattggatgatgtggatgctgtcttcaatgattcagaagagcaccatgtgacagaaaagaaagaagaagagccagtagctctgaatgcatttgaacttatttcaatgtcagcaggcctaaatcttggaaacttatttgactcagagcaggaattcaaaagagaaacaaggttcacctcaaaatgtccacccaaggaaattgtccgcaagattgaggaagctgcaatacctctgggattcgatgttcagaagaaaaattacaagttgaggctcgaaaagatagaggcagggaggaagggaaaccttcatgttgctgctgagatactgcaaattgcaccctcttttcacgtgatagaagtcagaaaaggagaaggtgacactctggaatttcataagttctacaaggacctttccaagaccttaaaggacattgtctggaaattcgatgatctctaaatgcaaccagcttcctaatagaaccagcggagaggaaagatggaaaactatttgcatatcattcttccaagcacattcggatttgatagcctgtattgttcaccattgctgtaaattattgtaaatgccgcttgttgtagttgaagggcaattcatcgaggcttaatccatgttaggaaaattcttagtcgcaactagaaaacttttgttcgccctgcatgtcattgaaacagtttttttctcttgacgccactgccgtttgttagcataacaagagtctctgttagtataccaagggttggaatctctttatttttcagttttcctacctcttcatatcccaatgtaatctctatatatactctcttgagattaatggaaagtgagtagagttattaaccnnnnnnnnnnnnnnnnnnnnnnnnnnnnnnnnnnnnn

SEQ ID NO: 10212 - DNA, 940 bp, Setaria italica
  misc_feature (932)..(940): n is a, c, g, or t
  Peptide Sequence Number=SeqID_76186
agaatgactgtcttcaatgattcagaagtgagtgattggtgcatttctattttcagtctcatgcataatgtcacagattttagttaccatctagttctactgatgatgtgaatgttattttcaatgattcagaagagcaccatgtgacagaaaagaaagaagaagagccagtagctctgaatgcatttgaacttatttcaatgtcagcaggcctaaatcttggaaacttatttgactcagagcaggaattcaaaagagaaacaaggttcacctcaaaatgtccacccaaggaaattgtccgcaagattgaggaagctgcaatacctctgggattcgatgttcagaagaaaaattacaagttgaggctcgaaaagttgaaagcagggaggaaaggaaacctcaatgttgcaactgagatcctgcaagttgcaccctcacttcatatggtagaagtccgaaaagcaaaaggcgacactctagaatttcataagttcttcaagaatctttccaagaccttaaaggacgttgtctggaaatccgaggatctgccgatgcaacctgctgcttagtggaaccttaggagaggaaggatggcaaactatctgagtctcattcttccaagcagattccattttggtagtccgcatcagcaaatctgttcactgcattctacatgtaccggtgggtggcctggcaaattgtgctggtcctctaccatagttgtaaatactgcattttgagaggtcgcattccttgctgtagactgtagtcagagtgaagctcattcagtagatttttgtgagcgtgtgagctctgtaaatccatgtatgcctatgaatcatgttgaaccactatgtgcagaatctgcgaaatgaggccaagtagggtcttgcactcttgtagacaggttaagtaaggggagtaagggacgnnnnnnnnn

SEQ ID NO: 10213 - DNA, 1031 bp, Setaria italica
  Peptide Sequence Number=SeqID_76187
tcgtccgcgtagagctcgccgacagcgatcgaggcagagcggccgtccacgtcgacgcggctctcgtaacggccggacttgatcgaagcgatgcgaactccaggatgcccggaggagatggcgatgcgggcctcctggaccacgacggtgagcagcccgccgatgcactgcgcgaacgcgtcctggatgacagcctcgttctcgatgtacgagaaggtcccgccggtggcctcggcgatgacgtgcatcgccgccgcgtcgtggtcgttgccgaagccaaacgtgtggatcgccgcggaccagtcgccggtgccggtgcgcatgaacgacggcggcacgaggtcctcatagttggggatgcggccctgcgcgcttcgcgtcatggtgtagttgtcctggccgtcggagaggagtatgacgctggagacggcgttccggtgccggcgctcgtcgagcaccttggccgccgtccggagcccctcggcgatgttcgtgccgccgcgcgcaacgagggactcgacggcgctcatggcgagacccttcccggcgtccgacatgcgcaggagcctggtcactcgttgcgccccggacgagaaggacaccacgctgaggcgatcgtggggcccgaggttgtcgatgacgaaccccatggcctgcttcaggagcgcgagcttctccccgctcatgctgccgctgacgtcgagcaccgtcacgaggtcgagaggcgcgcgcggtgcgtcgccggccgccgcttcgccgtcaactatcccgggagccttgacgtgcacgaggacggcaaagttgtcgggggacgagtcccttgcgacggcggagtactcggtgtgcgtctcgacggcggccaaagctccacgagatgccgccgccgcggcttgtcgctggccgtcgtggccagatggtagctccaccggctcgtcgtcgtcgaacacctctggctccgcgggctggggcggtggctggacggagtggaacggccggtacctgatcggcggtggctgcacgtggtgcatggg

SEQ ID NO: 10214 - DNA, 331 bp, Setaria italica
  Peptide Sequence Number=SeqID_76188
caacccccagccctcttctctctccctcccctctctcgctgccaccaccacctaatccccgccgctcgcccccgcttccggaacctcccagaaggtcgccgggggcatccggaagcttccgccgtcaggttgaggagcgggcagtaggcgcagggaaggagggaacagtgggggaggggggtggatgtagagattgtatgctactacaatggcgcaagctgctgttgagtccgctctgaatggtgactcgctgattgggaggcagccggtggttccgaggatgaagaggaagacgccctccgaactgagaggtgagcaactgaagcggcgt

SEQ ID NO: 10215 - DNA, 744 bp, Setaria italica
  misc_feature (659)..(744): n is a, c, g, or t
  Peptide Sequence Number=SeqID_76189
tggtggcagtcaagatggttgccgtgaccttcaaaagcttgctggattcctccaagagtatggaatccagaataattatgtagatctcaattctagaataaaagaagagcatggcaaggacaggatgtttaccgatcatgggcttctacagaatactgatagtccatttagattgacctctgagtgcagttcatcatcgtctttgaattgttgttcgtccaatttaatcactccttcaagaaatcaagccagcaattctgacctaacttggaacactactaagaaactatttggtgttgacattggaaatttggccaaacattctgacagtcaggttagtcaaatggtaaaagtttcaagcagatctgatgcggcgtctaggccaacatcaaggcacagtcttccgtaacaaccattagactgaactagggtcaccattgattttgcattctttagacctagtccttttagatttacatgatcccagttcattctagcagatggcaggatggttcatttatcccctaattagccagtttcatggtaaccaatatagcaagttatttgtttcttagcaatagttcgtatgtacaaaatattcattgctggagaccggaaagggtaatgaagagatgtgtttgcaaaaaaactaaaaaaannnnnnnnnnnnnnnnnnnnnnnnnnnnnnnnnnnnnnnnnnnnnnnnnnnnnnnnnnnnnnnnnnnnnnnnnnnnnnnnnnnnnn

SEQ ID NO: 10216 - DNA, 1430 bp, Setaria italica
  Peptide Sequence Number=SeqID_76190
tttgtcttccgagaacggccgccccgacgcgtcctacaccaagtggcggtggcagccgacgcgctgcgatctccccagatttgatgccaaaagcatgctggagaagctgaggaacagaagagtagtatttgttggtgattcgattggaaggaccaatgggagtccctactttgtatgctctctactgctgttcataacaagagttcaatctatgaagttaatgggagtcccatcacaaagcacatgggtttcttgattttcaactttagagactacagctgcactgtggaatactacagatccccttttatagtccttcaaggtcgtgctccagctggagcccctgagattgttaagtacacgattcgagtggatgccatggattggatgtctgatcggggtaagtggaaggatgctgatgtattgatcttcaacactgggcactggtggaacattgagaaaacaataaggggggtgcctacttccaagaaggtgatgaggtggaaatggatatgactgttactgatgcataccgaagatcaatacatacattgtccgattggcttcacagagaagttaacacaagcaagacccatgtcatctatcgtacatatgctcctgtgcatttcagaggtggtgactggaagactggagggagctgtcacttggaaactcttccagatttgactccacccgaatcgctggaagaatgggatgatctgcttaaacctgtgaatgatgttctagggaacaatctgagacccaagctttctggtttagatatgctgaatgtgacgcagatgacagctcagcggaaagatggccacctctcggtatacctaagcccttcaggacccgtccctcgctacaaacaggattgcagccactggtgcctgccaggtgtcccggatacctggaatgagcttctatacgccctcgtcatgaaaaggcatacgaagacagatcagaatctttccctttctggtactataactccgaacactggctgataatgatgatctgctaagtgctccctgtctgaagtctgaagagggaggtggtaactggtaaggtaaatgcagcagctggtcattggcaaagcaagcttcaaactcatcctgagcgatgacactgttgattgatctcgtaccaattagctaggatgccagaatggcgagacacatttttggatagtgggtgtcggtttgcaggaagctgcagcaccctgccgtgtttgtacatgccgaggttggcgaatagctgagcagaggtagaagactgttcagcttttaaggaaagcggtatgtttcatgcggaggctgttagtgttagcggtggtgaacatagcttagctaggggcgctacattggaatgatgtaaatatgtagcggcggcagtgagttttggttaaaaccattgccaaattcgct

SEQ ID NO: 10217 - DNA, 421 bp, Setaria italica
  Peptide Sequence Number=SeqID_76191
ggaatagtatctcctcgatcaactgcattatccggatagctgagcgacagccttcaaacggctaaacccgagagtccccaaactacccacctcacccccaaaccccacgaacacgaaatgctggcatgttagccgcgaggtcccccgtctcgctccaccaccgcatcgtcgccggcggccagcggaggcgatgcgtcgggggaagcgaaaggaagtgcggccgcacgcagggccgccacttcacgcaggcgctcgagagcctctggaggcagagtccccggatctctcctcctgccgccgccgccgctaccggcggtgaggtcaatcccttgtggcagccaccagcactcgagaacgctgccttcgaggagtactataagaaaaggacttggtttcaggatcttgttcatctggatgtgtg

SEQ ID NO: 10218 - DNA, 416 bp, Setaria italica
  Peptide Sequence Number=SeqID_76192
ctttcaatctggtaagcatacccaggcacttagaagcaactatgtggatgtaacatgggcattctatattcggtcgaagatggctgatataagtgatccttttcaagcttgacgagtgtttacaccacgctcctgtggttattctagtatgatttgcatgaagataaacaaagaaaatagctcaaaatgcgtgttggtgacatcttgctaccacagcttagttgcacaccaccagagcggctctttctatgtatgtcccactatctggcagatgagcagatccagtgtttcctagtatttgacattttggccaaacgggaaatcacactctaatatcaaaagtgaaagacgtggatgctggcaataataaatagacaagactagttagactacaaacgactacgaacaaaaaaaaa

SEQ ID NO: 10219 - DNA, 596 bp, Setaria italica
  Peptide Sequence Number=SeqID_76193
actgcaaggaaataattataacggcaatttaataaactcagaaaaagcatagaaaaaaataataaaagttaaccccaaaaaagccaactaacctaggcggaactaggcagtttgtattaagaagaaataagcatctgaattttccttgatgaggacttgaacttgggtggtctgggcgtacatccactctcaaccaactgagcttagctcaagttcctatgtagcaaagataggatgtgtaaaaaaacatagaggttttgtgcataacacacaaaatagagaattttttgaataagagacttgtgattaccatctcactgccatcgaacctgtgggtactgaacaatgataaaaggaatttagatattgttgagcctatggggcctgaaccttgagacagcgggttcttaagaaacccataaattgcttagtgatacaccaggacgaggtttgtgtagaaaacttagcttttaagttacaatgttcactctattttcctatctatttttctatcatcaatgtttttattgttatcatatttgtctgtcatgattttccaccagctggtttctacatttgctggggatgcttggtat

SEQ ID NO: 10220 - DNA, 376 bp, Setaria italica
  Peptide Sequence Number=SeqID_76194
atggcagctctgcaggtgcagagcaatggcggcggtgctggcgaggggctcttagctgatgatcctgggtacgtggaggttgatcccacggggaggtatggcaggtacaatgagattctcggcaagggatcctcaaagaccgtgtaccgggccttcgacgagcaccgtggcatggaggtggcgtggaaccgggtgccggtgcacgacttcctgcggagccccggcgagctggagcgcctctacggtgagatccatctgctccggtcgctccgccaccgcgccgtgatgcgcctccacgcctcctgggccgacgcgccgcgccgcgccgtctgcttcgtcacccagctcttcacctccggcacgctccgccagtacc

SEQ ID NO: 10221 - DNA, 376 bp, Setaria italica
  Peptide Sequence Number=SeqID_76195
tccggctgcggcggtggaagcgccggtcatccgccgcgccccggccgcggttcgtggcggagcccgtggacgcgcggtcgagctccttcgtgggcacgcacgagtacgtggcccccgaggtggcgcgcggcggcgggcacggcgccgccgtggactggtgggcctacggcgtgttcctctacgagctcatctacgggcgcaccccgttcgtgggggagaccaacgaggccacgctccgcaacatcgtgcgccgcccgctcgagttccccaccgccgcctcctcccacggcagcggcggcgacgacgccgcggcgcgcgacctgatcgcgcggctcctggacaaggacccgcgcacccggctcgggtcgaagcgcgg

SEQ ID NO: 10222 - DNA, 774 bp, Setaria italica
  Peptide Sequence Number=SeqID_76196
gatggctgaaaaagattatgtggggttatggtcaaacggataggggtttgccttctattgacatttctgctagttgatcaatgatgaattcagatacatcgtgggctttgtacacccctattgccgttgatggaatatgatatccaacaaagttcattccaaatcttgactctgaaatatggtatctgggtattatgcttgtagatcttcctgttttgaactgtgattcctttggtagattatagcaatgtatttaagagttgttacttgataatgttctgcaatttgttgcagaggcatataagaagtgtgaaattgaatttatgttttgttttgtgcaacacgtggtttctgcattttccagtatgtaaaagtgggcagactgaattactgcaataagattaagcatgtcaacaagccatgtttttatgtccagtccaggaatacggaattttagggttttcagctcagtttcatttttctgttggtagtgtgttggcttccaagttccaaatttgtgtacttccatatatacttgcatgattagttagctttcaagatggtattcacttacttgatggggcaatgcttgaatgccatgtttttttgttgtcatctgaattgtcggttattgtgatttgttttgtatgctatctcttcttaatgtttgcattcggtaacaatattttcctcgagtattgtaatagtttggttgtcatttaattgctggagttgcatgtccgaattataaatcccgtgttatggtttttcttt

SEQ ID NO: 10223 - DNA, 401 bp, Setaria italica
  Peptide Sequence Number=SeqID_76197
gtttgattaagttttttctgcctcctttaaaacagatggaaaatgggcattgcaaatgtccaagagccaagtatcacaatttcatcatattcacaatgcctacatacattctactatatagtagacagtatccgtataaagaactaaagtatgctcttcatcgcaaccggtagcaaattctaaggtgtttaccttggtaggcctgcttgaggcaggtctgctctgtcgctttgagaggtacttagtgcgaatcttcttcctctcctcgttattgtactgcgacgccctcacgccgagctccctcaacgcacgtgcctgctcggcattgtcatctgcgacagccttcctgggcctccccctccctctcttcacttccacctggacctcctcttccactccca

SEQ ID NO: 10224 - DNA, 3368 bp, Setaria italica
  Peptide Sequence Number=SeqID_76198
ctgggggatttgaggaccattatgaaagggtggtggttgcagatgagaatgttgatgaagaggtgctggttcttgaatctgcccaaatgctgacatgcctgggaatccctggagagaaccaagaccaaactgctgggcaacatatggtgcctgcattatatggcttggtgcaagaaattgattggttggagttcttaaatgacttggaatatcatttgatactgtgggaggaacagccctgagtgggatttcaatctcctcaggctccaatagaccttgtctagcctttttctttttatttgaatctagaggactttgttgctggcgacgtggctccacatttttatttttcttagcagttactctgcgaggttcactgttgctgacctcactctgaagcaaatgtggctgatgtccttttaggatagtgtttaaggaagatttatcatgcaaccttgcttgcaaaagtacctccacttgttccacaagctgttcatattggttctccaggaatgcataagcttcaatgctttctgaagacttttctgcaattttatataaagttcggtacaacgtattgtaccgccttgacaatgaaaacctgggatcttcctctatggtcgcatagccatagctctcccccggagactcgcttcgagcatcttttctccatcttttcaggatatagtgtggtggaagttctttaatatttctgagttcaagaattttcaaaacatggcaacatggaagacccaggaattcaaacttcttacaactacaaacaaccacacattctgttgaatcaaacctaacaaactgaccccgaggcttgtctttggcagttacctggtactcagatattggtccaatctcaccacagctaaagaccatgcagttcgatatttgctcaaattccatcctgaacatctcaaaaagtgttggagtatatgaatttgcagcttgccaaagcagccgcagtggtgctaccctttgcgtcatttgagccccaaggtagtcagcttgttgttcagccaggcgtttttcctccaagaatttattgtaactgttgaagaagttttgaagatctacttctggtttaaggagatctttcaggatagtatctgtgttatcgcttcgtagtgtggcagcaatatctgcacagaatgtatcacgcccatatggcgaaccccatctttctctatcctcgtacaatttatttagccactcattatcctttagattatacttctctgaaaggatttcccagcttgaaatgaagtcctcctcctcatagtcatacagccacctactaaaatcaagtgcaaaagtttctgaggcttggaagttatcccttaataccttgctagcagtcagatataaatgcaacaatgagaagcggtgggtggtcccaggccaaacagaagaaattgcatcactaagttctgtagactgatcagtcaaaactgtttttggctgctttccactcatagctgatttgaaggtctcaaacaaccatctaaatgattgaactgagtcatcataaatcaatgcagtaccgaatattattggctgcttatgatggttaacaccaataaacagcagtagaggtctcccataatcacttgtgcaatatcttgtgtcaatacacactacatcgccgaagtaattgtaatccattattgatttaaaatcagcccagaatacatttgtgaattgatcatcttcatccacctgaatggcataaaagaaagaaggattctcgcctttcatccttcgtaaatattcactgatggcctgggcatcacctaattgcatatcttttatgcattttgtccttgtgtaatttttatattcatttggaatcaaaacaacttttggtggatcaggaggctgttgtacttttgctagcaatttttgcgacttcaaaatctgaatgtccaccaaaggagcttcacgatcatgattatgatcagacacaaactcagtcactacatattttccactttctgtaattttaatagtcatgtgtgcctggcatccagttcttgtttctggtcgtggcttctttgattccgaagaaatacttttcgtacgaaatccctccttggaacaaacatatgctcgagattttgtaacattctttgcggttttgtccaaacagccttttcggacactgaacccttcagctccagcatagttgacatagaattcataggccttatcctcatccaggaaaaccatccctatctttggttctcctccaggtccagcaactacttcttcttctggatctggttcagcttcaattatttcatcttccttgctctcagccttctcttccattttgagactttgcttctcaagacgtttggaacgtctttctgaaggctgccctgaaggctgctgtccttcacttgaaaggaatctacctccatcgccacgcttacgcctttcagccaaagcttgtcgtgaggcaatcttggtaggcctgcttgaggcaggtctgctctgtcgctttgagaggtacttagtgcgaatcttcttcctctcctcgttattgtactgcgacgccctcacgccgagctccctcaacgcacgtgcctgctcggcattgtcatctgcgacagccttcctgggcctccccctccctctcttcacttccacctggacctcctcttccactccctcctgatcctccccttcaccctcctctgcctccttatcaggaggaggaggagcagaagcatcttctaccacatccttctccacctccaacccagcaacagactcctcctgctccaccatgcctttcttactcctacccctcctggaacccctcccattctcagcacctcccatcccaacacctttcgccacctcaatgatttccgcatccttcttcgcaggattgcggctcctcgtcctataaggctccctcttcctcttctccgcagcggtggcagcagcagcctccaccacctcctctgtttccttccccttactcctcctgttggcgtaactgcccctccagcagaggaaccgctgcatgatcttctcgccgtcgccccctgaacggcggttggagcccgtgcgcgccttgaaccccaccgctcgccgtagccgtagtagaactccttggcggcgtcaacggagtcgaactccatcccgagcgccggcacggtcgccgcgacctcgccgggcgcgacctgcagctcgtggttgtgctccaccaccagcctggacaccttccacttgcccccggcgccgtccttcgcaaccacctccatcatcgccaggcaccgctcgcccgggccccccgcaggcgagccgacgcaccatcctcctcatcagcgtcgccggccctgctg

SEQ ID NO: 10225 - DNA, 556 bp, Setaria italica
  Peptide Sequence Number=SeqID_76199
cgccgcgccatggctggagggcacctcccgatgccccttctgccgcgccgccgtcgacgccaacccaccacagcccgccgccggcgcctagccctggtgccggcggccccggccggtgtgcgcctacctcggctagaaagcaaagcaaagctaatctgccgccgatcaagctcggcagcgagctaagccacaccattgccgtgccgtcgggaaagtggagacgagcgcgatgagcacgagacatccgtgaacctgttgccggtttcgcgcgcacccggcgcgtgtcgatccggccgtgtcccgtgttccctagagcaatcgatgagcgtttttgccgtggcgagtagtcactcactgaacagtgtgttagagattccagggtactcctttccgtgtaaattttcgtctgatccaggaggaagggaactgtaaattcgatcgaaagccttggtttacagttttgctttgaacttaaattgctcatttgaagttttgagtcggggtcggaggtcccctttgggaacaaaaaaaaaaaaaaaaaaaaaaaaaaaaaaaa

SEQ ID NO: 10226 - DNA, 467 bp, Setaria italica
  Peptide Sequence Number=SeqID_76200
accaccgcctccaccaccaccaccaccgcagcctctcccagcagcgcgcggaaccctagcctcacccacccgtctccgtcccccgcccgacccggacttcctcggcgagccatggccagcttcggcgtcgacacccgcccggccgctgcggcctcgggacggggcggcggcggtggggcggggacggggacgggggagggcgctctgtccttcctctcccgcggcctgcgtgaggacctccgcctcatccgcgcgcgggccggggagctcgagaccttcctcaacgcgccggtcccggagcccgagctgtccgcgcggctccggcgggcctactcctcctcggcctcctcgtcgcggacgcggctggacctgtccgcgatcgggaaggcgttcgaggccgagtcgtggaggggcacgagggggtccgtcagttggaggtgggaggaggaggccgaggagtgggagct

SEQ ID NO: 10227 - DNA, 659 bp, Setaria italica
  Peptide Sequence Number=SeqID_76201
caatgtactagtagaaagcgacttcacttcacatggcgatggccactattttacacactcccattgcataccacggcagctgaccaccagccacacaccacacacactacaagtactcctatcatccaacttgacggcgagatcatgcatgtaggtacacgctagtaggagcccagcgcggccctaaagacaaaatctttcggccacgtcgagacaaccacacacatgcacgcctttgtttaatcctaagccatcatcatcgggctaataccaccatctactacgctaatactgccactactagacggcggtcgccgttgctcgagtcctcgtgtcgccggatcacgcgccgtcgccgccgtcaatggtgtcggccgcccggccgccgtcccccgccgtcatggaccgcagcagcggcgactccgaccctacggtgtttttttttttggtccatccaatccaagcacacagagatgccattagccgctgctagtactaaccatcatgcatactaggttgctgccgtgtcgctgggaggtgggccacaggtggcgtccgcctccgcgcaagtacctttggacgcgttgaaggagagcttgcagtgggcgatggcgctctggatgccgtcctgcacctgcagcagcgagtccgtcccgccg

SEQ ID NO: 10228 - DNA, 261 bp, Setaria italica
  Peptide Sequence Number=SeqID_76202
ccggcttggtgtaggccacggccacggccgtcttcttgcggccgaagcactggaccgtgcccgcggtgggtcgggtgagcacggtagacatggtggcggtggtgggcttgtcgaagtcgtagtacatgaaggtggacttgaggcggaggtacttgttgacgtagttggaggcgtccttgccgagcaggtcctccagcgccagcaggtcgaaggcgttgctgcgcaggcggtaggcgtgcgccgcgaagctggggccgatgt

SEQ ID NO: 10229 - DNA, 239 bp, Setaria italica
  Peptide Sequence Number=SeqID_76203
aggacatcttcggccgctacgaccgcaccctccttggcggcctcgtcgacgtacttctggtagtaggcgacgagggccttggcgatggcctggcgaatggcgtagatctgcgacgtcttccctccgccgcggacgcggatcctcatgtcgatgtccttgaaccgggagcgcccagcgagcaagatgggctcgaaggccttgaggcggagcccctccgggcggatcagctcgatgggggc

SEQ ID NO: 10230 - DNA, 1006 bp, Setaria italica
  Peptide Sequence Number=SeqID_76204
gccatacgcaagggattgttagaacctgtcaagaatgctgaagaacaggattggttttcgcagcctgagtgacagatggaaggttcatttgtgcaggaaccagaatggagaggcagatcctaatggctcagtatggggagttccataccgatggggtaccatggtcatcgcgtacaagaaaaacaagttcaaaaggcataatttgaaaccaatacaggattgggaggatttgtggaggcctgaacttgctgggaagattgcaatggttgattctcctagagaggtcattggtgcagttctgaagcatctgggttcatcatacaacacagttgacatggaaacagatgtcagtggtggtagagaagcagtcttgaaaagctttacgcaactacaaaagcaggtccaactattcgacagtatgaactacctgaagtcatttagtgttggagatgtatgggttggcagtgggctggagcagtgatgtgatccctgctgcaaagcgaatgtctaatgtcgctgtggtagttcccaagtcaggcagcagcctatgggctgatctatgggtggtaccatgcgcgtctagatttcagaccgaccaaatcggtggcagaaccagaggcccatctccactcatccaccaatggtttgacttctgcctgcagagcgctaggagcctacccttccgccaagacatcatcccaggagcatcacctctgtacctggagaaccctgtgccggaggtccctcaagacaagaacaagaggaagccgaagctggacacgaacatcgtcaggggagtgcctccacctgagatcctggagaaatgtgagttcttagaaccactgtcgggcaaggcgttggaggattaccagtggctagtatcgaggatgcagagaccacggcttggtctgttcgggaatgcgttgcaaaagatatcgagtgtattggacttgaaatcaagattatagagctcgtgtactgcacttgaaccaaaaaaaaaaaaaaa

SEQ ID NO: 10231 - DNA, 956 bp, Setaria italica
  Peptide Sequence Number=SeqID_76205
gtagttgggatggatcagccgatcaacagaaaactacccaacaatgagcaacctaaacagtcacgcgaacacaaatgtctacagtcatacccctccattccacaagttaaggcaaggaagatagcttaactaatatgggtgaaacgcatgaaacaggtgccccgtaaaattgaaatactaattttacatagcacaaagaacttaaaccatatcagaatcccttgacatcgataataagcaaaaccatacttcagagactattcaaaatctcacaatcatatcacaatgtcaaaacggttcaacactaggcttaaaagtctaaactttaaggtaaagcagcagctagatatagaaccagataagcagctcgattgataggagatgaagccaacaacaccgacaacggtgtggcaaattttgatgcggcaagcaatcgctcaacggtaggacttctggaacctggcgcgggcaccacgaccaccgaacttcttgggctcgcagcgcctggggtcggcgacaaggagggtgcggtcgtagcggccgaagatgtccttgacctccttcttggcggcctcgtcgacgtacttctggtagtaggcgacgagggccttggcgatggcctggcgaatggcgtagatctgcgacgtcttccctccgccgcggacgcggatcctcatgtcgatgtccttgaaccgggagcgcccagcgagcaagatgggctcgaaggccttgaggcggagcccctccgggcggatcagctcgatgggggcgccgttcaccttgatcagcccgcgccccggcttggtgtaggccacggccacggccgtcttcttgcggccgaagcactggaccgtgcccgcggtgggtcgggtgagcacggtagacatggtggcggtggtggctgctgggatcgcagcggcggcggtagggctttggcggcttgggggtggggggcg

SEQ ID NO: 10232 - DNA, 2318 bp, Setaria italica
  Peptide Sequence Number=SeqID_76206
atgtcaaacgaatcaggagctgtctcatatccaaagagtggagaaacataggccggggtattgagttgatgcataatgctcaagcatattcatttacttttgataaagtatttgatcattcagcatcacaagaacacgtgttcttcgaaatatcccaactagtccaaagcgccctagatggttataaggtatgcatatttgcctatggccaaactggttctggtaaaacatacacaatgatgggtaatccagagttagatgaacagaaaggaatgataccaagatctctggaacaaattttccaagctagccaggctctcaactcacagggttggaaatataagatgcaggcctcaatgttggagatctacaatgagactatacgtgacttgcttgctgtgaatcgaatggctgctcaagatggtgcttcttcaaagtacactatcaagcacgatgccagtggtaacactcatgtgtcggacctcacggttgttgacgtaactagtatcagcgaagtttcttcactccttagacgggctgctcaaagcagatcagttgggagaacacacatgaatgaggaatcttccagaagtcattgtgttttcactcttcggatttttggtgtaaacgagggtacggatcagcaagttcaaggagtgctgaatctaatagatctagcaggcagtgagcgcctcaacaagagtggtgccactggtgatcggctaaaagagactcaggctatcaataaaagcttgtcatgcttaagcgatgtgatcttttcgattgcgaaaaaagaggaacatgttccatttaggaactcaaagttaacttatctgctccagccatgccttggaggggattcgaagacattgatgtttgtgaatctgtctcctgaagtgtcttccacgggagagtcaatttgctcgttgcggtttgctgcaagggtgaactcttgcgagattgggatccctcggcggcaaacccagctgcggagctcacaatgatgaaataggggcgaagtggtgcctgtgaatcgccaagatccatctggcgatggaccatgggcagtgtacgttagtattgtttgtgttgattcggcgatgcaattgatcagttgcatcccctgtgattggagttggtgtgtattgtcgggtccgtttgagttgttgtttgtcgattgtgctgacggctgggcctctttaatcttaggatctcatttgtacaaactttttcattattagtcttgattcatttggcgttgacagtgcctctgatgagcctggtgtgtaaaccactgactgctagcatgacatgatgattatatttccttatttgcgaattctgaccatacattatgaattgaattttttggagagctgctgctgctgactgctgctaggccattttggccatgagctcctggaggatgacttttgtctccgcgtagcggtcgcttatcttggggtcatccttggcggtgacagcctgctgcagcgcctcgaagctgtcgaagaggcggttggcgaggtcgacgtagggccccttgtcgtcggcggcggtgatgagcttgtcgaagtcgtagtacatgaaggtggacttgaggcggaggtacttgttgacgtagttggaggcgtccttgccgagcaggtcctccagcgccagcaggtcgaaggcgttgctgcgcaggcggtaggcgtgcgccgcgaagcgtggggccgatgtccgccatgaagatgccgttcttgaggaaggagcgcgtccccgtctccgggttgttgatctccttgttgaggatcttgggcacgggcaaggggaactctgtgagccaccagccgttgttggccggctcgccgtcgtcggcggcgcgggcggcgtcaggctggcggagcaggacggcggttgcagcagcgaggccgaggtggagggaggctgatctcctggacgcctggcacgtcaccgcgtgctgcgttggccggctgcttctcccggagccggagaaggcatggcagcttgccgccgttagtctagtcagcagctgctggtggcgctgtgagataagtggccatggggactggtgggagtggatactggatagcagcgcggggaaggaggcagctttgtcgtttggtttggatgaggtaggtcctcagttcggtctgtggtggtagagaagcagtcttgaaaagctttacgcaactacaaaagcaggtccaactattcgacagtatgaactacctgaagtcatttagtgttggagatgtatgggttgcagtgggctggagcagtgatgtgatccctgctgcaaagcgaatgtctaa

SEQ ID NO: 10233 - DNA, 917 bp, Setaria italica
  Peptide Sequence Number=SeqID_76207
gtttttcttcgccaacacaagtgtctacagtcgtatcatcaattccacgaagttgggcaaacaagatagtactaagcaacatgggtgaaacgaatgaaacacgtacttggtgaaattgaaatactactcttacatagcacaaaatacaaggaagccatatcaaagtgcctggacatggataaacagcaaaaccatatttcagagactattcaaaatctctcacattcatatcacaatgtcaaaacggttcaacactaggcttaaaagtctaaacttgaaggtaaagcagcagctagatatagaaccagataagcagctccatttataggagatgaagccaagaccgcacacaacggtctggcaaattttgatgcggcaagcaatcgctcaacggtaggacttctggaacctggcgcgggcaccacgaccaccgaacttcttgggctcgcagcgcctggggtcggcgacgaggagggtgcggtcgtagcggccgaagatgtccttgacctccttcttggcggcctcgtcgacgtacttctggtagtaggagacgagggccttggcgatggcctggcggatggcgtagatctgcgacgtcttccctccgccgcggacgcggatcctcatgtcgatgtccttgaaccgggagcgcccagcgagcaagatgggctcgaaggccttgaggcggacgccccgtccgggcggatcagctcgatggggacgccgttcaccttgatcagcccgcgccccggcttggtgtaggccacggccacggccgtcttcttgcggccgaagcactggaccgtggcccggggtggggcgggtgagcacggcagccatggtggcggtgctggctgctgggatcgcagcggcggcggtgcaggcggcggcgctagggctttggcggcttggggtgg

SEQ ID NO: 10234 - DNA, 246 bp, Setaria italica
  Peptide Sequence Number=SeqID_76208
tattagaggcaaacaaagcttagaaaccatatgtctgcttctggcatacaagttgaagtaccctgataatatataccttttaaggggaaaccatgaagatgcaaaaattaacagagtttacggtttctatgatgaatgtaaaaggagattcaatgttcgactatggaagatattctgtgattgcttcaactgctttcctatggcagcgcttattgatgacaaagtactatgcatgcatggtggcct

SEQ ID NO: 10235 - DNA, 663 bp, Setaria italica
  Peptide Sequence Number=SeqID_76209
tgaggaacttaatgatactcagaagggtttagtggaagtgtccaagaagaaagcatatgacaatttgaaacttgttcagtatgaaggaaaaaattcagttcatgaacatcaggtgatatttggagataagggaaacaattacctgccgggattaagttcaatgccacaatctccttcaccactgacaaggtttcatgatggcatttctccacatggcgaggtttcggagagcgctccagcacaggagagcccccgccctcgtcaacgttgggcgaaaatcgtgactgtggtcaccactcttcgtttcttgaacaagaagccccaggcgtgtcccggagaagtgtccccaaccccaaccccaaccccagaaactggctttgggatgacatacctgtccgataatttaatgttgggggcagacatagaaatgggcccaattcctctgatagaaagtagcccttggatgactgaatggccgttaaatttctatgagtgggagtaacatgtcctaagctaggctcctcaagcttttatagtttctactttctcagtgaaactttcgtagggactccaggatttggttgagatgaatgtttgctaccctaagttaatgttgttgctgtttatttctaaatgacgtcttcactgttgctcggaacaaaa

SEQ ID NO: 10236 - DNA, 150 bp, Setaria italica
  Peptide Sequence Number=SeqID_76210
acgatgtctccagctgaatccttgtatgttacatataacagccaaaagaatcatcaaacccatacaatctagcacgctagtctcaagctattttacaaagtggttttcttcaggacgatgtctccagctgaatcagtgcaatggatttcc

SEQ ID NO: 10237 - DNA, 577 bp, Setaria italica
  Peptide Sequence Number=SeqID_76211
tggggctcatacagagatcaaggacaagaataatgggttatctccgcatacaaaacttggatattttttttccattacatgataaggaattcaaatagatagaagaaaaaaaagacttctgtgtagcatttttgtgtgtacgtatgattatggagaggaggtattgacacggaagaagacatcgtcagtgcaatggattttcttacagattacttcaagtaccatacaaggattcagctggagacatcgtcctgaagaaaaccacttgaataatagatctacgtaccaaagttgtgtcaaatgttacatataacagccaaaagaatcatcaaacccatacaatctagcacgctagtctcaagctattttacaaagtcatactccattcctaatatgggattcctcagttgtcttcggaaaaaaaaaagtgtactatcgtgtgctgacaacattacaacggatcccattacagcatcaccacagatgattcggatgattgctatagacgtgcaggattggcagaaaagtaacttccatacggaggaactgtttaccatgaatcgtgctgccgggaaac

SEQ ID NO: 10238 - DNA, 1458 bp, Setaria italica
  misc_feature (51)..(51): n is a, c, g, or t
  Peptide Sequence Number=SeqID_76212
tccccttgttgttgtcctttggtctagttctctttagtttttttttttttntttttttttttttttttgtgtaagaaaaccacttgaataatagatctacgtaccaaagttgtgtcaaatgttacatataacagccaaaagaatcatcaaacccatacaatctagcacgctagtctcaagctattttacaaagtcatactccattcctaatatgggattcctcagttgtcttcggaaaaaaaaaagtgtactatcgtgtgctgacaacattacaacggatcccattacagcatcaccacagatgattcggatgattgctatagacgtgcaggattggcagaaaagtaaacttccatacggaggaactgtttaccatgaatcgtgctgccgggaaacatattatgaaataaagagatccattcaattaactgatgtattatgttctgtaactgtgtatggaggtctagggagaaacagtgcctttgctaactgtggtacaaaaaaatgggtcaacctcggataaatagtggttaaaagactatgcacagaagggggacagatgcatcaatcgattggatgcttgtctgtttgcctggtggtgtattgggctgaaataagaagcaaggacaggaacgcacttgccacgaatatagcatcaaaccagcggtggtagaagtcaaattggatatcaccacccaaaacatcagtaatgatcaccctatattcatttgccaggcttttccttataagaagaatggaagatatgaagtacatgcccataatctctgataggaaaagaacaacattggttgtcgagccactcccaaccctagagacagcaaagaagaacttcataacatttgccaagaaacctcgaacagatatgacaaccaacattccgatgaacatcaaagatatgtactgcgataaaagtgcaacatcaatgccaatgtcaaaatgcctcaggaaaatcgttattgtcattgttacaggatcaacagagcctgactccttaaagactacactctgcaaggacttaagcatcttataaacacaatacactgacaaagcatatccaagtagattctgaagatgccctctccatgttcgggaatatgcagcagctatcttagcttgacggagttcatatatctcaagaaacagctgtttggaaagctcttccagtgcctggacttctgcttctaagttctttatatcctgctcagtttgatcttcctgcacagatcgaacaactgttcccactatacgcttcagaaacgatctggcctttagcttctcctcggatccttgaatcctctccatttccatttgggacaaaataattttctttttcttagcagtacatgactcgatggattgcatcagctgccgttccaaagttttgatgtctgtttcatcaatttccctgatgaacagcgacagataactgtatggcag

SEQ ID NO: 10239 - DNA, 438 bp, Setaria italica
  Peptide Sequence Number=SeqID_76213
agagggttggttgtctgttggcttattatcttatagaggtgtctacgagtctgttattgaagtctgtgctgaggtgagaaaggtattggagctgttagttggacagatccgaactaaaattttgaaaaagagaaatcggtttcggtattttcatattctaactcaagtagcttatctggatgatattgtgaacagctgggcatacacctttcaaagattacatgttgatagcaggacaggaatatcaggcacaaagagttcatgctccgaagtgtgtcaaagtactagacatcttgcagaaaccattgtacaagttgctcctgttggcaaccctgctgaggttgaagacattccaagacccaaccaacaggactaaggaactagtactggtcctaataagatgcaagacaatccagttcagtgtactgcagagcaagt

SEQ ID NO: 10240 - DNA, 224 bp, Setaria italica
  Peptide Sequence Number=SeqID_76214
tgtactgcagagcaagacaattcagttcatcttgcagaaaccaatgtacaagttgctcctgttggcaaccctgctgaggttgaagacattctagctcaacacacagaggactgtgaagttgttcctggtcctaacaagatgcaagacaatccagttcagtatactgcagagcaacttggaacccatactatggtctgtgatcttgatgatgatgatgtcacatt

SEQ ID NO: 10241 - DNA, 1619 bp, Setaria italica
  Peptide Sequence Number=SeqID_76215
aaggaagttgtgttctcatccatggaaaagaatagtgtacctcgctctttctggtctacttatcttaattctttgatccaacagaaaggtattgcaaatagaattaaaatggtcttgtcaagctgtggtctagcatctgcacaattaggaagtcatgattcaatgttgccgagccatgttgaaacacaggagaatttttgtggcaacagatcaaattccactggttctcatattattgagggttacctcataaattatcaggctttcgagttttagtggctggagcacccagatcaggccagcaacacctaattcgttgcctactccatggttttatgggccagattgtaatacacaagcttgatcttgcaactatggtgcaggagggaaatggtgatattcttagtggactgacacaaattcttttaaaatgcctaaaccttggaaggtgcatcatctacatgcctagaattgatttgtgggcagttgataaggtccataatcagatagaagataatatgctcaatatggggacaagcaatttagcatcctcaactaccaatcacataagaaaatgttcagaagtttggaatgcattggttgagcagatggattcactgttagcttctgtatcgataagtgttatgtccactagtgacctgaggtttcaagatcttcctagtggagtaaggggtttcttcagcacacatgttgtggatcaatgccttgcttcttcagaacacacaattccaagattttctgtgaatattgacagccactctagttgggatgagatgattgattcatgtgcttttcggttatctcatgacttgattcaacatcatgttcaatttttgcatgacaaatctcataagaataaccgtcatgaacagaaagaagtctttacttccatggagatcagtgcacaaggtgaacctaagtccagtgagaatgaccaacccatgtgtggagttgcttctagggagaatccaactcagctggctgcaagcagagctcaacaagagccaccaccatctaatgtgaaagataatgtaaaaaatgttcagaaacctttagaggacactgtgcaaagatatccgtctagtaggattgtaaaaggcaatgagacacttgctattgctgcttttggaattcagatactgcagcaccctcagttctctaaactttgttgggttacctcgaagctacgggaaggcccctgcactgatataaatgggccatggaaaggctggccatttaattcctgtttattgcatagcagtgcctcacctgataagtcagtaaatggaggaaacaatgttattaagggcaaggaaaagactctctatgtgagagggttggttgctgttggcttattatcttatagaggtgtctacgagtctgttattgaagtctgtgctgaggtgagaaaggtattggagctgttagttggacagatccgaactaaaattttggaaaagagaaatcggtttcggtattttcatattctaactcaagtagcttatctggatgatattgtgaacagctgggctaatttagactaattaagtactaagttaagtaaaaccttaaaaacttaaaaaaaacttaaaaaaaaa

SEQ ID NO: 10242 - DNA, 349 bp, Setaria italica
  Peptide Sequence Number=SeqID_76216
cggctctcccagctcagcgcgggccgctgctcgtgcacgccccgccggaacaggtgctggtccaggctgccgttgggcatgtactcgtacaccagcagcaactgacctttcttgtagcaccaacctgacagtcgcaatgcaagaaacgcgttcagaacaaacagtgcatcaatcacaaattcagaatcagcacagcatcactccatgctataactgtagcaacttgcaaggatccatgactagtacacagatgccgattttaaaatacattttgaaatcatagaattgaaaaatcactaacaggatggttgaacggatcagagtgctacagtaggttgttggcccgtac

SEQ ID NO: 10243 - DNA, 407 bp, Setaria italica
  Peptide Sequence Number=SeqID_76217
gtgctacagtaggttgttggcccgtacacgatttaataaacgcgttagaatttgagtagaatacatcgtcctctagatatttgtccatcactattttacactattgactcatcaatgcatataataattcagagtggaagttgattgctcagctacaacaaactggtcaactctgatcggctaacgaacaactaacaatggacagctaaatctcaatcaaactttaaaaccgaatctggtaaatatcatcattctgatttgagatgaaattaggaattttttcacgtaccaatgagagggacgatgttcttgtgtcgcagccggttgatgatctggacctcggcgaggaagtcactgacgcccctgctgtcgccccggatgaacctcttcacggcgacctccatcgt

SEQ ID NO: 10244 - DNA, 1971 bp, Setaria italica
  Peptide Sequence Number=SeqID_76218
tcgttgtcgtgtctcagttttttttttttttttttgtaatgaaagccctttattattcaagtgatatattttgaagagctctggctgtacaattctaaaatttctgacaagccaaaacacactctaacttcatccttgatctgctgccagaaacagagatcaaggtcccctgtatgtacctaccaagtgcccttacgaattcgacatatacatctatatttacatttcatggccaaatgcatatacgtgaggccaagattacggtgtttatgcacacagtgcaagccctcgatcagcggccggaagagaggacggggaagtaaccctcgctgctgttgggcgccgtgtcctgcgtggccatcgccgtcgacgacgcgccattgccggtcgtcctgtttgtcgtcacagacaactcgatgtcgccgaggtcgaagtgcgctcccccctccggcggccacacgaactgcggcttgaacggcggcacctccggtggcggcgaggccttgttcagcacctgcagcacctccggcatggtcggccggtccccggggttcgggctgctgcacgccagcgccagctgcagcagccgcccggcctcgtcgtggtcgaacccggcggtgccgaggccttggtccaccgcccccagcagcgcgccgcgcccgtgcatctgccacacccagtccgtcagcagcgggcacctcaggtcctgggtgcgcagcgcgtactgccccgtcaccacctccagcaccagcgcgccgaaggcgaacacgtccgtctgccgggaggccttgtggccgacggagtactcgggcgcgatgaagccgcgcgtgccggcgacgttgaggtcggtgaaggagttgcggtcgtgctcgaggacgcgcgccaggccgaagtcgccgaggcgggcgcggaaggaggcgtcgaggaggacgttgctggccttgatgtcgcggtggagcaccatgtgggtgtgctcgtggtggacgtagtggagccccgccgcgacgtcgcggacgatggcgtagcggctctcccagctcagcgcgggccgctgctcgtgcacgccccgccggaacaggtgctggtccaggctgccgttgggcatgtactcgtacaccagcagcaactgacctttcttgtagcaccaaccaatgagagggacgatgttcttgtgtcgcagccggttgatgatctggacctcggcgaggaagtcactgacgcccctgctgtcgccccggatgaacctcttcacggcgacctccatcgtcgcctccggccggccgtcgtcggcggggaccacccccttgtacaccatgccgtacccgcctttccccagctgcagccgctcgtcgaagttcctggtggccttcctgagcttgtcgtactcgaacaccctgggcatcccggggaggttgttcagctcgtgccccagacgctcctgccgcctctccatggaccgcctcgcccgcagcctcttggtcaggaagaaggcggcgacggcgacggcggcgaggctgacgggcacgacgacggcgacgacgatcagccacgtgttgctcttcttgtcggggatgacctcgatcgacaggctccagtcgaggatgcagttgagctggaagctggtgccggtggacgccgagaagccgaggtacgccgtctccgggacgtgctcgctgaggtccagcggcgactcgaggacaggggacgacggcttcggcctgcccctgacgttgaagaacaccgagatgtgccgcgccacgccgtcgtactggatccagaccgtgtagttggtggcggtggtcacgttcgtggcgatcctgaggtcgttgaggctcgccgtcttgctggacacgacggagccgacgtcgaggccgacgtggttgtcgtcggggtcgtggacctgcttgaacgtgtcgagctcgacggccacgaaccggttcgcggccgggccggctttctggagcgtcgcgt

SEQ ID NO: 10245 - DNA, 663 bp, Setaria italica
  Peptide Sequence Number=SeqID_76219
tcttttctaagtcttttgtcttcaaattcttccttttttagttccatctctctttctgacttcttctgagctcttccaacataccattctttgtcatttatcttctttccattaagttcctgaacagcacgggcagcagcatctggattctcaaaattgatgaaaccaaagcactttgatttgccatccatgccaatcatcacaaccgcacttgtaatacttccatattcaccaaaaattttgaccagatcctcccttgtggtagactcagacagatttttcacaaagacattgttaaattttgtcttatcaaaagaatgatctcgctcttgcttgcgaagaaaaggtccaacaaaaacaggcttatcattgataagcatcccattaagactttttatagcagcctgtgcagcttcttctttttcatactgaacaaaaccaaagcctttggattggcccacttcatccatggctaccttacatagaagaagaaataggtaaccaaaatagtggaaaaggtctcatgaagagttttgttgtctattgtcttgtcaagattcttgatgaaaatgttagcagatccgctcctgcggctgcttgggtcacggtttgaatacatcacccggatgggcttgctgttaagcagagcaaagttgagcactt

SEQ ID NO: 10246 - DNA, 1063 bp, Setaria italica
  Peptide Sequence Number=SeqID_76220
gttacaataccaataccacatgcatgttattattacgcatataaggaaagacaatacaagcgaaacaacagtaataaacggtagcaatctgagtttgctagaccatttatcgatcaccccatgcatgatgaaaagaaaagaaggaaaatttatatgtatatcaatatatggattcctgcccgatgcatgcatcttattattcatatataggatgactgagatagatcaacggtggtgtcccttggcccaggctgcggcggccatgagagagtaggcgagctgccctgtttggcgctgcacctcctccctcaccatctggcgcaccaccgccatgagctgcgcctgcgcgtttccttcttcttctggcatgcgcagcggcagcggcgatggctgctggtctgcagctttcatgcccgtcgccgatgccccggcttctggttccggcagtggcaggcccagggtcagggacagagacgtggacggttcgtgcagagcgccgtcgtcgtcgcggtggttgttggggttgagaagccctagaccagaagcaggttgttgatcggccaccggcggagcgctgtccatgtcctgctgcagaaatagctgctgggttcctcctgcagcagcagcacgggaagaggtggatggtgctcctgccgccgccaacgccgccgctcggcgcctgcacctgcgcaggttggagttccagtggttcttgatggagttgtcggtgcgtccggggaggagacgcgcgatggtggcccacttgttgccgtagcgagcgtgggcgccgaggatgatggcgtcctcgtgcgccgtgaaggcgcggtgctgcacctcggggctgagctggttgcaccaccggaggcggcacgacttgccggagcggccggggatggcggcgctgatgaggctccagcggtgggggccgtgctgttccaccagcctcgtcagctgggcgtcctcctcggggctccacgaccccttcttcatcactactactgccgtcgccggcggcggcgcatcgctcgccatctccataccttaccttgctactgcagatctg

SEQ ID NO: 10247 - DNA, 3647 bp, Setaria italica
  Peptide Sequence Number=SeqID_76221
cgggcaggaatccatatattgatatacaggatgactgagatagatcaacggtggtgtcccttggcccaggctgcggcggccatgagagagtaggcgagctgccctgtttggcgctgcacctcctccctcgcggccggttgggtaacggtacatccgtgctcgtggaaccatctgttgctgaaatgatggcacaggttgctgaccctgggccccagctccacgcctcatacctgggcgtggaccctgttggccctgttggacaactggaacaaagtaatttggcatatggggacccccaggtctcatgcctggaacaagctgctgctagaaaccatatcccggctgagggggtagtcatagctggcggagcttgtccatagaagagttgctgaggagccataggagggtacattggaaggcgtggagccagagtgggcgtcattggtacaggagggcgcatctgagaaaattgtgcctgtaacattgcttttctatcttctttacgctgtgcaaatgcaacatacaatggctttccagatatcattttgccattcatttcagtcaaagcctgagatgcttcctcacgagttgagaatgcaacaaagccagagcctttgctaagacctattttggtcacacatcaccttgcacgaggtaattttgccaaagttagagaataattcacgaagttgatcatctccaatgctatcatccaagttcttgaggtacaagttcagcccttgatacttgtcagcagcatctttcaagctttgctcaaatctcctttttagttccatctctctttctgacttcttctgagctcttccaacataccattctttgtcatttatcttctttccattaagttcctgaacagcacgggcagcagcatctggattctcaaaattgatgaaaccaaagcactttgatttgccatccatgccaatcatcacaaccgcacttgtaatacttccatattcaccaaaaattttgaccagatcctcccttgtggtagactcagacagatttttcacaaagacattgttaaattttgtcttatcaaaagaatgatctcgctcttgcttgcgaagaaaaggtccaacaaaaacaggcttatcattgataagcatcccattaagactttttatagcagcctgtgcagcttcttctttttcatactgaacaaaaccaaagcctttggattggcccacttcatccatggctaccttacatgagagaatggtaccaaatgtggaaaaggtctcatgaagagttttgttgtctattgtcttgtcaagattcttgatgaaaatgttagcagatccgctcctgcggctgcttgggtcacggtttgaatacatcacccggatgggcttgctgttaagcagagcaaagttgagcacttccaatgctcttgcagcatccatggggttgctgaagttgacgtaggcgtatccgagcgagcggcgcgaggtgacgtccctgcagacgcgcaccgacaccacctgccccgcctggctgaagagctcgtacagctgcgagtccgtaacggacccctccaggtcgccgacgtagagcgacgtggtcgggagcggctgcgccacgccgaccccgacgccgaccgcccccggcgacaccaccgcggggacagcgcccgcgctcccgttcgccaccaccgccgccgccacttgcgccgccatcgcctcctacacccctcgacctggagggtccgttacggactcgcagctgtacgagctcttcagccaggcggggcaggtggtgtcggtgcgcgtctgcagggacgtcacctcgcgccgctcgctcggatacgcctacgtcaacttcagcaaccccatggatgctgcaagagcattggaagtgctcaactttgctctgcttaacagcaagcccatccgggtgatgtattcaaaccgtgacccaagcagccgcaggagcggatctgctaacattttcatcaagaatcttgacaagacaatagacaacaaaactcttcatgagaccttttccacatttggtaccattctctcatgtaaggtagccatggatgaagtgggccaatccaaaggctttggttttgttcagtatgaaaaagaagaagctgcacaggctgctataaaaagtcttaatgggatgcttatcaatgataagcctgtttttgttggaccttttcttcgcaagcaagagcgagatcattcttttgataagacaaaatttaacaatgtctttgtgaaaaatctgtctgagtctaccacaagggaggatctggtcaaaatttttggtgaatatggaagtattacaagtgcggttgtgatgattggcatggatggcaaatcaaagtgctttggttcatcaattttgagaatccagatgctgctgcccgtgctgttcaggaacttaatggaaagaagataaatgacaaagaatggtatgttggaagagctcagaagaagtcagaaagagagatggaactaaaaaggagatttgagcaaagcttgaaagatgctgctgacaagtatcaagggctgaacttgtacctcaagaacttggatgatagcattggagatgatcaacttcgtgaattattctctaactttggcaaaattacctcgtgcaaggtgatgtgtgaccaaaatggtcttagcaaaggctctggctttgttgcattctcaactcgtgaggaagcatctcaggctttgactgaaatgaatggcaaaatgatatctggaaagccattgtatgttgcatttgcacagcgtaaagaagatagaaaagcaatgttacaggcacaattttctcagatgcgccctcctgtaccaatgacgcccactctggctccacgccttccaatgtaccctcctatggctcctcagcaactcttctatggacaagctccgccagctatgataccccctcagccgggatatggtttccagcagcagcttgttccaggcatgagacctggggggtccccatatgccaaattactttgttccagttgtccaacagggccaacagggtccacgcccaggtatgaggcgtggagctggggcccagggtcagcaacctgtgccatcatttcagcaacagatggttccacgagcacggatgtaccgttacccaaccggccgcaacatgcctgaagctccagcaatgccaggtgttgctggaggtatgattcagccatatgatatgggaggcttccctgtaagagatgcagccttatcaccttctgcccaaaattgggactctgacttctgcccttgcaaatgctactcctgagcagcaaagaacgatacttggtgaaaacctatacccactggttgagcaactggaaccaaaccaagcggccaaggtcactggaatgctattggagatggatcagactgaggttctccacctgctcgagtcccccgaggctctcaagtccaaggttgccgaggcgatggatgttctccgcaatgtagcccatcagcagaatccaaacacccccgaccagtcagcttgctgcgttatcactgaccgaaggcattatctaacttttgaagacaaacgtttcagtttgcaattgcgtgtgccggataacctctggaaacaccacacgcatgcaaactgaaacgtttgtcttc

SEQ ID NO: 10248 - DNA, 1260 bp, Setaria italica
  Peptide Sequence Number=SeqID_76222
agcgaatcagaaacgagctcttgatgatctagtgatacagcgaggtagctacaatacagagtttttcaagaagctcgatcctatggagttcttttctgggcacacgtctcttcgtgtggaagaccagcagaaggactgctctatgactgccggatcttcaaatgatgcggatgtggggttgtcaaatgcagatgttgaagcggctattagacaagcagaagatgaagctgactatatggctctcaagaagctagagcaggaagaagccgtggacaatcaagagttcagcgaggaggctgctggtagaccagaggatgatgatttggtaaatgaggaggatgcaagacacgatgaacacattatcgaagaacatagatataactcttcggatatggagaaggagaagaatgctgctttgtccaatcaattaaatgaagaaaaggctcttacattggctgttggtgatgaagatacagacatgcttgctgatgtgaaacagatggccgccgccgcagctgctgcaggacaagcaagttcgtccttcgaaaaccagctccggccaattgatagatatgcaatgcgctttatggaactctgggatccagtaattgacaaagctgctataaatcgtcaagtaaatgttgaagaggaagaatgggagctcgatcgcattgaaaaactcaaagaggatttagaagcagaaattgatgaagaccaggaaccgctttcttatgaatcatgggatgttgattttgctacgacagcctatcgccaacatgttgaggctttaactcaaaagcagttgttggaagaacaggaaaaacaggctcgggaagctgcaaaagagttggaggagaaaaatgataatatgagcgctcaccgtagaaagtcaaaaaagaacaaaaagaagaccggcaagttcaagtccctgaaaagaggacgtttgtcatctgaatcagaagtcatactggaggaaacttctgtagatacaatgagcattgatgacaatgcaccctcacctgaactcataagtgatgaatcacctcgccattattctaacaagcgtaagaagattatgtctgctactgaagaagaaaacagtaacagaagtttgaagaagttcaagaaagccactaaatcaagtagtgcctcagaagccttgtcacctaggcacttgagggaagagtttaatgattcagatccaaaatcggcagctagaactaagagtgatggcagaatttccatcccttgcatgtcaag

SEQ ID NO: 10249 - DNA, 282 bp, Setaria italica
  Peptide Sequence Number=SeqID_76223
ggtcgtttcgtaaggcatatactcccacgccgcggagctcaagaagcacggcatcgagatgtacaagctgggcaagaagctgagcaagagaatcgtcggcgacgccaaccccatctacaactaccacatgaacctctccgtcttctcgctggtgcccgacttctggggcatcaagcagctcttcccgatgatgccggtgagccggctcaacgacaagccggggctcaacggcacgctcgtggacatcacctgcgacagcgacgggaagatcgagaagttcat

SEQ ID NO: 10250 - DNA, 273 bp, Setaria italica
  Peptide Sequence Number=SeqID_76224
cgggcaaggcggcgctcccgtgggcgcgccgcatggcgatcgcgttccaggtggccatggcgctggagcacctccacgagacccgggacccggcggtgatccacggcgacatcaaggcctccaacgtgctcctcgacgccagcctcgacgccaagctctgcgacttcggcttcgcgcacgtcggcttctccgccgcgctccagcccccggacgccgcggcgtccagggcgtcggcgcgctccgtcatgggctccccgggctacgtcgacccgc

SEQ ID NO: 10251 - DNA, 1014 bp, Setaria italica
  Peptide Sequence Number=SeqID_76225
caccgtgtacctggcctccctctcctcctcccgcctcggcgccgtcaaggtgcagcgcagcagcgagcgcctccaccgcgccttccgccaggagctccacgtgctcctctcgctccgccacccgcacgtcgtccgcctcctcggctactgcgacgaacgagaggagggcgtcttggtgttcgagtacgccccgaacggcgacctccacgagaggctccacggcgacggcgacggcgcggccggcgccttcccctgggagcggcgcgttgcggtcgcgctccaggtggccgcggcgctggagtacctccacgagggccgcgaccaggccgtcatccacggggacatcaaggcctccaacgtgctcctcgatgccaacctcaacgccaagctctgcgacttcgggttcgcgcacgtcggtgtctcggccacggtgggcggcggcggacgcccctcggcgcgcgccgtcatgggctccccgggctacgtcgacccccacctcctccgctccggcgtggccaccaagaagagcgacgtgtacagctttggcgtgctgctgctcgagctcctgacggggaaggaggccgtctgccgcgagaccgggcaccggctcacggccgcggtggggccaaaggtcagcggcggtaaagtttcggacgtgatggaccagaggcttggcgccgagtacgacgccgcggagtccgccgccgtggcggagctcgccatgcagtgcgtgagcgaccgcccagagttccggccgtccatggccgacgtggtgcgcgtgctccagcaggagaagacagccgccgctggatcgaaatcggaccgcaagatgatgtcctaagttggattgcatggcgtagattgtaaatagtccttgttggtgctagaattatgtctagggtagttaggagaagaatttgcctagtgagatgaggtagaaaaaaaattgaagcttgtagatcactaggtctgatagaaaattttgtcatgccatggcgtgtttgttgaaccgaa

SEQ ID NO: 10252 - DNA, 307 bp, Setaria italica
  Peptide Sequence Number=SeqID_76226
gtttggtcggtattgggctcccggcctgccgcacataagggccggccggctaagcccctaaaactgacaacccgcctgggccaagttgggctaagcccaacgcaaccggctagacgacagaagcccggcaacggccgcgcccgcgcctcgctttccccccctgcgagcgggcccaaccctgtgaaatccgccccggggttgatcccctccaccgccgccacacgacacggaggagggagggggaataggaggaggaggaggcgacctcaccccgcccgagccggagctgtccctgcgtcgcgcggag

SEQ ID NO: 10253 - DNA, 647 bp, Setaria italica
  misc_feature (622)..(622): n is a, c, g, or t
  Peptide Sequence Number=SeqID_76227
ggaaagaacaagggctgaccacagcagtacactctggggcatctaccgaagtcatagttcttgaacttctccaacattgcagctagacccttgctggttaagacgtatcgtgcatgaattaatccatagagcatctctgcagatgactcaatcaattcattttgttcctcagtgaacacatcgcctgtacaaaaatggtcccgtttcatgagtgcaacacagtacaataatctttacctatttgtagatttcaaaaatacaagggacatatccactggttgacagaatcaactctttaggaaaagatttatcaacacaaataaagaatgcaaataagataaggtcaggtgtcttgaaaataagacacagatgataaaaatcagaaaaaaacaaaccaatggtatacctatggcctatagtaggtattaaactagtggctttcttaagttaaaataatctcaccattagaagactcaatgtctaagatgagatcaagagcataatcataatatggcacttggttactcagaccacataggttgaaatcatcctgtatatagtcatcatcaatctcgcagaagaattcattgcctcgcaggctgcagaaccatgcaatccaagntgtgtcctctccctcacgaaccact

SEQ ID NO: 10254 - DNA, 644 bp, Setaria italica
  Peptide Sequence Number=SeqID_76228
aaaagatgtaccaattcgcgagcttgggtctcgctgtaaactgatgaacttgtatccgtttttctgatattatgctattctgtaaccttaggttctctctcgctcgctcactcgatcaaattatgtctatctttttggccacaacatttgcgggccacggtgctctccctaaaacctaggtaaaagggtgcttctgctgaaagtacaactctgtcatgacttcttgtgaagtttgaagccgaagacccttggggtgtattgctgcgtcggcttctgcggcttcaagtgtgggtatgtcatcagaaaaagatgagggaatgttgtcccaaagtatgaaccatcaatgtctgggtaaagtaaagggcgtgcaagggcaagtagttgcaactggttaacaaatatctatccaagaagggtttgccaaaaaagcagaaatggaggtaagtaataattggaaaaaatgttcgatgtgatactaggctgttggcatggagatgagagagaacataaatgacattgcaaaagaaatattttttcaatagtttaaatgggtggttaaaatataaaatcacttgaaagaaacagcacaaaaatggaattatgaaaatatcataataccaaagtaatttcacaaaataacagat

SEQ ID NO: 10255 - DNA, 1294 bp, Setaria italica
  misc_feature (1)..(39): n is a, c, g, or t
  Peptide Sequence Number=SeqID_76229
nnnnnnnnnnnnnnnnnnnnnnnnnnnnnnnnnnnnnnnacctttttgtaaacgatgcagatagacttttttggatcgagtgagcgagcgagagagaacctaaggttacagaatagcataatatcagaaaacggatacaagttcatcagtttacagcgagacccaagctcgcgaattggtacatcttttggccacaacatttgcgggccacggtgctctccctaaaacctaggtaaaagggtgcttctgctgaaagtacaactctgtcatgacttcttgtgaagtttgaagccgaagacccttggggtgtattgctgcgtcggcttctgcggcttcaagtgtgggtatgtcatcagaaaaagatgagggaatgttgtcccaaagtatgaaccatcaatgttgccttggtacttggatcttggatagtgaagttcttcgcatttcggacaatatatcttcactgtgctcgatctaggaatatctgattgtcctgctggaagacagggctgaccacagcagtacactctggggcatctaccgaagtcatagttcttgaacttctccaacattgcagctagacccttgctggttaagacgtatcgtgcatgaattaatccatagagcatctctgcagatgactcaatcaattcattttgttcctcagtgaacacatcgccattagaagactcaatgtctaagatgagatcaagagcataatcataatatggcacttggttactcagaccacataggttgaaatcatcctgtatatagtcatcatcaatctcgcagaagaattcattgcctcgcaggctgcagaaccatgcaatccaagatgtgtcctctccctcagaaccactgacatcagaatcttcactatcggattcgaaatcctcaccatcggacaccttcccagccttgccgagcgacgccggcagcttccccgcagcgaggcgctccctctccttggccgcgacgcccctggaggtggatggagacgacctctcgaggtgcttctcgagcgcgtccttgatgcgcttccggtccatacccaagccgccgccgccgaacaaccctgatccacgtaaggcgccgctgctcccgctcttccgatccttgcgcggcagctccggtctccgctgctggggagcctcgggagtcgcaggtcggcgcttgtgggctagggtttcttggctgcgcaggcgggggaaacgagagagagagatcggagaagtgacgaggcgcggggcgagggccgagggggaagagaaagaaaaaagaaaaaaccaaaaaa

SEQ ID NO: 10256 - DNA, 365 bp, Setaria italica
  Peptide Sequence Number=SeqID_76230
taaacaatagaccaaacttaggaacggacgaacaacagcaggtagtgggcacaaggtggccgggggccaacctgcccacatcgcccatggccaaagctccaagccatgagatgatgccaaaggcgatcacgtccaaaccattgtgatctgatggttgatccagacccccttttggcctcccaaattccaattccaagtgcatcagttcatggcatgatgagctcatgtgcatggtccagcactctttgacgattaatcgggggtggccacgccctggttaagctcggcaaacctcatgccgaccctcatggagtgcttcaggaacttctcggcgcagcggtggacgcacgactcctcttgcttgt

SEQ ID NO: 10257 - DNA, 798 bp, Setaria italica
  Peptide Sequence Number=SeqID_76231
tggctccacacgagaaacaacatgccaacttggacggcgacacagcaggtagtgggcacaaggtggccggggccaacctgcccacatcgcccatggccaaagctccaagccatgagatgatgccaaaggcgatcacgtccaaaccattgtgatctgatggttgatccagaccccctttggcctcccaaattccaattccaagtgcatcagttcatggcatgatgagctcatgtgcatggtccagcactctttgctgaatatagcaacgagataatatgcacctatggtcaatgattcaaggtaattttattcaatttcatacccagcagcagttggttcaagaggcaacctaactgagttgcatatctcaacgagtgctaaaatctttttaggattacaaatcgatgctgacaaaatccccaaggttagaaacttggcaggggcaacaaaccagcacgtttagtcaggtgtggccacaccctggttaagctcagcaaatctcatgccaaccctcatggagtgcttcaggaacttctcggcacagcggcggacgcacgactcctcttgtttgtccagggtcttgcggcggaacgtgtccacgcagtccgtgaagcatctctccaccagggaattgtacattctcagactgtcacggatctggagctggtcgatcatggcggccatgcgcatcttgtcctcctcgggggaggccgtccaggtcgccgagcatgctcttgtccatggccgccgccgctgctcgaggaagagaatagctaggttttggagactagaaactaa

SEQ ID NO: 10258 - DNA, 332 bp, Setaria italica
  Peptide Sequence Number=SeqID_76232
tattcggtcgtaggtacggtcgtccggtcgtactagtcgtaccttagggtttcttccctccccggccgcccggcgaggacggcgccggcgacagcgacctagggttctccaagtgggccgagaagctccgtggcggcgcctcaggtgagaaagatgctcaggataagaggaagctaactagcaaatggaggccaacgactaaaggcacgctgaagagaacctaccgagttcgatcaactgaagaaggaaggcggatcctgaaagagatagcttcagttctgtccgaagatgaccattttgtggatgcttcaactcacaagggttgccaaata

SEQ ID NO: 10259 - DNA, 679 bp, Setaria italica
  misc_feature (675)..(675): n is a, c, g, or t
  Peptide Sequence Number=SeqID_76233
gtgtgagtagttatctgtggaaatttctaagcatatatacctcattaccttgttatgtaatagagaaggtgattaatctagatcttgtggcggcgcctcaggtgagaaagatgctcaggataagaggaagctaactagcaaatggaggccaacgactaaaggcacgctgaagagaacctaccgagttcgatcaactgaagaaggaaggcggatcctgaaagagatagcttcagttctgtccgaagatgaccattttgtggatgcttcaactcacaagggttgccaaataaggagggaaagtgctcatggtgagagtgtgtgctgctacaatgtgagagctttgttcgatgagcttcccactcctcacctggttctggagattacgcctttccccgctggacatcttactgataatgactaccgcaaggctgagaggctcgagatggtgctgaggctgagcgcttccatttaaaaactagggactgattttccatttcccctaatactttctttgcccaagttgtaaattgtttaccagtgggcctgtaaattgatgctgttggctaagaactaagaactacttgtaaaacctgagttctgctcagatttttctattaatttgagctcaagaacacattctataatttggtctcaaaaaaaaaaaaactaaaaagngact

SEQ ID NO: 10260 - DNA, 388 bp, Setaria italica
  Peptide Sequence Number=SeqID_76234
cgaggtccgagagctggtccaccgtcatctccgccatgagcgcccgcgccgccgcctcccgcccgttgttcaccttcaggctgttgaggtaccccgacgcgttccgcaccgtcgcgcccatctgcttcagccgcttctcctgctgcacgctcagcgacgccgtgttcgactcgaggaactcggcgccggcttcgaggtcgcgcggctccgccggcttcgtgcggccgccggagaggtacatgtccttggcgagggagaagctccggaagatgaccctgcgccgcctctccatctccttgttcagcttcggcgacgtcgggacggcgctccggggcacgtgcgcggcggcgagctgcttctcctggtacgcgacgacggcgcggacgaa

SEQ ID NO: 10261 - DNA, 337 bp, Setaria italica
  misc_feature (253)..(337): n is a, c, g, or t
  Peptide Sequence Number=SeqID_76235
tacctcgaccgcttcggcctcatcttcatcgaccgcctcaacggcctcaagcgctaccgcaaggagtccagctactggatcgagaacttcctcaagagctagatagatgattgcagctgggtgtaattgcattgtttgcagagtgtgatctgttctgtgttcctgtagtctatggggtcgccgccgttgccgtcgactgtcgttgagtgtggttgcagagaaaaggaggaataacgctcgctgcggagctggnnnnnnnnnnnnnnnnnnnnnnnnnnnnnnnnnnnnnnnnnnnnnnnnnnnnnnnnnnnnnnnnnnnnnnnnnnnnnnnnnnnnn

SEQ ID NO: 10262 - DNA, 549 bp, Setaria italica
  Peptide Sequence Number=SeqID_76236
acactccgcgcatctcgccgaagtgccgaacggcgaacgccatctcgccgcatctgtggtcaaatacgagtatgcgacgctctcgcactcgagtactccctgtgctctcgcatccacattgacccgtgcccattcttagctcccactcgtctatgctgcgcggctgcctccggctccgagcgagcaagtgagctaggtgtagcaggccggagctcggttgggttgtggagggtgggtgaagatgaaggcggtggagcgcgcgaagctggtgcggagcctccggcaggagtcgcggcggctgcgcctgctcgttctcgtcatcggcttcttcctcgtcaccctcaccttcgtcatcgtctccaagcccgacgcgctcctcttcaacctgaatggcaggctgtcggtggaccaggcgccgcgttcactcctgatccgccagcgggtcgacgccgacgacgccggctccaggagatccgccgacactctcgccgctgccgccgaggatcccaaggtggtcgacgacgacaacgccgccaaggaagcccacgc

SEQ ID NO: 10263 - DNA, 785 bp, Setaria italica
  Peptide Sequence Number=SeqID_76237
tctgtatccagtcctgcagtaatggtgctaggtctccgaaccaagacgaggaaggattctgccttccatgtggatttcaacatcctcatccaagaaatcagcccttggcccccttcggagtccctgaagtctttgcgctccgtggtgctgttctgggaaaatggcgagcgcaattcagggaagacaagcactgttgctccttcaattgggtctggttctgcatctgggaagattgaattcaatgagttcataagcttacaggctgttttccagaaggaggggtcatccaagagtggaaagtggcagaagaacctgcttgagttgaacttgtatgagccaaggagggataagctgaagggtcaacatttggggactgcaacattagacttggcagagcatgcaatgtttcatgaggactcgagtgtccctgtacctctcaattccaagaggagcttcaaaagcaatgcccagcccatggtttaccttcgaatccagccattggatggggataactcaagtgtttcctcacgagatgcattatcaaaagaggcatcaattgataaagattcaaaggaattcgcctcggcaacgatgagtgaggagtacactgaagatactgagtttgcttccttcactgatgatgatgaagaggaagctccgtacccataccgctcgggtggaactgttcctacaggtagcaatagatctcaggaatctctcaaggggaaggatatcagcttggctgttaatgaaggcaccagctcaacatttgattctcagcgtga

SEQ ID NO: 10264 - DNA, 286 bp, Setaria italica
  Peptide Sequence Number=SeqID_76238
gcgccgaactcggcgcgccacgccgcgcagcggaggagcatggcgtgcgcgtcgcggacgcggaagtcgcgcgcgcggaggaacttgaggagcaccacgtccgcgcgctcgtcggcggcaggagtggcggcagtgccgtcggctgcggcggccggaggaggggactgggggttgagcgggacgccccagatggagattgggtctgggtgcgtggcgagcagcgccttgaggtcggcgagcgcgcggagctcggagggcgggagcgcggcggcgacgtacgagtcct

SEQ ID NO: 10265 - DNA, 464 bp, Setaria italica
  Peptide Sequence Number=SeqID_76239
gcgccggcgccggcgcgggtcgatgacgaggccgccgcgaacgacgaggaggcggaggccggcagccggcagggcaagaggcacgtcatgtcggccgtgcacgcggagagcccgctgcggtacgccagcgcggtgaagaggccggagagcccgccgacgctgagcagagcatgagtaaaacggagcaaagcggcgaagggatcacaagattcacaagtgtacatagctgacaatgtgtccatgaattcttttgtttttgggtttcttggtgatgttattcttcctcccaagaatttgaaggggagagattttgtttccttttttcattgtattgttagtatactgccgagaatacctcaaattggtgtatttgtatactggaagtttgaggcaacacgtattgcaaaagctgttcaatttgaacaaaaaaaaaaaaaaactaagagacacgcacaagggagtag

SEQ ID NO: 10266 - DNA, 416 bp, Setaria italica
  Peptide Sequence Number=SeqID_76240
ggggtatatagattccattcttttccctcgcagctttgacatcttgtttcattctttccatttcttggtagaggtccttgagcataatattacatgttgttttatttgcctcaggcctatttcttatgcttttagcacgagaagcataatcaagtgtaaccagtgtttcttcctgggaatggacagatggagacaccgtagctatgatgcatgctttggcttttcctcctaatgattctcttagcagtctggtgagcttactatccctgtatggcacatgaacagaatgctccacaagcgcggtgatgacacgccccagagttaataagctcctattcatctctccagcttctcttgctctaccctctcttacacctgatcgagctatattctcagatcctgccaagtctacaaga

SEQ ID NO: 10267 - DNA, 254 bp, Setaria italica
  Peptide Sequence Number=SeqID_76241
aacacaatcattcagacctatacatagagtatgcaaaacctaatgatgaaattgtaaaatctatagatcctaaaccatcaggattatgatcatgaaaatttaacacaaggtagattatgaagttatccacaacttttatattcaccatatttacacaaaacataatttgcatcacaaaaatattgccacaacaaaaactactctagcagccatttcagcacatatgcaacaaggttcttcattttatttttttt

SEQ ID NO: 10268 - DNA, 282 bp, Setaria italica
  Peptide Sequence Number=SeqID_76242
cggcgttgctgaactcggtggcgagcgtgggctggacggggttcacgatcgactccagggaccccagcgggtagtaggagtggagcacgtgaaagcggagcaccacggccttgcggtcggcggggagggactggaggcggtcgccggcggggagtcccgcgaaggcgtcgtcggtgggggcgaacaccgtgatccccgcgccgcgctcgtcggcctcgaactcgtccgccacgccggacgcctcgagcatggacgcggcgacgttgaaggcgcgcgcgtcgg

SEQ ID NO: 10269 - DNA, 1436 bp, Setaria italica
  Peptide Sequence Number=SeqID_76243
gtaaacttctggtttctgtcgtctacaacatacagagatcgagctgtctggagaatggtcagtcatcgatccaaccgcaagagcctggatatggttgcctgtacaaaaagcttggagcgaatgtgaggggactggaacaggagcactgattctggttgcttgcagctggtggaggcggctgagtttgctccgaggaggggggcggctcaatttcctcaggcacatcttgttccatgggtgcaccttcaagcgtttccggcacgggaactccattggcttcaggaaagatgatatggttcctctcgggtgttcgtaggttccttacaatcttatgcttcatgcagaatattaaaattcggtcaggtagaatgtcgttccacgccctttggagcgagccattggggcctctccgcgatttgaaaatgatatcacttggcaagcactgccggtggtatgcagttgggcagcgtctgcacactgcaaactgcatgttcctgtcattcttgttctctacacccttgcaaacgatacattcatgcataggacaagtgaatttctccctggcagcagcaacttcgacctcaaaaagtgcagcctcttcgctatccgggtatagcagttgagcaatacatttagggtggtaaaagtgcgcacaattgtcacgctcacattggaacacctcagggtgtgatgatgcatcatcagaagaccccagcaatccacaagcaaaacactgatgctgcttgaactggcagttcttgcatataaaaccttcttccgtactgataatcatctttgcctgttctaaagttagcccaagtttttctctgcaatcatcatgttcctcactgtcgtcgtcgtcactgtcgactgggtgggaagcccctaggtggaaagccctttgacatacaccatcgcagcaagttacagaaccaccatcgtcacaaatcacacaaacatcatattcctcggctgagtcgtcatccatttcttccttgagcttgttttctttgcctgatttcacgattcttcttcatcctccggagctcccccgaacttacctttctccgagccatggcctcctccaagaatggagcactcggggtttggttgccaagagcagagcctctgacttcctggtgggaactatgcagctgctctgccctagcttgatcgggattaccgcattcggtcagattggcggtggtggtggacatagtcgtgcaagggggtatcacgatgaagtcgagtttgtgtggcggagggcagattcggtgataggatctaccaaagatggttacttggtagcagagtttgcgtggcggagtacagatccggtgacaggacctggtactagaatttgcacgacggagggcagatccggtgacaggaccaaagatgactaccggtaccagaatttgtgcagcggaggccga

SEQ ID NO: 10270 - DNA, 202 bp, Setaria italica
  Peptide Sequence Number=SeqID_76244
cggttcgctgagccagctcgggtttgagtcacggcacaatcttcttaagacaaaatcagggggacgtgtctccccctggtcgagttttgtttttgttttcattgttaatgttatattccaatctttctctgttttttcatgatccatattgatgatcttgaatcaaagtttgtttgtacagatggatcggtgaacctccatg

SEQ ID NO: 10271 - DNA, 365 bp, Setaria italica
  Peptide Sequence Number=SeqID_76245
agcaccttccatgagtgagtaccaacgaggtgttagtgcatggaactttgatatcgaggatctaaaggctcaagcatcactgatttgtgatgacgatccacttgaattaaagaagacgatgacagtgctagaataacagacattgataaggatacatcttctgacggtcattttggaaagccgacacagttgaatggaaataactgcagaagaacatgccaaagaagcggttcgctgagccagctcgggtttgagtcacggcacaatcttcttaagacaaaatcagggggacgtgtctccccctggtcgagttttgttttgtttcctttgttattgttatattccaatctttctctgtttttttc

SEQ ID NO: 10272 - DNA, 568 bp, Setaria italica
  Peptide Sequence Number=SeqID_76246
ctgcaatagctctgtatcttcatcagttctgattccccatcttcaaaaccttgtaaagcagaccgtatttcagcaagatctgattacaaacctactaagtagtttgcagcaaaatgagagagttgatgaccagtcaagagttcagagtattggaagtgatacggtggttgaagcatctacggctgagggagaacgctccatacttgttaaaatttttgaattacaatctagttccctgcctcattccatgcttctacctgccattgatgtctcactctccacttcatgaatgatttctttaactgatgaattgattgcggcaaagctgaaacatgttcagctgcaaggagagctaaatgcgctgtactgccaagaagaaattgttgacaggagagaggacgaaaatgaggaggcgtgatgtgttaaagagggccttttcttaactagtaggaggggaactaaaagcagcatgctccggggtgatgcaatcgaggcttgcctcactggttgccctcaaggtttttaaggtgcattggtgcagagccagctaactccgggtctcatcaga

SEQ ID NO: 10273 - DNA, 575 bp, Setaria italica
  Peptide Sequence Number=SeqID_76247
cgactgctcattggaacttcttgaacctttgcaagatccacattctcagtgacatctgagaatgtggatcttgcaaaggttcaagaagttccaatgagcagtgcctcatgcaaattgcaagagggaccttcactgagaaaatcagcaagtgtcggtgattggtcagttaatgccaagacaatgtctactagtcatcaacggaaggaactctgcaatagctctgtatcttcatcagttctgattccccatcttcaaaaccttgtaaagcagaccgtatttcagcaagatctgattacaaacctactaagtagtttgcagcaaaatgagagagttgatgcagaccagtcaagagttcagagtattggaagtgatacggtggttgaagcatctacggctgagggagaacgctccatacttgttaaaatttttgaattacaatctagaatgatttctttaactgatgaattgattgcggcaaagctgaaacatgttcagctgcaaggagagctaaatgcgctgtactgccaagaagaattgttgacaggagagaggacgaaaatgaggaggcgtgatgt

SEQ ID NO: 10274 - DNA, 388 bp, Setaria italica
  Peptide Sequence Number=SeqID_76248
tcgaaccttcatttttaactctctccatttcctgttcctccctttctttccttttgcgtgtttcacgttccctctcctttaacttggcttgctcatccactttggccctggcagcttgttcagcttcctgttcagcagattttagttccgctatgtactcgttaaatatagtctccctctcttcgtgcttcgtggctttgtaccttggatcactccggaaattttctttcacctacatgattcagtgtatgaacatgaacattgattcataagtacaaaaacaacccataaattacactgcaaggtcctactacatccaagtatccaacaataacagtatgctattattactattggtgataaatcctcccaataggcttctcccaca

SEQ ID NO: 10275 - DNA, 674 bp, Setaria italica
  misc_feature (659)..(659): n is a, c, g, or t
  Peptide Sequence Number=SeqID_76249
taaagaaaaggaaaaggaacgtaagaatagtagttaaaagaagggaccttttacttaactaagtaaggaggggaactaaaagcagcatgctccggggtgatgcaatcgaggcttgcctcactggttgccctcaaggtttttaaggtgcattggtgcagagccagctaactccgggtctcatcagagaagaatattgctgcgcaaaattgagtacttgcaatgagtttgaaggagagaggggagagctcttcgaggtgtatgatcatcgatggtcgccttgggattgacctgttgctacagatatgtatattcggtcgatccgctatagtcggggtttagttgttgagtgagttttagttgctgtttttggcagtgtgcgttcattttggtcgcaccgatcgttgagatggccatgatgccagcctctaatatactagtatagcagtatagtaccattgtaccgcagaaagactgcgagaataatcgcatcgcgtctaggaacagcaggatgtatatgtagcaacttactgtataagttagcgccttgtttttgcaaataacaaatacgactagactagtttacgaaaacaaccttttacaatagactagttaacgacgactaattttaacaaaagacgaaaaagtttaaagaatttaanacaacctaaaaaaaa

SEQ ID NO: 10276 - DNA, 1937 bp, Setaria italica
  Peptide Sequence Number=SeqID_76250
atacggcgtacgatagctccagaacttgctgtgatgatgatggtgatgatgagaaaaaaaaggaaaggctctcagtatcaaaacttgctgtgatgatgatggcagctcaatatatattacaaaagtgtgtaagcaggagcttaactaccaacagcaaggaagtactaggtggctgttactataagcggctacctccgcctaggtggatcagaggacctacgttgcttgccatctgtatccgatttctccttctccttctccttcgtgtctgattgtttgactttcctcatcaagtcatcagcatagcgccgccaaatagactctctatctttactcgccagtttgttgtaccttggatcagatcttagaagacattttgcttcactccaagagttgaccgcagtcctcccctcgtctgatgtccgtgctgctacctctggagtgataacctcagatagaagtgcccggaaatcacgtacacagcgctcatataggtccttgacatggtcacggaataacttttctgcatcactttggcccaagtcaggatttagagcacgaccttgcggatccttttcaagttttggtttggattctgtccatgataccttgggatccttaatcatttcaacaagcaaagcttggtatgatgacacagcctcttttcttcgaaccttcatttttactctctccatttcctgttcctccctttctttccttttgcgtgtttcacgttccctctcctttaacttggcttgctcatccactttggccctggcagcttgttcagcttcctgttcagcagattttagttccgctatgtactcgttaaatatagtctccctctcttcgtgcttcgtggctttgtaccttggatcactccggaaattttctttcacttttgtccatcggctagttgaagttacatctttactttctcgaagcattgatttgaagtcggcaacgacagctttgcgcattgacttgactttttcttgaatagcctttaccttctcactaaaaagagcctccctttcctttcgatccaaggcttcaaacctaggatcagcaccccattttcttttgaattcctgatactctgttttctcattgatgtccttggatgcttcttccagtaattctttatatgcctctactgcagccttctgtgcagcttttttctctttccgttcctcttcagcacgtgtgcgaacatagtggtcaaatatagcccgccttgttgagtgactaggaatagccttaaagcgtggatcaaacactatttttggaagttccttctcccatttcgaaaatggtgcaactcctcgttcctttagcatctccttaaactgacgaatgcagtcctctttacttgggccatgttcctcatcatctgaatctgaagaggaatcagacatattcgcatcgccattgttatcttttgatttctcacaattattcgacacttgctgccccttaagtgcagcatcagctggtttggatccattcaattcagaagcagcagatgaagacgtagcgagaggtgaaggcgcactggaagcaccagcatcctgcaatttcttctttattaaatccaatgcagatggcgatgcaggggcaactgtttgccgaagtggcaacgaatcacggccacctgtctgtatggcaggagtacttgcatcaatgcttattactcccttattatctatagtagcagcatcctgcagtgaagttgaaccttcttttaaggagtcagattccacattcttgaggagttcagccacctctggcggaagttgccagctgctaaccttttgcttgttatcataataatatttctttccatcgcttgtagttactatgctccagtcagtaccagccactttgtcccaagaaactggaactggttgtgttgcaaccttctcaggctccccctt

SEQ ID NO: 10277 - DNA, 2940 bp, Setaria italica
  Peptide Sequence Number=SeqID_76251
ccctccctctccttccctcgccgtccacacgcgactgcgcgagacactggtcaacggccggggtggtggcagggcggcggccgtgcgggtgttggggctagctccgtcgatcgccccggaagaacgcggcgcggcgcggcgcggcgctgccttccggcgctcgggctccatggggaggaacgggagcgtcaagcgctcggggtccgctggcggctcggggcacgccgcggggccgccgacgttcacggtgaaccccgccgactaccggctgatggaggaggtggggtacggcgcgcacgccgtcgtgtaccgcgcgatcttcctgcccaggaacgaggtcgtggcggtcaagtgcctggatctcgatcagctcaataacaacatcgatgagatacaaagggaggctcaaataatgagcttgatcgaccatcctaatgtcatcagggcttactgctcatttgtcgtggagcacagcctttgggtgataatgccattcatgacagagggttcatgtttacatttaatgaagatctcataccaggatggtttcgatgaacccgtcattggttccattctaaaggaaactcttaaagctctggaatacctccacaggcaaggtcaaatacatcgtgacgtcaaggcaggtaatattcttatcgacggtgccggtgtagtgaagcttggagactttggtgtttctgcttgcatgtttgatagaggtgataggcaaagatctaggaatacatttgtaggaacgccatgctggatggctccagaagtgctccagcctggcactggatataatttcaaagctgacatatggtcatttggaataactgctcttgaactagcgcatggccatgctccgttttcaaaatacccccctatgaaggttcttctcatgaccctccagaatgcaccacctggtcttgactatgaacgtgacaaaagattctcaaagtcatttaaagagatggttgccatgtgcttggtcaaagatcaaacaaagaggccaacagctgagaagttgctaaagcattcatttttcaaaaatgcgaagcctccagacttgaccatcaagagtatcttatctgatttacctcctctctgggaccgtgtaaaggctctccagcttaaagatgcagcacaattggctttgaagaaaatgccttcttctgaacaggaggccctctccctgagtgagtatcaacgaggtgttagtgcgtggaatttcgatattgaggatctcaaggctcaagcatcgttgattcatgatgacgagccaccagaaataaaagaagatgatgacactgcaagaagcatcgaagttgaaaaggattcatcttccaggaaccatttcgggaagtcatcttcaaatgattgtgactccagggagcgaacctttgcaaccacagtaaattcacgtggaaacagccctattacgaacgaggtttttgattttgatttcgattttaatgacaccgatcctaaaaagaaggctgatggatgtgaaaacaacacgagagagaatgattcattgccctctacatcaaagcgggaaccagagtcgaatcattggacaagtgatgttgggcagagacaacagacttttggtgggaacaatagctcagtggctgctgaaaggggccatagttttgagagggatgtagctgtgcaaatgatatctgacaaacaaagaagtgatatgagaaaaacaagcaagccttagtggcccactttcactgccaactcgtgcttctgcaaatagtctgtcggctcctattcgatcttcaggagtttatgtagattcatcagttgacaagtccaaacgcaacgtagtggagattaaaggccgcttttcggtgacatctgagaatgtcgatcttgcaaaggttcaggaagttccagttccagtcagctgtctctcccgtaaatcaccagagggttcactgctaagaaaatctgctagcgctagtgattgtttggtcaatgctaagctgatgtgtaatcctaatcagctgaaggaactctgcaatagttcagtttcatcgtcaatattaattcctcaccttaataaccttgtgcaacagaccatgtttcagcaggatctgatcatgaacctactaagtagtttgcaacaaaatgagaaagctgatggatcagagcctggaatatcttctcaagtccgaactatggagagtgataaagagcaggctgagacagctaactctgagaaggaacggtcattacttgttaaaatttcagaattacagtctaggatgataacactgactgacgaactaattgccgctaagctaaaacatgcgcagttgcagcaggagctgaatgcattgtactgccgggaagaaatcgaagacattagggatgaggacaatgaagaaacataacatcaggaggatccatgctgtggaattagctgccctggcttttaacattgaggttaatggagtcttaacaggagaaggaatttgatgccagcagtgcttctgattcgcaaatatatgcctgatccggagactagctcttacagctgcggcgcttatggaattctttttcttttttgaaggttgtagtgccgttggccggctgccatcgttgtgtatatccatctttctttcagttacctttattttccgttggttcaacgggtttttggtggtcacaagattgcggttgcggcatggtgcattccgctatttcggctatacatatcattggagtagctgtgattatgtagttagcagattgccggttggctctccatgcagcatagcagaagactgcataataaaatgtattttctgtagcagtaggttgtatatttctgattggtgcattcgttgatattgtcatgcatggtttatttgcaaacctccaaacagagtttgcatgtctaataaagtatacctttcattaaaa

SEQ ID NO: 10278 - DNA, 2935 bp, Setaria italica
  Peptide Sequence Number=SeqID_76252
cccccgtcttctcctctctctctttctctgtccagtccccagcgcgcgacacgggtcaagctcccagccgccgccggcgatcgccggagctaggagccggtggctctgagcaagcacggcccgtagccatggtgaggagcgcgagtatgcggcggtcctccgtgcccacgccggcggcggtgccggcgttcaccgtgtcgcccggcgactaccgcctgctggaggaagtgggctacggcgccaacgccgtcgtctaccgcgcggtgttcatcccaaccaaccgaacggtcgctgtgaagtgcctggatctcgatcgggtcaacagtaaccttgatgatgtaagaaaggaagctcaaactatgagcttgatagatcaccctaacatcatcaggtcttactgctcatttgttgtggatcataacctttgggtggtaatgccattcatgtcagagggttcatgtttgcacctcatgaaggttgcatatcctgatggttttgatgagcctattatcgcctctattcttaaggaaacactcaaagccctagaatacctccataggcaaggacatattcatcgtgatgtgaaggcaggtaatatccttattgatagtcctggtgtagtcaagcttggggacttcggcgtctctgcttgcatgtttgatagaggtgataggcaaagggctagaaatacatttgtgggaacgccatgctggatggctccagaagttctccagcctggaaccggatataacttcaaagctgatatatggtcatttggaataactgcactggagctagcacatggacatgctcccttttcgaagtatcctcccatgaaggttcttctcatgacgcttcaaaatgctcctccaggtcttgattatgaccgcgataaaaaattctcaaagtccttcaaggaaatggttgcgatgtgcttggtgaaagatcaaacaaagaggccaacagctgaaaagttacttaagcattcttttttcaagaatgcaaagcctccggagctgaccgttaagagtgttttaactgatttgccccctctttgggatcgggttaaggcactccagctaaaagatgcagcacagctggctttgaagagaatgccttcttcagaacaggaagcactttccatgagtgagtaccaacgaggtgttagtgcatggaactttgatatcgaggatctaaaggctcaagcatcactgatttgtgatgacgatccacttgaattaaaagaagacgatgacagtgctagaataacagacattgataaggatacatcttctgacggtcattttggaaagccgacacagttgaatggaaataactgcagtgaaagaacttctgctgagcaaggtcaaaatggccccgaaagaagtgaagcattgtcttccaataatggtagtgcccatagtgaaaggaaggctgatggacctaaaaatccaggatcagaaattgatttgttgccctctacatcaccagatgggaaaaattgtaaaagtgaagtcaggcaaaaacaaaggacatattctggtccaattatgcaatctggcctgcataatagttcgatgactgaaaggggtcacattgttgaaagggatgtaggaggtcaatctgtatctgataaacaaaagaatggtacaagaagaaccaataatcttagcggtcctctgtcactcccaactcgtgcttctgcaaacagtctttctgctcctattcgatcatctgctggttatgtaggctctttgggtgataaacctaagcgtactatggtggaaattaaaggccgcttctcagtgacatctgagaatgtggatcttgcaaaggttcaagaagttccaatgagcagtgcctcatgcaaattgcaagagggaccttcactgagaaaatcagcaagtgtcggtgattggtcagttaatgccaagacaatgtctactagtcatcaacggaaggaactctgcaatagctctgtatcttcatcagttctgattccccatcttcaaaaccttgtaaagcagaccgtatttcagcaagatctgattacaaacctactaagtagtttgcagcaaaatgagagagttgatgaccagtcaagagttcagagtattggaagtgatacggtggttgaagcatctacggctgagggagaacgctccatacttgttaaaatttttgaattacaatctagaatgatttctttaactgatgaattgattgcggcaaagctgaaacatgttcagctgcaaggagagctaaatgcgctgtactgccaagaagaaattgttgacaggagagaggacgaaaatgaggaggcgtgatgtgttaaagagggccttttcttactagtaggaggggaactaaaagcagcatgctccggggtgatgcaatcgaggcttgcctcactggttgccctcaaggtttttaaggtgcattggtgcagagccagctaactccgggtctcatcagagaagaatattgctgcgcaaaattgagtacttgcaatgagtttgaaggagagaggggagagctcttcgaggtgtatgatcatcgatggtcgccttgggattgacctgttgctacagatatgtatattcggtcgatccgctatagtcggggtttagttgttgagtgagttttagttgctgtttttggcagtgtgcgttcattttggtcgcaccgatcgttgagatggccatgatgccagcctctaatatactagtatagcagtatagtaccattgtaccgcagaaagactgcgagaataatcgcatcgcgtctaggaacagcaggatgtatatgtagcaacttactgtataagttagcgccttgtttttgcaaatacaatcgctgctgtttcgaaacaccttttcatgctgttacgcgctattttacaaagcgaaagtttagatttgcacctaaaaaaaaa

SEQ ID NO: 10279 - DNA, 606 bp, Setaria italica
  misc_feature (577)..(606): n is a, c, g, or t
  Peptide Sequence Number=SeqID_76253
gccgggccgctgcgccgccggcggcggcgccaccggcggcctcggccggcgcgatgatcctcgcccaccagccatacaccctggagatgctcggcagcggatacggcggcgggtacggggcggccaaggacgagccgcgggacgacctgttcgtcgactcgctcctctgctagcgacggcggctttcgagtccacacctctccgtgcgcggcgggtgacctctgtacgtgtacggccgctatacgcatacaacggccgtagcgtgtacgctcgccgtgttagaagaaaatacacgtacgcgctctgtatacatacactcgtaggtgttttagcttagctataggaagggaaatttgtttattcgttggatgaaggcctttaatacagctatacgcacacgtacgtgtatcccgtatgcgtacacatacggtcctgtgtctttgtagctagcaggagctaaaggtcagaaattaaaggccgtatatatacatgtagtgatgagagaaatccaataagtgtgaattgtagaaaatacccagatcaagcagttttgtttaaaaaaaaaaaaaaaaaaaannnnnnnnnnnnnnnnnnnnnnnnnnnnnn

SEQ ID NO: 10280 - DNA, 697 bp, Setaria italica
  Peptide Sequence Number=SeqID_76254
tgagaagtcaagatacaagagaagtgacccttgtcatagcctattgagggcaagtagcgaatcctttgccagggtggtgactttcccaggtggggatgctcttgatattcttctgtctggatcaaccagcaagtaacgatatccagcaacatgataagcattttctcctccccatcctcgtgtcaatttctgttcaacagtgacaatcttctgtgatgcattttcaagcatctgcttcttcacatgagcaatgccctcttctcccgtttattagtgaggaagcaggaatcagcaaaaggatagtgagactcttgtgctggtaaatgcataggtacatgcgctcctctgcctgctggaaccagagtattggagtcaagggtacagcaccacgaacttctgtagttgcaaaatcagcagcaacaaaaccgtcctttccctttgacaatttctcacgcaggagaggcctgaaattatgatgcatctgattttgtccatcaggagaagtatcacgagatcgactatggtacctttctcctgcagttgttccatttgatgaacttgaagttgggcctgcattaacagaagttcctttccgcaaataggaccaagagcttgcattggaagatagagcgcgaggagttaacctcaggacagcataagtatataggtttaaagtatcatccggggggcagtgttg

SEQ ID NO: 10281 - DNA, 1225 bp, Setaria italica
  Peptide Sequence Number=SeqID_76255
aagtgagattgacatcaaaagtcaaaccatggcaacagtaccaaaatacagaatcaccggatcaaatcctaagctgagctctttcagtcaccaggtccaccgccagcgtttacaagaaaactaaaacaggcacaatgctatgcgttgcggaaggacatgaggccgtaagagaacaaactctaccctgctctgcattattcccagactaggctatatttttttgggcacatagcacatgataacagagcagctgtacaactgatgtgaatatgaatcccttattccccttgcaaatagtgatccaagttcgctacaacaaagccatcgatccagctgaagactgagaattgtataaagaggggcatctcatgctggtgctttcagtccgtagagaaagctccctcgcagtacctgttgctaaacttctctacagctgtggaagcatatagaagtgtttcaccacctttctctaaagccatgtaaagctccctccctcgagtaattttagcaatcacccatgcattgctttttgttctgatgcatacttcaaaatcattatcatgacaagggtcacttctcttgtatcttgacttctctaaatctacttcttgtcttagcctattgagggcaagtagcgaatcctttgccagggtggtgactttcccaggtggggatgctcttgatattcttctgtctggatcaaccagcaagtaacgatatccagcaacatgataagcattttctcctccccatcctcgtgtcaatttctgttcaacagtgacaatcttctgtgatgcattttcaagcatctgcttcttcacatgagcaatgccctcttctccgtttattagtgaggaagcaggaatcagcaaaaggatagtgagactcttgtgctggtaaatgcataggtacatgcgctcctctgcctgctggaaccagagtattggagtcaagggtacagcaccacgaacttctgtagttgcaaaatcagcagcaacaaaaccgtcctttccctttgacaatttctcacgcaggagaggcctttctcctgcagttgttccatttgatgaacttgaagttgggcctgcattaacagaagttcctttccgcaaataggaccaagagcttgcattggaagatagagcgcgaggagttaacctcaggacagcataagtatataggtttaaagtatcatccgggggcagtgttgtagacaccaagaggt

SEQ ID NO: 10282 - DNA, 711 bp, Setaria italica
  Peptide Sequence Number=SeqID_76256
aaagggaaacaaaagtaaagttaagtaaagaaacaatagtgagactcttgtgctggtaaatgcataggtacatgcgctcctctgcctttctcctgcagttgttccatttgatgaacttgaagttgggcctgcattaacagaagttcctttccgcaaataggaccaagagcttgcattggaagatagagcgcgaggagttaacctcaggacagcataagtatataggtttaaagtatcatccgggggcagtgttgtagacaccaagaggtcttcaaatagtacgagcgattggcaggtggtgtttccaagacatgatccaagaactgtggtgagtgactgaacttcaagtgctacttctcttgatactgtgagcatttggaccgttcccctctcctttaggcaatcacggtaggttgggaattgcagctttttaccagcatgaaaatcactcaaataatctgtgagaaatgtgcggaggtgaccacgagcaagttcagcactgggttgtctgtcaagtaaagttcggattggtccatggaacattgcgaagagtgaatgggcctctttaagtatcccttgcagtgcaccacaacgccaggtcaattcattgtccttggttttttccacaaccagaaccatccaaatatcaggttccgcttgataaaaaatgtggagtgcttctcagattctataacttcacaatcctctaca

SEQ ID NO: 10283 - DNA, 448 bp, Setaria italica
  Peptide Sequence Number=SeqID_76257
cgattggcaggtggtgttttccaagacatgatccaagaactgtggtgagtgactgaaacactaacacatcaatggttggaataaatagaataaatatgcacagctattgcaatttgcaaacagcatgattctagatgatactgcaaacatgacatttgtgcactactgccggaggatagtccaaaaggataaatgctgatcgaaagagtaaatgttgatcagatcaattctgaaagattttcccagaaaacaaatttctatttgttgaaaacaaatcttcgtacaattaccctacaataaaaagcaatcctatctaatgtaaatactatggcacagcaaatgaatgtcaacagtaagccttccccaaaataaatataaatagaccagccaagaactgtgctaagaaaaataaagtaccccctcatccacaaatataagggattctaag

SEQ ID NO: 10284 - DNA, 568 bp, Setaria italica
  Peptide Sequence Number=SeqID_76258
gcaggacaaatctttgatctttgccaaggaaccaggaatgcaagtgggacttatattatgaaagggtatgatgtttgcacaaccattgggagtctatctaaatcccatatatctctaattgatgagagtaatcctcgaaagggtattgttgttaagatgttctcgccaaagtgttctatttctgtttctgtcctttgtgattcaagtgtagcccaagtaccggacaaatttgttgtatctggtcgttgtgattatgctacaacatttaagcacccttctggttgtgcaagatctgtttctgcttctggaagtggctgggtatggttaggcactttgttcataacaattatgtcccttcttggagggtacattttgcttggagcagtttacagatattatttccttggccttcattctgtagaggccattccaaacctggatttttggatcagtttgccccgacgaattaagaccatgtttgttcctgcaacaagaagccgcataagttataacagagatggtctaggcgcatatgcccctgcaaaccattgagaaagtggcgttgaag

SEQ ID NO: 10285 - DNA, 689 bp, Setaria italica
  misc_feature (633)..(689): n is a, c, g, or t
  Peptide Sequence Number=SeqID_76259
agcagcaggccttcctgctgcagcagcagatgatgacgatggcggtggcaccgccgccggcggccgccgccgtccaccaccacccgatgccgatgcagcagaaccccgcgaacccgttcggcaaccccttcgcccccgccggcgcccaccacccctacggcgccgccggcatgccgctccacgccgggcccggcaacgcctacacggggctcatctagcgtcaaatccccgggcggttggtttcttcttggtcgcattgttacgcgtagcacgaggtgcacaccattctttttgtccaaggttttcttgttgccattgtgaggaggaaatttgtagcagcacacggacaggcacagggtagagtcgcagtcgctggtcgtatagcgtcgagagctggctggggtgtatagtagagaaggtgatttgtatgatacgtagagtttgatcgtttctgatcatcatgtgcagtggagagtcgaaattcttgttgccaggggacacaggaacacgttgaaggttggtattggattattcttggatatacggagttgaataatgcaacattctttatactagtagcagttgactttgtgaaagttgtctcgtgcttgtgccttttgtttgtgctgactnnnnnnnnnnnnnnnnnnnnnnnnnnnnnnnnnnnnnnnnnnnnnnnnnnnnnnnnn

SEQ ID NO: 10286 - DNA, 577 bp, Setaria italica
  Peptide Sequence Number=SeqID_76260
cctatcccctcgtgtgccttgcctatcccgttgcgtgtctcaggctgtgaaggtatgacagtaattcctccagggaacctcatcagttcaaaggaagatggatgcccaaaaagtgatggtgttaaggataggttcacatgctggagcatcatctctatcaaggatgattttagcacacttagggctggcaaacttatcgcagcatcttttggataaggaaggacaccaaaaacaacatttgtggagtatttagaggttaagggctgcattgaaacaatggaaatctgcacaagaaaatatctgaattaatcatcactgaaagcaaaaagaaatttgagtacaagggagggaagcatcaggcaccttgctattaggtacaccaatctcttcaaatatgtcattccctagtttgtctatgtgagaagtaaggaatgacactggcttttccaaagtgaaaccaactttgatttcagctgaaatagaaaagatactcctcatcaacaaatccatcatagcaccacatcaacatgtgactgctaatgtaatgctataaaggtggaaaaatacacgataacag

SEQ ID NO: 10287 - DNA, 1871 bp, Setaria italica
  Peptide Sequence Number=SeqID_76261
tttttttttttagtcgaagttggatgttgtattatgctcaacatgatacaaagaagagttatgttgcagcgcgtggcaccagtaataggagtctccttacattctcctctaccataagctcccagcccttcggtgtgagaactcaaaacttggtgtcctacattctcctctaccataagctctcaatcctttggtgagaacttaaaagttggtagaggcatagggcagccaccttcgtggcataataccctggttaattagcatgatatgaacctatatctacagtcaatctgacatcagaagctttacaattcttcatatggtttagttgccaataaacaaagcccttcgtggcatagggcagccaccttcatatcatagcccatgatcgcaactcatggtaatacttgaagcagcaaaattgcaggcactgtgactctgtcttctggctggattttcctgatgatgcatgaccaacagtccaagcaacccagatatccagttaagcataacttcaagtatgaaggagagtatacggtgatggagctattgaagggacattagatgctttgctgttctgcttcttccttgggggtaccgaatgatgaaacaccgagggtgaaggtactggcatcattggagaagtgggtctagggactgtttttggaaaacgattggggtttggaggggaaggaacagcagatggctttggcgaatgcataaatgggggtagcttagggtctctaccaatgcaaggaggttttacaattggactaccagctggaggaaagcgattacatctaaaacatggaaagcaagggtatctgctccgtgaagggggcaaagcctgaggagggtggttcgggttcatatatgtcggaggtgaagggtggggttgttcccaaaaggtgacaaggatggtggcatacttggaataggtgattgtgatggtgatggagatggagatggagaaggcgaaggagatggactaggagataaatcagagatcttgtgttgtaggtatgatgacagctgaacaccctttactttaccaaatacagagtgattaaggccaagattacctacatcaggttctgtgattagctgagctagttgtttcaatctatctggtaaaagattactgcttccatctaacaccaatgcatcaatagttgctggagcttcaattgaagaaccaatctcattcctgaactgcaaatatattttctcatatgacctcaagtttaatccaagtttcagctgatcctttagctccgtaagattacccaggatctgataaatggagttgttcaacacaaagttgaatagggggtatgtatccgcccatggagaaccaggctgtgaaggtatgacagtaattcctccagggaacctcatcagttcaaaggaagatggatgcccaaaaagtgatggtgttaaggataggttcacatgctggagcatcatctctatcaaggatgattttagcacacttagggctggcaaacttatcgcagcatcttttggataaggaaggacaccaaaaacaacatttgtggagtatttagaggttaagggctgcattgaaacaatggaaatcttgctattaggtacaccaatctcttcaaatatgtcattccctagtttgtctatgtgagaagtaaggaatgacactggcttttccaaagtgaaaccaactttgatttcagcggcgagcacgtcggggtcgtcggagacgtacccctcgtggcgcgagggcacgagcaggaacagcgccgggacgagcacccccgcggcgagcaggagcacgaacacgcaccggaacgacaccgcccgcccgatcgcgccgcagcctcccacgcagcctccgc

SEQ ID NO: 10288 - DNA, 351 bp, Setaria italica
  Peptide Sequence Number=SeqID_76262
atcacctcaccacgggccttagcatctgccttgagctggtcgttcttggctttccgcaggcggaactcctctgtgcaacgggacggctgcacatgctccacgcggacatggatccgcttgctgatgatgcggccattaacctgcttgttgatctcgagggtggttactaggaataatgcttgtatcttgagcagttcaagtgatttagcatcaatgcttatctgaatctttttggtactggctagttctttttgttctctggtgttttgaaacctatgtggttattactggttaacattaaagattttgctatggttgattgcatcctgataataaaaaaaaaaaaaaaaa

SEQ ID NO: 10289 - DNA, 975 bp, Setaria italica
  Peptide Sequence Number=SeqID_76263
cccgtggtgaggtgatcacctcaccacgggccttagcatctgccttgagctggtcgttcttggctttccgcaggcggaactcctctgtgcaacgggacggctgcacatgctccacgcggacatggatccgcttgctgatgatgcggccattaacctgcttgttgatctcgacgccgatggcgcgcttggtgacgttccagacgcggccggtgcggccgtggtagaacttgtgcggcatgcccttgtgcacggcgccgttcaccttgacgtcgacgtagtcgccgatcttgtaggtgcggaggtaggtcgtgagcgggatgtaccccttcgcgcggccgttccgcaagaaggggtacatcccgctcacgacctacctccgcacctacaagatcggcgactacgtcgacgtcaaggtgaacggcgccgtgcacaagggcatgccgcacaagttctaccacggccgcaccggccgcgtctggaacgtcaccaagcgcgccatcggcgtcgagatcaacaagcaggttaatggccgcatcatcagcaagcggatccatgtccgcgtggagcatgtgcagccgtcccgttgcacagaggagttccgcctgcggaaagccaagaacgaccagctcaaggcagatggctaagggcccgtggtgaggtgatcagcaccaagaggcagcctgtgggtcctaagcctggtttcatggtcgagggtgctatgctcgagactgtcactcctattccttatgacgtggtcaatgatctcaagggtggttactaggaataatgcttgtatcttgagcagttcaagtgatttagcatcaatgcttatctgaatctttttggtactggctagttcttttttgttctctggtgttttgaaacctatgtggttattactggttaacattaaagattttgctatggttgattgcatcctgatataacccttatgccctgattgctttgtgtaca

SEQ ID NO: 10290 - DNA, 1439 bp, Setaria italica
  Peptide Sequence Number=SeqID_76264
gtcagacctttggataacagttcctaggcaagggctctcacacttcaaggtcacataaaaacatcacagttgcaggacagttcatcgctacagccacaactctgcgataggtacaattttcacagccaggtattagatttgcacttgtcaagtaagcactctattcgccaccaacttgacgtttccaggaatcctccacgatgagctcatcaacactccaatcctcgtagcttccatctggtaaatatcgcctgattgtgaatgggatcttgcgtgctctcagttctttcatggcgatctcaagaggatcagtttccccttcaagctcgaccataactggagcattcatgctaatctgtaaagcacgtgtaccaagaatgcgtgcacgctcatactttgtcatatatactttgttgttttccgctcgcgtgccttcttttcttgttctttgttttcaacttctgcccctaccacatcatcaggagcatcctcattgttattctcaagctcctcctcagccccctcctcaatctctggttctgggggctcatcctcataccccatgtccatgtcgttgtagtcgtcgtccgccatggccgccgccgccgccgctcgctggggtcgcctgctgtagggcgcgagtccgaggggagggcggcggaaagggggagcagccaggatgccggccggccacgggctgcgctcgcggacgcgcgacctcttcgcgcgccccttccgcaagaaggggtacatcccgctcaccacctacctccgcacctacaagatcggcgactacgtcgacgtcaaggtgaacggcgccgtccacaaggggatgccgcacaagttctaccacggccgcaccggccgcgtctggaacgtcaccaagcgcgccatcggcgtcgagatcaacaagcaggttaatggccgcatcatcaggaagcgtatccatgtccgtgtggagcacgtccagccgtcccgctgcactgaggagttccgcctgaggaaggctaagaatgaccagctgaaggcagacgccaaggtgcgtggtgaggtcatcagcaccaagaggcagccgttgggtcccaagcctggcttcatggtcgagggtgctaccatcgagactgtcacccccatcccatacgacgtggtcaatgatctcaagggtggttactaggttgtttggttggcctatctacctgcactatcagttctatatctgtgttactctagtgcgtacaattttgctcgctccgagcagtagtctggacctattctgtctgttcctgttgaaagattttccattctaggtgcaaacctgagttcatcagaacgctcaatactgttatctttgcttctgagaatgaagatgtgctttcctgaaccactgcctcttggagaaggtgctgttttgcagtaatgatccattgttatgaaccaaa

SEQ ID NO: 10291 - DNA, 219 bp, Setaria italica
  Peptide Sequence Number=SeqID_76265
tggcggcgttcgatcttgcggtgccccgccgagatggtttgaattgtgatctggaaatggagccgtcggatctgaacacccacctgccgccgcggaagcggctgctcgccgggctcaggacggcggccacctcctgcgacgcagccgagcccctcccgtccccgctcgcctccggcgatctcgccgcccgcctccgcgagatggcgctcgccgccaacg

SEQ ID NO: 10292 - DNA, 270 bp, Setaria italica
  Peptide Sequence Number=SeqID_76266
gtatacagcaagaatagactacacgcatgatacagttcccatgacccaattaagcttttcggtttggcatgaattgcttaattgggtcatgggaactgtatacagcaagaatagactacacgcatgatacaggaacaatggtgagctatcataaaagtttacagcccttggataccgcgtgttaatttacagtggagaccatgatctgtgcatccctttccctggaactgaagcatggccgccatctatcaacaacttggtatcctattg

SEQ ID NO: 10293 - DNA, 1515 bp, Setaria italica
  misc_feature (1465)..(1515): n is a, c, g, or t
  Peptide Sequence Number=SeqID_76267
aacgggcccttcaacttcgagcccgggaccaagcccggcggccttcccaggctgcagctcaacccctacagctggtccaaggtctcgaacatcatgtacctggactctcctgctggtgtcgggatgtcgtactcgttgaacaaatcggactatacaacaggcgacctgaaaactgcagctgatgcacacaagttccttctgaagtggtttgaaatatacccagagtttcagtcgaacccattctatatttccggggaatcctacgcgggggtttatattccaacacttgctgatgaagttgtcaaagggatagagaaaggagtggagccaagaatcagtttcaagggctatctgattggcaatggattcactgatgtcgactatgacttcaattcctttgtgccatttgcacatgggatgggcctcatctcaactgacatgttcgaggatgtcaaagctagttgccatggtacgttctttggcgacgtagacaacctgtgccaagagaagatagaaagaattcactgggaactgaaagacctgaacaagtacaatatccttgcaccttgctaccatcatcctgaaatccaacaggtagaattcgctaacagcagcttgccgttgagctttagaaggctgggagagaccaacagaccatttccagtgaggaagcgtatggcagggcgttcatggcccctccgtcttgctctgaggggtggacacgttccgatgtggccagggcttggtggtagatcacttccatgcacgagtgatgaacttgctactgcatggctggatgatgaagatgtcagagcagcaattcatgccaaaccgaaaagcttaattgggtcatgggaactgtatacagcaagaatagactacacgcatgatacaggaacaatggtgagctatcataaaaagtttacagcccttggataccgcgtgttaatttacagtggagaccatgatctgtgcatccctttccctggaactgaagcatgggtgcggtcaataggataccaagttgttgatagatggcggccatggtactttggagatcaagtcgctggatatgcggaaggttatgatcacaatctcaccttcctcacaataaagggagccgggcacgctgtccccgagtacaagcccaaggagtcgctcgcgttctacagtcgctggctggcaggagagaagttctgaactgatccggtcggcgttgcagcagaaaacttgcaggcccatttcctctctcctggaaaaacgcggtccgattcagatgcatgccatagttcctttttcttcctcgaaaatttatgatgcaatggctcagtgcaaaatgtacacgaaatcaaaagatactgtttgcatgggtaacgactgagatatgtcccctcagttcaggagatgatatactcaaacaatcttcgtgcgaattgtgaaaattaaccaaaaaaaaaaaaaaaannnnnnnnnnnnnnnnnnnnnnnnnnnnnnnnnnnnnnnnnnnnnnnnnnn

SEQ ID NO: 10294 - DNA, 430 bp, Setaria italica
  Peptide Sequence Number=SeqID_76268
ctaaaatttagcacttggattagcatccggatccgaacgaggtgtaagttcagctgcgtgtacgactgggcttggaacctatggaagcatatgtacttatgtagtcttgcatgatactctgcacatggatgtatgtagaactagcagtgacagtaaggatgggcaaagccatagatggtcgtcgagaatttgaagagcgcgaagcaaaacgcgcaaccggcgacgacgagcgcgagcacggcccacgggctgctgcagtggtcacgcaggaactcggccttgtgcctgcgccagctcgagcggtagtaccggttcagatcggcgaacatggcggcgaagatgtggtcctcgtactccaagctggcgcagtcgcccagctgctggaagaacttggccgccgcgtcgtcgtcggtgcccaggaggttgtcga

SEQ ID NO: 10295 - DNA, 477 bp, Setaria italica
  Peptide Sequence Number=SeqID_76269
aattgaatgggaaatatatatttccagatgggcggcagaagcacccgccatctgtgctggcgggtggctaacgtcgcccgccagcacagacgacatttgttctggtggatgctcgacccgccagcacatgcacttgtagtcagcagcacaaatcttttatgacctagtgaaagccggtcgtcgagaatttgaagagcgcgaagcaaaacgcgcaaccggcgacgacgagcacgagtgcggcccacgggctgctgcagtggtcacgcaggaactcggccttgtgcctgcgccagctcgagcggtagtaccggttcagatcggcgaacatggcggcgaagctgtggtcctcgtactccaagctggcgcagtcgcccagctgctggaagaccttggccgccgcgtcgtcatcggtgcccaggaggttgtcgacgacgccgcgcttctggaggtgctccacgtcctcgcgttccttcgtct

SEQ ID NO: 10296 - DNA, 375 bp, Setaria italica
  Peptide Sequence Number=SeqID_76270
ccttctcctggcacaccaccgtcggcacgtccacgccgccgtgcgcgtacccgccgccggggccgccgtaccccgcgccccaccctccgccgaacccgccaccgcctgggtagcctccgtagccgccgccgttgcccgggccgccacggtagatcccgcctccgttgcccgggcctccgccgtagtagaaggctccgggcgggatgccgccagggatggcgccgccgtaataaggtgcaggctcgggcttgtttccgtcggtcggcgccgggagcgggttggcgccgtcgaggtcgcgcgcggcgaagacggcggcggccaggagcaggaggaggacggggaggagcagtgcgcgggcgctgtggtggtgcgcgg

SEQ ID NO: 10297 - DNA, 2724 bp, Setaria italica
  Peptide Sequence Number=SeqID_76271
ttttttgagacaacacaggggctctcattgaaatgattctgttaaggattatggattacaacacacatcaacctttacattcccttcactatttctgaagcgaaaacgaagaatctaccatccacctccatctcccccaactcccctctcttccagtcagactaacctctaacaaagagcccactccaacacagcttgtacaccaagcacccatcttcaggtgcctaggtgaaatgaacctcctacttcccgtatcctacaattgggaagtagtggatgaaaaggaaaaaagaagagaaaacagtcaattatactttacaccattgctgagcttcttccagagcagcatgggaagaagctcgggagaagttatagccagaaagatttcttctcgccatatcctgtgcacggaacacctttttcctcttcttccctcttgctaaaaagggtctgatctgagcaatccagacccgctccacaagccgaattgtacaattcgcatgcagagtagcatacccgaagcctgttgtccccatcctcgtcacaccgttgaattgagatccagcaggccagccgcttcgcagctgctgcacaattggcattgttgaagaagttaaggaaggtccgtccacttggcatcaacctattgtaatttggcaccagaactacagcttcaagctgttgtagtatgctgagttcacttggtgcacaatgctgcccatccgaatctctaacaagtacatcatgacacattgacaggctgggcagtattgtagaacccttcagacaagtgtagcccgcataatctgaacaacggaactcacatttaccattatcgcaaacccctccatgcaaactacattgttcatcacaaaccgctgttgaacagtcaatccctgtccatccactttgacattcacagatcccattagctttgcatataccatggccactgcacttgtctgggcaagatcttctgctgcagtcacgaccatgaaacccagggaagcagtgacaggtcccatcaatgcagtcaccgttaaaactacaggatttgggacactgaccagtcactgggactgggacagtattacacaactcatgatacgccgggcaaattaattccccattgaatcctgggaactgaacaggcccaccagactgtggacatgacttccaaattccatcaacagcaacctctaatgagttgtttgtgcagcgatgctgataacagccatttccttgggtcatagatccacgaacaaagcccgttcgcactagagtcgaggccatgcacctcgaattacttcctcgcacttcacctaacattctgtcaggcgctcttgcgctatttacatcagtgcatgaaccatcggaataagcaacgtagtatgtgcagtagtctgctaatgaagactgaccacctttattggcttggggaaaatattgagcccatttaggcaagtccccactatagctcactatagggcagtaaccttctgcctccctattatatgtgcatcctgatagttgagttgtgttgcaatggtaagcccctttccacgaattgcaaggagatacagcaaactctgttccctgattccgaccccaatctaaatgctcggccatgctgtaattagcttgataccatccactgtcctccagtaatgctaaagtcattcttgaaaccaccgacctagtatccactgacccagtcatgatctcattcattaagagtcttttctcccaatgtgaacctgaggtgcccctgcctcccccatcttccaattccaacccagtgaagttttgggaaaatgctccatagtgatgtctggagtgcattactactcgaggtaggacaacacgagtaaccattcttccaagcttttcatccaaagtctgaacagtaacctgaccacgtctccttttcctttcatcacgaaaatgtgtgaaagcatgaggatcaaagcctagaacatgcatgacctcatgtattagagtagccgaaagtaatgtttctgcttcagctgtcaaatgacgaggggccacattaacatgtcctgcgatggctcgaccccactggtcacgttcgcaggccacagcccatgcaagggtgttaccagttgtcggtctagtagttactaagaggactaagtcggcattagaaacaccatcttcaacatatgcatgtgggagctgtacacctccatcctgaccacaagctgagtacccactgagccgcaggttccccttgacaggttcaacagctagagcttttctaaaccactctactgtttgtcccagtgccttccggagccgttgcttcttgtcctccccagctatgtcctcaagggtgcaattgtaccagcagtctcccaccagtggtggatcgccatgaggatcacatataggtgttcctggtgctgacggtacaggaggctcgccaagcttaacgatgtcaccaactcttttacaatcccggtcaggcgagtgcccgacggcatcataattgaggtatatgcgtattggcttcctggcattcctctgcgtaacacgcgaagacgaaagacccaacaagtgtcgtcctcttacgtggtccactttctcctgaggctcgtggtacacttgtggcatgacagagtactccttccgcccagctcgccgccgctgatgcagtatctcgtcatggatgcatgagtggctaaggtaaacatccttttctcc

SEQ ID NO: 10298 - DNA, 259 bp, Setaria italica
  Peptide Sequence Number=SeqID_76272
gaagtgaaggtcctggcaaggaaataagttgccccaataaaaccagcataagaacccgatatccttgctcttgctttgcgattttcaggtctctgatcatgaaagtatagataagggaacgatgacaggatcggcagagtggaggtgaggcagacgatccagatgtagaagaagttgcggtaggggatgccggtgctcatcttgttcgcctcctccagccggcacccggggcacccctcgcggctcctccgcttcgtaa

SEQ ID NO: 10299 - DNA, 505 bp, Setaria italica
  Peptide Sequence Number=SeqID_76273
catccccggcattgacgagggacaccgcgggctcctgtcgtcgggcctgcatacgccaccatccgctcggtggcgcgcaggtgcgctccgcgtgcggattagcctgccgctacacgcgtggcggcgcacggcggctgccggtcgctcttgcggctgggggcagttcagctcgtctctctgatgagccaacgttggcgtagtgtggtggtaaggcaccacgggtggtagcctacctgtcatggatcgattcccagcagccacaactggcgtccaaagaacgttggggtttgccccccttttcttttttaataaagctcgtctctctgatgctagataattaatgccagcaacctgtgtcctaggcaagggatgcaaaaatcaaaataattttaaggtggtggaggagtgttcaatttgagaatgatacctcgttactgtttctttcttttgtttgctttcacatgttagctagcaatgcatgtagttcatattaattttgttcctt

SEQ ID NO: 10300 - DNA, 413 bp, Setaria italica
  Peptide Sequence Number=SeqID_76274
caccagcgctctccagtcccccactccacctccacagtccagtaatccagtctcggatcgccaggcgggcagcgccgccgtaggatgagcttggcttcagccgttccttccgcgtgggcatccccggcattgacgagggacaccgcgggctcctgtcgtcgggcctgcatacgccaccatccgctcggtggcgcgcaggtgcgctccgcgtgcggattagcctgccgctacacgcgtggcggcgcacggcggctgccggtcgctcttgcggctgggggcagttcagttggtgatgtttttgttacagagggctcaacaaatgtgaagtttcctcaggagttaatagttccaggctacacaggctctctgtaacctgtgccaagtataaccaaagagcctgtgtagcctggaac

SEQ ID NO: 10301 - DNA, 499 bp, Setaria italica
  Peptide Sequence Number=SeqID_76275
aatatcttgtgcaacatcttgatttgtcggatttaacatatctgacacttgaaaaacaccaatcgggacatcctaaattaatacagcaacatcgggaaatatcaatcacaaagtgacatcccaaaatcacctttgcagctttaccatccggctccttgccacctaaatcaatcgttgtcgctgggatagatcttctacctgccagaagtgatgataggcaattgacatcgagctctttgttgccttactgaagggatcgagctcttcttcgttgtgccacaaaggatcgaacttcccatcacctagatcgacaccttgctgctggacaacttgaatcggcactccaatcaagtcactcgaaccaccgccatctgaggctgcggacatgagcacgagtgtgcgaggccctcactgtgccgccaagttactggatgaatcaccagcggagcctccgcgcgaggatgccgaggcttcgtggagatgaaggagctggatgaat

SEQ ID NO: 10302 - DNA, 418 bp, Setaria italica
  Peptide Sequence Number=SeqID_76276
atcgtctcccagccgcagcgcgtccgccactctccagcacgcgcttcatcccgtccgccttcgtccttcatctccccgctcccatcgcatccgcgtccaccccgccgccgccgccggcgagctccaaaatcttcgccgtcgccagcgcctcctgtgcgctcgcggcggcgtcctcgatctcgcgctctctcttgatggtgcggcgttgcagctggtcggcgtcctggagctgcccggcgctgaggtcgccgaggtcggccttgaggctgccgccgttgaggaaggcggggagctggtgctcgagctgcatacccgacttggtgtacagcaggtggagcgcggcggtggggcgccagccgccgcaccagaggaagaggttctcggtggtggaggtccaggacggggtgaacatgcggag

SEQ ID NO: 10303 - DNA, 371 bp, Setaria italica
  Peptide Sequence Number=SeqID_76277
caagcccttaaattgcagattatcgaaaggaccactatcttcttcagaatgaaccctatctgatccagattcaatgcctactaaagaactaattgctgatgaacatgctcatggattttctcggtcaaattcattcatgcacaattctctagattcaaaatttatttctgaacctttggtggatataccttcactcaaggaaggatcaagtgactggtgttcacctccaaatcacacgatagggtctggatcagatagggttcattctgaagaagatagtggtcctttcgataatctgcaatttaagggcttgaacaaattagcaggtcgttaattgtaagtcctaatttctattctacggtaagggtcta

SEQ ID NO: 10304 - DNA, 920 bp, Setaria italica
  Peptide Sequence Number=SeqID_76278
taaaaaaaagaaaaaaacaaaaaaagaaaaaaacaaaaaaataaaaggaaataaagaaaaaaaacaaaatggagccaccagtttccaatggaggaggttggaggcggcatggaaggcgtgattatgatagataccactgatgactggtatttgaacagagattgcagaatgctgactcaactctgatagtggctgattggcagtgcttggttatcggggatgggtaatttctgacaatatttgacggttttccttgtcattggtgaatcatgaatcattcgtcgatgtctctatttgctggtttgcttaacctgaaatctcctgaaataaaagatgggaccaccctccactgtatatatgtagttgtagcagtgttctgcaaatgcagaaacgggagctaggccaatcctgtgaagagagtgagccatatgtgttgttaacctaacattccatcttgtcgaagtctgtatttcgttcctgtaacccagttgccatccaacccttttctaagataatttagtttgtagtttgacagcagggctttgtcaaaattcagatgattttgtccttgtagactattgggcatctggttttgataccatgcatatggctcaacactcttccggcgaatgcagccgagtcgtcacactgcaaaaagggttctgggcttgggaatgtacaatgagtttgtaatatttcgttaaaactatgtgatctgagtcatttgacaggtaactcgtttagtcgtatgcaagcaaccgtcaaaagtgatggctctacatcgatgtgattttccaattgaaattatattttgggtgcgtttggttgcttgtatcatttggttcatgtatggaatggttcaaaataataacaattccacatcgatgggattttcgattgaaattatatttatatcaaaa

SEQ ID NO: 10305 - DNA, 3017 bp, Setaria italica
  Peptide Sequence Number=SeqID_76279
ggatgttaccctgaaaggctgcactgcttcaatggaaaggtcccctcctaataactctgcagatgcactcgttaaaagtccaaaatctgcattggctgaaagccctaaggtatctttgagtgcacattctttagatgctccaactggccaaaagcatatcacacaagctgtcctgttgaacaaggatgccttctctcctgttcctttggatttgagaaatgatgatgtcagtgacagtatacaaagggacatagtttctgaagaagcttgcatggaccgtgaaaatgtacctaatttggttcatactgggactgatagcgatgactgtggaaaaactccaacctgttccatgaaattggaagagccagcctttgtatctaagtttgatcaatcaccttcacatgaagcaaggggaaatgtgcctatggaatctattgaaggctctaaaaatgctttcggcataactattgatgtatctgctgagccagttagccaagcaaatgctgttgtctcatatactaatggcacttgtgatcctgttgatgacactattttagctgaatcagcagctaatatttgtgacggaacaagtactacttcgttggtttctaaagtttcatgtattcattctgacacaagcaccaggacatttgaagagcatagttcttcagcaattgcaccgagagacctcgaccacggattaaacccaaaagataagagcatatctccagattcaatgcctactaaagaactaattgctgatgaacatgctcatggattttctcggtcaaattcattcatgcacaattctctagattcaaaatttatttctgaacctttggtggatataccttcactcaaggaaggatcaagtgactggtgttcacctccaaatcacacgatagggtctggatcagatagggttcattctgaagaagatagtggtcctttcgataatctgcaatttaagggcttgaacaaattagcaggtcgtaatgaagccaattcatcacggagggcatttgaagcttttgttggtacactaacacgaacaaaggaaagtatatctcgtgcaacacgtcttgcactggactgtgccaagcatggcatcgctggtgaggtaatggatatcattattgaacacctggaaaaggaaactaatttatataaaagggttgatttgttcttccttgttgattcaataatccggtactgtcgcaatcagaaaggtggacctggtgatgcctatccttctcttatccaggcagttttaccacgaattatatatgcttccgcaccacctggaaattctgcttgggagaatcggaggcaatgtcttaaggttttgaggctctggcttgagagaaaaaccctttcagaatacatcattcgccaccatattaaagagcttgaagctcttaatgaggcatcatttggaagctctcaccgtccttcaggtaccgagagagctctgaatgaccctttgcgggataatgaggcatttctcgttgatgagtatggaagcaatgctggttttcatcttccaaatttaatttgcacgaaactaattgaagatgaggatggaaggtcctctgaggataggagctttgaaggtcttactcctgaacatgaagttactggtgctaatgagcaggaggcgtcccaatttcctgtgacaaagcatcaactcatcttggaagaagtggatggtgaacttgagatggaggatgcagccccgtcaactggagctgaagccagctccacatgccaagaagatctaaccaatgatgctagctgtacaagaacagctcaacagcgcagttccattccgcccctacctgatgacaaagctccatctcctcccccattgccatcatcgccaccacctcaaccgcgcccaccctgtcctgtctctcaaggttcacaggtgcaaggagcattgcttgtggcaacggattgtgttgagcatcatcatccaggagccaattatactgttgaaggtccacaccattattctgttgcaaacaatcgaggcaacatggatgcatgtgtaacttcttcacagcctccagtacactacagttctggatatgcagggagtactaatcaaatatttcaaccaccaccgcctccgccaccaccacctattgcagcattccatccttctgggccccatggcagcttatgtgggccctcattaccacatcatggaaataactatcaccagccaccatcagcaccattacctagtagcgcataccatatacagccaccaccacatccaccaggtcctaatcagttcccatatccacctgaaccagaacagagaacacaaccttggaattatggccctccccatcctgagagttgtcagtatggtggacatgacagaggacaacatggatataataggagacctcatttcaatgacagagggcatcactttgatgataggggccattgctttgatggtggagggcattactttgatgatgggatgcatcacttcgatgacagatggcaccactttcatgatagggggcaaatgcaccatgaagttatggatggtggaaggtttcctccattctttccaccaggtcccccatttccagatcacttcgaagcgccgcccaaccaatttcattgtggaccaccgctggagcctccaccaggtccatgttctgggtggtctatgcctcataggagatccaagtatcctcctgattccagacagacaatggagccaccagtttccaatggaggaggttggaggcggcatggaaggcgtgattatgatagataccactgatgactggtatttgaacagaggtgttcttacatgttacctttacaactgtagctttaaaattatgtgatttacttgggataaggtacttgtaaagagtggaatcggagcattccccgcctgcttaaagttttccttactattctatttcttcttctactaagtctacctaggtacttatttttgttaagttagtttcttttatttttaa

SEQ ID NO: 10306 - DNA, 559 bp, Setaria italica
  Peptide Sequence Number=SeqID_76280
aggtatctcccatctcacccccaaacccaatagcaggtatgattttggggaatttaaccatcacagcaatttcaagaaaatataggcctcttggagcttacaaccaaccgactgtgcaaacagtgccacatcaaaacaaatcacatccgatatttgaaactgctgataaaggtaatctttgagcatgcagcacctaatgtactttgaagcccaaaaatgggtccggtctcggtggcacaaagttgtgctcatgcacctccttggaattcaagcccgaccactatttaccattgccattctggttttcaggagctcatttcctcagtgagcagagttcgattagtggatctactggccaacctcactaccttccttaggctcatccgatagccaaaggatccctgcatattgttggccctgatcaagttaatccgccacctctcatgtcacctcagatgccgggcctaaaagtaggcagcataaaagcctgtcagccccagtcagcccaagagcaagctcccccaaagaactcagcccagaatggtcaggccagtagcag

SEQ ID NO: 10307 - DNA, 1289 bp, Setaria italica
  misc_feature (1263)..(1263): n is a, c, g, or t
  Peptide Sequence Number=SeqID_76281
cctccccgactacgaaattattgaggccctgaaggcatcccatatggatcaatagcagactctgaatttgtttctctacaagtacaccttggtcccaggactgattgctggcggagcgtccgcacctgccttctacgctatccccaccaacccaggtatctcccatctcaccccaaacccaatagcaggtatggattttggggaatttaactatcacagcaatttcaggacagtataggcctcttggagcttacaaccaacatactattccaacaatgcctcatcaaagccaatcacctttagttcctggcagagtgtccccactccaatttgatgccttctacgctatccccgccaacccaagtatctctgcttcctctcacgcctcctccctccctaccttcctgctccctctcaaatctccctcccatctcacccccaaacccaatagcagatatgattttagggaatttaaccatcacagcaatttcaagaaaatataggcctcttggagcttacaaccaaccgactgtgcaaacagtgccacatcaaaacaaatcacatccgatatttgaaactgctgataaaggagctcatttcctcagtgagcagagttcgattagtggatctactggccaacctcactaccttccttaggctcatccgatagccaaggatccctgcatattgttggccctgatcaagttaatccgccacctctcatgtcacctcagatgccgggcctaaaagtaggcagcataaaagcctgtcagccccagtcagcccaagagcaagctcccccaaagaaatcagccccagaatggtcaggccagtagcagcggctcagagttatggaacatatcggtggatgaattggtgcgccagtactacaaaggaacactggcgagatggttgaagctgcacttaagaatccctgtgcgggtctccaagaggagggaaactaatttactctgccaagcctacagggttgttatacgttagttccgtaatggaaagagttgggggtgaaaacatgcgggtgagaaatgatagcaaatttttcattggtaatggaaagagttgggggtgaaaacatgcgggtgagaaatgatagcaaatttttcattgatttccttgcaaatcctgacgccatattgaaggatttcttggcatacaaaatgtgaccgagtctgtgctacgacaagcatttcttgcttgatggagaactcccaatcctatgttggacaccctaaaaataattcngtaagaattatgtgacatgggagctg

SEQ ID NO: 10308 - DNA, 546 bp, Setaria italica
  misc_feature (506)..(506): n is a, c, g, or t
  Peptide Sequence Number=SeqID_76282
tcgaaagcccgctttgagcaacttgaatttgcacaaaacaagcggcagaatgcatggcagcagtttcaaacaaccaaggggaaagctaaaaaaggtagccttttctgtgctcggccctcttttaatttggctaggcacttgtccattaagttaggagtctgtatgtcaaggtaccagcctatcccccaagcttttatacgttatgtcatgactgaaaacattcctagcatcggcgtaccaatagtttagacttctcatcacataacagaatcatctgaatttgggtggttcgtttttcaggtagggttcttctccggtcgcaagaaggagagcatcttcaagtcacccgatgaccacagaggtaaggtgggtgtcactgggagtggcaaaggcctgaccgatttccagaggagggagaagcatctgcacctcaagggtgggtctgcagacgcattggatgacgaggaataggactcttctgatgcgtcacttaattgttagcgagngcatagaaccaaactattttacattgttcgttgggtttat

SEQ ID NO: 10309 - DNA, 1606 bp, Setaria italica
  Peptide Sequence Number=SeqID_76283
tacccatcagatgctgttgctccaatggcaagttgcattaatggttctcacaaaggacatttgattgtctaacaaaaaaaaggatatttgatttcttctctgatttttggggactgttgctaccgattcctttctcttctttgttacaaggagccatgcgcagcaaggtagcatgatcaggcagcttgcaacagaagatttatttttggggaatttagatttttgtagcgttgaaaggtgagaaggttggttaaaacaatggtagggactgtctgagcaaaattattagtagtaatgaacagtatgtataaacttccatgccttccaagttgtccattaccctttatcttgattgattgcaggtttgtgtctcatgctagagtacctcctcctgattttgggtgtcggtgctgctgttctaagttggatctcaataatgggcgcatatttaataatactgaggcgttccttatgtttgtgatgcttaatgctatttttttttttgtgaccactgcaggtcattatgttaacagaagagcttttagcaactgcaaagcaagctgagggtgcccagaacgttgcaggtctatcaccgccgaattattcggctggaatgcagtcagagggactgggtgacctttcacattcacataagtttgcggttgggactagagtgcaagccgtgtggagcgaagatggggaatggtataatgcaacagttgaagctttgacaccaaatggatattacgtagcctacgatggctggggaaacagggaagaggtggacccagataatgtgaggctgcttgaggaagaagctgctgatgctttgcgacaagctgaaaaggaagctgaagccacaaaaatggcaataaagaggaaaattgaacaagcagccacatctgattttcaggcgcggagcttgcctgccaaacttcgtattgaaccaagtgatcctgaggatgttaaagctgcaaagcgtaagaaaatacatgctttcaaatcgaaagcccgctttgagcaacttgaatttgcacaaaacaagcggcagaatgcatggcagcagtttcaaacaaccaaggggaaagctaaaaaggtagggttcttctccggtcgcaagaaggagagcatcttcaagtcacccgatgaccacagaggtaaggtgggtgtcactgggagtggcaaaggcctgaccgatttccagaggagggagaagcatctgcacctcaagggtgggtctgcagacgcattggatgacgaggaatagactcttctgatgcgtcacttaatttgttagcgagagcatgaccaaacattttcatgtctggggtttattgccgacctggcccccaagtggcgcctgttcagtatgttcaacttgtcgaatctagaaatctcacagatatgtcaatgatttcatgtttgtggcgtggcgttctggtgtcccccagctcatttttgttaacgaaatattctggcgttctgctgtctcgaggtgcgcctgttctgttgtagagtttgccggagctgttcccttgtctcaggctctcagctgttggtcagtttacaagttgtaccggagtattgtagctttcctgtaaaattt

SEQ ID NO: 10310 - DNA, 1081 bp, Setaria italica
  Peptide Sequence Number=SeqID_76284
tgaaattcccgagccggaagctgctatggccatgccggagccgtcgtcttgcctgaccctgcgaatcttctacctgagggtgagcaggtgcgaggtcgacgagtccatggctgacaccctcatcctcactcacatcccgctcacccctgacaccgacctggaagtaagcggcgccgatcggaagccaagcgtcagcagcggcaaaggcagcagcaccgtgacgtgctccctccgccgcgaccgcgtcgactcgaggtcggaggaggccaccttcgttagcacggcgtccatcaggatgtccggcagcgtgcggttcgaggtccaaagcaaggacgagcggctcctggtcgggatcctggagatgtgcgatgcggaggggaagaagagctgggtgatgaagtgccaggtcgcgacgcagcgcgggtcggggttcctgaggtgcggctgtggtgggagggaggcgaagccgccggcggtggaggtgtacgtggccggcgtgtcccggggcacgccgaccgtgttcacgaaggccatgcagctgcggttcaggaggcggcgccaggtgaaggcgttcatggacccgatcccggagtgcggcgagcaggtggaagacatgaaagaaacgcctccgaagcatggaccacaggaatcggagtacaggtgctacaagcccgacccagacgcggacgacgaggacagcctctacctgaaatcagcagggcttgacgacgacgaggagtacagcgagctgtcatggttcaccgctggggtgagggtcggcgtcggcatcggcctgggcatctgcctaggcgtcggcatcggtgccgggctcctggtccgatcgtaccagtccacctccaggaccctgaagcggcgcctcatctcaaacctgctctgaacccacggcagcttgagtgctcatctcctaaaacttcagcgatggcaagtgacaaaaaaaatgtagatgctgaaacgttgtgcacgctgtgccgaatgcacctattgtagtatatccctgtgcggtcggtatggtatattggcagtgcgtgtgccatggtaaagaaaaaaaaaaaaaaaaaaa

SEQ ID NO: 10311 - DNA, 1174 bp, Setaria italica
  misc_feature (1)..(31): n is a, c, g, or t
  Peptide Sequence Number=SeqID_76285
nnnnnnnnnnnnnnnnnnnnnnnnnnnnnnnagtcagatcaaatggtaaagaaaaactatagacccatgtatgtgacttggtacacttgctcaaaacataaaaatctgccaggttccagaatagaaaaacaggtttttttaaagatgaaatattccttttatataaggtgaaagtcaatgaaaagtatctgatacaggagcggatttggtagacaaagcaatgccttacatttcgaattccaacaagactgatgaagcccctgcgatatcatcttcaccacttttattctcaaactactattacataaatcgagtacaagaaactgccaaactacccagcctcgattcacctcacaaatagaccagaaaaaaaaagggttggtgtacatgcatagcataaaactcagccaagtcttgcttctcggtgcaaaacctcctcagcaaacttgatcaagattgtcgtccttggcctttgctggccttcaattggcacaaagtgtgcagtgactactgcaggaaagccagcattatctaatacaccctttacaattcctgcaacaaaggctccgcagttgaatgctcccatatcttttggcaccgaaatgaaccggttaacaagaagctccttttcactaatcatgtattcatcctcatgttcagttcccttctcaagtgagtcagccacctttccaaataggaccttccatacagtgctgtgaatgaatgataaaatccccagaagtcgtgtttctcgcctattccccttctctctgtgacagagaagttcaagtacccttgcaccaacagcataaccagcatcctccagtctccgttccagctccgcaatgttgtcgacttgtgtttggttgtactgtaccaactctgagaataagaatgcaaatgcactcaaactgacctcctgcctgccgcggctgaggggcttgtcgaggacgttggcgtactgcttcgccttcccgacgccgatcatcttgcccgctccctcctgctgggtcccgctctttcacccacttccgccggtttcttgggatagttagcggcggggagtgtgcgggcgaggagggcgtgcggcgccggtggtggggaagggaggagcaggcggcgtaggaggggaacggggcgcggtggtgagagcacgccggtcgcgagcggagat

SEQ ID NO: 10312 - DNA, 587 bp, Setaria italica
  misc_feature (540)..(587): n is a, c, g, or t
  Peptide Sequence Number=SeqID_76286
cctcgccggccgcgaggggctcccgcggccaccggcgcgcgttctcggccggcggcgctggcgacgacgccgaagccgcgccgccgcggtgcttctggacggagcgcgactgctgcgagaagggggtcgtcaggggtgcggcgtcgcggtggccgtcaggaacgcgctggccacggtcgtcggcggcaagcccggccatcgagccaccgcagcgtagagggaggcctgataatatggctaaagttgagggtgtgctttgcattttgctgcagcatgttactctatgtgctttgtagtaacctaacgtgccatgccaaaattgttcgtgcatgatatggaacatatgacagtatgtacgtcatgtatgcgtatgtatgtgtgtatgtaaccgtatatatgtatgtatatacggtcatgtgtagtctggtcctgcaaatacgtgtgatttttcccaaagttgttgagtgtatcactacataaacggtagggatagtggttgtagatctaaaagatggtactcaatattctctttgaaatttnnnnnnnnnnnnnnnnnnnnnnnnnnnnnnnnnnnnnnnnnnnnnnnn

SEQ ID NO: 10313 - DNA, 293 bp, Setaria italica
  Peptide Sequence Number=SeqID_76287
ccgccgcacgcgtacctgcccttcggcgccggcgcgcgcacctgcctcgggcagagcttcgcgatggccgagctcaaggtcctgctggcgctcgtgctctccaagttcgagctgagcctttcgccggcgtacgtgcactcgccggcgctcaggctcatcgtggagccggagcacggcgtgcggctcgtgctcaagagcgtcgtcgagccaaggtcatcgtgatgcgggacctcccctcccctgtgtggatgggctggacctcgtttcttccactttgggcctcattgacacgg

SEQ ID NO: 10314 - DNA, 624 bp, Setaria italica
  Peptide Sequence Number=SeqID_76288
tacaaattaactaggaaggtgttacctaggcatccattgacaaacatttcttcatgggggatgtgggaagctggcctaagttcaagatatcagaatacaagtaatacaaggatgtttggattttggatggaaggaatgctcctttcgtagagctcctcgtggctggagaggtgggcgacttcagttggacaggctaatagactctgttgtatgtaaacccagtcgtgattgagaaaatttccctttttgagagttttctcatggagatgattctgaaagaggtagaagctgtgcagggtaactgccagagggatttcagcattgactggaatcacatggagagtttggactttggaggtctccaccaattggcaacctcgttctactgatgaactaagcagaccaagtagattcgtgatggtttgttgtaggtctattactgttggcatcaaagctgatgttcttaactatgaaaaatggtggttccttctcgagagtcttagtgttcatgttggagcaatgtgtttccttttgcgatcagcttgttattaacagaagctggacattgtcaccctgtaatgtaccaagcatcaaatgtgtgccacgcagaggtgattaacatag

SEQ ID NO: 10315 - DNA, 501 bp, Setaria italica
  Peptide Sequence Number=SeqID_76289
ccgccgcagctgctcccggagctgccgcaccaccgtcgggatgtacgcgatcgccgcgctggtgccgttgtctttgtcggcggcgtaggagtagtcgttgccggagacgacgacgacggcgaccccgccggcgtcgcagccgccgccgctgcggttggagggagtgcggtgctgcgcctggaacaggtcgatctgcgcgctgatgttgcgctggaagttgccggtgtcgagcacgccggcgccgccgacggcgaagttcatgccgcgcgccaggagccccggggcggcgcccctgcgcagcttgtacgccaccggcgtcggcacgcccatggccgaagctatgaagtcggtgaggacgcggccgtcggagaagcggccggtggggcggccggggaaggtgtcgccgtaggggtcgtaccaggcgtgcgtcagctcccgcccgaggtcgcccaggttcccagtgtccgcgtacgagtcgccgaacacccacagcggcggcgg

SEQ ID NO: 10316 - DNA, 265 bp, Setaria italica
  Peptide Sequence Number=SeqID_76290
tggcaagggccttgacggcggtgaaggggatggcggagaacaccaggacgccagccagctcctgccacgacgcccgcactggcgtgggactccgccgccgcctcagcctctgacgggcgacggcgccgggcggcgcggcggagcggaggaggagcggcggcggcaaaggaggcatggagctgcggaggttggacccacttgacagtgtcaggaggaaaatgctcgagccgaaccggctcgaggagaccggaaggaggagggggca

SEQ ID NO: 10317 - DNA, 430 bp, Setaria italica
  Peptide Sequence Number=SeqID_76291
acgttagtttagttccaagaatgttacgacgggctagtccatgatagagtaaaatcagaaaatctttattttcatcgtccacgggagaggaagagttaaatgatgatgatgccgccatgctgcatgcatcccttagtgtcgacattgatagagtgtatgtcgcactttcgaaagcggatacagcttgtgctctgagaatggctgatggtatagcagggagaagttgctgaatcaactgggttgtcaaaattagcctcttccgcggtaaataatttagaggaccatcatctggagtttctgcatcatccttctcaatcaacctattagctgcccaagcccactccatctcagatgtgctgatgttcctcaatttttgtggactctcaattattttatgtccaagaacaagcgcggactccatagctttacg

SEQ ID NO: 10318 - DNA, 4710 bp, Setaria italica
  Peptide Sequence Number=SeqID_76292
gccaatttgcatcccatcctaaaggaaccaaagaacccagagaaaggctcacattattatctccactctagcccgccaacactccatggatttcttagaaagattgacaaatagcgaagaaatccgccacatgtgctaagctagtaagcatggacttctctaacaaattctgaagctaattactcttcatcagagaaaaatgatgggagatccacagttttttccttgactttccacaatatacagggacctatacttgatataagggacaacaacagcagccagcactgagttgatcggctggaacacgtcccttggcctcttcgtggtattcttctgtttggccatgctttgcatgggataaggagcactgggaatcacagggcacccaagatcatgaggggctagaaaacaatggaagatcattccactagagtgacaaacagtacaccccttcaggaagattcccaggaactgcaaaagacataacatgtctttcaggaaaaattctacgagtcatttctgaacctgatgacccctcaactgctgctgcatggtttcggccatgaaatcttcccaaacgatttacaatagaaattctctccaaatcttggcactccaattgcacatctagcatcgaagccctcttgttcaagcttacaaagtcattttccatcttccggattcttccaacaaagacttccacggcctttgacactttgccttccattttcttggcactcgttgtttgttcagacgggttattttcatcgtccacgggagaggaagagttaaatgatgatgatgccgccatgctgcatgcatcccttagtgtcgacattgatagagtgtatgtcgcactttcgaaagcggatacagcttgtgctctgagaatggctgatggtatagcagggagaagttgctgaatcaactgggttgtcaaaattagcctcttccgcggtaaataatttagaggaccatcatctggagtttctgcatcatccttctcaatcaacctattagctgcccaagcccactccatctcagatgtgctgatgttcctcaatttttgtggactctcaattattttatgccaagaaacaagcgcggactccatagctttacgcttcttaggccttctcatcattgaagatacttttacattggaaggaaccaaggcgtccatttttgttgatgggaggtgatgcccaggcctaacagataggacagattcaactctgttttcagcagagttattattgtcgttattccaagaagcttttggaaaattatatggcaaagctgtggtcttctgcgcattgagcatagcaacactctgaccatttctgtagtttccataatgtccaaaccaagaaggtgccatttgagggtttatccttggtctctcacttctttcaacagaatttgatgctgcacttgtgcacataggctgaacttgattttgattatcattctgtgcagtaaccaaaccatgatttggacgctctccagaaggaagctgagaaggtatattaggatttctctcctcactccttgaagcaaaactcagcattttcatgtctgaagggaatgaccccgggacaccagggcttccaatgttatccacagacgatttggttgagttattggctacatgagcaaacctttgaccagacttccagtcaatctgcgaagcatcagaaccaacatcaggtcttattgtctttccaattgaactgcctggatcaatatccgtatgcctcaaggcttgcatttgatgcaaaagagaataattttgctgctgaatgtttgaaggagctgggcttccatgtagcacaatgccaccactactattagagctactgtgggaagcattcatggcctgaaaatttgctcctgggttctccccatgtttagcgcccatgatgccttgctgacgcaactgcgctaaggatgaaacagtattgacgaaattcccatccaaagaaggcttctgcaaagattcattgcctccggatacagtagctccagtcgactcaaagtttgccttctgagaagatgctaaccctgaatcactatcaacagcttgtttgaatcttggttctgcgagttcgctgaacttgtcgcaatatctgacggagtcgctgttttatgcccttgatcgtctgccttctgagagctccataaattggaagctgcagcattatttggaaacatcatagactggaggatattaggtgtaatcttgttagcttgcataccagctaaacgttgtgctgatatgtttgtccatacattcttgaacacagttgcagagctgccttgctgaggctgctgcagcatgggtgcaggaccagatctatcatctgccgcaggatactgctgacctgaacttaactggggaaaacgcccaattggctgcccgtattttctgtttctgaagcatgaaatggtgaagattgagagtttgtatgcggaggcgtcaaagactggctaggggtggaaggcagctgtgaccggtcatcctctggtgccgagtggtcaggttgcttggcatcaacattagtctgactagaccataagttacctgaatttgattgccgttgggatggtggtgccaatctcaacccaaatccttgcaaagaaggatggttaagttgctgctgggcagaaacagcgccgagagaattgttgggcacatcagcaaccgcattgctgtttcttgagttgtccactttatgaagaagctgaagcatatgttggctgttttgaactgctctattctgagacagaccggtatcagttcctccaaaatgcaatgcactggagctgttagggagaccatgtcgagattgaagttgctcttgtgccatcatcattttctcatttactgaaggcatactattggaaacatgggagtttgtgccaaaatgatgctgcatgttattccgcatctgatgtgactgaggtggaaacagactatttgacactggattgcctggagaagggccaatgttcattccagagctacccatagaccgattctgcaacatgtaagatgccattgcttgctgactggactgacttaaattttcggattcctttccagaaaagacagaatgcctcctgggagcagaatcacttgttacgtgttgcccatggtttaaaaggtgtgcttgcctttcgtttggggttgcatttagatattcctggttgaaatcgcttggtctttggtctgcactttttcctggtgaatcggaggtctctggaaccctatgtcccatattgcgattcattccgacttgctcaccactccgaccagtgatcatctgataatgatcctgagtcatcattgaaatgcttgagctcatcatgctaatatttttaccatctgaactttcatttggcatttgtgcagaggttatatcagacttcctctgctgaagtctctggactgaatttgaattacctccacctgatttccaagagttctcattgctattaaagatattttgggtactgctcatgtcttgtccaagtgcattgttggctttccagtcattttggttgttgctggactctctgttgatgttgtgatcagctgtattttgttgtgacatccaaaatccatgagtgccaggtggtgtagcatgtgcaccagttgactgcaaattatttcttaccatttcagatttctgatgcgcccaaaatttatttgcaatgtgcgcctgttcttgtctaccatctgattgattttgttttaagctctgctgaaagtatccattgttggcttctgaagcagattgatgattgttaacaggagcactaggaggagattcatgaggcatttggtcccttcgctcgtagggagttcttatggcatgctgaaaactggcaagatttgggttattcattgttccctcagcatagctggatgctggcggagggcgtgcattttctaggttcgtgcctcttaatccagaaatcttattctcttcacggcctgacattgaattgttcgcaattatttgctcaggtttatggaaactcaagccactccactcttctttgggactattttcactggttgtagactgcagagcttcctgcataagggcactccagctaccactctgtagagatgagtaagcaccaccatagttatcattgtccaaagaattaccattatcattgtcacccctcaacaaagctccccagttgctatcctcatcgttcccaaataaaattttctcctcagtagggtcaaggctagccctaccacttgcttgcccaacctgcactgctgatttctcttgcacacccacttgaagctcaacttggttcggcctaccatgaaaatcttgggtttgaaaaccatgctgtagatgattcatcgtaaccggactgcctgccttgatattatcaccttgactttgcattggactgttacttaagaaacccccttttccacgaaaattctgcatcaaactggaggcaccttgcaggtgaagaccatgttcattcattgaagagttgaatggcctagatgtcttttcagactgatctggacctacccttgccatcgcaccctgagaatcagcaggaatccctaaaaactgggaatactggtttccagaccccctgctgctggtggcatgcattggataaaaagattggtccacttggtgggtagctagtcccattggtctc

SEQ ID NO: 10319 - DNA, 304 bp, Setaria italica
  Peptide Sequence Number=SeqID_76293
ggtatcggtccccacccgcgcagcctagaagtttccgccggccggccgtttcccggccagccacccgcagcgatggccgccgtcgaagaagattcggcgcctgcagccgccgccgccgcttccgatcccgccgctggctccagtgataatgaaataacagtggaagaggcctcttctgtgcatactgaacctccccaggatggcagtgctccacccgtggtttcctctgatatggaggttcttcatgataaagttaagaaacaagtcatcaaagaaggccatggcaagagacccttaaagtttg

SEQ ID NO: 10320 - DNA, 1052 bp, Setaria italica
  Peptide Sequence Number=SeqID_76294
tcttctttcctaaatcacttgattgcacaggagtctatcactattcactagccagagaagaaaaacaagaaatcagagacaaaaggaaacacctacaaattgtgccaatcataaactcgtttgtgtgcattgtaaaacgttgcaaagcgaccccatgctcaatcacaagagaaagggcttcctgtagatgtcgaacgtctccgaagcgcagagctggggctcctgcgcgcagctgaatgtgatgacccggcggaagaaggtgccgatgggaccggggatccccaactccccgccgttgtcgcggatggtggccctcatcgccgcgagcaggcggccgtaggttgtgcccggctccgactccaccgccttgatgaagctgtacgtcatggcgcccgtcgaggtcgagcccgagaacgccgtggtatcttgcgaggtctggctgtcgccgcagccgctgatggagatggcgaggccgccgctcgtgcacttctgctcgctggagaagcgggtctgttggttctcccattgccagtatccggtcctggagaggcggcagaggtaggggaggtcgaggatggtgccgctgtggcaggtgtccacgatggcgtggagcttcacgcccctgcccagcggccggacgatggtggcgttgatctcgtcgtcgaggatgacgccgccgcgggggtcctcgaagtccaccgggcagagcgcctcgtcgtagccgtccgcctcgtcgctgttgttgtccagcttctgcacgccgtgcccggagaagtggaacaccagggagtccccggcggtggcgccgtccacgagccaccgcagcgcgcgcaccaggttctcacgcgtcggcacccgggacgggtccctgtcctcctgtgtgaggacgaggatgcagtcggccgggaagccgaagcgctcgcggagcaggtagtccatgcagttgacgtcgttgacggcgcccttgagctcgtaccgggtgccggcgtagctgatgcccacgaggagcgcgcgcttcttgcagccgcgggctcccgggtagctcgccgccg

SEQ ID NO: 10321 - DNA, 1031 bp, Setaria italica
  Peptide Sequence Number=SeqID_76295
gttcgtccttgtttcctaggtaggtctattgttctaattgacaaggtagtcaagctcgccccagtcagtagtggtcagcaactgattaatgactcctgaaaccattggacctcgcatgattgctcttccttgtccagcaaatccaaaagacaccattttgacgcccagatactcagtcggaaggatagctctgctttctgggttcatcactagcaatcggttctcaggagaaaccatagttggtaagcttggaccgaagacatcagcatcaaagattccaaccctggcccccattccagctagtgtatatgctagatttacagcaacagtagattttccaactcctcccttgcagcttgatactgctatgatgtttgaaatcttctgtagtccttctggaagctcccctccatataccggctgtgcaggttgtgcagacattgtgacgtctaccttcttgacccatggaagtgctgcaacaacctcgtttgccttttgttcaaactcgtctttgattggacatgcgggagttgtcagctccagacgaaatgagacctcatccaatgcatcaccgatctctaaatccttcacaaacccacacgagacgatgtccgtaccgaaatcaggatcaatgatttgggagagtgctataagcacatcctttttagcatcatccacagaggtggctgtcgcagcagcaccggacgaagcagcagccctcgagcaccgccgccgccggctcgcgcggcgcgacgagggaaagcaggcgcgcgaccggctggaaaccgcggcaggaacaggacccgctgctgatagaacccctcttagggccggtgcggttgggggaaggagatgggaagccggcggcgcgaggaaggaggcgggcgcggcatggagcgtctgcatcgccgcgctgcccgacgaggagaagccgagggacgctgctcggctcgcggtgaggctgtgacggagagcgggcgggtggagaggatggagggggagggagtggccgttttgggccgctggctgtg

SEQ ID NO: 10322 - DNA, 287 bp, Setaria italica
  Peptide Sequence Number=SeqID_76296
cttgcagctatgtggttctagaataatacgaacgaaaaaaataagagtccgtactgctgtcccctggaaacatatgttctcctgcggttaaacatgcatggtgttaagctcttgattcgcctaagtcgttgctggagtgccaataaagctctgacctcctgcagctgatacgccttttggagtaatttggtgtgttccaacttctaacgcgttaatggattactacccaaccgtagcagactattagtgaggctgtgaaactgcactgcgcttgtattgtagtatca

SEQ ID NO: 10323 - DNA, 2080 bp, Setaria italica
  misc_feature (1)..(43): n is a, c, g, or t
  Peptide Sequence Number=SeqID_76297
nnnnnnnnnnnnnnnnnnnnnnnnnnnnnnnnnnnnnnnnnnntaggtaaagggaatgcaataacaacttagtttatgcaattacaaattaatctcaggatgttaacagcgggaaatggttgcaaattaacaccttgaaattaactgcacaaatccagctgagtgaactgcgaaaacaggtttccctacaagatcatgccaaccaatccacatgttttggagaaaactgtactcgttcctgtctctatgatcaccaaggctgattgcctctaaaatctttcacaccatgttgggcctctggggtagaagaaggttgtagaacttgtctttcaagaagaagcttcgtcctttgttgtcgacagacttcttccacccgcaccatccaccattcacaatcttcttgagatcgtcagcaccagtgtagtgtggatcaaggatgagaaaagcacagtcgccactggcttcattataatcaactcccagaagggtgtaagccaagactcctccaccaatcatcactggagttccctgtgtttcgaaatgcctggcaagttctctgcatttttcaggaagctcatcaccagatctcacattaataatcttgcaactcactcctagcagtttgtcaaggacaaagcttagctcaatggctccaatccactcacgagatccaataaatgatggatccttgtcaccaatttcaacaagaacttgttgaatctccctgtgcgaagggacatctattgatgaatactgttgcaatctgtaccaagaaacaattgtttgtaaagaccgatatgcacatccccatccattgtcatcaataccatcatgaaggtaatgataatactcatatgaaccatcaatcaaagacataattcctccagatacaccactggatggaatttctctgtggacatctcgaagcagtgaagaaccatttcttgatgtctttttcaccctctttcccatgtcaccaaaagtcaatgcattagaaattcgcaacaaaggccggtctaagggaagtcctagccttacgtgcagttcttttcttagctcactctgcttctcctcgatctccccgtatcttgtatcgtatatggctgttactggaatatgcaatcccgaaggaatgaaatggtacggacaaagctgtgcttgtttagctatctctgatgcaataatcttcttcattacactcatctgatcagctaaacctgggataacaagttcagatacagcaaccgccacagggaaatctattgacgagtagcatagtatatcaagcttcaagttgattactcttaggctggcaggtgctggggctggaaaatactctaccacaggtgtgatgccaggcttcaagctacctactgattgattggacaggacagttatttcgattgcatctgcattctcttttgtcagtgagaggttgtacctcttttctgggaagaattctgaacaagatacaatacttgtcatgcattcctttgttcttgagtttccaggtacatgagaatcagaacttaaagcatcaccatgtaagatgatagaatgatgtgattcattagatgtaattggcccctcaactaggaacgaaacatgaggatctctgagttcagcagttgtagattcaataagtgaagaaaaccattcttcaatgccagaaatctcatccgccggaacatagagtggcagcttcagcggcagctcacagtgcagaaggcaacccttctcccacaacaacctccctggctcatcctcccacacaacctccaacccttccaccgcgtccgtcccgccgctctcagaggtaacaaaccgaatctccccggaggcggcatccatgctgccaccgaccatgccatggctcaccgccacgccgagcagccgctctctcagcgcccgagccagctccagagcgcgagcggcgtccgcatccgatccctcgccatccacgagcagcgccccgacgatgtcgaacccgcgaggaagcaacccccggatttcgtctgcttccctggtgagatcgggggcggcgtggtcgccgtgaagggggcgcagggcggcggcgacg

SEQ ID NO: 10324 - DNA, 605 bp, Setaria italica
  Peptide Sequence Number=SeqID_76298
tactaggccatcacgttgcgggtctccagctttcatgtagaagcgtgaaaaattgttttgaccaagggggggccgtggcccactttggcccccatgtagctccgctggtgcctcctagtaactacaggcatttataactaatattgcctattctccctaactaccagtggaaaatccgctaacacgaaatattctgcacctagaagcttcactgaatatgaacatctactcgtacacacaaggttactgctaacagctagttgaatgcatggatgttgggttccccgcttgcccatgaattttcaatgtataaatcattgaacagtatagtcaatgatcactgtctacagcgccttaaatattacttctatatagcaacttagaaataagtacagctagcgcaatgcaacaacagcaagtgaccttagctgctcgttcgctgctttgctgctgtttgctttaatgatagcatcatagttcaattttcatatgatgttgtgaaccactttataattatctttgaatggttatttgcacttcgttgtctgctttttaatttgatgtgttgtaattcagatactggatgatccatcaccaactccaca

SEQ ID NO: 10325 - DNA, 301 bp, Setaria italica
  Peptide Sequence Number=SeqID_76299
ttccttcctcccctcctccccatctccacattctcccatcggccgttccccttcctccctccccctcccatggcggcgagatctctccacgcgctttcgtcaagctcctgctagccagctgcgtccacggagagcgctcgtttccgcatcttctcgcatgcgatatcgccgccagacgattcttcttcacatggcatcgcaagaagcagggatcggagaatgagagctggtagagggcacgagctagggcttgggaggaggtactaggagcgggctgccatcgttcatgacgccggcgagg

SEQ ID NO: 10326 - DNA, 2043 bp, Setaria italica
  Peptide Sequence Number=SeqID_76300
tttttttaatgatctccaagaaagatgacttatctcggccaacagtcaagatacacaagcacggttcgatacacaaagttaaaactttttccaaccaactgcaactgagaccaaaacaagaaaagaaacaaatgacatctttactttttttattcaatggcctcttacctacagggtagggggaactaggaagatcctcccctgcagaaagaaggccaatcatatggacgaggtgatggagcaggatccattggatggttactgtcatgcaacccagcgatgcctgcaccagtcaggttcccaggtgcccttgcggatctgccgcccatgaacatggttgaccatgtgtccgacagccgctcgctctttgctgctgggttcaacaacgttgtgtcgacgctccagtctactgaggtgtagtcatacggtgcaagcccattggttctccaatcagaatgagacaatgtagaggaggattcagatgagttccaccctctaaatgccccgagtgatgacgccacagaacgggaagatgatgtacctccagaactccaggtgccaccccaaccattggcagcaatctctataggattggagacaaaactttgttgatggtttgtatgtccaaatgccctggcagaactaacattgtccaaactcatattccttagtccatgccccaagccaccattcaacatcatatccacacctgatgcaccatttaagtaccactccctcgaagatggttctgatgcaaacatactatggctggtggatggtaggctctgcttggtacctgcggattgaggacgctgcattacagttattgactctcgcaaggttccattgggcattgcacttttcacctcattgcctcctgccacatgccgcatgtctgacttcagttgcggtactgtaacaggcaaaggagatgatgccacgtaaggaactgatggaaccgagctggcattaagacgcctcttctcaggttgaacaaattgttggcggcctatatctggcttaattggtgcggccagtggctggaagcctttaattgcagactcctttggaccattaccattcatcaaaagcttatagtttaagtccttctcctctctcctcatttgctgaactcctactgaagaaaatccatttgtttgaggccttgcagggttctgcgcaagtacgacttgctgcttgttaggcaagccacttgaatcgccagatccttcaggcttaggtggtactgcagctgattcttgcttatgtgtcttcaagacctcctcagccttttctagatcaccctcacaggaaacaactgccctttcaacctcttgctttgtgcacttgtatttcgcctccaagctcgcaatctttgcaagctcatcagctatatcaatcttcaagttaactccagactgttgatcagctgcaagttgttgcttagtttcctcactgccatcaaagttgcagagccaggtaacagactcctcaacgcaaccctcattctgtataagggccatcgttgcttggtctgctgagaaacccatcgcaacaagcttctgcgcgagtacctccaactttctggacataaggtatcccttgcatcgctcatgtaattcctgggcacgcctctccttctgcctttgatgcttcttctcattcttttgtctgatcttctcacgtttatcaatatcacacccaggtacggagtccactcgagacgcagtactggttgctttttcctttggatcttctgactcaccagaacagctaccattgttggaggcacaatcgaagtcccctgtaccatgggagctacgagaatgctcatctatttcatctgtattcctgaatttatcaataccttggctacccaacaaagaggctgatggttccagaacatggaactttccagagaggttgttgtaagaacctacaagtgtaccattccccattggctttccagcaaccttaggttgctcttttgcaactttttgcacctgatctgtctttcgacttggactttggtattgtctagta

SEQ ID NO: 10327 - DNA, 821 bp, Setaria italica
  Peptide Sequence Number=SeqID_76301
tgtttgaagatactctctgatgtgatgattgtgatcttcagtgactcttcgttaactgctgacgagcaaacaataagtgatttgaaattgatctctcaaaagcattttctgccgctgtacccttcttttgcagaggatgaagatcccatacccatatatgcacagaaactgctagtaatgctaatggaacatgattgtgtgaaagtctgtgatattctgcacaaagcaacagtatcccagtgctttgaatttttactaggagatctgtcaaatacaaatgtaagcaatgtcaagctttgctttgcccttgcatctgctcctgagatggacacccatattctttctcaagcttcaagttgttccgaaagaaaggaacctacttgagtttgttgctgcaaagacatggatgattttcttgaaccaaccctggaactttgcagagctttcattatccgtggcattggcagcaacagaagtgccgccctctcccaaaacccagcactccttgttgacagtgccttcagcatgagcattgctgttgatcaacaaacttgcgtcatggatatatgtgactttggtggcaacatgggtatttttcttgagctagttggcagttcagatccacagataagtgatttagcatcagattgtatggtgttgttgctcaaggcagcacctcgagaggcaacagtgggcttgttgacgaatcttcctaaattgagtgctgtcatggacttgctgaagcatgacagcagcctacggctgactcgcttactatatggcctaggcttttcatgcagacaatatctagcccagggaat

SEQ ID NO: 10328 - DNA, 496 bp, Setaria italica
  Peptide Sequence Number=SeqID_76302
gtggtggtggtggtagtagggctggtgcggtggcagcggcgtcggcagcggctgcgacgacttcctccggtggatctcggcaaggaggtgcttggctcccttcctgaagaactcgttggcaaactcccaccgatctgccactatcttcctaaaaccataggtgttgagctgcctgacgaagctggagaagttgttgtgcttgaagtagttggggaggaggtcgcgcgcgaactcggcgggcgccacaccacgaaggtggtgtcgtcctcgccccacgacacgatgtggtcggtgcaggggtcgtccaccagctggtacgtcttggtcaggaacggcgccggcaccggcttcgcgtgcgtcggcgaggtctccatcgacacaaccatctcgccgcaccgctccaccaggaaagccatggcacaaagctatcgatctgatttgattcgatcggcgggcctctctctttctttgtttctttcttgcagccgtgtgtagc

SEQ ID NO: 10329 - DNA, 317 bp, Setaria italica
  Peptide Sequence Number=SeqID_76303
cgggggcgttgtgggaggagacccggacgcggcgcatgctccgccgggttgctgctgctgcgccggcgaggaattcagctggcttgttcttgttcctgcgtgcgcgaagaagatcccccacacaattccttgcccttccggaggattcaatcgccggggaatcgagcagcctggtagaccaagaagtggcaagaaatcaaccaccctcctcagcagaaccggcctggtaggtaagttcgtcttcctccccaattcagttcaccctcgatctcaaccagctcgagggagggcacagggcaactaactactaccaagaa

SEQ ID NO: 10330 - DNA, 544 bp, Setaria italica
  Peptide Sequence Number=SeqID_76304
gtgccagcggcggcacacgaggcggcaggcgccgtgcgccgcgacggggaggcggaggaggcaggtcagcgcggcgtcgtcggggaggcccgggatcagcggcgtgtcccaggccggctgctgcaggtcctccgggggcggcggcggcgcgggggtgttggtggtggcgaggcggaacttgggcgtgagcgccatctgcgcgtcgccgagcttgtggacgggggcgttgtgggaggagacccggacgcggcgcatgctccgccgggttgctgctgctgcgccggcgaggaattcagctggcttgttcttgttcctgcgtgcgcgaagaagatccccccacacaattccttgcccttccggaggattcaatcgccggggaatcgagcagcctgaacctcgccggcttggaatctctcagatgcccttctctcggagacaagacctcacctcagctcagctcgcggccattggtttcgggtgttggattcggcgaagcagctgacgccgtcgttccaaccaccgccaccagcccagcgagcgacgc

SEQ ID NO: 10331 - DNA, 260 bp, Setaria italica
  Peptide Sequence Number=SeqID_76305
cctccacatcactccacagtccacaccgcccaccggcttcacacggacttcgtcgtcgagctcgagcaagcgaagcgagcatccggatccgccgatccacccggcaatggcgtctcctgctcctcccgtcaagaaggtgctggtgccgatcaccgccggcaccgagcccgtggaggcgtcggtccccatcgacgtcctccgccgcgcgggcgccgacgtcaccgtcgcggccgcgggcggcgccgacggcctgctcgtcg

SEQ ID NO: 10332 - DNA, 261 bp, Setaria italica
  Peptide Sequence Number=SeqID_76306
gtgcacgacggcgacaacagcttccagggccaccgggagtggctggcagaggtgatcttcctgggccagctctcccacccgaacctggtgaagctggtgggctactgctgcgagggcgagcaccgcgtgctggtgtacgagtacatggccctgggcagcgtggagtcccacctcttctcccgcacgtcgccgccgctgccctgggcggcgcggatgcggatcgcgctgggcgcggcgcgcgggctcgcgttcctccacggc

SEQ ID NO: 10333 - DNA, 258 bp, Setaria italica
  Peptide Sequence Number=SeqID_76307
ccctacacgaaccagagcagcctccaccgccagcgccgacacttcgagctctgcttcggccttctgcgcgtctctggccatggctgaacccgaggtggaggtggccgcagccgccgcagcagcgatggaaaccgaggcgccggcagccgctggtcagaagagggagagggaggaagggggtgatcctgccgctgagggcggcgaggcggcggcggaggaggaagcggcggcggctaagaagccgaaggtggaggggga

SEQ ID NO: 10334 - DNA, 284 bp, Setaria italica
  Peptide Sequence Number=SeqID_76308
gagagacgcggccatggcgatggccccgccgcccgcctgctcgctcctccgagtcgccgcctccgcgcccatttctgctgcctccacctccgtttccatcccgcgggcccccagtttcctcccttcctcacgttccgcttccgcccgccgccacctcaccgcgacatggcctccgaaggccgcgacctccgcttctgtcgaaatccaggacgagtacgcggatgagatagacgcggtgaacattgcgcaggacgtcacccagctaattggaaaaacaccaatgg

SEQ ID NO: 10335 - DNA, 264 bp, Setaria italica
  misc_feature (243)..(243): n is a, c, g, or t
  Peptide Sequence Number=SeqID_76309
tctagctgctggcgttacaagtttacaacaactagatcgactcgagaatagtagacaggagctttagctgagcaagcgagagagcgagaagcattcttcagatcatcagagagattcggatccatggagctggaggctgcctcgccggtgctgatgaggagggacggccggaagctggtgaggtgcccgcggctgcagctggacaccaagacagtcgcggtcatcgagcagtccacggggganagcatcgccgacgccgcggtt

SEQ ID NO: 10336 - DNA, 445 bp, Setaria italica
  Peptide Sequence Number=SeqID_76310
cggcctacccctcctccctccccgtcgccggcgagagctcgggcggagacgccgcagcccccgcaggagagcttctccccggggaaacaaggggcttccggaaggttcttcctcccccaagggttgttcctatcagattggcctgagagatctcaattttattccgaagaaggggtttctcaccacaaatcccgatctactggtgatagagagctccatctttgatgagacgaggctgcggaaaacccgtgggcctcccatggtcgtggtgaaccttgattggcgcatcaggcgagaaggggcagcagccagcaggaggtgacagagcaagaagaagaggtagctgagaagtaggcaacaataggaaggacgaaggagaaggagaggagggagctctccatgggggagcccctcctcacctccctctccatggagaacagcaaca

SEQ ID NO: 10337 - DNA, 285 bp, Setaria italica
  Peptide Sequence Number=SeqID_76311
tcagccttgatgagtgggagctcctgcctgaccataagagctccttcttcctggaagaggactgcagcaatggcagccatggcgctgtcggcggcggtaaggaccagctcttgctcggcaccgagctggtcgtgatcgacatggatcacttcggccctgcatctcatcctcctccctatgattgcatcccagatgaggaggcggcggccaagaaaccactcctcctaccatcacaagatgcctgtgtccatgatccggacatcgagttcatggacatcgccgcct

SEQ ID NO: 10338 - DNA, 945 bp, Setaria italica
  misc_feature (37)..(37): n is a, c, g, or t
  Peptide Sequence Number=SeqID_76312
ctatatagatccctgatccagacttgcctgtgagcanagggggcttccatggatgcgatcagccttgatgagtgggagctcctgcctgaccataagagctccttcttcctggaagaggactgcagcaatggcagccattgcgctgtcggcggcgatgaggaggcggcggccaagaaaccactcctcctaccatcacaagatgcctgtgtccatgatccggacatcgagttcatggacatcgccgccttgctgaccgatccgaagcgagaggagctcgtgagcaaggtgaccgagatactgatctatgaagcagaagatcatgacgacgagatggtcaagtcccctgatggtgtcaaggaggctgatcaggacgaggtgctggttgaagctcctgcacctgatgatcagcgagctcgggaggaagaagagggggtcagcagaacgggcttcagcgtggggaacctgagggtgaacggtgtcggggcgctctgctcgtttggggttgcggctgccacgtttgtcatcttcctgcttggaggccaaggagcagcagaagaggcatcaggatcacaagatccagctccagatgtacgccgatgacgagaggattcagcaggttgtgcagcaggcatccagactgaaccagaccatgtcgtcggtcatgggaggcgcatcgtcggcacgggcgagcatatcgtttggcgggtactatcaggggttttgatgcgtcaggaacttggaacttcatgcgtgattagcactagatcatcctgtaatttaatgtttgctttgtacattctttatactggccagggcccagctgccagcgacctgtgtgcacactagcattctcttgcatcatgtacatttgctgttcctgctactagatgtgaatagtacctgtattatagatcaaattgtaagagcatcaattatgcagaaaaa

SEQ ID NO: 10339 - DNA, 408 bp, Setaria italica
  Peptide Sequence Number=SeqID_76313
tttttttttttttttgttttaacatttgcatggtccactatatagcaatcaaggatgcagacacatgagagaagtaaataaaacgatttcaaaaagctctagtgacgagggaagatgaggccgccgactgaacgtgttcaatctcagtgctgtacttatctcatttcactgggcatgacactacatttcttgccatggcctagcatctgtacatctctctcttgccctggtatgcaggtggtttgcccctcggcgcctttttggatatcgtcttcgacagccggttcttggcgcccagcacttcagcacagcgcccgggcgccttctttcttctggtgtaaggggtggtcttcttggcgaggtcttccacacagctgacatcgaccagcggtcgtattgttgtaaggt

SEQ ID NO: 10340 - DNA, 436 bp, Setaria italica
  Peptide Sequence Number=SeqID_76314
gttatccagtacgccaacctcgtcggcgtcgccatcggctacaccatcgcgtcgtcaatcagcatgagggccatctccctccccaagctctgcagctccacgtccgtcccgctgcagtgcagagacacagcaacacaaatcccagctccaggccccgtcgcatttgctccggcgctgccccctctgccaccgattccaccggaatcttcacaggagcccgagtctccgggggcgacgtcgccggcggtggactcgccgccattcagccagaggccggtggtggtgcccagctcggcatggaggagttctcacgtgcccgtggcggctgtcgccattgtgctgtcgatagctgcatccattttcgtttgattaggatgtgtatcgtaggatgcatgtgttgtgtttatgtggtttcagaagggactactactcggag

SEQ ID NO: 10341 - DNA, 252 bp, Setaria italica
  Peptide Sequence Number=SeqID_76315
gggaaatgtcattgacctggacgtcctcaaggaccagcggccgaagagcttgacaaactctctgatgatgcacggccttctaacaacaccagcagatccaatacgtgtcgcatcttctcttggcccactgtttatgatggcatctacgataatttggatagggttggcatcagtcagcaggtgaataatctccatagcatacttcacttttcctgctttgcatgagaatgctcaacggttggccttggcgac

SEQ ID NO: 10342 - DNA, 567 bp, Setaria italica
  Peptide Sequence Number=SeqID_76316
caacaaaaacaacactggcactaagcagaagcattgtcacaaaacagagcacacattatattcaaggtgacaggattgggggtccagcatctcagaaagaattcacccattgtacatggaaaaatatcaagcatataatgtaacattttccagaactaaggcaggctgatgggtatggatctttttcctccttcggcaaattacaggtcaagttttctaaactatttgtaatcagaagaatactggtataacacagagaataaaacatacctgttagaagaacctttagctgcattgataagctcgtccgcaaggcactcggcaatggtcttgatgtttctgaaagcactttccctagcaccagtggtaagcaggtagattgcctggttcacacgcctcaaaggagagatatcaactgcctgccttctaacaacaccagcagatccaatacgtgtcgcatcttctcttggcccactaaatgagtactacaacattctaacccaaatagagacaataaagcatgaaagacataggttcatattagcaaaacaaaagtaccaacaaggt

SEQ ID NO: 10343 - DNA, 806 bp, Setaria italica
  Peptide Sequence Number=SeqID_76317
atgcatactccgaagaccgaagtacatcagccagtagtttcagccaccggcaataaattatttatcatcttgctctttgtactgaggaaaacagaaaaaaaaaagagaagaaacactgtactcgacagaaagcctggaaaagttcagtcaggtgcatcagagtttctgggattcaacctcagtgtggtctaatatgactcttgcctttacaatgcttctactgatatacgtgtaaataatctaaggaaaggaaatgaaatagcttcatggaatccacaaatcttctcccaatctcatcttccgctccaaaatgtacgacctgtagtgcttcgactacaaatcatgctgatgaaacattgtcttggataaggaagaataaattctcatcaccaacagcaaacgtttctatgcaagctggggatgttccacttgaaggatgtaagttcctgccactacatgttgcagacattgcacaccttttggtacttgttgatcaattatggatgttggaactcctagtcaagtcacaatctcaactatagtaatggcagcaaaagctaaaaataggctccctccaatgtatgctataatcttttcagacaagaatgttcccagcaaagaaccaccaagaactgcaatcaatgttgcaacagcatgaccagcaagtgatcctgcaatgacacccagaggggatgaagctgcagcaagtgcaattgtagagaaaaatgatttatcaccccattctgcaacaaaaaccaatacatatgtgctagctatagtatagctagcacacatgtattggtttt

SEQ ID NO: 10344 - DNA, 809 bp, Setaria italica
  Peptide Sequence Number=SeqID_76318
ttagttaatttgttttcccttagttcttaaagttaaccttaccttaagttaacttgtctaattctaattgtttgtcaacagcatgaccagcaagtgatcctgcaatgacacccagaggggatgaagctgcagcaagtgcaattgtagagaaaaatgatttatcaccccattctgcaacaaaaaccaatacaaatgtgctagctatagtaccagcagcagacatgacccccgcaccgtttccagaaaatttcgatactgctaactcagcctcctcctgttcctcgttgatcttttcatcatcacctgaagctgcatcaagtaatgtagtaaccccataataaaccaagagacaagcagcagcgatgtcatcaactgggaaatcagtaccaccaaagccaaatggaatgattccatcaacatagtggaatgctcgaccaagaactacagaaataactgtcattaccgcaagagctccaaatgtgccaagaaaaatgactgctccagaacttctagctgctaaaagtgccgcaatgaagaacgttctgtcccctagctcagaaaagaagatcaacaggaaagctgaagcaaaacctgtactgaggtccccgagatcccccagtacgtccgccggctgcagacccccgaactgcgtggcggccatcgcctgttgcgtcccctggagcatgagcacccccgccaccgtcgcgaacgcgagcccgcacgatgcatcgaatctcgcggctcggaaccctccccgacccgctggctcagccgccttccgaatcgacagcccagcgcctcctccaacc

SEQ ID NO: 10345 - DNA, 615 bp, Setaria italica
  Peptide Sequence Number=SeqID_76319
cacttctcctgaggaagtaaggtatgcctgacttcttgcctcagcttgaagaagcttgctagaacaatcaggctgtccagaaggctgagtcctgggctgtacaactgttgctgctccatttacagattcaacaaggcaggacgggctcctttcacaatatacttcacatggatctgtgactgactcgaaatcaaagctggcaagtgctcggttcttgcttttatgttgcaaatcactctccgtatgacaacaagctgcattcctcagtatggggttcaaactgagattgtaaggaatgctagtattccatgcctgatttatcttaccagacttctcatagtgtttactgttcagtagtctaggagaccctgattcagaatgtaatggataaactacattaccatgtgatactttctgtactgaacttttttgatcagtatataagaactcctcaactgaattcattttcggatgagcaacaggttctcttcataaacctgtcaaatggtgaaaactgactatactgataatccaattctaaagcgtcaagcgccgcattatgcttaatattctgtgagtgcataggaacatgtctgtaactcaagttgtcatctt

SEQ ID NO: 10346 - DNA, 560 bp, Setaria italica
  Peptide Sequence Number=SeqID_76320
cttagctattcacaagtcaatgtgattttacccttggtctttgtgtatttgcccctgttttcactgttgactaggggcaaaatcacattgacttgtgaaatagtaaagggcaaaaatcacaattacacttcaaagtaggggcaacaacacaaatgccccataaatatttgcgggcaccattgcgaacttttttccatcttcagcattcctccatagttgaaatccaaatttgtgactccagataggctcctgaggaacttgcggatatcatcaacctgagtacctcctgaagcaactgaaactgatgctgtcactagtgatcccatgtcctttagtaaaggtattcctgcttctacggagaagccaagataacagaggcttggaatagaaatagagagctgttcatcaaatgtgaactcggtggaatcaccaatggacaaaacctttagtgtctgggaggtaatctcatcatcgtcaatggcacagtcacttaagagcagacgttctaatgctgtgcatccagtttggaggttcctaaagaaaccaggaacaacataaca

SEQ ID NO: 10347 - DNA, 361 bp, Setaria italica
  Peptide Sequence Number=SeqID_76321
cggacaggttgggccttgtggctactattaaggatcgagccaatgaaatctacaagaaggttgaagatctcaagtctattaggggaagaaatcaaggctccattagcaactgaacatatttctttcacagttctaggcctatcttcttgcctacaagcaatatacagacaagcagctaatatggcatcttgatttcttcccctaatagacttgagatcttcaaccttcttgtagatttcattggctcgatccctcatcctcgccttccgcaccatcgccaacatggcggacaggttgggccttgtggctactattaaggatcgagccaatgaaatctacaagaaggttgaagatttcattg

SEQ ID NO: 10348 - DNA, 771 bp, Setaria italica
  Peptide Sequence Number=SeqID_76322
gtttgagtggccgaaccctgaaaccgtcatggattctgatgacttgttgttatccagctattcctctagatgggtgcgtaagtgaccttggtgcatattagtaattatcaaaacattttatacttttatgtgccattttgcaccttaataagtgattaaattctgtgaactatatttttgcctttgttgttatgtgaacgcttgttgaaaaaaatctggtggtcttgaacaggcgttttatacgaagatgcaaacaaggttgcttgcaatttgtgattctcaagcctattttggttgttatcaccttcatactttatgcaaaaggaaaatacaaggacggaaacttcagtgtcaaccaatcctatctgtacataacaatcatatatacaatctcatactcaatggcattatatgccctcgccttgttctatgcggcatgcagggatctacttcggccatacaatcctgtcccaaattcataatgatcaaatcggtcgtgtttctcacatattggcagggtgtcctggttttccttgttgcaaaatctcgacttatcaagaatgctgataaggccgctgatctccagaactttgtattgtgtgttgagatgctcatagcagccatcgggcacttatttgccttcccctacaaggaatatgcaggtcccaatgcccgccctgctggtggtttcaagaagaaaagaccttacttacttttttaatagactttagaaagttacaaatagaatttttaaccaatagaacaactaga

SEQ ID NO: 10349 - DNA, 479 bp, Setaria italica
  misc_feature (33)..(33): n is a, c, g, or t
  Peptide Sequence Number=SeqID_76323
atgcaatattctactcaattatttccactattntaggcaccactagcaaggtaaaactagcagaaacttgtctatgatccaattcatatgcagtgtcaacataatacgctgcctctgaagtctgaactgctcattggtttccgtactataaatatgttacaactgtgttgatactctttgatcatctctattaaatggaggatccactatcctttgtaaacaggtgcagtctgatcccataggagtaggcatcataaattcataagcgatggagattactcgtgcttctgtctactcttagtatcttcctagttcctattaacagcatcgacataaatgaaaacaaggtggagcaaatataccaaatgatctcctctttgtaaaaattgtaaaattccaagatgatcatcacttgtcataatttggtagtaaattcatttaatctaatacggtactaagttcatcctcatatgtcaaac

SEQ ID NO: 10350 - DNA, 1285 bp, Setaria italica
  Peptide Sequence Number=SeqID_76324
tttcccttatccttcctgaaaatgcgatatatttcaattctattcgagagatctatgatgcttgggtcatctacaatttcctctcactctgcttggcatgggtgggaggtcctggtgctgtggttgtaagtttgagtggccgaaccctgaaaccgtcatggattctgatgacttgttgttatccagctattcctctagatgggcgttttatacgaagatgcaaacaaggttgcttgcaatttgtgattctcaagcctattttggttgttatcaccttcatactttatgcaaaaggaaaatacaaggacggaaacttcagtgtcaaccaatcctatctgtacataacaatcatatatacaatctcatactcaatggcattatatgccctcgccttgttctatgcggcatgcagggatctacttcggccatacaatcctgtcccaaaattcataatgatcaaatcggtcgtgtttctcacatattggcagggtgtcctggttttccttgttgcaaaatctcgacttatcaagaatgctgataaggccgctgatctccagaactttgtattgtgtgttgagatgctcatagcagccatcgggcacttatttgccttcccctacaaggaatatgcaggtcccaatgcccgccctgctggtggtttcagagaaagccttcttcatgctttgaagttcaatgatttttaccatgacactgttcaccagtttgctcctacatacaacgaatatgtgctctacaatcacaatgagggagataatgcacaaacaaagtatccctcagggagcaccgcgccaagcgggcagggtgtagagttagctggcatcaccgtggtagcttcaaatagtccagtgacatcaagtgcctcatcgaaccaggcagatcaggaagaaacaatgacaaccccaatcaaggacaaagtcgatcctcctggagggctttatgacctcacggacttgctagacgtggatttgtctaactacccagccaaggttcctgcaatcaccgatgtaagaaaacaatgatcaagctcgatgtggggctctttgtagggttgcatttcggggaaaatcgtgatttttgttgaagggtcggcatagttaacattgtaaaaatgtgtgtattacttgttctgatttttccccattgaaggggccctattcatgtcagcaactgctgccacacggcctctcacctcgctctttactaactgtgcaatgttgtgagctcaaggtgaactgaagtgaaaaatgagtcatactgaatacaa

SEQ ID NO: 10351 - DNA, 1065 bp, Setaria italica
  Peptide Sequence Number=SeqID_76325
gtcaccattcaagctttgtactgcaacaccgtgacactgcaccttcgacccatcgcccatgaggccgacattccaccgtgctcctttgcacgctcgaggccgtgtcctttttgataaaagaggtcgcgccattgaagcagagacagcggatgacgggtcctctgatttcagcaagagcactcattttggatgcttgcctcacgtcgccactcgcctcataaagctattctaaacttcccaggaaggcagaaagcgacgtctcgtgcggcatctcgttgcctttagatgatttttcaagcacggtgggtgcctgaataataaacatcctgcagttgggtgcactttctggtgcttatccaatccaagcatctcgttccgagaattcgcgacgctggaggtccaaatccttgcccatccatggcgaccccgacagtcgtgctggtgcccgtgtggggcgccggacacctcatgtccctgctcgactccggcaaacggctgctcgcccgcgccggccgcgcgctctcgctcaccgtgctcgtcatgagcgcgcccacggagcacctcgcggccgaggtcgcggcccacatccgccgggaggaggcctccggcctcgacgtccgcttcgtccacctccccgccgtagagcccccgacggactgggtcggcatcgaggagttcgtctcccggatcgtgcaggtgaacgcgccccacgtccgggcggtgatttccagcttgccgtccccggtggccggggtcgtcctggacttcttctgcaccacgctgctcgacgtgtcccgtgacctcgccgtgccgacctacgtctacttcacctccaacgccgcgatgctggcgttcatgctgcgcctgccggcgctccacgaggaggtgccggtcgagttcgaggagatggagggcgcggtggacgtgcccgggctgccgccgctgccgccgtcttctgttccgacaccggtgaccgacaagaagaacccgaactacacgtggttcgtgtaccatggcaggcgcttcgcggagaccgacggcatcatcgtcaacacggccgccgag

SEQ ID NO: 10352 - DNA, 491 bp, Setaria italica
  Peptide Sequence Number=SeqID_76326
ctcatcaatggacatgcattactttttactagctacttcgaggttgcctttgagaagacccttgtacacagttccatgtccaccatggcccaacactcgtttttcgtttgaacttgtcagtggcttcttgcaattctgcttctgagaatattttaaatgcaatgccttgttgtgattttatctcctcaaacagcagcatacccccgtgttgttggaagtatctctgtttgatgtgctgtagctttcttctttgttgggtcaagtatgcacaggttatggtaactataaggaccactagtccaacacttgcgcctacgactggcatcacccaaaaagaggacttctgatttgccatacacatgtcactaatcatttgttttcctgagggacataagcaggtaaagttcccctgtgtatttagacaagtcccccactgcgcgtgcatggattcatagtattctcaaggcattcatcgatatctgtgcatccat

SEQ ID NO: 10353 - DNA, 413 bp, Setaria italica
  Peptide Sequence Number=SeqID_76327
catgcatcttcagttgcttgtggatgagtggtctgaatcgcgctctgccctctgtgcattgatcggatgcagccatgggcaatcgtcctccgctgcatccgatcaatgcacggcgaccatacctgcttctgctatggtgttctgcggtgagctgccaggttgtatacattctgagtaacagcctaacaggatacactgtacctctcaagtttcctcctgtaatattattttgcgaagcacaatcttctgctgtgaggagattgttcttcggtcgtgtatgtttgtagattgacctaacactgtaaagaaaaatgccctggtgattgtaaagttctggacactgtaacccctgttaaaaggtttttcctttttgggtgtcgataaccttcttgttcaaaaaaaaaaaaaaaaaa

SEQ ID NO: 10354 - DNA, 1806 bp, Setaria italica
  Peptide Sequence Number=SeqID_76328
accaaatagaatctagacaagcctcttaatgagtatcaggactacacaaaaaaaattggtacacactctagtctactgaaatgttacaaaagaacaatcaaatgatatcaaataagtaagcttgtaatattcaccttacggcagtatctgtatatgtacaggagcaagtttggttattttctttcgccaacacaggtggcaacaatgacacgtctgtaaaccagtcgacgacgcaggaaaaaaagggcgtgggcctttgctggcagcctccccaaagctactcccgctccatgaatcctcacgttagtgacaaaagatgaatagccacggccaggcgagcatgacaaaaatgcttgctaagcctgtcacgtgaaaagaacagatgacggttgcttgaagctggagctggtagcacctgctttgttcgatgatgttaacatcttatccttcgcagtggtgttgcctacgacctgctcagaagaatcaggctgctggttggtttcactatggctgggtctggcccagattttgattagcccctcacggcatatggtgaggattgattcgctggtgaattccagtccagagagggggtctacatgtacccggtgcgccactaggggtgagagctttggtacatctcgcatccgtggagaaggttgaagaacacctgttggagggcatgcattgtcccagtgtgcagaagggcttccactgctaaaagtcggtgagccagcagaagggtgacgtagagggacagcaatctcatccaatgcaagatcccagagaagcagttgtgtgtcctgtccaactgacccaaagcgatacatgacattttcttccgtttcatctgaatttggtggggaccaatacggatcaaaagcaactgtgctaacccatgaattatgcccttcgccccatgcaacaatctttctatcatccatgctccatacttgcacaagatcatcttcaccacctgataacaaatatttgccatccgcactccaagagcaacacaacagagcaccatagtaacttttcccaccaaatattagttgttcttttgcaaaatcaaatactcttaaataaccatctcgcccgacagttgccaagtaagcaccatccggtgaaaaggaaatggcattgattgcaccttgacagatatgccatcttgcaattggattgcccttactcgactttgcatgtgaaatcagcagctgactttgatccttcacagttggaaacgtccaatcagtatttccatccttggacttatcgtatacataaaaatttccatcagcgtggctaacaacaaaaatgccttcacgctctggaacccatgcaacacaagtgcaccggctgctggcagcgccaccttgacttggatctttgtctttgtctttgtctttattaataaaatgctgatatgaaacaggcttctttccaggatcttgcaactgctgcctcaatgacattgaataaacatctcctgagaacaccccaacaagcagatcgtgcccatccttggcttctgggtcaaatgcatggcaaagcgggttcgaactactgaagtggatggactttattggatctttgtcatgtgaattgagatcactgatgaagagcgtatcagcagtgttgaatatgatgtaggttcccttgccatcataattcgccatgccttgtgatccactcgcgctcgtcgacgcaccaatgccaccaccaatgcggctgcttcctgagacagccttgctggtaccattgctcccaaagctaagcgcgcggctcccattcccagtgccgagc

SEQ ID NO: 10355 - DNA, 965 bp, Setaria italica
  misc_feature (874)..(874): n is a, c, g, or t
  Peptide Sequence Number=SeqID_76329
atccattgtccagagccacatgggaaagcagaacggcaggttgggggcagaaatgtcagcatccggagggacatcacctaatgacacgaaaatgaagcgtgaggacagccatggatctgaaaggatgaaaaaacataagttgcttccacctaccatgacaacaaagaaacagcatgagtgtacaaaggctaacacgccaaattgccatgataattccatgacttcatctgctgctccaaaccaatctagagagggagataacaaaaagagtggtgtggtcgccaataagacttggggatcctgggcccaggctctttatgaacttgccatgcacccggagaaatataagaacaatgattctatcctggagacatctgacgaatttgttgttctcaaagatctctatccaaaggccaaaaggcatgttttggtgatatctaggacagatggtcttgattctcttgcagatatcacaaaagaacacttgcctttgctgaggaggatgcattcagctggggtcaagtgggcacagaagttcctagaggaagatgcgtcattggtattcaggcttggataccactcggttccatctatgcggcaactgcatcttcacatcattagccaggatttcaactccacgagcttgaaaaacaagaagcactggaactcctttaccacgcagtttttcgtgattctgttgatgtcatcgaggagattgagcaacatggatcaccaaccaccaccagtgatgaaaaggtactggcaatggaacttcggtgccacaggtgcaggagcgcgcacccaaacatcccaaagctgaaatcccacatcgagagctgtaaatcttcctcccttccatcttcagcagaaaacnggtgatatcgtcgaccacgatgcatgtggattgcacgtagaagttagaacttgctatggctttgcgagcacatttgcaggtcgtgcttgga

SEQ ID NO: 10356 - DNA, 257 bp, Setaria italica
  Peptide Sequence Number=SeqID_76330
tacggttgcatgtgacgggggcgggtgggcgcggtggggaaggcccagcgggtgtcgctgaaggcggcggcggagaagtggtcggcgatgaactcgttggcgcggccgcagtcgcccaggccgtgcagccacaccacgaagccgcagcgccgcgccctcccggtcccggtcccggcggcgggcatgcggtcctccatctgaattgggacttgggagacgatgacgacgccgagaggtggagatggcgcccgtcttct

SEQ ID NO: 10357 - DNA, 483 bp, Setaria italica
  Peptide Sequence Number=SeqID_76331
attaggagccgacgccgccgccttctccctcctccttccgcgccacctcctccctctcctcgtccctccccggcgaattcgagctcgagttcgcgtccgaggccgctgccgacgccacaaccgcccggcgagccgcgggtagcctacctcgcggccacctcgcagttcttggcctccgccccatccacgccgccgtcggcgccggagacgaagacctcagacccgcccactgcatcctcgtctcccttctcccgaaaccagatcgaattggttctccaagaaaatagaaaggaaagaaatcgaattcagtggcacttcgatgaacagatccctgcggtttgttggaggccggcgagtggatgcccaggcttcgctcccctcctcgccgctaaaattaggcgccgctcttgccctccatttctgtggctccgccgcttgccaagaaaaccaaggcaccaacgaacaggggaggacaacgagggg

SEQ ID NO: 10358 - DNA, 449 bp, Setaria italica
  Peptide Sequence Number=SeqID_76332
ttgtagagacgtaatactggaatcactctctgctgtgaactcacagcgtgccctatcagatgctgataaatggaaacctagggcactccatcccagaaggtgaggaaatggaccgcacgaaaatgccaacaaccatatcatccagacggccattgcccatgtcgtttgtaaccagaactgaagcacgccacggaagggtgaagcaaacatgtatgcttttgcagcatcttgaggagtgttacctcgctgtagccattccctctgtacaaagccgcccatcacagataacaacacgagaagttgcaaagaattcccttggcaatagttatgaaagagatgcagtgttgcaatacgaaactgtacagctcaagttgctggtttcatcagtttatagctgacgcctggaggctggacgtttgtgtgtttgttgtacagaaattttgtccaaa

SEQ ID NO: 10359 - DNA, 346 bp, Setaria italica
  Peptide Sequence Number=SeqID_76333
tgtatgtataatgtatgactggaaaataagatgaaagatacttttctccgacagaaaagattaataatgccatctcctttgtggtggctatacatcacatacggtttaggggccctcatcttcaggcatcatatcaatcaccagaagagttcatcatttcttttaattgcaacagctcaagttgctggtttcatcagtttatagctgacgcctggaggctggacgtttgtgtgtttgttgtacagaaattttgtccaataaaaaaaaagacggaaatctttggacataggccaaatgtgtgaatgctgtatcgctgttgcaattaaaaagaaatgatgaactcttc

SEQ ID NO: 10360 - DNA, 408 bp, Setaria italica
  Peptide Sequence Number=SeqID_76334
tagtgttattcttgctatctgtgctatctataacatgtttcatacttttatcaatctgctggggaacatggaagttgtgtttccaagagttgctttctggtgtaagtcttatactacggatacgaaattcatcagattcaaggaggcagaggacgattgcactgaagctctgaatctggatgatcgatatataaaagcgtactcacggagaattactgcacgaaaagaacttgggaagcttaaggaagcaatggatgatgctgaatttgccatcagtcttgagccaaacaatccagaactaaggaagcagtatactgagataaaagcattgcacatggagaaattgggtaaaaaagacccccggtgccaactaaacatgcagtttctggattggataaacctgctgat

SEQ ID NO: 10361 - DNA, 1980 bp, Setaria italica
  Peptide Sequence Number=SeqID_76335
tgctagaggtctgcttggttagctctgataaggtcactatggtggggcctgacgagatggcatttctcaggcagaatgttcttggggaaggaggagatgctcagggccttattgattatctcaagaagacacaagccaatgaccccgctttctcgcatgccatacaggttgacaagaatggctgcgtggtgaatgttttctgggctgattctagggctaaagcagcttatcggcattttggggatgctgtcactttcgacacttcgtacaagaagaacaagtatatgatgccctttgttactttctcaggagtcaaccatcatctgcagcctgttatttttggatgtgcattgcttatggaggagactgagttctcgtttgtttggctatttgaaacatggctagcagcaatgggagggaaggcgccgtgttcattagtcactgaccaaaacagggccatgaaggctgcaattgggaaggtttttccaaattcatatcaccgtttctgtaagtggaatattttgagtaggaccaaacaaaagctgacccatgtatacacagagcatccaaccctaagagatgagcttgaaagctgtattcttgagtctgaaactattgccacatttgaaacagcttggatgtcaatcattgataaatatgacttgagaaagaattcatggcttcaagcaatctacaacatccgccaaaagtgggttcctttgtacttgatggatacattctttgcagaagtttccccagcatggaaattggaaaccatgaatgatttctacaagaaatattttaatacaaaaacaacactggaagtttttctgaatcagttcaacttgagcatggcaagccaatacgatgatgaagcaaaagctgatatggacacctacgtaaataaggcaactacaaaaactgcatccctaatagaaaaacaggcggcaagcacttataccaaagcagtcttcagtaaatttcaggaggaattcacagagtctctggggtttgtcattcagaaaattgaagatggttctataagcaaatacagcatcacaaaagatgaagatccatccgaaacattctatgtgacttatagtgcttcgaataagatggcaaactgtagttgcaaatactttgagttctcaggtattttgtgccgtcatattcttggagtatacataatagtcgatccgcgtacactacctcctgattactttttgaaaagatggacaaggaaagccagagatgataatgctgtgttagaagaaaacaacaattatcatgatgaggatccttctcagtccattactagccgttacaatgtcctatgtgttgatgccattaaatgtgctgagaaaggagctggatcagaagcagtctacaaagcagcaaaagatatcttacagaaggcgtatgaagagattattgcttatgaaagaaatcctggtcggggttcccaaagggacgacataaacatcaatgaggatgtcacaatagatgacacgatgaatgatcaatctatgccagattctggacggaaggtgactaatctactaggccagtttcttgattcctcttggtctccagtctgatatttttcttgtcatatctttggagatgaaaaaaatgcaatttagcagcattattagctgtcatcattggcatgcaattttctttttgaattggctagtggaaaacagcatgtggacttttcaacttgatatgaatttccttgagaagaatgtcctccacttgactgttgggaaacaggacaattttgtttgaagatgccagatgatttctgaacatgctgaagtctttgttgcttcaatagaagctctgtatggttctgcctgtatgtctgaagctactgaagggatgatgcagcgttagctgttagcattttggagaatctggcaaaagttccacgcattgacttgataataatgtgcctttcatccatgcacaaatctg

SEQ ID NO: 10362 - DNA, 1432 bp, Setaria italica
  Peptide Sequence Number=SeqID_76336
gaagtattcaagctacttaaatgatgaaccaatgcctgatgccgacgtcggaaaaggagcagggaaatgaatattcaaacagaagaagtttactgaagcaattgagtgctactccagaagtattgggttatctcctacagcagttgcttttgcaaatagagctatggcatatcttaaattaagaagattcaaggaggcagaggacgattgcactgaagctctgaatctggatgatcgatatataaaagcgtactcacggagaattactgcacgaaaagaacttgggaagcttaaggaagcaatggatgatgctgaatttgccatcagtcttgagccaaacaatccagaactaaggaagcagtatactgagataaaagcattgcacatggagaaattgggtaaaaagaccccggtgccaactaaacatgcagtttctggattggataaacctgctgataaaaaggacatcacttctcatacaccgactatctcccagaagggcagtttcatggaagttgattcgcctactagagctgcagtggagattagagagagtcctggtggcagttccagttctaaaggaggatctggagtaatcgtcaacgagaatgtcttgcagcagtctcggaatgctaatcagaagcctgggccagaagcttcaattcaagagcttgcatcgcgagctgcttcacggtatatggccagcaccgtaaaaagcgtcaaaataccaaagacagcttatgactttgaggtttcttggagagctctttctgatgacactgcccagcaaatacaattgttaaagtcaattccaccggcaagcctaccagagattttcaagaacgcactttctgctccttttctcattgacatcgtgaagtgttcagcctcaattttctgggatgatgcagcgttagctgttagcattttggagaatctggcaaaagttccacgctttgacttgataataatgtgcctttcatccatgcacaaatctgaactgaggaagatatgggatcaagtattccttgctggaaaagcatcagctgatcaggtggaagctctcaggcagctgcgaagcaaatatattcagggaggatgtcaggataacgcgttcagttcaagctaatgagacgatgtaaagacgaaacgttagaaaccttctgtacccttctctggggtgtctgtcaaatgttagcacgtgtgcccacttcctggttgcagtgaatggttgaagcatgtgttttgtggaatcctgctactgggatgaaatgttcatgttgcttctgacatctcacgttcacgtactatctgattatactacgtactcgcgttgctataaatactttactaatgagcttgtcttaaacatcacaatactaattagaaaaaacggggacgaaattaacaattaatacaattaaaaaaaaaa

SEQ ID NO: 10363 - DNA, 487 bp, Setaria italica
  Peptide Sequence Number=SeqID_76337
gattaactggacgaaccattggttagaaactgcattactaaattactaaagctatgtagttgttctgggacgattcaatccacgtatgatgttttgtacatcaatagcaaacttaacaccaagggatcaaggttaactgatcacacaccattgatggctgattgatcgttgttgctgcggcaattcgatgtatttagatttcaggaacatccttgatggcctctttggcaacgaggcctcatgtgcagctagatgccggggcaggcagcccaaggatacttgtggactacttcacgggtggcaattgctgcagctgacgactccgcattctggcatgtagttttatctacaaatgaaaaaccccttcccgcacggacaattgaccaagtaaagatatacacgtaagtagtggacaacccaaatttcctacacctaaagcttcagcacccatatcagcacggacaccgagcagccaatccagctgctg

SEQ ID NO: 10364 - DNA, 448 bp, Setaria italica
  Peptide Sequence Number=SeqID_76338
aaaaagacaaggtatgaataagcaattgatatatcagcaccaaagtttcatttgagggaaaagaaaacagatgttcaaacaattttgtccaggtcttctccaaactcagcaataggaagccatatgcttgccacctagctcaatgcggcacatagcatcgaacccattgatggctgattgatcgttgttgctgcggcaattcgatgtatttagatttcaggaacatccttgatggcctctttggcaacgaggcctcatgtgcagctagatgccggggcaggcagcccaaggatacttgtggactacttcacgggtggcaattgctgcagctgacgactccgcattctggcatgtagttttatctacaaagcttcagcacccatatcagcacggacaccgagcagccaatccagctgctgctcaggctcattctattctaggaaatcaa

SEQ ID NO: 10365 - DNA, 1224 bp, Setaria italica
  Peptide Sequence Number=SeqID_76339
ctcgtccccgtcaaacaaattaagggttaccaaagcgtgcgaagcctacctccgccggccgatcccacgaaccctcccggagtaggagccgagccgaggcacgagcgaagatgccgcagcggcactcgaagaacaacaatgacctcgccttcttcacgtacgaggagaagcggaagctcgggtacggcacgcagcgggagcgcctggggaaggactcgatcaagcccttcgacgcctgctgcctctgcctcaagccgctcatcgacccgcactgctgccccaagggccacgccttctgcaaggagtgcatcctcgagtgcctcctcgcccagaagaaggacatcaagcgcaagctagcagctcatgaggcccagaaaaagcaagagaaggaagaggaggaggagaagctgattctgcagaaggctaaggagttggacgcctttgatcagcaaaaccatggagctgttccccagtaccatgatcgcagtggctcccaagacaagaatgggtttcatggagcaaacagtgtgaaggttacttcctttgaagaggaagccctccgcaacatgaaggcattttggctcccttcagctactcctgaagctacggtcaaggtagatgccccctccactgacactatctgccctgaggggcaggaaaagctcaagttgaaatcgctattccctatctcgttcactgaggaaaatggtgaccaaaagaggaagaagtcagtggaaaagagctacatgtgccctagttgcatgtctaccctcacaaacaccatgaccctggtggcaatcagcacctgtggccatgtcttctgcaagaagtgctctgacaagtttctactaaaggataaagtttgcttggagtgcaacaaaccatttaaggagaggaatctggttactttggagaaaggaggaactgggtttgctgcgcacgatgaacgcttggaggcaagggagttcaagcatttggggagtggttctgggttaggattagtgaaaccagctccaaaggcttagtagccttcaataattgtagcagatgttgtatatgcttatcatggcctcatcaaattatgtaacctggaaattttgtttcatggtatccatatgtttgtattttgaacggttgatgttcaaagtctttactggcatcaatccgatgtgcctgagtcttgcagctttggttctttttactgtggcaaatttgtgtaaaaaa

SEQ ID NO: 10366 - DNA, 382 bp, Setaria italica
  Peptide Sequence Number=SeqID_76340
gtgctcctcgccctccccaaatccctcgccacgatggcccgcctcctcctccccctccccttcgccgccgccgccgtcgcctccgcctccgcctcctcgctccacctcgccgcctcccgcctccgtgtccccgcggtctccgtcgcgcggcgcgagggcctcttcgggggaagggtggtaggaggagcggtgagggcgcccgcgaggctggcgaggcgtgggctgtgcgccggcgcggagcccggcggctcggccggcacggtggtcggccaggaggaggccatggagtgggtcaagaaggaccggaggcgcctgctccacgtcgtctaccgcgtcggcgatctcgacaagacgatcaagttctacacggagtgcctgggca

SEQ ID NO: 10367 - DNA, 279 bp, Setaria italica
  misc_feature (256)..(256): n is a, c, g, or t
  misc_feature (276)..(276): n is a, c, g, or t
  Peptide Sequence Number=SeqID_76341
tagcagtgctgcctccatggactttccagagtgaaccataatatggatcgttgatcctaacatcccaagaaatacgtccagttttacctaggcgcaagcatacatgtttccatgaatcctctttaagaaacggtaaccgcaaccaaagattagaggatggtgtccccagctctgcttcttctgcatatgggatgccaagagaatccatctgggtagttagttgagcatacttgatacaaactgaacagtgctttangacatgacgaagtacggaancaa

SEQ ID NO: 10368 - DNA, 353 bp, Setaria italica
  Peptide Sequence Number=SeqID_76342
ccctctgcaagacactagaaacagctaacttaaaaccagaataagcaataagcatcaccctgatgagctctccatcagctgcatagaccaagttctcatccaactcacagggtgaattgcaatataagccagaatcagcagtaatatctactatttcgagtaaacatggacctcctcttaaattcaacatactagtaatatgcattcaactattcaagactcaaatagaccttggtctgaactttgctcctcttctttattaagtatatgaacagcagaactcctgcttgttcctttttatttaagaaaaaaagaagactcaaatagaccaaagcaaaaattaataagtccta

SEQ ID NO: 10369 - DNA, 439 bp, Setaria italica
  Peptide Sequence Number=SeqID_76343
attgagatacttctctttacaaatgaaccggtcagttcaagttctaggacatatgttgcttctaaattaattgacatacatctctttttgtaaatgcaactgttatgaaatactgaattcgctatcgccaaattatgccaatacccatggcatgtatggataccatcttggccatgacgtctttgacgactctattcagtgatcatgtctgttaataatttgtagattttagtactgtactggttttagtctacagttggagtccttttgtgttcagtatccttgcctgttggcttagaacatcaattcatcagtagtttttccaaattaactttatagttgtttcttgatgcaaaagcttctgcctgaaattgcaggtatgaaagttcatgggagttgttaggtaatgagtactttgtgcacgcatctggttcgctgt

SEQ ID NO: 10370 - DNA, 561 bp, Setaria italica
  Peptide Sequence Number=SeqID_76344
ctacgacaacgaactcccgcctcccgacggtcatctggacgctcagcatctcccaccatcctcagccattagctgcaccaggcatcaattttctccactgcactacctcctactattcgctcagcatctagtacatcctcagcaacatggatcagataaacgccactcgtggtcatgcgaatggactgaagtatcaaaatgaaatccaaaggaaactgcacacacagattgacgttagattaaaaaacctttgaaacttctctacttcatagttttgcagtgatgagctcatgaaaaacaaaactttagccactatattttccttcgacatgcagttgcagaacaagctgcgaatgagaattgaggtgcagggctgatatctgcaaaacaatagtagagaaaacccagaataacctttcataaaatgcaactgaggctgtaaacctagaagcaaccaggtcgcagcttgtagacttcaaccttgctctttgagtttccaagaacgtgtcacaagtgtatgagcagaacaatggcgagctggacgaatcatacaaggataaa

SEQ ID NO: 10371 - DNA, 467 bp, Setaria italica
  Peptide Sequence Number=SeqID_76345
tttgtttaagttcttaaaggtttgttagtgtagcaaggaggcttaaagaaatgtactgctatacttcttcagacattgtgaagatattcttcaacccggagatttacaacaatgacttcaccactcctttacaagttgttattgacaagtgcattcaatcatccccaatcgacacaaggagagctctgtacaagaatattgtcttgtctggaggatcaactatgtttaaggatttccataggagattacaacgggacctgaaaaagatagtggatgcacgggtccgtgcatctaacactcggcttattagtggggatccaaaggcccaacctatagaagtgaatgtggtcagtcatcctattcagagatatgcagtatggtttggcggttctgtgcttgcttctactgcagaattctacgaggcttgccacacaaagcagaatacgaagagtatggtgcgagcatct

SEQ ID NO: 10372 - DNA, 737 bp, Setaria italica
  misc_feature (681)..(737): n is a, c, g, or t
  Peptide Sequence Number=SeqID_76346
ccggacggatggtggctcatacaaggccagcacgtggcagctgagagatgaaatcactttggggggtttgttcatgctatccatctgcaaggggtgcaaaaataacacaccgtggcaagctgctgcctggtggtcagatgcccagcatgttcttcctttccattttttgtcccattgctgagacggcaatagtggatataggttgggatggagatctctgttcggcagatggcgatgcctgtatgatgggctccgtgatctgcatacagttttgggctgaagcagctccgcatttccggtgctgccttgcatggattttgtgaatgcccttgccctgagctttctttccctttctgttggtcaaagcaaactgcaaacgggtgattgtttcggcagcaattgctgtttgagagttagatgtcagtgtcatgaacaaatccagcatacagattactgcatagtgcttgtgttttacggtgttgaactgtttgatgtagttttgtgtcgatatgttgtggccgttggatggcttggtcgagtcgaaacgtgtggtccgaacttatttgccatgagagcatcttcttatggttctcctgtatcatgctgctactgctagggtggtttgccttggtggtaagctggtagtcgaaagtctcaatacagctgtggcttaaaacgggnnnnnnnnnnnnnnnnnnnnnnnnnnnnnnnnnnnnnnnnnnnnnnnnnnnnnnnnn

SEQ ID NO: 10373 - DNA, 398 bp, Setaria italica
  Peptide Sequence Number=SeqID_76347
cctttgtattgctttcttgaggccctagcagagtcagtatcatcagtgtgattcagtggaaggacaacaataactggttgagtggaaggctttacttgcatcctgtgaaagtcagaataggacatataatacaatgaatatgcccagagaaacttagtactaagcataaccctatcagggactttttaaaaaaataaaactctagctcctttatgacttcaaaccaaatcaattgtgggaaaaagaaagaactaaagcatgcttttgtcttccattggtcagcttcttttaggtaagagactacaacaaacgtcaatattccaatatcatgggttatctcctagcatatgctagtaggatagatttgtaacatgaacaatcaacagcaagtgttgaag

SEQ ID NO: 10374 - DNA, 998 bp, Setaria italica
  Peptide Sequence Number=SeqID_76348
tactattagagattacttgtctttattgcaagcccatagcaggcattcctcccatgtgggctgaaatagaatttcagcagtcttgaatctctcttccgacagagtgaaccacccttcaccatcaacctcacaagaagcttgtgtacctttacgtagttcagcttcgtaatcagccgctacgtagcaaagtttcttcaaatacgagagaaagagaggcacagacatatgtcagatatcatccccattcagttacatgcatgtttagatagctagcctctagataataggctccgaacacagttagcttgtgtgcagccaacaggtgagattataggaagaatgtcctgacaccaaatatcttcaactattgctgcataaataaactttacctccttgatggtccggacagtatacagtgactcgcaagatatatttctctggtgcattaactccttaagaaatccagtgagtttaagggcaccttgccccacagtttcaacacctatctcatacattaccctgccttcaaagactgttgtaaacatagtacatcagaatctgggaacaacagaagtggtattgaatccaatgtggacaacaatgccagaggtccgcttagaagcatacaaagataaaactgcttgatcaacaggaaagcaaatgctagtgagctcattgcttacatatgtttcctcaaggatagttatacacatgccatatggatgaagtacataagaagtacgagtaattgaagataaaacaattttggaccttaggccagcgagaaaaggcagcatatatctacaacaatgttgcaacattgtatggatcagttttacacaaatctcacagttgggcagctcaagatttaactaagatacatggttctggcgtggtgcaagattttgcgaaagctaaattcaaaaggcaaaaattattcaggacagaaccgatgattggattaaataaacacaaggtgaaatttgaaaaatgcatcc

SEQ ID NO: 10375 - DNA, 412 bp, Setaria italica
  Peptide Sequence Number=SeqID_76349
aaacaacggaccattcctgcgtatcttctggcgaaactgcttctctttacacaccatgcctcagtgaaagtactcacccatcatgcgcgccacacaaaattcaaggttccatgtccttacattgctaatcatctttgcaccaaaccaggcagaatcagtgccaaacggaggaggaagtactcttattccttctgaaatgtaatgtggaagaagctgttgaagctctttctccagcctctctggtaaaccaggtaagcatgacgatccaccagctaaaacaaccgtcttgtaccagctgtcatcaccaaccacttctgaattatagcagtgatccatacatagagattcaagactgctgaaaattctaatttacaagaccccaacaatagggaaggaaatagacctagactaa

SEQ ID NO: 10376 - DNA, 450 bp, Setaria italica
  Peptide Sequence Number=SeqID_76350
aatagtacctagaacaaccaaaataatcttcaactattgctgcataaataaactttacctccttgatggtccggacagtatacagtgactcgcaagatatatttctctggtgcattaactccttaagaaatccagtgagtttaagggcaccttgccccacagtttcaacacctatctcatacattaccctgccttcaaagactgttgtaaacatagtacatcagaatcctaaaatgtaatgacatcagtatgtgcaactgaaagatgcaaccggcatggctaatgttccccaaactcatgggaaaaggaaaacacagtaaatacttgaaaaaccaaggtaatgtcaccagcattgaatcttaaataaagaaaggaaaaaacatgaacaattactcactgggaacaacagaagtggtattgaatccaaatgtaggacaacaatgccagagt

SEQ ID NO: 10377 - DNA, 1293 bp, Setaria italica
  misc_feature (1)..(44): n is a, c, g, or t
  Peptide Sequence Number=SeqID_76351
nnnnnnnnnnnnnnnnnnnnnnnnnnnnnnnnnnnnnnnnnnnncaaacatatattttcaaaacgtcagtatgttttaaaacgagtatttcatttacaagatgtataacacatgacagcattttgtatcgtacccaactccatataaataattacagaccaggatgactgtaccaataacaaaagaattgttccgctgaacatcctgtaacaacaatgaacttccaaaaacatgctataacaactataacctatgatacatttgctcataatccatgtacttgatatgtacttagtgtcttataaaccggtggagtatggactggatgctcgtaccatgttttggatacggagaatagctccatggaaactccatgttttattttctgaccacgactcatcgccgtgcaatcgtaactgtaccaatgagattcttattaccaagaatttacaaacaacggaccattcctgcgtatcttctggcgaaactgcttcttctttacacaccatgcctcagtgaaagtactcacattgctaatcatctttgcaccaaaccaggcagaatcagtgccaaacggaggaggaagtactcttattccttctgaaatgtaatgtggaagaagctgttgaagctctttctccagcctctctggtaaaccaggtaagcatgacgatccaccagctaaaacaaccgtcttgtaccagctgtcatcaccaaccacttctgaattatagcagtgatccatacatagagatactgctttatgcaagcccatagcaggcattcctcccatgtggggctgaaatagaatttcagcagtcttgaatctctcttccgacagagtgaaccacccttcaccatcaacctcacaagaagcttgtgtacctttacgtagttcagcttcgtaatcagccgctacgtagcaaagtttcttgggaacaacagaagtggtattgaatccaatgtggacaacaatgccagaggtccgcttagaagcatacaaagataaaactgcttgatcaacagcgcaaacagcaggaacattcatatcaaacaagacagagtatattgtttccttgtattgctttcttgaggccctagcagagtcagtatcatcagtgtgattcagtggaaggacaacaataactggttgagtggaaggctttacttgcatccttgtatagattgtagagaagaagtgacgaagccttgcatacataggtgattcaatgttaccgaattccaagaatgtcgcacaacgcccagaaggagcagcatacttgctccagccat

SEQ ID NO: 10378 - DNA, 1200 bp, Setaria italica
  Peptide Sequence Number=SeqID_76352
taagttaagaaaagaactaactttaactaccaagacctactactaggtaaaccaggtaagcatgacgatccaccagctaaaacaaccgtcttgtaccagctgtcatcaccaaccacttctgaattatagcagtgatccatacatagagatactgctttatgcaagcccatagcaggcattcctcccatgtggggctgaaatagaatttcagcagtcttgaatctctcttccgacagagtgaaccacccttcaccatcaacctcacaagaagcttgtgtacctttacgtagttcagcttcgtaatcagccgctacgtagcaaagtttctccttgatggtccggacagtatacagtgactcgcaagatatatttctctggtgcattaactccttaagaaatccagtgagtttaagggcaccttgccccacagtttcaacacctatctcatacattaccctgccttcaaagatgggaacaacagaagtggtattgaatccaatgtggacaacaatgccagaggtccgcttagaagcatacaaagataaaactgcttgatcaacagcgcaaacagcaggaacattcatatcaaacaagacagagtatattgtttccttgtattgctttcttgaggccctagcagagtcagtatcatcagtgtgattcagtggaaggacaacaataactggttgagtggaaggctttacttgcatccttgtatagattgtagagaagaagtgacgaagccttgcatacataggtgattcaatgttaccgaattccaagaatgtcgcacaacgcccagaaggagcagcatacttgctccagccatacttgcaatacccagatccaccatcgactatgagagtacccgggaccaccgctcggaggccgtaaatctgtttgaacgatagctgcggcgagttatcgtagtacaaccacgggtgcgagtcggggccggcggcgaggtgcgtctcggcgaagacgacgaggtcccacgggtcggggccgaggcgcaggaagaaggcccagaggccgttgtcggaggcgaggatgcgccaggcgcggcagacggccgtggagcgtgcggcgtcgacggggcccagcaggcgcaggatctgcgcgagcacgtcggtcgggacggcgtcgagcgcgcccagcgacagcgacgcgctgtaccgctcggcggccggctgcgcgcgg

SEQ ID NO: 10379 - DNA, 285 bp, Setaria italica
  Peptide Sequence Number=SeqID_76353
ccggctcggcagcggcggcgtcggggaagaggtgcgcgtctccgagatcgagctctcccgcgaggatggcggcggggaatgagaacgcgggcggcggaccggcgaccgggccgacgccagcgctgagccggagctcgtccaggaaggccgagcagtcaccgtacaggcgcaaccctatggccgagctcgacgagaactcgctccgtaacaacagcaaccacattgccaggcggcagaagaaatccattgagaatgccgtcgccgccacacccaagaagaaggcca

SEQ ID NO: 10380 - DNA, 402 bp, Setaria italica
  Peptide Sequence Number=SeqID_76354
ggttagttgttatcccttttcagtttcaggtaaggttgagctgacaggcatgcctgattttgactcggttaggcaaaggcagcaagcatctcttgggaatatgttaaagaatcccatgtctatctgacttgactttataaatgtgaattttagacacccatgtatatatacataactcttcatctctatctacaatgactctgctctgcattttttattttgtaattgcaattatcagattggctagcccccaatctataacctaatttcagttgccaatgcaatgcaaattcttgcgtctcatcatttacttattggttgtggctcagcaagcaacagtgattgggcggttggcccctaggctgtcagggtcgtcctattcaatgtcaatcctagtcatgg

SEQ ID NO: 10381 - DNA, 1550 bp, Setaria italica
  misc_feature (1524)..(1550): n is a, c, g, or t
  Peptide Sequence Number=SeqID_76355
ctgcccaacatttcctcctccctcccgtcccgtcccgtcgcctcgccgcctccgcacgcgaaacgcagcagaaaccgccgctccctccgcccgcccctgctcggccgtctcccctttgcgtgcgagaggaaggagaaggaagggccttcttggacaagactagaagcgtctcggggaagagaggagatggcgatcgaccacgagtccccgttcaaggagctccgcctcaagaaccgcaggatcatgggaggcggcggccctgagccggaggaggaggccgcctcggcggcgtacggggaccagtggccgcgctggctgcagccgctgctctccgcgcgcttcttcgcgcattgcaagacccacagcgactcgcaccgcagcggcgagtgcaacatgttctgcctcgactgctccgccgccgcgggcaccggcgcgctctgctccctctgcctcgcgcacggccaccgcgaccaccacaccatccagatccgccgctcatcctaccacgacgtcatccgggtctccgacatacagcgcttcatggacatcgccggcgtgcagacctacgtcatcaacagcgcccgcgtcgtcttcctcaacgagcggccccagcagcagaagcccgggtgcggcggcaaggcagcctccgcctccgccaacctctgcgaggtatgcgcccgcagcctcctcgacaacttccgcttctgctccctcgggtgcaaggtcgtcggctgcgcccccgacgccgccaaggccaggagcaggctcctccggcccgcctccgacggcaacgcctcctcctccgccctgcggaatgccgacaagaagcagagcttctcgcccccgacgccgccgaccctgccgacgaagcggcgcaagggcatcccgcaccgcgcgccgttcggcagcctcatcgtcgagtactagtcctcggcggcggcattggcattacacgcgcgcggtaaagtaaaagtactcttcaaccaacggaatcgcagtgcgagtcgctgaatccgtgcatgaatcacagtccgccattacggcaatgggatggccaccacttcggtggccgccttcctttgccatggcactttggggttggtggtgcttctcgaggtggatgccatttgctcgctggctttgctttccacaaagggagagggaaagaaatgtggagaagaaagaaaggagggtgcttgatgctagaccaactactcctgccgcaactatgtcaatcaaactagcctttccattactaagagttaattactgctgttaggacagaagatatatatttctgatagaaatatatgtacatgtttagtcctgttctgtttcatatcaccatagtggagcagtatagcctagcttttgtgatgctcttacctttactagattagatgtctgaagaatgtcaggagataatcagtcagtgctaataagcaatgcaggtggctctgctcccttgcatcctccttcagagttttgtgatggacctgttgtgcttgattggtgtcagttcannnnnnnnnnnnnnnnnnnnnnnnnnn

SEQ ID NO: 10382 - DNA, 463 bp, Setaria italica
  misc_feature (127)..(127): n is a, c, g, or t
  Peptide Sequence Number=SeqID_76356
cagcgagccacgcgaaaactgtggtggtgccaaagctgtggcacttggaatcggcgccacacatacggcgcaagaactagcaactgctgtggctgttgcacctgcgtcaccaaccaagcatgtcgcngttttttatggcgccaccaaaaacttggtgtggcaaaccgtggcggagaaccaaacgtctccttataatttcacagcatttatgggtttcctatcataatctaaaattgcagcacaaaatttgtggtaactaaaaatacttgctgcatgatccactcctttgctacattattaatctgcatttttattggtgatacaacttgcctatttgtgtcgattaatgagattgatgtcctcttgttgatagttgcatggtgttgacgataatattggcaagagcaagaagatcctggcagcaatgtcgaagaggatggacaggaacaagtggatcattggg

SEQ ID NO: 10383 - DNA, 1208 bp, Setaria italica
  misc_feature (1204)..(1208): n is a, c, g, or t
  Peptide Sequence Number=SeqID_76357
cgcagtctccagaacaagcagcgccaatgtgctaatccctcctgtattcgtctcccccaatcctgacccgatcaaagtcgaagccgcccccaaatttccccacgcccagccacgcggaccgcaatcctcgtcaaattcgcctccgccgtctgcttgatccgacgccgccgagtcgctcctgttggaccgtgtcgccgggagtgattcgtccgcgggatttggagggagcggctcgaggaaagagatcgaggcgaaccgcgagcagcagccatgagcgaggtgttcgagggctacgagcggcagtactgcgaggcctcggcctccctctcccgcaagtgcaccgccgcctccgccctcgatggagagaagaagaagcagaagctgtccgagatccagtcctgcgtggaggaagctgaatcgctgattcggaagatggacctggaggcgaggagcctgcagccgagcgtgaaggctggtttgcttgcgaagctgagggagtataaatctgacctcaataatgtcaagagcgagctcaagaggatatcagcgcccaacgccaggcaggctacccgggaggagctccttgaggctggcatggcagacactcttgcggtgtctactgatcagaggggaagattgatgatgacaactgaaagactgaatcagtccactgatagaattaaagagagccgaagaactatgttggagacagaagaacttggtgtgtcaattcttcaggatcttcaccaacaacgacagtcactactacatgcccataccactttgcatggtgttgacgataatattggcaagagcaagaagatcctggcagcaatgtcgaagaggatggacaggaacaagtggatcattgggggaatcatcacggctctggttctggccatccttctcatactctacttcaagctcgctcattaggcctgcttccaggtaggttggcccacatatctctgtccagtaattgtgtgataagagttgtctgaatgctgtgtattgagtaacacgctctctccaagcatcatttgtttaccatccaaatttctaaaacttcaagtggcccatgttatgtacagtgtcagacactccaattatataaactgtccaaagagtgaaaaaaatttactcgagtctcagtctctctgcctgaggcatgcttgatacaaaaaaaaaacaaaaacaaaaacannnnn

SEQ ID NO: 10384 - DNA, 405 bp, Setaria italica
  Peptide Sequence Number=SeqID_76358
aggggaaccctgctgctgatctacccctttgcacttgggatcatgggacggtggagcaagaggccctatctcctgtttatcttctttgtgattgcctttgttgtagtcgcagcggtggtttttgccatccatgctgcacgcactggttctgttcggttccacttcagtcattcaggtggtgctagtttccctacaagctggggtttttagcttgtggttgagtagtggcacatgtcacagtaagtttgagttttttcttcggttgtggagttttcacatgatgtaaatcgtgcattgattgtacaagattgttcagtgaatgaaaaaaaagccatttgtatggaaaagaaataaagagtaaaagattcttttagcttttaagaaaaaaaaaaaaaaaaaaaaaac

SEQ ID NO: 10385 - DNA, 240 bp, Setaria italica
  Peptide Sequence Number=SeqID_76359
ccatggagagctgctagccatctttgatccctgtccttgattggctaccatagacaaggaagaccaaggttcacttattcctaatcataggctagcagctagcatgaataggagcaacatggtagtgctcaagctcgacgtcgacatactgcatgaaagctgaaacagagacagagaccagtcacttgtgatcatcctatattatgctctctcgtacaagctgttgtggacaaacggccg

SEQ ID NO: 10386 - DNA, 272 bp, Setaria italica
  Peptide Sequence Number=SeqID_76360
aacacgcgctcccaatgtgtactactcgcccaagctcgcttacctcaaggtggtggtcatcgcggcgcaggacttggtgcccgcggagaagggccgggcgcttgctcccaccatcgccaagatccagctgggcgggcagatccggcggacgcggccgcagggtcgcccaacccggtgtggaacgaggagttcatgttcgtggccggggagccgttcgacgagccgctggtggtgacggtggaggagaaggtggcggcggggcgggacgagcc

SEQ ID NO: 10387 - DNA, 594 bp, Setaria italica
  Peptide Sequence Number=SeqID_76361
tgtaggaccttgcagctgaccataacatgtgtataataggatcatgactgcaatgctaaaatgattcaacctacataatgcctgtcagtctgtcactacaagagcaatgcgaaccaggtttcacaaattcggttttttgttactgtcctagacccaagctggagcaaggaattaccattttagtctttctcactgttccatatgttttagcctttttctttatgtatatacttttctggccagaatgaagttaatgtttctaacgttatgtcactatatttggcattgctggatgactatatgtcttagtgaacaagtgtaaacatgactgcacatgatagtatccacatctataaatctgggtgctctcaatttattaatgttcaaataaacaaaatacaagaatacatattccgtgtatattggatagaaaatctaacactgctcttacatgatgttttaggcggccaagtccctggaggagaagctcaagtcttccggggtaccatatgaagtccacatataccctggatgttcgcatgccttcatgaacacttcgccggaggccctcaagcggaagaagggaatgggtcg

SEQ ID NO: 10388 - DNA, 298 bp, Setaria italica
  Peptide Sequence Number=SeqID_76362
cttagcggcgaccttaggaggcggctccctgacgactacggcgaggttggcttggtgattggaggaaggaggcggcagcggcacgggcggggtaaggggcgggggaggctgcggctgtcggcccccgtagagaaggtcgtcgatgttgaggtgggaggggaaggaaaggccctctttggcgtgcagccggtggagccataccggcgtgctactggcggcggccgcggcagcggtgagcagcgtctggcagcacggcattgccttccgtcctctcccctccggctgcgacggcggtggg

SEQ ID NO: 10389 - DNA, 462 bp, Setaria italica
  misc_feature (441)..(441): n is a, c, g, or t
  Peptide Sequence Number=SeqID_76363
gctgggtcgaatggatcaggtgccgggtcttctgctgggtcgggtggcgggcaagggtatgggcagggtggtgggagtgggttcggttctgggtatggtgagggtagtgggtctgggcgtgggtcgggtaatggggtggtcggcgtagggtatagtgagggatacggtcatgggtcgcctgctggctcgggtggaaacccttgatcaccaccctatctgaatctgtattttggaaaagcttatcatgcttactctactatgtatttagtcgaaccctgcttaatcttgccgtgtggcatagcccagacccactaccctcgccaaacatggccaatatggtgtgtgtaatgttaggtcaaaatccttttatttaagtgtatatttgtgatgcgtatgaaataaacaaaattgtttgtgttttgggcaaaaaaaaaaaaaaanaaaaaaaactaaaagagaact

SEQ ID NO: 10390 - DNA, 332 bp, Setaria italica
  Peptide Sequence Number=SeqID_76364
gagctgcgggacgcggcggcggggcggccccgagcagcactgcggccggaggttgaagcgaagtgagaacttggtggcgagcgtgtggtctctctgagctccgacgagccgctacgccatctgggctgcggctgctggtacagagaagaagagcggctccaccacgaagatagagagaagagagagacgagggagggagggagggagaagacagagaggaaggggggaggagctgacatgcaggatcatcatgtggagtttgtcgcgtactcgcatgtgcatgtagtgagtactgttaacgcttgaatgctgtatgcaaatctgggtctacg

SEQ ID NO: 10391 - DNA, 1399 bp, Setaria italica
  misc_feature (1363)..(1399): n is a, c, g, or t
  Peptide Sequence Number=SeqID_76365
ctccctcccacctcccgcgagcgcccccgaattccaggtgctcgtggcggggcggtaggtggcgacgatggagttcaagctggccgccaaggccgcggcggcgtcgcccgcgcccgcgcacgcgcaccggggagaaggagcgcagggcaggagccgcgtcggcttcgggctcggctcggcggcgaccgggaccaaggcgctgcgcgcgaccgccaacaactccgcgacccccgtggccaaggaagggagggttgatcgaagtgaaatattgacactggatagcatcagacaaactttgattagactagaagacagcatcatattcggcctcttggagagagcccagtaccgttacaatgctgatacatatgatagcaattctttccacatggagggttttgaaggatctttggttgaatacatagttagagaaactgaaaagctacatgcgcaggttgggagatacaagagcccagatgagcacgcattctttccagatgatctgcctgagccgcggttgccacctatgcaatacccaaaggttctgcatcccgttgctgattctattaacatcaacaaaaagatttggaagctgtatttcgatgaacttcttccaaggttggcgaaagaaggaagcgatggcaattatggatccagtgctctctgtgacacgtctctcttgcaggcactctctaaaagaatccactatgggaagtttgtggcagaggccaagtttcaagagtcccctgaagcttacaggcctgccataaaagcccaggaccctgttcaactcatgcaactcctcacatacgagactgtggagcgtgctatcgagcacagggtggaagcgaaggccaagatcttcgggcaagaggtgaacatcggcgctgaggccaacggcgccccaccggtgtgcaagatcaaccccagcatagtcgccgggctgtacaggagaatcatgccgctaaccaaggaggttcaggtcgcgtacttgcttgggaggctggattgagtgttgctgcttataccgctctagactccgagattcgaattccctggcattaaaaataacttgaagccagaacgtctgtaggtatccgcttttggggaggttggagaatatacaccgtgtgtggagttgtggcaggaacatgcagaatcatcatgtggagtttgtcgcgtactcgcatgtgcatgtagtgagtactgttaacgcttgaatgctgtatgcaaatactgggtcactttcgttggtggggggtgcctttgtgagccggaggccgaatggttacttcgaaaaaagaatggttctcggggaaaagaaaaaggttacgctgaaaaaaaaaaaaaacaaaaaactagnnnnnnnnnnnnnnnnnnnnnnnnnnnnnnnnnnnnn

SEQ ID NO: 10392 - DNA, 872 bp, Setaria italica
  Peptide Sequence Number=SeqID_76366
aataatgcatacctgaaggaacctaatgttcctctttcggcgaatggacaaactgatcaattggttccggaatatacattctacttctctagctggaaaggaaaagggttgtacaaaagaaagggaagatcacacgttgacgttgaggatattctggtaataactgtatcaacagacactaactcaacaagatacaacacatgatgtctcgccgagaaattgccctttttccctcattaaacattggacatggacgcatggtacaggagattctatactacaaaaacaacaaagcgattcccaggaacaagtcaagatgatcaacaatcaccatccttaaggtgcgatggggaacatacaacacaaggaagaaatgttggtcttcaaactattttccggtgtccactgaaggcccaaatcttcaaatttttgtcccaacttcctgtacacaatgcactcccatcagatgacattccaaggcaacttatacgaccatcatgggagttttggaggtttcccaaattaagtaccacctcggcaagaagtgtgtcccacacgtaacagtcaccattggagtacccagcaaatagtagccttcctgatattgagaatgcgatagatgtaacagtaggtagttcattatcatctctattaggctccctactgtacacctgaagttgatgcccagttctcatgtcaaataatctacaagtaccatcatctgagccagtaccaaacctatggccatcagggaaaaacttcacactgttaacgtcagcctcatgtccatgataggttcgaacagcccgtactttgtctcagatatcccacagcctcaccagttgcatcacatgagtccagagacaaacata

SEQ ID NO: 10393 - DNA, 1589 bp, Setaria italica
  Peptide Sequence Number=SeqID_76367
atagttgctgaggagcatctcaaagggaaaaataggcaaataattaatcttcacttaataaatgcaaccacatttgcatgcctatattgctactgagtgataattgagttacgcttgtcaacataaagattatatcactagtcagatctgaatttatatggttcacaaactgcaccataatcaaatatgccattctttcaacagaagggaaccaaaccgtggtggaacagtaaagtataacggtaatttgatcggtgttgattcttggcattatttttctttataatatataagctgtatttcattccatggaacatagccaaaaatccaaacctcggcaagaagtgtgtcccacacgtaacagtcaccattggagtacccagcaaatagtagccttcctgatattgagaatgcgatagatgtaacagtaggtagttcattatcatctctattaggctccctactgtacacctgaagttgatgcccagttctcatgtcaaataatctacaagtaccatcatctgagccagtaccaaacctatggccatcagggaaaaacttcacactgttaacgtcagcctcatgtccatgataggttcgaacagcccgacttgcaattctgatatcccacagcctcacagttgcatcacatgagccagagacaaacatattcgtattcgatgagttgatggatacactttgaacatcagctgtatgccctgatggaaattcacctccaaatattgacatcctctggccagtagtaacatcccacagaacacatgtctgatcacctgagcttgtaataaggcgactttcctgatctgggacatattggcatgacgaaacatagcccttgtgtccagtaagaattcttgatactggcatattcccgtctctgtctgcttgcgagttaagattgaaaatagagcatgcactatctagaccaccacaggcaacagactggccattgggtgcaaaagcgcatgtcatcacccatgggcagtgcagctttatggcatgtgttttctggcttgttaacgcattccacacaatcagccttccatcttgtgaggcactgactatccaattcttttcgggagtccaatccagagaatatacctttccgctgtggccctgcagcgtgcggcagcagaccagatccgtcgggttgaagctcaccggcgtcctcccctgcgccttggagtacctcgccacgtcggtgtcgaggagcatctcccggcgctggcgaaggcgctcgcggagggagttgaccgacgccgtcgccgcggcgtgcttctccttgagctccgccacggacgccatcggtgccgcccgctagcctgtttgcgccggggactcgagcgacggccgggggtgggggaatctaccaggacgcgcgcatggagagcgggggcgcggttccaatggctaaggcagagctccgggagctcccaggggagaagccgagaagggaagaggaggcggcggcggtggggtcaggaacaggagggcgaatcggcggcggcgttggcggcgacgaggagaaactgacaaggtgcgcgatggggagagtcgagtcgagcgag

SEQ ID NO: 10394 - DNA, 827 bp, Setaria italica
  Peptide Sequence Number=SeqID_76368
gtcgctccgaccccggaggcccagacagatggggaggcggcacagcggcggcggcggcggcggccgcggaggcggaagagggcgtgggcgagggcgagatgaggaaggcgatctccatctgcacaaggctgcgagggatggtgatgcggccgcggcggagtcgctgtgcgagtccaaccctctcgccgtcaactcaagggaccgcctctcccgcaccccactccacttggctgcatgggctgggcatgttgaggttgtgaaatgcctttgcaagcacaaagctgatgtaggggctgcagcaatggatgacaccgctgcaattcattttgcctcccagaaaggccatatagaagtggttcgcgagctgctggtggctggggccaccgtgaaagcgaagaacaggaaaggcttcacggcgctgcatttcgctgcgcagaactcccacctggatcttgtgaagtaccttgtgaagaaaggtgtcgacgtcacagcaaagacgaaaggcggccagacagccctacatgtcgcggagaatgacgatgtgcgtgcgttcctgaaagagtgcgagcagtccttgaagaagggatctgagctaccattggagaaaaagggagctgagcctgagctaccatcagagaataaggatgattctgcccaggacggcggtggcagcaagtcttcaggtgagggtatgcaagatggggatgatgcagggcagggtgagaagaggaaatgcgagggggttgctgcctcgagttcaccacaagtgaaaaaggccaaggtttccccttggtcatcttgttagtgaaaatgacatggatgaggag

SEQ ID NO: 10395 - DNA, 1364 bp, Setaria italica
  Peptide Sequence Number=SeqID_76369
ctctggatcggcggcctcctgcactggatgaacgaggactacctctacgcctgcttcacctactcgcccgagctcctttcccttgtcgtaaagcggagcaagcatactggccagtcggagggttttggctttctcagatttaacgaccatgctactgccactcgcattctcaagagctacaatggtcagaagatgcctaacgctgatcaagatttcaacctcaactgggccgctcagtcatatgctcctaacaaacttcctgatcaagattccaagctcgactgggccacgcagcaggatgggcacactaatgacactgctgctgcttctgagcatgtcatatttgttggggacttggcctatgatgttactgaatacatgctacaccatctgttcaagagtcgatatccatcggtcaagagtgcaaaagttatctttgacaagcttactggccgctcaaaaggctatggctttgttcgctttggagatgccaatgagcacgtacaagcaatgacagaaatgaatggggcatactgttctaccaggcctatgcgaattgggcctgctcccaacaagaaatattttgaccacagcacacaaggaactgattcttatcacgatccaaacaattcaagactgtttgttgggtcccttgatcaaagcatcacagatgatgatctactgcgggcctttagtccatacggagagcttgttaatgtcagagtactaccgggcaaggcatgcggctttgtcacatactcaaacagggcatcagcagaggaggccatgagaatgctaaatgggagtcagctgggaggtaacaacttgagactcacatggggtcgccgttctggtaacaagcaggatccgcgaaatggtggccagcatggacgccccaaatgcattgatccttctagctttggttggtctccacaggatccatatgcttatgctcagacaggccatccaggatatggatattaccaacatcagctgcccacagtacagtgagatcaccatgtgaaggaacatcacaaggaacagcatgtagagagatttttggtccatgaactcagaagaacttcctctcctttttggaaatatagctttcttccttagttgcgctcccatgagaagtagctccgtatcccagcacagaagcccccctgcgatgcctgggactaagagtttttacagacgtcgagaatttagccccctttaacctgttggattggctgaattttggtagcttaactcgggttcagagtgacttgtcagctgaggctgtagacgacattacattgtggttaccttttactggctaaatcgcacttgtgatggtgtttctgactaagaaaaaaaaa

SEQ ID NO: 10396 - DNA, 424 bp, Setaria italica
  Peptide Sequence Number=SeqID_76370
gcggccccgcggcgagcggcgccgatggcgcgctgcagatgcgtgcctagacgctagcgcccgacgcgcagccgccggcaccatacgcagcgcgtggcacggccaggaggctgtagcggggcatgcccgggtctggacgatcgaagaagtgttcgacgggcatctggcgccgcggcgacaaggagagtccagcccgtgcttcctgcttcctccactagagaagtaagtatttggatgctgaatcaatgggacaacatgattatgatggaaccagctcaaaatcgtggaggagatgctcctgtgcgttcttccttttgcttgttacattgttgattttccatctgattagctttgatgccatcttcttactggctggcgagaggaactccattgctttggcaaaattgaagctaggattcaagct

SEQ ID NO: 10397 - DNA, 703 bp, Setaria italica
  misc_feature (682)..(703): n is a, c, g, or t
  Peptide Sequence Number=SeqID_76371
gtaagatgttacgcaactcaaacccaaaacgtactgaggaaatcttctactgcaactatcaagcgagctgatcccaaagggatggtgaacaggcctaaacttgatgatggcaatgggggttttcctccattccgctttggtaaaggcgggggaggaggaggtggtgggggaggtggcagcaactattttggtggttttttcgtatttgcctgtgtattgcttctggattacctgaaggaagccgagaaaaacctactccgacaaggccatggttcaggagatcaagcaagcattgggctggcgcaataaccattttcgtttcagttagcattaattgattgtgtttgctgtaaacttgagctcgttcaatgcagatgtgacagttgaccccgagcatattgatgtatcactctcgtgaaagagtggttatcatatgcttaagattcagtagatagaggtcatgtcgctcgatatcaaatcaatagaaaacctacaaataaacacttttaacttgtacttggccagctcaaacggtggctagccacccccctctattctagccacaagaacatgcatcttaatggtctgttggactacctgcaggctgtttgttaaagcgacctatggtattgatttggcactggaaattgtacaaataagcctgaagaaattgctggcaagnnnnnnnnnnnnnnnnnnnnnn

SEQ ID NO: 10398 - DNA, 518 bp, Setaria italica
  Peptide Sequence Number=SeqID_76372
aaccggcgatgagccttgaattgccatgccaagtgatgactgaacctcctcagctttcgccaccatagttggcacagcacctatcttatcctcctttgatgaatcagtggttgtactgaacaacctcctgccactctgaatggacttagctcctatttgcttcatattaattgaagtagagacagagcttacatgttttttggccgaatgcatggttgcttcagacctcttattggcagtgggggttcgagttgcctttactgctctgttaatgaattgggttcggccattcttcggtacagaattttgctggatagagggcagcaatgaccttgacaaattcttagcccttactgaaaggcttgcatttgattttgaacaacttctggtacccaaggataggttgtagaattgttcattgaccacttggcttgagcgagaagccaaagtaagagtagagactgcagatggcaggaaacttcatccaaacaacagatcaacacagcgccacttgtctt

SEQ ID NO: 10399 - DNA, 392 bp, Setaria italica
  Peptide Sequence Number=SeqID_76373
cactccgaccaggagctgttcaatggcggctccacggacgccctggtcaggagctacgcggcaagcccggcacagttcagtagcgacttcgcggcgggcatggtgaggatgagcggcattggtgtcctgactgggagcagcgggcagatccggcgcaactgtcggagggtgaactagctaccagaaacgaagtatacggcagcattgcgagtatcatcaactgcaattttttgttggggtccgccgcgtgcacttttttatttgtaacgtatgaatgtatatgatcataaagactatagcccccttatatacaacgcggggtttcccaccaaatcatatgggaattaaaattatcctgtaaagatatcgtaaaacttctatagaaaaaaaaa

SEQ ID NO: 10400 - DNA, 353 bp, Setaria italica
  Peptide Sequence Number=SeqID_76374
aaagtggcatcttgagaccgtgatgtctgtactctgtcgcgtgatgtcgatgagaccgtcgtcgtagtcggcgagcgtgcagcggtcgatccagatgttggtggagccgggcttgatctggatgccgtctacgtcatgtcctcggcctccctcgaacatcaggttgcagacgatgacgtggtggcagctcttgagctggagccccttgccggtgagcaccacgcgctggccgcggccgtcgatggtcttgtgggaggcgacgcggaggtaggactggaggtggatggtgccggacacctcgaagacgatccacaggggctccgccgcgcggcacgcctccctcaggctcccgg

SEQ ID NO: 10401 - DNA, 421 bp, Setaria italica
  Peptide Sequence Number=SeqID_76375
cgcggccggcccatgaacttgtgcgcatcgtcgccgccgccaagcatcagcgccgcggccgccgcggctctgtcgtgctgctgctgctgctgctgttgctgcagcaggaagctgaggcacttgctggcggcggagggcgagcctgggagggagccggtgggggagtaggggaaggcggcggggccgaggcgctggctcttggagcggaggaggaagtcctggcactgctgctgctggtcggcggcggcttccatcttggtggcggcgagcgcggctgcatcgtcggggagaccgccgtgcacgaaccggcagctgctgccgttcttgcagaacccgcgcgcgtagtagaggcagggcttccacccgaatccgtcgccgcccccgcccccgccgaggcagagctcgttcaccgacacgctcc

SEQ ID NO: 10402 - DNA, 1334 bp, Setaria italica
  misc_feature (1311)..(1334): n is a, c, g, or t
  Peptide Sequence Number=SeqID_76376
gccagcgagatggcggctaccgcgaccgccaccaccaccgcgatggagggcatcgaggcgaccgcggccgccaccaccacagaggccgccgccggccagtctgcagccatccccgagaaatatatgcataaaaaccgcttgcaagagtttgctgtgcgaacacaaaagaaactgccgatctacaacgttgagcgtgaaggcgagtatcatcatcctaagttcagatgcacagtggaagtgggtggtcagaagttttcatcaactggtagtttcagtcgtaagaaggaagcagagcaggatgctgccagagtggcttatgagatcttggcaccaattgaagagggtgatgttaataaagaggtgtttgggctgattgatcaggatgtggtgttctgcaaatcaattctttatgaatttgctgtcaagacaaaaaccgctcggccctcatactctgaagattgtctcaaagagcccttcaccatgtttgttggatctgtggtgtttgatgggaatacctatactggtgaatctgcatccaacaagaaggatgcacagcagaatgcagctcgtgctgtgatcaagtcaatattagctacaggtaactcttgtatgagtggaatcattaggtcaaagaaacatcttatcactgccatcaaatcttctgaaagcaccccaactgcttttactcctataaagtttacacgcgctgttacatatgcagcatatggcggaccagatcatgtagcacctgcgtcacaagatgaatcttcctcattaggtgttcaagaacacagcattgtaccagcagttgggacatccgccaatccatctgcaaaagctgtaagtggttcaaagaagcgcaagggcagagttggaggagcagatgtcaacggaacaatggttgccaaggagcattaacttctcacccatcaacataaggttcagaaaggcccgcctcatcaatggtgtactcaggggtgatggaagtgactggcttgctcacatggtgcagtgtggcacgtgcatttctttagtaggatatttcaactgacattggattggcatttccttcatatcgctctatacagctgtagggttagtcatctttgctgttgccgaacaaaactagggcgatgtcctctctcccccttaaggcttctacaaggtaaccagttaatgtggtgtccaactgatgtctgcgtagtctgtaaagatgtcttgcgtcagatcatcgccgatgattgtgctgggtctgtatggtaacatggtattctgcgaagaagcaattttcttgtgctttcgtttaaactnnnnnnnnnnnnnnnnnnnnnnnn

SEQ ID NO: 10403 - DNA, 614 bp, Setaria italica
  misc_feature (606)..(606): n is a, c, g, or t
  Peptide Sequence Number=SeqID_76377
gtcctgaaagcagcgcagggagggagcccccagccgcaacgggaacctcatctcgtcgcctaggagcagagcagccgcggccgcaacaggtaagtgagaagacaagatggtgcacaaggagctgccgcaggcatggtggtttgacagccacaaccttgcaagaccatctccatggctgaacaacacactttcagagctggatgacaagaccaagcaaatgcttcagctgatagatcaagacgcagactcatttgcgcagcgcgccgaaatgtactacaagaagcggcccgtgctggtggacatgctgggagacctgtaccgcacgcaccgctcgctggcggagcagtatgatctgctgaagcatggcagcggcacacgccagacggtgtttggcctgtcttcctgcactcagagccggtctcaggcgtcatccgtgaacggcaagacaacgcctcgctcctcttgctcggtctccatctacgactcggagtctgaagttgatgaccccgagcaagaagaagaacacgaccgagagcaggtggagctgatgcgcgctgagatcatcaagatggagttgtcgtcgcgggagcagcagcgacagaaagngcaggtgg

SEQ ID NO: 10404 - DNA, 376 bp, Setaria italica
  Peptide Sequence Number=SeqID_76378
tcggttgtcggttggtaagttgtcgtcgtagtcgggttgcggcgcgtgctgcaagctggacaagggccccgacttccccacccccgacgagatctttgccgaccaccccgatgaccttcagctgtacaggagcatgaccggcgacgacggatggtgcatcaactacgacaaggccacccgcacctgcaacatttaccaagaccgaccttcgttctgcagggtggaaccaaagattttcgatgagttctttggcgtgccacgcagcagattcgatcgggaagcttgcagtgcttgcctggataacatcaagatggtgtatggtgatgactctgctgagctcagtaacttcaagcgtgtgataagggagaaaagtaat

SEQ ID NO: 10405 - DNA, 662 bp, Setaria italica
  Peptide Sequence Number=SeqID_76379
cgcgtgctgcaagctggacaaggccccgacttcccacccccgacgagatctttgccgacaccccgatgaccttcagctgtacaggagcatgaccggcgacgacggatggtgcatcaactacgacaaggccacccgcacctgcaacatttaccaagggtggaaccaagatttttcgatgagttctttggcgtgccacgcagcagattcgatcgggaagcttgcagtgcttgcctggataacatcaagatggtgtatggtgatgactctgctgagctcagtaacttcaagcgtgtgataagggaggaaagtaataagctggaagcaagcaagaaccaacaagataaattgttggatacatagatcccagggcatgaatctgctataaaatcaccgaggaaaaccgagaagctaacaatgtgcaaacgcggaacatgctgagcgagatactcagtggaggcaacctaaacagctgccacgacaactctgacatgcgagtgcacacttcagttctgaacgtattcacgatactttcttcagtgaagcctggtggcaagagcccaagagtttgtggtattctttattattgacaattgtttccggcggcacagcatagtactatagtagtaggttttgattggtcccagactgtttgtttttcttta

SEQ ID NO: 10406 - DNA, 599 bp, Setaria italica
  misc_feature (513)..(599): n is a, c, g, or t
  Peptide Sequence Number=SeqID_76380
cgcgcgcgccgctcacgcccacaaagtaccaaagtcaagaaatacaagatgaaggccccctccgtccatgaagtttagattcagaaccatgaacgacgggcagatccgcaggtggagggcgggcaagcgccacaatgcgcacctcaagtctaagcaagcaaaacgaagacttcggaagcctgcattggtgcatttagcttacgcaaaggttataaagaagctcaacttctgcgggtaggaaataaaggaagatattgcggagtttggcatgggtactgactgccaaccgctgcatccacatgcaaattgtaaacgctggagtctcgatggactagtttgaattcttacttttgtcatttgatgcactgtcttcagatgttgtgctctcatctgtttctactgatgcgaagctgtttgttttctgctaaatgatataaagttgcgctgcattctgttatgcgcacaatctcagagaaattcatcagagtcatgtggaaactcgcttacaaagtnnnnnnnnnnnnnnnnnnnnnnnnnnnnnnnnnnnnnnnnnnnnnnnnnnnnnnnnnnnnnnnnnnnnnnnnnnnnnnnnnnnnnnn

SEQ ID NO: 10407 - DNA, 249 bp, Setaria italica
  Peptide Sequence Number=SeqID_76381
cacgacatcgccgtgtccatgttgtgggcgagccgttcctcgctcgccgcacgctgccgtgtccatgctgttggcgagccattccgcctcgctggctaggtcgatgctgccaccacgccggtcagacaatggatacatcaccgaatcatagacaaatcgggtgttagccactgcatcacatggcgccctgaactcctgccaactgcgcctctttacgcatctctagggagctctttgatggtgtgttcc

SEQ ID NO: 10408 - DNA, 4572 bp, Setaria italica
  Peptide Sequence Number=SeqID_76382
tggcccacgtgtcgttcaaaaataaagaggtggacggtggcatgtcccgatggtcggagtacctgaatgttgaagaaccgactccttctgcattggcaagctggaggaatatgagtgttgatgggccacaaggttcttccgccagtggccacaaacacctccagatggaaccggtggttcagctgtcaaaagtcgcggaggggttgctggccaagatgtaccggctgaatagcatcctggactatccggatcccaacacgcacacattctcggacgcattctggaaagctggtgtctttccaaatttcccgaaaatttgcatcacgctgtcaaagaaatttcctgagcatccaaacaagctgcagctggaaagagtagataaatttgcacttgatgctttaaatgagaatgctgaaggttacatgcacaatctagagcaatggatcctgttgcttcttgatttgctggcatttcgtgaacaagctttgcgacttattttggatttgagcagcacggtcataacattgctgccacatcagaactctttaattcttcatgcttttatggatctgttttgttcatttgtccgagtcaatgttttctcagacaaggtaccaagaaagatgatcctccaggtttacaacatcttacacgttatgctaaaaggtggtcgtgattgtgagttttatcacagattggttcaatttgtcgactcttacgatccacctatcaaagggttgcatgaagatctaaattttgtgagcccacgaattggagaggtcctggaagctgttggtccaattatcttcctttcaactgatacaaaaaatttaagaaatgaaggtttcctcagtccatttcatccacgttatccagacatcctaacaaactccgctcatccaatgagggcccaagacttggctaatgtcacatcataccgtgagtgggttcttctaggatatcttgtttgtcctgatgaactacttcgggtgaccagtatagatgttgccatggttgttctaaaagagaatttaatactccctctgttcagagatgagtacatcttacttcatgaaaactatcaactttatgtccttccaaaagttctagaatcaaagagaatggctaaatctggacgaactaagcaaaaggaagctgatctggagtacaatgttgcaaagcaggttgagaaaatgttaacggaagtgcatgagcaagcgctagtgtcatgtgatgctatgcatcgtgaaagaagaattcttcttaagcaggaaattggaaggatggttttatttttcacagatcaacctagcctcctagcacctaatattcagatggtcttttctgctctttcgttggctcaatctgaggtgatttggtacttccagcatgtggggtttcatcatcaaaatctactcgagggaaaactgttgacattgatgcaacggacccaactattggtttcttattagatggaatggggaaactttgttgcttggtccgtaaatacatagcagcaataaaaggatatgcattatcatacttgtcatcttgtgctggaagaatacggttcttacttggtactccaggaatggttgctctcgacctagatgcaacactgaagggcctttttcagcaagtcctccattgtctggagaacattccaaaacctcagggggaaagtgttcctgccattacctctgacttgactgatttgcgtaagcactggctctccattttgatgattgtcacatcttcacgatcctcgataaacattcggcacttggagaaggctacggtgtctactgggaaggagggtttggtgtccgaaggcaatgctgcatataattggtcaagatgtgtggatgaacttgagagccaactttccaaacatggaagtcttaaaaaactttacttttatcatcagcatcttaccacagtcttcagaaatacaatgtttggtccggaaggccgcccacagcattgttgtgcttggcttggagctgcttgcagttttccagaatgtgcttctgcaattattcctgaagaggttaacaaaattggcagagactctatctcatatgttgagtcccttatcgagtctatcatgggtggattggaaggtttgataaacattctagattcagaaggtggatttggctcattagagatgcagctttccccggagcaagcagctcttcacttgaataatacaacaagagcaaaaggtgtttcaagcttgttaacaccaggacatgagagctatcctgataatagttcgtcaattaagatgttggaagctgctatgcaaaggctgacaagtttgtgttctgttctaaatgacatggagcctatttgtgttctcaaccatgtttttgttctccgggagtacatgagagactgcatcataggaaatttcaggagaagatttcatagtatgattagaactgataactgcattcagcgaccatcaatcatagagtctcttctacgaagacatctgggcattatccatctagcagagcagcatatcagtatggaccttactgaaggtatacgtgaagtgctactagcagagagttatactggtccatttcccaatctgcaaatgtttgagacaccagtggggacacagggagggggatctgctgttgagatgatatgcaattggtatattgagaatgtagtaaaggatgcttctcatattggagttgcttttgatgcaatccagaattgcttcaggagctcacaacctattggtggtggatgtttggctgaagcatttacagatacaagagaactcaaagcacttgttcgtctttttggtggctatggaatagataaaatggacaagatgctaagggaacatacttctgcactgttaaattgtatcgattcagcattgaggtcaaatcgtgatgccttagagggcctagctggaagtgtaaattctggtgataggattgaaagggatgcaaatctgaagcagattattgatattgagacattggctgacctctgtattcaagcaggacaggcgataacttttcgtcgactgttggttgaggctgttggagcggtgcttgaagagaaagtacctcttatatattctcttctcaaaggattagccctgcagctgccagacgaggtacctgataaaaatgagatcattagattgagaagggttgcaagcagtgttggtgttggtgacaaacatgatgctgagtgggtacactctatcctggcagaagctggtgcagctaacgataattcttgggtcttacttccatatctttgtgctgcatttatggtatccaatatttggagtggtgctgtttatgatgtcaatataggtggattcagtaacaatttgcactgcctagcaaggtgtgtaaatgctgtggtcgggggaagtgaatacactagggttgaaagggagcagcaaataaattctctttcaaatgggcatacagacgagttgcaagaggctgaattaccaagccgtgtctcagcagaagcaaatattaaatctgctatgcagatctatgtcaaattgtctgcagggatagtcctggattcatggaatgacactagcaggccacacattgttcctaagctaatattcctggatcaactctgcgagctgtccccgtacctccccaggagcaccttagaagttcacataccttacacaatcctccgctcaatctaccaccagctatatggtgcctcactgatggcttcagaaccaatggatcagtctccaagacagtcacctctgatctctcttgcgcatgcatccccatctgcaaggcaaaatcgacctgagacaacacccaggtcccacactttcgagccaagctactacagttcgtcagggtcacagcacgacgaagggtacgatggagataagaggaccggacagctgcggagcatgaggcgctcgggaccacttgacttcagcgctagcaggaaggtgaagtttgttgagggctcaagctccgggagcagccatggcgctggctcactgcagagattcgcggtgtcgagatctggccctctgtcctacaaataggaactttcggtaacatgaccatgtgttctgatggagcaccagaatcaggcagctgacaagcagcgtaagcgaatattattctttaatctttgtgattgtagggtactaggtctgtagatcatcctaatgtgtattacttgtatgtagctagtggagttgtaagtaaaacccgttgtatgttggttttgtagtgtgctcatgtttaatgctgttagagaagtgatttgaactagctaagccagtttgcgtgtgaaagcaaagacactgcttgtattgtagtacccagtacagctgttcatgtgaaatgggctgtccgatagccggtaaggtaacaaatggtgagttatgagatcttgactgaaatgagatcttgactgttcatgtgtaagtcaagattcatccctgtaaaactcatttcatcactcttcataatttctatgccatgtcaccatatttgtttacatggcatctctacaatatgataaggaaaaaaaaaa

SEQ ID NO: 10409 - DNA, 286 bp, Setaria italica
  Peptide Sequence Number=SeqID_76383
gggcctggacaacctatacccctcatttattgcttgtctcccccctccctgcgcacttttaataagggtagatagatctttttacagctcattaaatgccttttagcaagagtatccaaatagtttttgctaaagtttagcaacttttagcaactaaagtttagcaagaggaaccaaacatgtccttgatggataaaaattaacgaagcagctaataatggaactattatgtcgttgtttaatctttatgtttaaaagtgctagcatttgcataacgggcgtgtgg

SEQ ID NO: 10410 - DNA, 696 bp, Setaria italica
  Peptide Sequence Number=SeqID_76384
ggttgctaaaacttgctaaaaggtgtctggacaacatatacccctcatttattgcttgtctcccccctcctgcgcacctttaataagggtagataggtccttttacagctcattaaatgccttttagcaagagtatccaaacagctttgctaaagtttagcaactaaagtttagcaacttttagcaactaaagtttagcaaggtggaagaaaacaggccctaataaacatatgccatggtacattatgttatcgagtttatcacatctgccaaggcgttttacaacttccatgaggcaggacgctctcatctcagtaaatgttgttgtcgaacacccagggctcgtgttggaacagctcgcggccgttcatctgtaccgctcctgatgcgatatcagcagctcgcttctgagctgcttcagctttcctcgcggcttcctctgcatccttgcgctgcttccaggagaggaactgcgcagcgctgatgggctgcgccctcgcagcggtcgcgggctcgccggcggcggcggcctgcggtggggcagtaccctcggcttctgctcccatcgcgaggatctgcgaatttctgggggaagggggtgacgacttgagaacggaaaaatcaaaatgaaacggggaatctgagcgcggtcaagcggggcctctccataaaggcagcccagtccacgtctccttt

SEQ ID NO: 10411 - DNA, 443 bp, Setaria italica
  Peptide Sequence Number=SeqID_76385
ctcctgtgcacctttaataaggatagataggtctttttacagctcattaaatgtcttttagcaagagtatccaaacagcttttgctaaaatttagcaagtaaagtttaacaacctttacctactaaagtttagcgacaacgggccctcagtatcactggattcaacggtacaagacagaatctgaaatctagataagcattgtcgttgaatggcatcccagaacgacgtaatgaactgggagcgctgtaaatttaagtgctgtaagttggcacgtggcctgtccctatcaatcgagcgatgcaacaaataaattatactaacaaattttattgcttatctaaacaagattgattatctaaagcgatgaaacaagggactccattatcaaacaggacagcacattcggttcttgatgtggcaacatttcgacagcagcagcagt

SEQ ID NO: 10412 - DNA, 748 bp, Setaria italica
  Peptide Sequence Number=SeqID_76386
tttttttttagtcaagcaacataattttttattccatccatcccaagattgattgatagatacagcaaactttcatccatccatccacaaacttcccctgataaaccaccattgcaaaacctaacctaacctagatagacaagatactggaagtactactattcctactgacgaaccaagaagccaaaacagcggctccgattgaagttgggtttccgaccggaggagtcatccgccgtctagaactcctgggaggcagatccgatgtcggccttgcccttgccgccggccttcttgggcagcagcgtctggtggatgtttggcagcacccctccggcggcgatggtgacggcccccagcagcttgctgagctcctcgtcgttacgcacggcgagctggatgtggcgcggcacgatccggttcttcttgttgtcgcgcgccgcgttgccggcgagctccagcacctcggcggcgaggtactcgaggacggcggagaggtagacgggggctcccccgccgacgcgctcggcgtacttgcccgtcttgaggtagcgcgcgacgcggccgacggggaactgcaggccggccttggacgaccgcgacaccgccttggtgcccttgggcttgcccctgccgccgctggaactcatcttctcctcccttccttgcgaggagtcctccgaggatcgaggtaggccttcgagatcgccggaatcgatgcggtggggacgtggggaatgcgggatgg

SEQ ID NO: 10413 - DNA, 245 bp, Setaria italica
  Peptide Sequence Number=SeqID_76387
tcctgtacagaaaacgaagaaagtggcaaagaaactgctaaagaaagtgcaaagtgatatgcaaatagtaaccacactagaggatgatcaaagtaatggcctggttgatcagaaaaacaatagccagaatattaaaaagacaagaaggagatatctgaaaaatgcatttagtaaccatgaagctcgaacaagagatgtaaatccagaaacaactcatgaagtcaactcaccttataatgcgccag

SEQ ID NO: 10414 - DNA, 514 bp, Setaria italica
  Peptide Sequence Number=SeqID_76388
gcagccgcaacagcccacaccggtcagaaccgaaggaagccaaccaaccaacccaccacctctcccccttccggtttccgctcttcctcggccggcgcgaggcagggggacggcagccatgaacggcatcaaccccaacggcggcatcctgtcctacgggacgctggagggctacgcgatgtgggtggccacgggcgtggcgtcggccttcttcgcgtccctggagcggtgctcctgcatccaccttcacaccgccgaggacgacggcgacgaggaggacctcgaggaggccagggaccgcccgctcatgctctcccgcccccaggcgctccccgagtactactacgaccggtccgggtcctccgcctccttcgccaagatgtgaccacgcacggatcgcgaggccgtcgtccccgcgtgatccgatccgtttcttgatttcgctcttgcttttgttccgttgtgaattgttgctgtatgtggcccgggcgtctgggatccgcggtcgtgttct

SEQ ID NO: 10415 - DNA, 234 bp, Setaria italica
  Peptide Sequence Number=SeqID_76389
ccgggtgctgcggctggctgctccgcgcggacgcccggacgacggccgccctgcggggcgagacgacgcggagcgacgacgcgctgatgccgccggcgccgcagaggggcttcccgagcccccgggccacggacagagacgccgcgacggcggtggcggccatggatcctgggctcagcactttgctctcgtgcgtcgctggggttggttggttgggtggggaagcggagcgta

SEQ ID NO: 10416 - DNA, 681 bp, Setaria italica
  Peptide Sequence Number=SeqID_76390
tcttaaacttatgcgcatcttgggtcaaggagatgcagattgcagtgaatatatgaatgatattcttgctcaggttgcaacaaaaagcgaatcaaacaagaatgctggaaatgccattctgtatgaatgtgttcagacgataatgggtattgaagctactagtggtttacgtgtgctggcaattaatattttgggtagattcttatcaaaccgagataacaatataagatatgttgctcttaacatgcttatgagggccattacagttgatgcactagcagtgcagaggcacaggacaacaatattagaatgtgtgaaggacgctgatgcctccattcgcaaaagggcccttgaacttgtttttctgttagtcaatgatacaaatgtaaagcctttgactaaagagctcattgattacttaaacatggcggatccagactttaaaggagatctcacgtcaaagatatgctcagtagttgaaaagttttctcaagagaagttatggtaccttgatcagatgttcaaggttttatctctggctggaaatcatgtgaaggatgatgtatgccatgcgcttattgttgtattaagcaatgcatcagagcttcaaggatattcagtgagatcattgtataaggccttacaagcatatggcaagcaagggaagtttagaagagtagc

SEQ ID NO: 10417 - DNA, 613 bp, Setaria italica
  Peptide Sequence Number=SeqID_76391
tggttacctttgtattctagtattgtttctaaggtttttattcttcttggtcttggtaaattctattgttgtaaggatgatgtatgccatgcgcttattgttgtattaagcaatgcatcagagcttcaaggatattcagtgagatcattgtataaggccttacaagcatatggcaagcagggaagtttagtaagagtagctgtttggtgcattggtgaatatggtgagatgctggtgaacaatgttggcatgctggatggggaggaaccagttatggtaacagaatcagatgctgtggatgctgtagaggttgcttttaaccgccattctgcagatgtgacaactggaccaatgtgtctggttgctcttttgaagctctcctcacggtttccatcgacatcagagtaagatatctttcaacttggcctcatggttgtcacacaaattggggagtgctttgcggacccgaactggaattgtggcggtaaaaatggacttactccaccaatttgtcccattttttccccaaatgtgtgcaaccttattatctcatacagtcatactttaatacaaagagaacttcagactcactgccaatcagtgaattatgggt

SEQ ID NO: 10418 - DNA, 2391 bp, Setaria italica
  Peptide Sequence Number=SeqID_76392
aaaacaacttacaataatagactacctgagtatgacgtttctggcattgctgatccattcttgcatattctttaaactaaattgatgcgcatcttgggtcaaggagatgcagattgcagtgaatatatgaatgatattcttgctcaggttgcaacaaaaagcgaatcaaacaagaatgctggaaatgccattctgtatgaatgtgttcagacgataatgggtattgaagctactagtggtttacgtgtgctggcaattaatattttgggtagattcttatcaaaccgagataacaatataagatatgttgctcttaacatgcttatgagggccattacagttgatgcactagcagtgcagaggcacaggacaacaatattagaatgtgtgaaggacgctgatgcctccattctggaaatcatgtgaaggatgatgtatgccatgcgcttattgttgtattaagcaatgcatcagagcttcaaggatattcagtgagatcattgtataaggccttacaagcatatggcaagcagggaagtttagtaagagtagctgtttggtgcattggtgaatatggtgagatgctggtgaacaatgttggcatgctggatggggaggaaccagttatggtaacagaatcagatgctgtggatgctgtagaggttgcttttaaccgccattctgcagatgtgacaactggaccaatgtgtctggttgctcttttgaagctctcctcacggtttccatcgacatcagagagggtgagacaaatagttggccagaataaagagaatgttgtgcttgaactacagcaaagatcaatcgaattcagttccattatacaaaaacatcagtctatcagatcatctttgcttgaacgtatgcctgttttggatgaagctagctatctggtgaagcgggctactgctacaaaggcaactatttcagcagataaacttgccccggcagtcactcctggaggccttaagatttcgaatggtgtagcaaaacccccgtcagctcatttagttgatttgcttgatttgagttccgatgatgcaccggcttcaaccactgcttctactgcaacacccaatgattttctgcaagatcttctgggtatcggtggagtgagttcatcaacggcagatgtaacttcaactgcaagcacagatattcttatggaccttctatccatcggatcatctccatcgcagaatggcacgccagctgttggtcatcctggacaagagtctaaacctattcctgctgcacctgaagctattgatctgcttggtagtttgtcatcaagtacacctgtttctgagactaaacccacatctgtggtacctcaagccatggatctcctcgatggtttgtcgtcgagtacatctgtttcgggactagagaaaacagctcacccatcaataacagctttccagagtccaaccttgaagatcacctttgatttcaaaaggcagtctggaaacccgcgagagacgatgattcatgccacttttacaaatttgacatctagtacctttacagattttatttttcaggctgctgttccaaagttcatccaattgagactggatccagctagcggcaacactgttccagcaaaaggaaatggttcagttactcaagggcttaacgtcaccaataatcaacagggccagaaaccacttgcaatgcgtatccgtatgtcttataaagtgaatggcgaggagagattggaacagggccaagtcagcaattttccttctggactatagtgccatttgtgtatattatatcttgttgtgatagctatctcaaattgacgtgctggagacagagaagatttcttttaccctgttccacgttttcctgtattcttgttccccccatttgcgggggtacttagagcaaatagttaatcccggcagttcatttttttgccccatatctatattgtatagttaatcccggcagttcctgtatttttattgccccatatctatattaaattcatgcctgatgtacaccacgcttgaggataatcaggaaaaagtccattctaaaagtaattttagctgtagaaattgcctatgtttctatgaccattgctgaattgtgttatactgatgtagcagagtctaaacctattcctgctgcacctgaagctattgatctgcttggtagtttgtcatcaagtacacctgtttctggttagtttggtttaatgttgactgtgtgagttgtctattttctgtttataaccattgatgatttaacactactcagcagagactaaacccacatctgtggtacctcaagccatggatctcctcgatggtttgtcgtcgagtacatctgtttcgggaactaagaagaaaaacaagacta

SEQ ID NO: 10419 - DNA, 511 bp, Setaria italica
  Peptide Sequence Number=SeqID_76393
caaacaaagtaactacagcatgctcatggtaactaaacctcctaatttgtgcaggactagagaaaacagctcacccatcaataacagctttccagagtccaaccttgaagatcacctttgatttcaaaaaggcagtctggaaacccgcgagagacgatgattcatgccacttttacaaatttgacatctagtacctttacagattttatttttcaggctgctgttccaaaggtaacatcttattgctatattctatgtttgagctgcccactggcactacaaattacccctctcacattccatggtttttgctctacacgtctacatacattagtttttatcaattgatagacaatcactccatgatagtttttgttgcatatcttctagtagtttgggttttgatgggttacatgctacccatgtcccatgctgaccattctttttcattgaatttatatagcttagttttgtagttattctgtactccaatcctagaaacgtgcagata

SEQ ID NO: 10420 - DNA, 726 bp, Setaria italica
  Peptide Sequence Number=SeqID_76394
cttatatcagagaactcagaagagagggagagggagagggagagggagcttaatttggccgccaccaccagcatcatggtgaacgacgacatggagagcggcggcggctgcgagaggaagaagccggcgagcagcagctgctccgacgacatggcggagctggatcgcgccctggcggcggtggagctgccgacgacggtgcagcggcaggactcgctgtaccgggatgcgagccgggctggtggccatggccagcaggggcagcaggaaggttgggcccggaccctgcgtctggccttccagtgcgtgggcgtgctgtacggcgacatcgggacgtcgccgctgtacgtgtactcgagcaccttcaccggcggcatccgccacaccgacgacctcctcggcgtgctctcgctcatcatctactccttcctcctcttcaccatcatcaagtacgtctacatagcgctcagggcaaacgacgacggagacggcggtacgttcgccctctactcgctcatctcccgtcacgccaaggtcagccttgtccccaaccaccaggccgaggacgagctcacgcacgccgacgacgacgacgccgccgtgctcaagtcctcgtcgctgcgtggcagcctgcggcggcggacggtgcagctggcgtcgccgagggatcagcgggcgcagtggctcaaggacctgctggagaccagcaagcccgtgcgcatctcc

SEQ ID NO: 10421 - DNA, 543 bp, Setaria italica
  Peptide Sequence Number=SeqID_76395
gcgagcgccgccgcgcgcctggtcgttacctgcatcctcgccgcgacggcggtcctgctggcggcgctgggcgtgttgatatacctgaagaagcggcggcgcgcggaggccgaggcggccgcgtccggcgcggggaagctgttcgcgctgaagaagggctcgtgggacctcaagtcgttccggatcctggcgttcgacgagcgcgagatcatcgccggcgtccgcgacgagaacctgatcggcagcggcgggtccgggaacgtgtaccgggtgaagctcgggagcggcgcggtggtggcggtgaagcacgtgacgcgggcggcgcgcttgtcgtcgtcggcgcggtggcgggagttcgaggcggaggtggggacgctgagcgcgatccggcacgtgaacgtggtgaagctgctgtgcagcatcacgagcgaggacggcggcgcgagcctgctggtgtacgagcacctccccaacggcagcctgcacgagcggctgcacgggccggaggggaggaagctgggcggcgggctcgggtgggcggag

SEQ ID NO: 10422 - DNA, 651 bp, Setaria italica
  Peptide Sequence Number=SeqID_76396
gcacggcaacaaccctggtcagctacgctcagcgggacgacgcgaccattctccacccgttccccaaaaaccagcggcggcgaccaccacaccacccatggctctggcggcggcgagatccggcctccggtcgctggcggcgcgcgccgccccagcgaggcgccgcatgtcttcctccgtccacgacgacgcctatgagacggccaagtgggagaagatcacctacgccgggatcgtgacctgcaccctcctggcggcgtacaacctctccaagggccacccccacttcgacgagccgccggcatacccctatctgcacatccgcaacaaggagttcccctggggacctgatggcctgtttgagacgaaggaccaccattgagcactgaatagcacaccttctggagtccgtgcatgttttaaagagttatctggttgttccagtgattttcttttccattgaaacctatttgcagcaacaagaaataagaatgacgaaactcttgtgttgacagtcaggtcttaactgtgttgttagctattacctgtcttgttttttctttccggcccacataaaatatgacatcaagttcaaattgcccagtttcaggaaacggtgtcactatatgaaaagttgttgatccaaaaaaa

SEQ ID NO: 10423 - DNA, 309 bp, Setaria italica
  Peptide Sequence Number=SeqID_76397
caatgggtttagctgcacgaggctacgagttccaaagcggggttgaatgagcaaactggatgatattaggttcatgatctgcctacttggacaccccatccacatgctcatgcatttggcgatatataggttgtaggaagaggactgaaacacataaggaacttaactcttccatgccattacaaaggtagcacaaaggggcactctgaaaacattgcctgattattcaagcttaggctggtggttttgtatctgaaattcgaatgccacttcttaaataccattatattagtggaagtaaaaaaaaaa

SEQ ID NO: 10424 - DNA, 368 bp, Setaria italica
  Peptide Sequence Number=SeqID_76398
cttgtgttatttatgctactccgatcctttctaaacatgagactttggatgatcatgagccttgagtgacaacatgtctgtacaaatgcttcaattcatggtacgcgcgagtaagctcatgccatgatattcctgtaattttttgcatatcaacagttggtgttgcgcttccacttccttaattatgagcagagtaatttttcagggtgagcatcagcatgtaactcttgattgcttcctcatcagtctgcatattcagcatcgagaaggggaaggcaaaatcgaccttggttccaactccgctcgacgccagcccagcagcaggagagcacggggactggggaggacgcgagggcggctgcgacgcg

SEQ ID NO: 10425 - DNA, 480 bp, Setaria italica
  Peptide Sequence Number=SeqID_76399
cacttcccgggatggaggaggcggaggagggcgggcgggttggtcgtccgggcggagatgttcgggcagctcaccaccggcctcgagtccgcctggaacaagctgcggggagtcgatgtattgacaaaggaaaacattgccgaaccaatgcgagatattagaagagcacttctggaggcagatgtaagtttgccggtagtgaggagatttattgaatctgtaagtgaaaaggctgtaggaaccgatgttatccgaggcgtcagtcctgatcagcagctggtgaaggttgtaaatgatgaacttgtacaactgatgggcggcgaggtatcagatttggtatttgcaaaatctggtccaacagttatcttgttggcaggtctgcaaggtgttgggaagactactgtctgtgcaaagcttgccttgtatttaaaaaaaatggggaagagttgtatgctggttgctgcagatgtttacaggccg

SEQ ID NO: 10426 - DNA, 332 bp, Setaria italica
  Peptide Sequence Number=SeqID_76400
caggaagcacccaaacccactgcggcaccgcaccagaccaccgcgccatgtccgccgccgcagccgactggctgccgtcagcatccgtgacggcgtccggccgcccggtgctgtccgccggcgaggtggagcggaacctgctcccgctcgtcgacctcgtgcccgaggagaacccgcgcctcgcacccctccgcggctgcctcctcgcgctcacctcccaccgcctcatcttcctccacgaggcctcccgctccgcgcgtggcctccccctcgccaccgtcgtccacgcctaccccccgcaccgcaggcacagccaccaaccccctccgctc

SEQ ID NO: 10427 - DNA, 1765 bp, Setaria italica
  misc_feature (477)..(477): n is a, c, g, or t
  Peptide Sequence Number=SeqID_76401
ttttttttttttaattgttaattcctttaagttaaattaaccgttgtcgtctatttaattggtaaccctttcctttaggtttcgttacatgtaaagtagggtttctctggagcaaacataagacttgttatatcaacaatatttctctgcttatctgatctttcaaccactatagatagaggaccccaactcagtcagcactaatggcataaggctgtcccaactaccaagcgaagcttctgcattgtctcaaagcaaaatccgcagttagccagttccagcattacaacaaagcaaccaccaaccaggcatgaccaaccgatgaaaggacagtattacttgtgtacggacttcaaaatctcccagctcaaccgcatatgcaatggcaatggagcaacaaagctgagcttctcaagatcagagaaattgtggttggattctgaagactgcagccgctgcatagctgctgagatgtcngaaggatcatctgcttgcagtgtagatgaagctgaggctggtcctcagctacgcttccaccacccaaagcgagtccaaagggaagcttccttttcttgagcatttccacatccattgcttgcggaatgggaagaggcatccagttctggtgcgcttggcgtccgtacttgtaatccccaacaattggtgttccaagaacctctgcacaatggactcggagctgatgcttccttccagtacgaggaaatagttctaaccaagtatagccttgcggacaagattcaatcacacggtactctgtcaaagcatcttgaacagaggcaggattggaaccagcgcaaacagttaaacgctccgacttgccatcttgtaatacaatctttgcaagtggagctgacaacaagcccttgggatgcctaggtcttccaataacaagtgcaacatattttctttgcagtacttgttgagtaccatcagctaaagcatcagcagttttctcacgaaatatagcatgcataatggaagcactaagttgggttcttcccagaacaaggacgccactgcaatccctatcaagcctgtggaccagtcgaggtgcttcagaagaaccatcctcgaacagtggcgccagtatatcaatacaaatttcaatgccaacaccaccttgcactggcattccaggtggtttattgagcacaatgatggccctatccttgtatatctcaaggctgcgtagaaaatcaatctcattcttgctaccaaatttctttgtcttctcagaaacagaagattcttgaatgttaaatgggagaaaaagaatatcaccaggcacaagttcatcttttgctgaaacccttctcaaccggagttgatcagcaataccatctgttgaagaggtatcagcagtcagaagattcctcttaaccttgcggaggcggaacagcttctgcaccagcgacgccggcatgtgcgggcagcagcgccgcacccacctgatcgctgtgtcgttggagcacgcgccttctcctccgtcccttcgggagatggctcgcgcggcagcgttggcatcgagcggcgcgaagggagggagctccacccaccgcttcctgctcccctccccaccgccactgcgactgccgttttctagcgcgctgtgtcccgctgcggcgcacagaccggcaacgtgctgttttagcggctttggagcggcggcggcccggcggcggaagaggagcggcgccgtcctcatcgccattgagacttcggccggtgtcttctgtcttctgag

SEQ ID NO: 10428 - DNA, 625 bp, Setaria italica
  Peptide Sequence Number=SeqID_76402
tttttttttttaaaatcatagattattatgctgctcaaattattaaactcaacaataatatccatagcggtgtacatagccaaatatagtagactttctaaaggcacgggtcaagctgaggaaaacattacaaagcatagcacaataacctagcttctatacaaatggggcaaagggtggaatcacatcaccaaaaccaccaaaatctctgctttagtgcccagccgctgcagcatcctcaacgagcaacctcagcctctggcttaagacatcaagctcatccatcctctgcactctccaccgctttgcaagctcgctttcctcagcactcccatccgcgttgccaccattgataatcccgttagactttgcctccctcaggcacgcctcaaacacatccagcacagcatttgccatgcgatgctcgttgctacatggcaccaccattttttggtctccgttcatctcattgccaattccatttgggagagcagccgcggcctcaggctgctgcacaataacaccaaatctgctgtcggctacaagagcagcaccttcgtggtctcccaggtgcccgctttcctgctcaaggtagaacatatcctcgccattggaaacttccgga

SEQ ID NO: 10429 - DNA, 435 bp, Setaria italica
  Peptide Sequence Number=SeqID_76403
gttgtggtagacatggttctgctgtaaattatgaaagaatctcctgcagttattaaattctgagtttctgactagaagtttagtcgctttagctaaagtaaccttattctggttttgttcttgattttgtgaatgaaggttggccatcttgaggaacgttaccaggaatgggttcaccaacctatcgtcagcaaggagggtccacgttttttcggaaatgatgtcctggaggtaacgtattccatcatattggtataccgagggttttggaaagtgaactgtattaacagaatttttgaatctccagttcttgacacgcacaaagtggtgggctgtgccaaccatatggctgcctgttgtttgctacttcttcgtgaagtctattctgatgggtcataccattcaggaagtagttctgatagctctgtttggaat

SEQ ID NO: 10430 - DNA, 888 bp, Setaria italica
  Peptide Sequence Number=SeqID_76404
ttagtactaagtaaacccctaacttaaatttagacaaaacgcgcacagctcagcacgggggtgtggtgggtccctctggcggcagactggaggagagggggactagagggaggcgcgactcattctttttccagatagccccccgcccttcctctcttattcgcgcccctccctctcgcgtcatccgctccgctgctcctcttcgtcgtcgttcgcccctcctctctctcgccgcccggggaggagggcggctcgtcgtcacctgtcttgcgcgtaggagtgcctctgctgctgctctggttggggaagatggttgtccaggagttcactgttgatctgaacagcctcttgtttcaggttgccatcttgaggaacgttaccaggaatgggttcaccaacctatcgtcagcaaggagggtccacgttttttcggaaatgatgtcctggagttcttgacacgcacaaagtggtgggctgtgccaaccatatggctgcctgttgtttgctacttcttcgtgaagtctattctgatgggtcataccattcaggaagtagttctgatagctctgtttggaatatttatttggacattgattgaatatactttgcaccgtttcctattccacattgagaccaaaacctactggtaacaatgcttcatccttgaaggatccaacatcgcactatgtcttccttctgctaatcaaattgttgttgatgcactgttgtaggtcaaacaccgcacattaccttcttcatgggtgccaccataagcaccctatggactctctcaggcttgtatttcctcctactgcaacagcaattttgtgtttcccattctggaacctggttgctttctttgcaactccatctacactaacagcattg

SEQ ID NO: 10431 - DNA, 1304 bp, Setaria italica
  misc_feature (1244)..(1304): n is a, c, g, or t
  Peptide Sequence Number=SeqID_76405
cgcacccctgcagaaccccactaattgcaaaacgcgcacagctcagcacgggggtgtggtgggtccctctggcggcagactggaggagagggggactagagggaggcgcgactcattctttttccagatagccccccgcccttcctctcttattcgcgcccctccctctcgcgtcatccgctccgctgctcctcttcgtcgtcgttcgcccctcctctctctcgccgcccggggaggagggcggctccggctccggtgaaggggccgccattgcttccgctgctgctctggttggggaagatggttgtccaggagttcactgttgatctgaacaagcctcttgttttccaggttggccatcttgaggaacgttaccaggaatgggttcaccaacctatcgtcagcaaggagggtccacgttttttcggaaatgatgtcctggagttcttgacacgcacaaagtggtgggctgtgccaaccatatggctgcctgttgtttgctacttcttcgtgaagtctattctgatgggtcataccattcaggaagtagttctgatagctctgtttggaatatttatttggacattgattgaatatactttgcaccgtttcctattccacattgagaccaaaacctactggtcaaacaccgcacattaccttcttcatgggtgccaccataagcaccctatggactctctcaggcttgtatttcctcctactgcaacagcaattttgtgtttcccattctggaacctggttgctttctttgcaactccatctaccactcctgcattgtttggaggtggtctattgggatatgtgatgtatgattgcacccactactatctgcaccatggacaaccatccaaggacccagcaaaacatctcaagcggtatcacctcaaccaccacttcagaatccaagacaagggctttggcatcacctcaacgctctgggacactatttttggtacattgcctccatcggcgacaactgggaagaagaactgacacacataacagaattcttggcatgggaaattctagggcatttgtaatatattcaagcggtacgattctagtaatgtcttggtgcgatgggtttcacatgtccattcagttcgaagttcctgtgtactgatgtctgttaatcttattctgatgtgaagtgatttcattagctcatcattctaagcattgccagtggtactaaaataatagtagaatagtaatagaattannnnnnnnnnnnnnnnnnnnnnnnnnnnnnnnnnnnnnnnnnnnnnnnnnnnnnnnnnnnn

SEQ ID NO: 10432 - DNA, 815 bp, Setaria italica
  Peptide Sequence Number=SeqID_76406
taagtaaagttaccttggtaaaactaattgttcttattccttggtagtctaaaaatttatttctaaaagtctaaagtttctatttgtgccccgagtcattttgaatgtctttctactatggttgcttgtgtggagccagcactcgtagatcctgtgtgtgtagaaagtcctggaaacatgtctatcctggagcaaaattattcaaaagcaaagttcattgtgcgtcttaaaagacgaaatggacgggtgaagcacttttatgaggacttgtatattgatggaaatgatatcaaatttgattctgctcctgtaagtacggaagtgaaccaaagtctagtacctaaggttcagttcaatcttgagctgtcggaaaaagagcgcactgacaaggcaaatgttgttcttccttttgaacatcaaggaaagggtgaacctattcgaatatatgatggccgcggatccctacttgagggtcaacgagaccccaacttagcaccagcccttgtggatgaaatagctcccaaatctggaactgcgaagggtgagatacattacttccgtgattcagatgacgagcaacctgactcagatgaagatccagatgatgacttggacatatgagtaggcaatgtatgagctctttaccttagttggagccatgcacagatcaatccatggtaatagatggacccattcagaaatgcaatcttttttgggttagccttttttttagtgcttctatgcttcagcttgctaattggaatctcacaaatactgaagtactaaaaaactggtgcttaatttaatagtgtgaa

SEQ ID NO: 10433 - DNA, 1146 bp, Setaria italica
  Peptide Sequence Number=SeqID_76407
cgcagtagtgttatattagcgccccaacctccgatccctaatcaccgtctaatcaggctcccctcccatggcgacggcggcggaggtcccagtgtcagcgccggtgaggacagtgaaggtcaccaatgtctcacttagtgcaactgtacaagatattaaggagttcttttccttttcaggagatattgaacatgtggagatgcaaagtggtgatgagtggtctcaagttgcatatgtgactttcaaagatgcacaaggtgcagaaactgcacttcttctttcgggtgccacaatagttgatctttctgtcatcattgcacctgctccagaatatcagccacctcctactgcctcagccccaccgatgagtggaaccagagttccagttggtgcagacaacaacgttgtccacaaggctgaggatgttgtcagcactatgcttgctaagggtttcgtcctaggcaaagacgccgttggcaaggccaaagcattcgacgagaagcatggcttcacatccacagctggtgccaaggtggcctccattgacaagaaaattggcctgagtgagaagatcaccacgggcacttccatggtgagcgagaaggtcaaggagatggaccagaagttccaggtgtcagacaagaccaaatccgcgtttgccgctgcagagcagaaggtgaacagcgccgggtcagccatcatgaagaacaggtatgtcttcactggtgcgtcgtgggtcaccaacgcgttcaacaaggtcgccaaggctgccacagatgttgggacaatgaccaaggagaagatggccgccgaggagcagcacaagggctctggcgcttcttctgggggccactcgtatacacccatccaatgattgtttggctggcagttagttatgtgccttcccctcgacatgttgtattattggtggatgtaaaacatagatatagaacagatcaggcctcctgccatatgttcatcgttcccatgtgttaaatttcgtactgcaggattattttttcttagaacagaaaagtatgatggtgataccaatgtattccggtggcttatatgaattctggttgggatttggatgaactagtgatgaatttgtgggggcgttactcgaataatgatatgatggtg

SEQ ID NO: 10434 - DNA, 858 bp, Setaria italica
  Peptide Sequence Number=SeqID_76408
tgtcttgatacactgccccaacaaaccagactttgatttccacaaatacatgatgcgtgctcttgaacacgagtttaagagggttgtcggtatcagctggtatttgtggctttttgtcatcttcttcctgttgctgaatataaacggatggcacacatacttctggttagctttcttgcctctatttctcctgcttatcgttggtgccaagctagagcacattattactcgattggctcaagaggcagcagcatcattatcaaatgaaacggaggtttcaaacataaagccatccaagggtcatttctggtttcgcaatcctggacttgtccttcatttgatccatttcatcctattccagaactcgtttgagattggtttcttcttctgggttctggtatcagaggggttcggttcgtgcatgatggaacggaagccttatgccatttccagacttgttcttggagtgatcattcaagtcatctgcagctacattactctgccattatacgccatcgtcactcacatgggcggagagatcaagctccacggttttggctcggacgtgcacgagtccgtccacggctggctcacccagcggaagaaaaccttctggaataataaggccggcggcgacccgaccccgactccggcggggaggtgaaggtgacccgtgcttcacccagcgagcggatggggagctcgcgccacatgctggcgccggcgccgccacccgatctcgacgagatcgtcaccgtggacggcgacgtccacggccgcgtccggatgtgaaggacggagaggcgccggccttcccaggtgccgtgcgcgtctggtgaagtgatgggcgggtggatg

SEQ ID NO: 10435 - DNA, 528 bp, Setaria italica
  Peptide Sequence Number=SeqID_76409
catcgttcatactcttatgactctgttattagcatattatcaccatcatctcgcatgatataaatattgatattagtagtagaaagtagaaacaggcgaatcagcaaaacagtcgggtcatggcataaatatactatacaagcacaaggacgctctccgtgcctccaaggacagtggcgccgtcgccgtcgccgtcatcgggtccggcgcccttggggacggtgacgacgagctcgccctcggcgtaggtggcggtggccatggcggggagcgtgcagggcgggaggcggaatcgccaccggtcgagctcgaacgccgcggccccgtcgtcgtcgccgtgggcgccgccggaggagaggtcccggacgacgaccttggtgacccccgggtggatctcgacggcgtgcgcgcgggcgcccgcgggggagaacccgtcgaccgccgcggcgacgaaccgcagcgccgccgcgtcctcctcgacggatacgtccgcgtcggccgcgaacgggagctccagcaccttggcga

SEQ ID NO: 10436 - DNA, 1024 bp, Setaria italica
  Peptide Sequence Number=SeqID_76410
cctcgaccgcatcgcccgtccgcctccatggccacctccgccctcgccacgctctccgccaccgccgccaccgccgccggcaagcgcctcctcctctcgcgccccaccacctccctcgccttcacctcccgccgcctagccgccgcgggccccctccgcacccgcgggttcctcggggctccaatccgggccgcggcgtcgtccgcatcggcccccgcggcggcgaagaccatcgcggtcggggaccgtctccccgacgcgacgctctcctacttcgactcccccgacggcgagctgaagacggtgacggtgcgggacctgacggcgggtaagaaggtggtgctcttcgcggtgcccggcgcgttcacgcccacctgcacccagaagcacctcccggggttcgtcgccaaggccggggagctccgcgccaagggggtggacgccgtcgcctgcgtctccgtcaacgacgccttcgtgatgcgcgcctggaaggagagccttggggtcggggacgaggtgctgctcctgtccgacgggaacggggagctggcgcgcgccatgggcgtcgagctcgacctctccgacaaacccgtcgggctcggcgttcggtcccggcggtacgcgctgctggccgaggacggggtggtcaaggtgctcaacctcgaggagggcggcgccttcaccaacagcagcgccgaagacatgctcaaggcgctctgaattgcgacccctcctcgcccgccatggtttgctgtcccccttacttgaaaagttagcttttgtctctgaataatcgttgcggcaacggtggcttgtgttatgttgctacctcgactgagtttagtggctggtgaatactgcgcactgcacctcagcatatgagttgttatcttgatgtgaaggttctagcgaacatggcagtataggcatgatagctcgtgattgtgaatgtgctgtttggcaacttctgatgacatatatcagttttgtttgggaattagtacttgtttgcgtccgttctaaa

SEQ ID NO: 10437 - DNA, 681 bp, Setaria italica
  Peptide Sequence Number=SeqID_76411
ctcggcgaggtcgtggtagaaggcgtactccgcctcgtagtcgtggagatccagctccgccttctggttgctgtggtaatggtgcttcgcgtcggaagatttcccaaagccgaacacgctgactctgtcgcaaactcccaccgcgaccatgatggcctgcatcccggacgagtaatggaacatggcggcgtcgtgcgcgcgatcccactcctcggccgcgcggccggtctccgcgacgaatcggcggagggagtagtacttgacgatgcgggcgcagaggacgtcgaggcgggcgtcggtgacggagatgggggagccgtggcgggaggatgaggtggcgttgcaggcggcgacatcgaggaaatgggcggcctggcagatgtagagcaggatggggacgccgtggccgtaggggtggcagaagcagccgggtcgtcgcgcgcagaggtgaaggatgttgctgttgatgaaggagaagttggtcttgctgccgacgtgcgcggcgtaacctgcgatgcgggcgttgttgaggcggaacacggcgtcgtgggagtcgatgagagcgccgtggttggcacgaaggaggatgccgctgttgccgacgacggcgcatgaggggatgcggccggggagggagagcagggaggggaggctgccgaggacggcggggtcgtagcggcg

SEQ ID NO: 10438 - DNA, 507 bp, Setaria italica
  Peptide Sequence Number=SeqID_76412
agagcacggtagctggtattgttttggcaaaagtagaatcttctatcaaattgtacagttgcgggattgcatatggatatccctacattttcacgaaatttgttaagagcaccataacctactcaggatcatacgtggtaattgcaataattgtcatctcttacctttcttagctctgcattcatccctggagttagagatataattaggaacccaaggtaagcacgctcttaaaataagcaatagtatgcaggtaactatatgaatttcaaatctataagcaaacattacaacagcatactttgaaattatttgcaagttttgaaaaaaaaagaacattgagattaagatggattcacataatctcttcaccaaactaacaaagccatcataatgatattcgaacaatataatatgataaggtaatgtaaattgatttcttgcaatactttttttaaatgcattacattcctgtcgcagcctaagcccttgcttgtaactcctctc

SEQ ID NO: 10439 - DNA, 312 bp, Setaria italica
  Peptide Sequence Number=SeqID_76413
aaaggcaggacaaatactcctgttatcttggatacagaacctagcagacaaacgaggggattttgctggagtgaaaggaggaactcaagttttgaaatgcttccgtggttgatatcatgtaccatacttccactgatactgatgtcgatatcagatgattgagtatgtgaagcatctatgggagtccactgaagtaattttaatctagtggcacatgtcataggtaaagaatatggattcagttttcctatggccccatgaggacctcagtgtaatttggtgcaatcaaaagatgtcagttgattaatggac

SEQ ID NO: 10440 - DNA, 595 bp, Setaria italica
  Peptide Sequence Number=SeqID_76414
tttcttttaacagctcttaagtaaatttatttgtaagacgtttagtaaattcagaattttttcctcacggagatatttacatcttgtctccaagcatactgtgcaactgttacatctgttatttgctgactgacggaagggggacaaaaacaggatagtaggtattcaattcaagatgctcgaggatctgtcgggcagctgataggtacgacgaatggccatcaacaagctcggtaacgtcaacctataaattgtacagaaaacgttatgcaaaacagtacaagatcaacaaacttgatcaaaggcgcaagaatggtcgtcggcatcagcatgcttacattctcgacaccaggcacatcaatggcctggatgccagctaatccttggctgagcaggctgcatcagagaattagtaagccacaaaagaaatcatcaaaactgttcagcagtggctatccgatccaaaatcaatcccacttcatataccttgctcggaaggtaacaccgagaatccagtcatctctcgagtacacgttcacaaatccttcccgcaacccatccttcctggcaggctcccaccgctcacccttcaccg

SEQ ID NO: 10441 - DNA, 1659 bp, Setaria italica
  Peptide Sequence Number=SeqID_76415
aaaatcttttaacagctcttaagtaaatttatttgtaagacgtttagtaaattcagaattttttttcctcacggagatatttacatcttgtctccaagcatactgtgcaactgttacatctgttatttgctgactgacggaagggggacaaaaacaggatagtaggtattcaattcaagatgctcgaggatctgtcgggcagctgataggtacgacgaatggccatcaacaagctcggtaacgtcaacattctcgacaccaggcacatcaatggcctggatgccagctaatccttggctgagcaggcttgctcggaaggtaacaccgagaatccagtcatctctcgagtacacgttcacaaatcttcccgcaaccatcttcctggcaggctcccaccgctcacccttcaccgaaacaggtgcgcctaggagtacaaccctctcgacgagtccctcattgtcgcttgacaaagctagctcttgtaaacacttgaatataactcgtgctcctaacgagaacccaatgagagtcacaggcctgtttccctgtagtccctttagaagcacttcagcgagcatttttcctgccttgtctgatctgtcaatagcaacagaccatttactatcaataaaatcagtagctgcaagcaacgttgcaggccaagcaaatgctgcaagaagaccacttaagacagttctcattgcaccttgtttcatcaattccattgcaagtcttgatgtcagccaatcctgtattgctgtactcactgcaattatatgcttagactcccactgaaggatgtacttctctaggttatccttccatccttcccaaggtttacagaagtcctcctcgtcaaaagcaaatccagaaaccaagatgccaaccgcaaggcgaccctgattgtggttatcaccaataggtttgaactcaaattctttcacttttccaattcgtcttgccattttgcttcccgtcaagccagctccagcagctccaaatgaagcagcaactgccacagagccagcaacagatcctgctgcagcagccatagcagcaaatccactagctcctatgaatgggacaagtgtaccgagtgttggcgcaagagcaccgaatccagcagcaatggctggtgcagctaaaccccctgtaatagccagcaatgctcccccagtcaaggcagctgcaccaataatgccaccacgcttccatttttcccatttgctcttcggtgatgcactttctcgctcttgttcttgctcctttgctgcagccatggcagagcatgcgaccattacctcgatagcttccattttgatccacttgacgtcaagccatgttgctagcaaccggagagcaacacgatgccgagcatcataaccctttctgaagtgagacgacttcctgtcctcttcctcttgtgatacaggtttatcagccacacaggcagagagaagcgcatatagcaatgccatcttgcggtgatggttagcagggacatcatctaaggataacttgtcaattccaagcaagttctcagctgattctgccgttccagaggtagaagtcatggagtctttactcttctctttgattttctcatccggcacggcaccacttcccaagctcatcaccatgacatcaactgctttggcc

SEQ ID NO: 10442 - DNA, 364 bp, Setaria italica
  Peptide Sequence Number=SeqID_76416
tcctcgctccgccgtgtgctcggcgtcgtcggcgtaccggcggcggcggcggcagaagcccgtgggcggcctcgctgggcggtgcaacgccgtgctgaagcagcacaagacgaggctgtacatcctcggcaggtgcgtctccatgctcctgtgctggcacgaccatgacgccgactgatcgagcgcagccgagcttgctggaagagcactgcctttgagtgggttttggttggttttcagtgtagggcgggttgagatactagagactaatgagaaacggtaatgcggtgcgctgcatcaaactggctgataaagtcgagaagtgtaaatggatggaatatacatatatactgtaaaactgaga

SEQ ID NO: 10443 - DNA, 1084 bp, Setaria italica
  Peptide Sequence Number=SeqID_76417
cttttcagtaacatcctgtagaagatctaggtagccttcatgaactgagaaatgctcatatagtgaagtgttttctgtttgcagagtctgaatagggctgtcttttacaggatttcctgacttcatcagatcaattataccctgtggtgcatgtttcttgcaccaccgctacatgaggggcttgaatcagaattgtggctgcacgaagagtgtgagggtgaagttgatggaacaatgctgtttgatttgtggtgttggtgcttgtcaaagtcggtaagattgctctgattagttggaggaatggtcatacttcctgacaaattgttttcagatgatattgaggtgtttgtgagatccttgtacaaggtgttgagctggaaagatgtctctgctccatgaaccgaatcaatgatctgttgaagctttcttagagagtggtctaccttcttaatcttccgtgatggccagcgggttataccatgctgtctgcatattcttttgagggttgtagggcacactccaaggctccttgctgcatctttcaggctaccagcgaagtactgccgaagaacctgcaagctcacagtcttctctgcctttgtacgcctttttgccttgctgccttctgcagctgactgaacaccagatagagatggaccctgccctccagatgagaacattccatgcattcgcaatgcagctaactctgattcttgctgtgaagtttctgctagacttgtccaagaggcctctcctctacgatctgctgaattgcctccaaaggacaactcctcagctttgttcttcccttgaggagtaaatgagttcaactcattcgtttcccgcatcgcctcgtcttccatctccttgtcggtgaccactcgtagagtttggcaaacacttcgcatggtacctgacaaggagtccagaacttccttctgctcttcgagtgcttgacaatctgttggcagaaagaattccagcacgaagtcagccgtcccagtgcgcgtgcaccgcaatcggatcgccaccgcaccttttaatttaaagattttggcatggtgagacaatggatagtccagtt

SEQ ID NO: 10444 - DNA, 1523 bp, Setaria italica
  misc_feature (1)..(79): n is a, c, g, or t
  Peptide Sequence Number=SeqID_76418
nnnnnnnnnnnnnnnnnnnnnnnnnnnnnnnnnnnnnnnnnnnnnnnnnnnnnnnnnnnnnnnnnnnnnnnnnnnnnnncttaaccaaacacacccttaatgggtaaggcagtagacattctttccaaagaggcccatggtgtagcatgagtgtacaatacaattttttaactttttaaaggacaaacaaattgaacaaagtaagtgtcctatcatcctatttctagaactaatccttgatgcagaaaattgcaatttcagaagcagaacttcatgtccattgaacagagcatgctggtcactcagccaatgaaggaatgttgtcttaagaactgttgtagctgatcaattatccgaaaacagccttcaacgattattgcacatcagtattccaagaaccaaaacatacttggagagttggagcaaatctgatttatagatacttcaccctatcaaaccaatcaactgcattgtctttcatagattcaggtgcatcagtgagagtatttacaagcaatgcatacttacttcggtttatcctaattcctagaattgatcttcccattatggagtactctagtttcatcatcagttcctaacctgggcaacagatcgaagactaattgatctaacagcagaattgggacgtggtgtcacatagtaccttgtggactacaaaatgtggactctcagtttcccaagtataaaaccaagtaatccaggtagaattctgaatgaacctcgtaaagtggtgaggctcatactgttgtcatgacaaaccagtgggaccagtagtgacccttgtagctggactaacagctaaatgaactgaaattttgattgtttggatgtctgctagtttgtatacatgaaagcactcctgtaaatctgcatcacatgtcatcaagacccactctgaatcatcatccaagtactttaaaatcaaggagcttgtgtctactatactcaaacgttttgctatctcatgcttcagttcttgaaagtcgcacttgggattcaatctgaatctcaccttttctgagccaaatgttgcctttactctcatatttgcttctgcattctgcttgggggatgatgggcttcgagaagaatgtagtccaccattagccttttcagtaacatcctgtagaagatctgtcggtgcctcatgaactgagaaatgctcatatagtgaagtgttttctgtttgcagagtctgaatagggctgtcttttacaggatttcctgacttcatcagatcaattataccctgtggtgcatgttttcttgcaccaccgctacatgaggggcttgaatcagaattgtggctgcacgaagagtgtgagggtgaagttgatggaacaatgctgtttgatttgtggtgttggtgcttgtcaaagtcggtaagattgctctgattagttggaagttaggaaggaaataggtacaataacttacctagaacaaaattagttttacaagaatagaataattagaaggtagtttagtagaagaataaccta

SEQ ID NO: 10445 - DNA, 318 bp, Setaria italica
  Peptide Sequence Number=SeqID_76419
tttatccgtagggaattggtgtcgatcggatcaacaacaatttggtattgtagctataaataatgtcgatgaaaggagtcagaacacgtatatttaagctttgtttttttaaacctatatttaagctttggttaagaagctaagtgtaatattatggaataagtcaggatggcctcgaggttcactacctagtcggggaattaaattgtatttgctcatttttcatgtgtaatgtaacaaatgaaactgtatatgtgtgcttttctaaagtacgattgtatccaagaaaccaatgcgattggtatttaaattgttttt

SEQ ID NO: 10446 - DNA, 278 bp, Setaria italica
  Peptide Sequence Number=SeqID_76420
agctgcatcgtcagcggtgtgctcgatgacgaagctctcgatcttatgaagtgactcaatagcgatatcagttggtgacagcttagagacatcatcatgaccctgtttagatgcaatgtctgcaaatgccacacagacgtgttaatccatggggcattgaaacaaaaacaatgatcaggtgtcaaaaccttaccttctagagaaacccttacatccgcatttgcataagcatcacccctttgctccgcaagcatgctgagcttagagaaggcctaaca

SEQ ID NO: 10447 - DNA, 552 bp, Setaria italica
  Peptide Sequence Number=SeqID_76421
tttactttaactttaagttttacttttttagttttttacctttaccttttaattttttattttctttacttttgttttctttaaagtttaatttgttagtttaccccttaagttactttcttagtactattaattcttccccacagtacttttccagaacccatcattcctactaagtaaatacacctcccgttcaagtagaataaaacttcttctgattttctcttcaacaggagtgcttcgtcaacggagttatgcaagttttcatgtcctgcataagcgtaagatcatgtagaaaatgtcaatctgatattctgactgaatttggcgtatcgcatgccatgaacttctgataaatctaaatttctccgtaatggatcaaccatagggatataagcatgaagctccatcttcctattttccttttctctctccaataatccaaatcccaccgatttatcaatttgaaacacccgcggacgaggcaaaccactcatagagtatagatcttttcccgacgaacccctacaaaaccaaacccatagaaaataa

SEQ ID NO: 10448 - DNA, 1318 bp, Setaria italica
  Peptide Sequence Number=SeqID_76422
tttttttaatgagccgagccaacttctgactgaacaataacacagtcggatgcaatggctgtgatacagacagtttggatgtaaagaaaaagaaaacccatcaaccaatcttttacatttacatcgtccatgactattgattgaatggatttgtgatgttggtaaaagtgaatgtttacatcgtagccattccatccgtaaacgttagcatcacatgcacgcattatatacagctgtagcctataccttaaatcctatgtcacactattttttttttcatatatgcacaatttaccatgcaacaaactgttggcactctcatagaagaaatggaggtttcgagctaaagggcgttgcagtaactgaaccgacatgagtttgttaacatggattctttccaattttccactctctgttccagcttttgttgcttcaacgatgtcctgttcaatgcgcgttgagtcttctttatatcacactcaatggatctaatccgcctcattgactcctctatcaggtcttccttttctggaggaattcttggagatcgctggttcagctccattaccatgttttctagcctttttagtctctctaagcatggggccgtgcaatctttgtcagtgggtccacctgacttcatacctggcatatgtacatgttcggcagtggaactcatgttaatgcagtgggagactaccctccttagagccgagaacagttgagccactgaaaggagactccatagaaatacaatgacaactttaatcacttctacaagcaacttcagcaattggagattccaaacagaatggcacaactgaaaacgtgccactgttgagccaactgtagttagcttgggactgaccatatcttccttcctagtgacaggggtattaggggaagatagcatcttgagtggaatgctggatgaaccagatgagtgggaattctccaacttcatttgcacatctggctccatgtcctgacaagccaaattctcattggagagatgcccagtttccattagtgttgattctgaaagatcatctgaagtcatcatctgattccagggtcctttgtttgacctaagacagcctccctcacccgagcaagagcaggagccaccgagaaaatgcggcagttgactcttatcaatttgttcaagcagtctgtattggtatgtttctcccaacacctctatcttgtcagctgtatttggatcaattaaacctctcaaagcaccccacaataatctgaaaccactgccagcattaacaatgaacatcctatgcaaaatctcaggataattatcacc

SEQ ID NO: 10449 - DNA, 560 bp, Setaria italica
  Peptide Sequence Number=SeqID_76423
aagaagagtaaaacagttgaagagaacgaggctgaggctgaattccggaaagaaagaagaaaagaagagtaaatcaattgaagaggatgagactgaggctgaggctgaattctggaaagaaagaagaaaaagaagagtaaaacaattgaagaggatgagactggggctgaggctgtagttcggaaagaaaagatgaaaaagaagagtaaaacagttgaagaggatgaggagcaagtcggagtggtcgaccattatgatagtgatggcgaaatgctcctcatcctcttcaatcgttctactcttagtagaacgattgaagaggatgaggagcgagatagcgatgatgaaatgtgcactcccaggagaagaaaatctggagaaagaagcaaatccctgaagaagagcaagaaacagcatatcgcctaggctgagtatcgtttatctcattacctgccttgtacttgattctgtagaattatgcatttttgtgctgtagtttatccgagacataattttgtgatcccatttgaaactcagcaagtgagttgcaccttccattt

SEQ ID NO: 10450 - DNA, 357 bp, Setaria italica
  Peptide Sequence Number=SeqID_76424
gcgaccgacttcgcggctccgcgccggcgtttcccgctcccgtcccaattccgttgccggccaaccaaccttgggggtcgggacactcgcacgagcccgagacagccgcgactcgcgaggggcagcagctgcacacctaccaacctcccaggctgggactgcccgtaaatgcggacgcgggcgtgggggcgcggggcggtggcgcgcttgatgacgccattcaatcgccgagcggcccacgcctcctcgccccacctgctccgcccctgctgctgctcctcctcctcttcttattccaccgtcctctctcgcctccgacgccacttcgcctcttcctcctcctccccagcataccac

SEQ ID NO: 10451 - DNA, 740 bp, Setaria italica
  Peptide Sequence Number=SeqID_76425
gcccgggcttggtgttcatgtcagtttccttcaaacttggtgatctcttcagtgacctctgcacaaagagctcctcattgatgtaaggaagctcctgttggactgatttgttgccatcaagcgacgagaaggatgagcatgaagaggaggacgaagaagctcttgatgattcgattgaaagactgctgttctcagtcgtacatttgctgaatgttttctccagaacgatctttgaagtacttgaactttgaactgggacattcctgctgctctttggaacagtattgtctggagctgacggcggaggcagcctcttctgcgcctgccggccgccgcgccggccactcccggtgatgagccgttggcggtcgaagatctggaatatgccggacatgcaccccatttgccggtcgagctcccgcgcgtcgtcggcgaaggccgcggcgccgcgcatcctcaccggcatcgtccgtgctcctccaagctttcctcgttctcagcccccgatcaggcgccggagcaaggtggccgcccaaggcgatcaccagctcgcattcaggggcgctacagctactgatggtcaggccgcagcgcaccaccgccaccagagaagcttccgaagcagaggggggagccagtcacggcgcaagcaaagctgcgagaagcagcgtgcacacgcagatgcaggggcagatatagaagctggagtctcttcttttcccttgggatgggcgagttca

SEQ ID NO: 10452 - DNA, 2873 bp, Setaria italica
  Peptide Sequence Number=SeqID_76426
gtacatgtgcgtcagaagagtttattaactattatatatagatttcctcacttcttctagcactgatggcagcaagattagtattgaggaacatttatattccttctacagtttagtcttcagcaaaatataaaaggttacatttactagagcctaagcttcttaacataaacaactactaccacaaatactcagtttacactactgaaagaaagctgcctccgcagcttccattgtccaaattgcatcttctctgtagccccaccatctatgacctcgttgataaggtttttgaatatgtccttttcgatttccaaaaccatgtcatgtagtatggtgtcaaagctcatccagtctttagtgatatcctcatgtactggcatgttttcattctcatcctcttcggagcattttgttagcctgtcaacctcagtgcacaaatccttgaatagttgccacccacttaacttccttgactgaagaaattttactggctgacttcgaaatctgcagatgttcatcttctgtgctatggtttcgtttaccatgtcaaacacaagtcttcggtgaagctttcctgtgcaaggcttagaacatttcttagctgcactgacagtttgaaattctgaagcaatgtctggttttgtttgttcaagaatgaggaagagctccgggttgatcagattacttgatggtcggagttgaccaggtaatgctgtgaaactaagttctttatgcaaaagaccagatgccaatagtatctcatagatatagtgatgatctttatttgcagcaactgatgccatgacttctttgatatttgcagcttcctcgttcattgattgcagttgctcaagcttctggatgaggaactccaagttttctggtttaatctggttgacttcactgctcgccttagactgtggtgtgtcaggcaggctgtttgggttccagcactcatccgaagaatgtgtctcaccatctttgaatgaatctgaaatccttttatgatagaaggatgtgtcgaggacagagacagggctcgggatgttgtccagtgaatgaatattttggtctgaacccagaattgaaggacccttgtgacttgatgttgtggcaactttgcatggttgaacaaatgatgagctgacacctgggggctttggacaatccatgatactgacatcaacttgctttgctaagctgattctgctccctgcactcggcaatacctcatcacggtggcttttcacctgagaaggctttgatcttattcgtccttttggggaaacagcttcattggacttcttgcttggagattttggtgagaccggcggacgagacctcctttcggactctgctttcttttgcacatttctggggcttgatgaacctgtaggcctcggtgagctggcactgctgacaggttcttctgacttcgattgagctctggacatccgaagatgaatcttgtcatccgtgccattgaaagatgaatctctgaccggcaacttcctcaggcttctgaggcctgcaattggagcaactgaagcaagtgaaaccccaggcttcttggtggttcttgcaggcttcataaccacaattggaggctggaagtctctgggctcggtggcttgatcataccctgtcctctgaacagccactgatccagcattgctgtcattctggctcttagaatcttttgcattcaatgcccccaatattctgagagccctgaagtccttgttattacactctaagaagtcgaggcccccgagccttctttctatgtcagcatagacagatgcagtccttggcctcccttcagcttctcgacattgttgtgcttttatgttgttggcacttctctcctgctgcctccaaggagccgcttctgtgagaattcttggggaaggcttggttctgagtacccaagactcattcttcagctgtaacatgcaggaatcctggcaagtgcttctgggcgaacgtgatggattctcatattgagtggcttgtgcaggtctcggtgatcttgaagtctcatggttatcagcagtcagcacccctgtagcatctgttgcttcttccaaccccattagcttggcaatgacactgttggctctcctatggcttggagaatcttgaggcctcaaagtatccaagagaatatcatcagttctcttgtaactgaagttattctggcgtgagcttggactcagagactccttcctactgtccaaggacaatctagggagctctttgggccttgaagaaggcctcttgctttcctgggtttcggctggccgcaggagtcttcggtcatcacatgagaagcgtgattgctcctgcaaacgcctgttagattcagtgacagttgcaggaacctttgtgctcctatcgatcccaataatacaggttccatccattgatttggacagcagcagcggccttggtgagtccttgtactgcccatttctccgtgcctcctgtaccgaggtttttacagttaggcctccggattcccggttgatggagtccttcactatatctctgaaaccgacattaggatgcccgggcttggtgttcatgtcagtttccttcaaacttggtgatctcttcagtgacctctgcacaaagagctcctcattgatgtaaggaagctcctgttggactgatttgttgccatcaagcgacgagaaggatgagcatgaagaggaggacgaagaagctcttgatgattcgattgaaagactgctgttctcagtcgtacatttgctgaatgttcccgttcaaagttcaagtacttcaaagatcgttctggagaaaacattcagcaaatgtacgactgagaacagcagttctttcaagcg

SEQ ID NO: 10453 - DNA, 432 bp, Setaria italica
  Peptide Sequence Number=SeqID_76427
catccatcaccctcttctttatgttctcgtaggctgaatcagatgatccaccttcttcgtccatgaatcgtatagatgagtacattgttttcaagcctcttgagagagaacagatcaacagcatcgtcaaattacagctggcaagagtacaaaagaggattgcagatcgcaagatcaagcttgaagtctcacctgcagcaatcgaattcctaggaagccttgggtatgacccgaactacggtgcaaggccagtgaagcgggtgattcaacagtacgtggagaacgaacttgcaaaaggcaatcctcagaggtgatttcaaggacgaggacagcatcgtggtagacacccaggtcacagtgccatctaatggccagcttccgcagcaaaagcttgttttccgaaggtcagtgaggaatcaaaagcagctgctg

SEQ ID NO: 10454 - DNA, 1944 bp, Setaria italica
  Peptide Sequence Number=SeqID_76428
agatggcatggcagtcaattgtctcatcacctgaggtggccaaggagagtaaacaccagattgtggagactgagcatccatcagatgctcagtctccacaatctggtgaaatccttgctggagcaaaggaatgggcttgcccggaggatcttttctaaggcgggagtcgataacacaaagcttcttgatgctacggagaagttcatccagaggcagcctaaggtactaggtgaagatcctggttcaatgttggggcgtgacttggaagctctgatacaaagagcaagggactttaagaaagagtatggtgattcatatgtctcagttgaacatctagtcctcggcttcgccgaagataagcggtttggtaaacaactgttcaaggattttcagattaccgtgaagaccttgaaattggccattgaatcaatcagagggaaacaaaatgtaattgatcaagatcctgagggaaagtatgaagctttggagaagtatggaaaggatctgacagctatggcacgtcaagggaagcttgatccagttattggaagggatgatgaaattcgaagatgtatacagattttatcacggagaacaaagaacaacccagttttgattggtgaacctggtgtaggaaaaacggctatagctgaagggcttgctcagaggattgtacaaggagatgtcccacaagctctgaccaaccgtcgtctcattgcacttgatatgggtgctttgattgctggtgcaaaatatcgtggagaatttgaggataggctaaaggctgttctcaaagaagttacagattctgacggacagaccattctttttattgatgagattcatacagtcgttggagcaggtgccacaaatggtgcaatggatgctggtaatcttctcaaaccaatgcttgggagaggagagctacgttgtattggtgcaacaacacttgatgagtaccgcaaatatattgagaaagatccagcccttgagcggcgcttccaacaagtttatgttgatcagccttcagttgaagatacaatctcaatactacgaggactaagagagagatatgaactgcaccatggtgtacgcatatctgacagtgcccttgtggctgcagctgttctttcagaccgttatatcagtggacgattcttgcctgacaaagcaattgatctggttgatgaatcagctgccaagttgaaaatggagataacatcaaaacctactgctctggatgagattgatcgtgctgtcctgaagcttgagatggagcgtctctcacttacaaatgatacagacaaagcatcaaagggcagacgatcacgcattgaagcagaactatcactcttgaaggataaacaacgtgaattgactgagcagtgggagcatgagaagtcagtgatgactaaaattcaatctatcaaagaagagattgacagggtaaatgtggagatacagcaggcagaacgtgagtatgatctcaatcgcgctgctgaactgaagtatggaagtctgaatgccttgcagcgccagcttcagacaacagagaaggagctagatgaatatcagagttctgggaaatccatgctaagggaagaggtgactcaagatgatatagcagagatagtgagcaggtggacaggcattccagtctctaaactaaagcaatccgacagagagaagttgctgtatctggaggaagagctgcacaagcgtgttgttggtcaagatcctgcagtaaaagcagtctcagaggctattcagagatccagagctggtctgtctgacccaaaccgtcctattgccagtttcatgttcatgggacctacaggagttggcaaaactgagctagcgaaagcccttgctgcttttatgttcaacactgaggaagctgttgtaaggatcgacatgagtgagtacgtggcgatgcgtagtatg
